United States Patent Application Publication US 2011/0183924 A1 - sequence listing, part 292

SEQ ID NO: 946382 - protein, 65 aa, Homo sapiens
  misc_feature (1)..(1): Xaa can be any naturally occurring amino acid
  misc_feature (23)..(23): Xaa can be any naturally occurring amino acid
  misc_feature (37)..(37): Xaa can be any naturally occurring amino acid
  misc_feature (59)..(59): Xaa can be any naturally occurring amino acid
XAGVAQTGSGKTLTYLLPAIVHXNHQAIPRERRWAYXFGAGTNSGTGQQVQQVAAEYCXACRLKS

SEQ ID NO: 946383 - protein, 59 aa, Homo sapiens
  misc_feature (27)..(27): Xaa can be any naturally occurring amino acid
  misc_feature (44)..(44): Xaa can be any naturally occurring amino acid
  misc_feature (53)..(53): Xaa can be any naturally occurring amino acid
MERIRLASLFYAFPMLLESILLTTSFXSFAAPLGHDFIIFFRIXLDLVVLSMXSSVSVV

SEQ ID NO: 946384 - protein, 182 aa, Homo sapiens
  misc_feature (57)..(57): Xaa can be any naturally occurring amino acid
  misc_feature (91)..(91): Xaa can be any naturally occurring amino acid
  misc_feature (109)..(109): Xaa can be any naturally occurring amino acid
  misc_feature (122)..(122): Xaa can be any naturally occurring amino acid
  misc_feature (145)..(145): Xaa can be any naturally occurring amino acid
  misc_feature (153)..(153): Xaa can be any naturally occurring amino acid
  misc_feature (164)..(164): Xaa can be any naturally occurring amino acid
MWAQAEKEAQGKKGPGERPRKEAASQGLLKQVLFPPSVVLLEAAAPGGGQPRSGQAXQWPSRGLPSAASILQATRPECLLPAEPPGQHHPXHPGPRQGHHTLLTCSASXLLQAERPPPEGPXALRQLSLAAGDTVPPALTVVQGXRGPTLLSXQARAVRFRGEXAGCCHVSCVNIKGLSRHA

SEQ ID NO: 946385 - protein, 56 aa, Homo sapiens
  misc_feature (5)..(5): Xaa can be any naturally occurring amino acid
  misc_feature (13)..(13): Xaa can be any naturally occurring amino acid
  misc_feature (20)..(20): Xaa can be any naturally occurring amino acid
  misc_feature (45)..(45): Xaa can be any naturally occurring amino acid
MRKCXTRSFPGSXEVLSSMXRRSAFLAARSGSGAYSCACWHFGRXPGPPEESLYLW

SEQ ID NO: 946386 - protein, 43 aa, Homo sapiens
  misc_feature (9)..(9): Xaa can be any naturally occurring amino acid
  misc_feature (21)..(21): Xaa can be any naturally occurring amino acid
  misc_feature (30)..(30): Xaa can be any naturally occurring amino acid
GRRMADIIXRLREDGIHVCYXKAEESSRTXKMGPATFHYRTLH

SEQ ID NO: 946387 - protein, 111 aa, Homo sapiens
  misc_feature (25)..(25): Xaa can be any naturally occurring amino acid
  misc_feature (67)..(67): Xaa can be any naturally occurring amino acid
  misc_feature (80)..(80): Xaa can be any naturally occurring amino acid
  misc_feature (97)..(97): Xaa can be any naturally occurring amino acid
  misc_feature (107)..(107): Xaa can be any naturally occurring amino acid
MGLGAGLGYLRLKAAVVLRRKRGLXRVVICGQWVSDLHRDSSTFGKGGTGGVLGQARYFDSMGTFDXDRPPVCAQVVFDXDSLRIEGLGPRVSRMGXCLPVEVVTLXRLAV

SEQ ID NO: 946388 - protein, 76 aa, Homo sapiens
  misc_feature (62)..(62): Xaa can be any naturally occurring amino acid
  misc_feature (68)..(68): Xaa can be any naturally occurring amino acid
  misc_feature (76)..(76): Xaa can be any naturally occurring amino acid
WYSVPGGMQDFNYLSSNCFEITVELSCEKFPPEKTLKTYWEDNTPSLATLSRYTEELKDLPXTFKVTXLRMPPSSX

SEQ ID NO: 946389 - protein, 68 aa, Homo sapiens
  misc_feature (13)..(13): Xaa can be any naturally occurring amino acid
  misc_feature (38)..(38): Xaa can be any naturally occurring amino acid
  misc_feature (68)..(68): Xaa can be any naturally occurring amino acid
RMKVRVQRRAFVXESAALRAKKDLKKSRTRVPVIVEKXSKAWIGDLDKKKYLVPSDLQVGRSTSLIRX

SEQ ID NO: 946390 - protein, 99 aa, Homo sapiens
  misc_feature (72)..(72): Xaa can be any naturally occurring amino acid
  misc_feature (83)..(83): Xaa can be any naturally occurring amino acid
  misc_feature (85)..(85): Xaa can be any naturally occurring amino acid
NNCVLSHRKYAEALDYHRQALVLIPQNASTYSAIGYIHSLMGNFENAVDYFTQPLVLGEMIHFLFNAWSLHXNVIGDSEAYIXAXIKDKLKCYDFDVHQ

SEQ ID NO: 946391 - protein, 80 aa, Homo sapiens
  misc_feature (12)..(12): Xaa can be any naturally occurring amino acid
  misc_feature (48)..(48): Xaa can be any naturally occurring amino acid
  misc_feature (52)..(52): Xaa can be any naturally occurring amino acid
QPCSQLLSWAGXVYNFSGRQCKVLVDLQFWGLEDGGRLLTAPLGSVLXWTFXGCSNPTFPFRTALAEVLHEGSALQQTSA

SEQ ID NO: 946392 - protein, 82 aa, Homo sapiens
  misc_feature (13)..(13): Xaa can be any naturally occurring amino acid
  misc_feature (36)..(36): Xaa can be any naturally occurring amino acid
  misc_feature (55)..(55): Xaa can be any naturally occurring amino acid
PFQPPLGITDSSXKPSGIFGKKTLGLSTQCPPPPNXHYHHAYNIGMFQRHPSFKXQSNLSASIMRFHQKDRKPRAYLDACIF

SEQ ID NO: 946393 - protein, 104 aa, Homo sapiens
  misc_feature (45)..(45): Xaa can be any naturally occurring amino acid
  misc_feature (51)..(51): Xaa can be any naturally occurring amino acid
  misc_feature (65)..(65): Xaa can be any naturally occurring amino acid
  misc_feature (74)..(74): Xaa can be any naturally occurring amino acid
  misc_feature (102)..(102): Xaa can be any naturally occurring amino acid
LWGSTGEIHVTFAFFLREAVPRELGTLSSGCSRQKGSWKGHSGAXFGVAPXSARGRGRKAATPSXASFCSIAAXSSRSNNLRFSSLTWCELSALLHFNFKPXSL

SEQ ID NO: 946394 - protein, 82 aa, Homo sapiens
  misc_feature (38)..(38): Xaa can be any naturally occurring amino acid
  misc_feature (68)..(68): Xaa can be any naturally occurring amino acid
  misc_feature (73)..(73): Xaa can be any naturally occurring amino acid
LPENRADLYDWFIPGVVIIMADNDTDRNQTEKLLKRVXELEQEVQRLKKEQAKNKEDSNIRENSSGAXLSVHXISVLMAEDT

SEQ ID NO: 946395 - protein, 78 aa, Homo sapiens
  misc_feature (5)..(5): Xaa can be any naturally occurring amino acid
  misc_feature (8)..(8): Xaa can be any naturally occurring amino acid
  misc_feature (55)..(55): Xaa can be any naturally occurring amino acid
  misc_feature (70)..(70): Xaa can be any naturally occurring amino acid
GKALXWDXSVMALRLPLRLKFGYRELARSQRQRIWFAGADSYKDAVRAMFARFTXMEGERERERDDKEHXKWSISRIR

SEQ ID NO: 946396 - protein, 67 aa, Homo sapiens
  misc_feature (6)..(6): Xaa can be any naturally occurring amino acid
  misc_feature (16)..(16): Xaa can be any naturally occurring amino acid
  misc_feature (21)..(21): Xaa can be any naturally occurring amino acid
  misc_feature (30)..(30): Xaa can be any naturally occurring amino acid
  misc_feature (38)..(38): Xaa can be any naturally occurring amino acid
  misc_feature (44)..(44): Xaa can be any naturally occurring amino acid
  misc_feature (57)..(57): Xaa can be any naturally occurring amino acid
GSGARXWRCSARLCRXTAEAXKGDAGLWAXASLSLRVXTPSVKXRPVPGDEVQLGPXMTRAYLYYKR

SEQ ID NO: 946397 - protein, 41 aa, Homo sapiens
  misc_feature (11)..(11): Xaa can be any naturally occurring amino acid
  misc_feature (27)..(27): Xaa can be any naturally occurring amino acid
  misc_feature (35)..(35): Xaa can be any naturally occurring amino acid
NADGEAGRWQXRTGQIFKQTYSKFDTXHNDDALLXLRAALC

SEQ ID NO: 946398 - protein, 96 aa, Homo sapiens
  misc_feature (49)..(49): Xaa can be any naturally occurring amino acid
  misc_feature (59)..(59): Xaa can be any naturally occurring amino acid
  misc_feature (66)..(67): Xaa can be any naturally occurring amino acid
  misc_feature (76)..(76): Xaa can be any naturally occurring amino acid
YIQLRKGPNVVGPYGLLQPFADAIKLFQRAPKTRHISITLYIPPDLSSXIVFYYEPPFXYPIPGQXXLGLYYSSTXGYAGTSILDRVASLRLIGHC

SEQ ID NO: 946399 - protein, 70 aa, Homo sapiens
  misc_feature (27)..(27): Xaa can be any naturally occurring amino acid
  misc_feature (32)..(32): Xaa can be any naturally occurring amino acid
  misc_feature (38)..(38): Xaa can be any naturally occurring amino acid
TLRWEPSSQPTIPIVGIIAGLVLFGAXFAGAXVAAVRXRRKSSDEGGSYSQAASSDSAQGSDMSLTACKV

SEQ ID NO: 946400 - protein, 91 aa, Homo sapiens
  misc_feature (45)..(45): Xaa can be any naturally occurring amino acid
  misc_feature (47)..(47): Xaa can be any naturally occurring amino acid
  misc_feature (50)..(50): Xaa can be any naturally occurring amino acid
  misc_feature (77)..(77): Xaa can be any naturally occurring amino acid
  misc_feature (82)..(82): Xaa can be any naturally occurring amino acid
VLMLLGVVAVVIASFLIICAAPFASHFLYKAGGGSYIAAGILFSXVXKLXASGSRQWLTWKATETCGLAGFHPFWLXGWHFXWPTGIFFLC

SEQ ID NO: 946401 - protein, 85 aa, Homo sapiens
  misc_feature (65)..(65): Xaa can be any naturally occurring amino acid
  misc_feature (75)..(75): Xaa can be any naturally occurring amino acid
VLKIIPCMWDFQKLSMSVQKGPPVYCGSCRIRHEKPLERESISTTPKCFLEKAKDKQKKVTGHNXKKKVALEDQXLKTDFICPEM

SEQ ID NO: 946402 - protein, 68 aa, Homo sapiens
  misc_feature (3)..(3): Xaa can be any naturally occurring amino acid
  misc_feature (63)..(63): Xaa can be any naturally occurring amino acid
LGXPAYQTLAGRGVGPKQLGPKLDPPEGGFPKGSRSCRGPPSRGPVRREGRKKPGASGHPYWXPFLPG

SEQ ID NO: 946403 - protein, 119 aa, Homo sapiens
  misc_feature (67)..(67): Xaa can be any naturally occurring amino acid
  misc_feature (86)..(87): Xaa can be any naturally occurring amino acid
  misc_feature (104)..(104): Xaa can be any naturally occurring amino acid
RCQTLEDEEEMWFNTDEDDMEDGEAVVSPSDKTKNDDEDDDEDEKGRYRYHCQRKQNLIHNNGNGLXSVPVEKNWSSPLPILHTKXXGFVNADTDQAFTLLLLXVPINGQEKGYHILGA

SEQ ID NO: 946404 - protein, 72 aa, Homo sapiens
  misc_feature (65)..(65): Xaa can be any naturally occurring amino acid
NQDSGLLELQKFTHLGTLRALQQEYDRMSDLCAAESKLLKNSKQQKMGYVTHLLFGSHYSFFRLXNGLPLYL

SEQ ID NO: 946405 - protein, 69 aa, Homo sapiens
  misc_feature (40)..(40): Xaa can be any naturally occurring amino acid
  misc_feature (63)..(63): Xaa can be any naturally occurring amino acid
KGSLLLLLVSNLLLCQSVAPCHLSRRGCRCQVTLRELLTXRACPLHHNLSQKCQRIHNGYPWXGVITKA

SEQ ID NO: 946406 - protein, 83 aa, Homo sapiens
  misc_feature (25)..(25): Xaa can be any naturally occurring amino acid
  misc_feature (34)..(34): Xaa can be any naturally occurring amino acid
  misc_feature (41)..(41): Xaa can be any naturally occurring amino acid
  misc_feature (46)..(46): Xaa can be any naturally occurring amino acid
  misc_feature (66)..(67): Xaa can be any naturally occurring amino acid
AGQYPPVRRCLVLTDFGIAVFEIPXQESRGSSQXILSSCAXLLLPXGDLTELASSSRIVLVLKDGXXEHVFISRRRQLDVTRL

SEQ ID NO: 946407 - protein, 61 aa, Homo sapiens
  misc_feature (22)..(22): Xaa can be any naturally occurring amino acid
  misc_feature (29)..(29): Xaa can be any naturally occurring amino acid
QSQPGARSPRPEPAAAFEGAQXAPVKVTXNFRLAGGKKDEPKSGRGLYPPDARGELKARYV

SEQ ID NO: 946408 - protein, 92 aa, Homo sapiens
  misc_feature (62)..(62): Xaa can be any naturally occurring amino acid
  misc_feature (89)..(89): Xaa can be any naturally occurring amino acid
  misc_feature (92)..(92): Xaa can be any naturally occurring amino acid
MDAAGGHYPKQINTGTENQILHILTYKRELNTGYIVDIKLATIDSGDYYREEAEGGKGRLTXGYYAQYQDDRSFVLQTSASCNTPMSQXVSX

SEQ ID NO: 946409 - protein, 106 aa, Homo sapiens
  misc_feature (27)..(27): Xaa can be any naturally occurring amino acid
  misc_feature (42)..(42): Xaa can be any naturally occurring amino acid
  misc_feature (47)..(47): Xaa can be any naturally occurring amino acid
  misc_feature (78)..(78): Xaa can be any naturally occurring amino acid
  misc_feature (87)..(87): Xaa can be any naturally occurring amino acid
  misc_feature (95)..(95): Xaa can be any naturally occurring amino acid
  misc_feature (106)..(106): Xaa can be any naturally occurring amino acid
MEALPLLAATTPDHGRTEGCFCCRYCXSCAGWSCAGLGDRGXARTRXEECHFYAGGQSVPGRGIRVSVADHFLHLTKXRFPSQRLLXRNSCDRWXNEELKLLISWX

SEQ ID NO: 946410 - protein, 78 aa, Homo sapiens
  misc_feature (50)..(50): Xaa can be any naturally occurring amino acid
  misc_feature (67)..(67): Xaa can be any naturally occurring amino acid
GFKWSLKPGVGGRVGVSLPLKVTYLETKPTVLAVTLIIGLSQRRQPLLPXRRRHSLLSTRGSSDAAXEAALKVFALPS

SEQ ID NO: 946411 - protein, 105 aa, Homo sapiens
MPPCELGARILSKACTLAGQVSNRHSSPQIEFTGLYSPKIKGPGSLGPSRDRGRGTRGPEHSPGATMAKDAVHLQGTQGEIYRPAGRTRVTPPRGANKEPLASAH

SEQ ID NO: 946412 - protein, 135 aa, Homo sapiens
  misc_feature (50)..(50): Xaa can be any naturally occurring amino acid
DYARRERMRSRQAPRGAQGSDTSLDGTGKPEQQKTGTRERTDASLHRLSXGTIAGLAQYDGWRAVMTLAQILLRVLADVIVITSTVTRMIYPQVRQSFQNKQLRRYTHCCRDQRLILNLPRDMNITGTPQNTAST

SEQ ID NO: 946413 - protein, 36 aa, Homo sapiens
MGVVCGDVGVLWMGVVCVGGRVGVAGVGGVRVVGGC

SEQ ID NO: 946414 - protein, 43 aa, Homo sapiens
  misc_feature (37)..(37): Xaa can be any naturally occurring amino acid
MKDRIFNRALRKPNTLPTRDAGPKRTQTGTATGEGPXRPRLGR

SEQ ID NO: 946415 - protein, 245 aa, Homo sapiens
  misc_feature (241)..(241): Xaa can be any naturally occurring amino acid
LGRGGLCVTGGGPHPPKDPFVEGGPAGFPLLLGRFGFAKAGQKEVEDDLPGGIRAPITRRGPQHWGGGDIPLKQEAGNTTAFQRGSYEAWRGHDHCNWMHYKEEQAPKGVGEYEAFPCKPNLGKQGPRRETQKKTFPHLLRKSPDHGGWGLAPKITTNFVKRGMAHGEGKKTKKFPPLPKGKTPGSPPLGGSWGTNLTALLLGKHRKGANHSAWGIFRRTPSWGPRGDNTKAPGTQRGHWXRFNM

SEQ ID NO: 946416 - protein, 78 aa, Homo sapiens
GLRNLAPGGIGAVAFYTEDAAPPQADVSVSAALSQSVPPFCSPPFWGSAHFKLLPWTFQGTVISSPQIISSSSVWGIF

SEQ ID NO: 946417 - protein, 33 aa, Homo sapiens
MGIEHAEKLEFLNKAKMLTKLREEVNLNGRKKN

SEQ ID NO: 946418 - protein, 189 aa, Homo sapiens
HTGIQLPALGGLSSLIRGLPWMTDFETWREGLNDAEKLEVPRISNCETVLRLQATCPARWREDGGVMSRKRCRMSMTVLPPRGALCRARETFLTVFRASYWVDPGSQVCKYHSAHKGHHPCHRTMVFICFILDQSLHQLIKVSWVVCSRKALPWFKALLGSIGISHRDTHRPILAPDGSALNFAESARC

SEQ ID NO: 946419 - protein, 152 aa, Homo sapiens
MSIPRAAGIRHEGACFVAVMDACVRFSALSQARERVCRAAQYACSLFGHALQRHGASPELQKQIRQLESHLSLGRKILRLGNSADAPESDEMFTYQTDVLRFCITVRHPNRGLYFACDNGPWAGRLDWLPGGSREVGPASFRNHKVSLIMNI

SEQ ID NO: 946420 - protein, 220 aa, Homo sapiens
GIRHELLSDLEAKGEKGSELVLYKPGTCVKGLTIEPPPADPRLREDMALMAEGALTPELRGDLWELPFPCPDGFNSCPDICFREAGCSFLCHKAFFCGRRDYFRALLDDHFPESEEPATLRGPPARNLHGISPGRFTHALYYMYRDHTWVVPEGGHDVLERSAKYPLPGLRGCAGATWLNAEDPVAEPGTRLRLPLARPEDPPCSRAPALAAVRPPLPWP

SEQ ID NO: 946421 - protein, 69 aa, Homo sapiens
PWSVQATVASLDSRALGDVGSDGYEKHSRGSCEAQRSIPILDFVADVVLMCVVDSLVLCATGLVVCAVV

SEQ ID NO: 946422 - protein, 104 aa, Homo sapiens
MNIKGSPWKGALLLLMVSNLLLCQSVVPLPICPGGAVRCQETLRDLFDRAVVLYHNIHNLSSEMFSEFDERDTHGRGLITKAINSCHTFSLVTLEDTEQAQQMK

SEQ ID NO: 946423 - protein, 177 aa, Homo sapiens
GQLLNGQEDRTHQKNFDGEIHKGGEPDIQQGIAELVPGVPVGDEVQMLDIECVQLNWNGPWTSSIDPIVIFGVQNRGNWCITGTEDIKFPHGIPLDLLDRVKIIQDHAVYSTGNETDPLKSCARRQGINIHDEGVKPLGEIGTKNTLKYSVRLLTRATCLLNINGTGQIEKEMLNRP

SEQ ID NO: 946424 - protein, 230 aa, Homo sapiens
  misc_feature (157)..(157): Xaa can be any naturally occurring amino acid
MRIMLRDRYGPSVRRLTMFELGLGGHLVLVGPGIRRNRRNSTYVMTIVPIVHDLDVSVASSPLGRDDYETQGLSTTAGLRRAQWERISRKRHDGERGCHVMRTAGEVSVGWYITVNGYTFRGPCLRQARCRCASSPPRKKLSAKFPQSLDDKMASCXLIVQRPIQADRINSTRVHDQGAPQRQHSDLTQRTKRPRQHFSETRPGTWWTVRDTGHQGTAVHLQPLNKTSPI

SEQ ID NO: 946425 - protein, 221 aa, Homo sapiens
MTHSLDKGDTTSHHYHDVSDNAGGVQLTRTEYKNVVTSKPLFSTVAEGCILGVYIVFSAIVHVCLLVSPYNASQIRLFLSDSSTSRCTCAELAEVSERAANGPTSPLSASTRTRNATEWTCTQGRRSQRCLTDDEIARIRLLDRPDRVSCRGRGVANKVFAHPTYSKPGFCYRLHTGFPDHQSAGMYPLRGSCPYVSNRGTWTMAAVTGTRRQDVVQLESS

SEQ ID NO: 946426 - protein, 182 aa, Homo sapiens
  misc_feature (61)..(61): Xaa can be any naturally occurring amino acid
  misc_feature (160)..(160): Xaa can be any naturally occurring amino acid
  misc_feature (171)..(171): Xaa can be any naturally occurring amino acid
  misc_feature (182)..(182): Xaa can be any naturally occurring amino acid
MTPKQGPSQNLLDELLAYPCDFTSDSHNAPAYSGLLKHTHSTIIPSAWRRCRRENSSIPRXTSTTQLVQHKVCTYSGHNSVLLLASSTVVISCQHETLVIEARSSPYVPRHIDHSYTATNLNGCGDVGCHREQWRYIRAAETIASIVTFANFAEDDDSSXCIFDSACDDTXECIARTAATRX

SEQ ID NO: 946427 - protein, 114 aa, Homo sapiens
MCRSPSRWYVTLYSPDGVPYNQYECLCTFRASNAPEESTKKCDRARTRDVMSPWLIEGRLPNRVCISTTRKSILKNLVVYVVSSRFTTCNTCQCREPTSALLASYAHVSAETSW

SEQ ID NO: 946428 - protein, 96 aa, Homo sapiens
GLVSLTVTRRGISGHNAAPVPCTPRKGKPTRIKDFELMQDMDLDEPLILARRRGAEARRLSIKVEMRATNGLGAGLIAAGHLNQGISLLADFILRG

SEQ ID NO: 946429 - protein, 114 aa, Homo sapiens
MGRLRCRTLASVCMLRITDADVRTHRMGSIECVLPFSTAGIFVDHKAVYAFLLPQISRYAVPCGTEDIERLQFDIFESTRGPTLIFFPLRLLSGSHEPSSYLGVRVYSDLRLGV

SEQ ID NO: 946430 - protein, 72 aa, Homo sapiens
FGRGPLLFVRVYRLGPFAHLTYSFLASHLTELLWPQSFHCSDSMHKGTHQTVRCNTTMLKSSRIDLRLCVDH

SEQ ID NO: 946431 - protein, 118 aa, Homo sapiens
MTLLIIRLIYTLAVSNPTASDHAEWEFEHSHNYKSVYIALHTGKDTIRNTDHSIVKMLTNSKYVGTTYDALSPEQYTAIFDTKTLLITILIYEVEQKTPLYESTDLYSSYGKTVVQSP

SEQ ID NO: 946432 - protein, 242 aa, Homo sapiens
  misc_feature (131)..(131): Xaa can be any naturally occurring amino acid
  misc_feature (133)..(133): Xaa can be any naturally occurring amino acid
  misc_feature (175)..(175): Xaa can be any naturally occurring amino acid
  misc_feature (187)..(187): Xaa can be any naturally occurring amino acid
  misc_feature (232)..(232): Xaa can be any naturally occurring amino acid
SLCWAVRIPWWIMAWQVLVQGTPKTVGYGGPLCAVGPQLTPKQLVGGTHRGQWGRWGKVIHVTRSVTCDKGSMWSHSAIMWDACLQTETSYKWEPTHHHKDEGIIAHLDLHLTGRVTHITQAGTHIFTVTXTXWTHFTHPMSRAVFSHYSNIHTRTVTVTIYPWCYSQRQYPGPXIPRHSIGVVSIXPSSQGGCFIGVESLVPRCGQSAILVNNRSIKSQYILDSPLIYWVXLVTQVLQLRL

SEQ ID NO: 946433 - protein, 75 aa, Homo sapiens
TDDDDDDDDDDENDDDDDDDDDDDDDDDDDDDDDDDDDRQKRRQMTKTTKSPTDVARDYRMRPKLEAASNTLPVV

SEQ ID NO: 946434 - protein, 186 aa, Homo sapiens
  misc_feature (112)..(112): Xaa can be any naturally occurring amino acid
  misc_feature (144)..(144): Xaa can be any naturally occurring amino acid
  misc_feature (162)..(162): Xaa can be any naturally occurring amino acid
  misc_feature (169)..(169): Xaa can be any naturally occurring amino acid
  misc_feature (171)..(172): Xaa can be any naturally occurring amino acid
  misc_feature (174)..(174): Xaa can be any naturally occurring amino acid
  misc_feature (180)..(181): Xaa can be any naturally occurring amino acid
  misc_feature (185)..(186): Xaa can be any naturally occurring amino acid
KCVSCNDHEHEHQRIAMGKQAPSCLLLVVYNLSPDARCVAHLCPSAPGRGLPECQCDPFDDLLLTVARRSKYPSSIPVYLLASVTVFPRDNSESNRILPQLGREGFELHIVXDSKRVVEQQHFVTAFVSRSRIGTHEKSDVREXKELELQRERILFPCKALXRYGSKSXLXXAXTSTCCXXWSVXX

SEQ ID NO: 946435 - protein, 440 aa, Homo sapiens
  misc_feature (80)..(80): Xaa can be any naturally occurring amino acid
  misc_feature (273)..(273): Xaa can be any naturally occurring amino acid
  misc_feature (356)..(356): Xaa can be any naturally occurring amino acid
  misc_feature (388)..(388): Xaa can be any naturally occurring amino acid
FLHEVGEYEFLQTSQHEHQADHLRGIYSIGCVYGKGTSDGLICIHDDLGLSMLISVQPIMRGYYRVKGFLDVPIGNYWWXPLVTHDVWYPLDCQSWEGSLDRATRCDRTEASLFHPKHYPTYVPQTAIHILGVVSLRIHIGDNIVDIIIMKLLENSRCTNDDTNSGIYYAAPEHSLLVSVGMYPWYRNLKRGSHWGGGKFPRCKTMLRELPPYPNFHRMYMKVLGVLDTPLLIDHVTGRMLPRILTRGHEVYTHSSLNACITDDKQIKCLCPXKRRDDAFVVASWPGLMGGELPGEVSNLRVDRAAGVVLCITLSAEARDKVPAQSLYFRYHKTHNVMCVPVPNDMLVDCAGRNPXDEYALCPCELTSGPRGCLYAAKSYHAGALSRXRTVDHNLRTPPTNTYLRSTDRHTYSRQHHFAARHQHRIVGCYTPINRLRTQC

SEQ ID NO: 946436 - protein, 122 aa, Homo sapiens
MKRTTPKEHAIVGKKENNGQRPEVARKGETHPYGGKERGGLFARPNKRNKSRLGERELPQRQNKRDTDPGGGGTKNPVKKRKNLDSPQGPPTLVPGKRKRDRKDTLHLTLGPAPMGKQHGNG

SEQ ID NO: 946437 - protein, 120 aa, Homo sapiens
PPCWNYAREENFVCPLDLMNIVLYARNAEYNPKRLAAGIMRIREPRTTALIFRSGKKVCTGAKSEEQSRLAARKYARGVQKLGFSAKVLDFKIQNMVGSCDVKVPIRLEGLVLTHQQFSR

SEQ ID NO: 946438 - protein, 173 aa, Homo sapiens
AEFNFFSIARVPELRGDCGSQRSGILWMGTARRGNYITYDRLLQVTRVERSKCWNDMDHGQKANHGGAGPHKFLQILHKRLAADSIYMTSKGVYKEEPHRMLAHGGSPKKASAHMSHAEDRDQQLFMTPTPCGLAHNADGLSGYRLVNNGGKVTAHSWNYPANHGRGDLGIVG

SEQ ID NO: 946439 - protein, 52 aa, Homo sapiens
  misc_feature (13)..(13): Xaa can be any naturally occurring amino acid
MTARNGEYCLSAXTQAPAACLCVCVVVCAVRGGVFVLLLLVAVVCVCVVVSV

SEQ ID NO: 946440 - protein, 120 aa, Homo sapiens
SLLLTPGAGAALAAPGLAECSAPEGQCLRSVRGPAPRVGGEAAAQVAARYTAGAVVSRPASGHRGRHFVRAEAPREGGNPSGRAAGFAGAAMPSSPLWVAVVCFSNHNRSMEAHNILSKR

SEQ ID NO: 946441 - protein, 148 aa, Homo sapiens
MSSREARGLLDFHIDGLTIECNLPILILYTLISIPDRYSFHLLVPPWRRGSDKPRVIRIWRAKKALIHLLVGEFMYPIPAMTRTNGDMTAGSEIVERPAEDYVIQVSTVTVVIIKNRHRWSFISLVTTYTLLGIFSHPPVCACIRGRT

SEQ ID NO: 946442 - protein, 57 aa, Homo sapiens
  misc_feature (57)..(57): Xaa can be any naturally occurring amino acid
MASRMALSLFHFIRKFSGYTSCIIKPHTKGLAKTLQDSQAMITHIGGASVVSWSLRX

SEQ ID NO: 946443 - protein, 130 aa, Homo sapiens
LISGISLQQSTKNTNTNFKQEKSFIFPPASAINWHHHHPADNCIDRIFPASFIICGNQAMAHMHTFIPPPHWCSVQQHTIIQEGCFFQQPTQAHTKHHNTPTTSFNTSRPSSHIILILPSIPSVFRQRHC

SEQ ID NO: 946444 - protein, 287 aa, Homo sapiens
  misc_feature (204)..(204): Xaa can be any naturally occurring amino acid
MVAVYLSTRSTSNGRLGGKVCAHAVSEYGAEALDEDVPVSFPTIKIYFPHFDLSHGSDQVKGQGKKVDDAAEPNAVCARGRRCSNIAVRTLSDLARAHSYRCGTTVIHQGSVKPLSMLDDHWVGPASSARSSNPHVGGMALPWHECSLELLLRHTMAGLVTEIPCFEARKLSGGPCNRSHLERGYPRRLHRGDAGWREWGTPPXTRAGIITMRDAYGQSSENENSTQRKTPSNSQNINGCVSYIVTGRDIGPGVEHVSVAFVPVRAIFTDTCVVLFYTRLDSLYTLR

SEQ ID NO: 946445 - protein, 200 aa, Homo sapiens
HPRSHELIVNEYLMRLSKRNCAYAEEETLSREARERSRRERADIRDRHLLDAPKVSAAGGPPGEAQPAWKMPRSSCSRSGALMLALLLQAYMEVRGWCLQSSQSQDLTTESNLLECIRACKPELSGETPMFPGKWRRAASDREHPGSTLWANFQLRPNRPPEQQQEQEQRAQGTPEDVLRGEDWGPLPEEGPEPPQGLRP

SEQ ID NO: 946446 - protein, 173 aa, Homo sapiens
AGFGTSLTFKREGVAENVGDFLIKAAHAPLATRVMPKLSHCAVGTNTLRDCGCPDSKKTYRLCMWIVLTHTLPLKTACRMPTTVGHCGMPHPQVYTLHLLRRELTGNNFAGRAQAKTPETHGKQKNKNSGAARYPTLLNAVVLHFTRPLFTPLNWPFNTHLTASSPFPPAASP

SEQ ID NO: 946447 - protein, 176 aa, Homo sapiens
AAGTRHELGSGGGWRNARTKGRSKKSRPHLERQGGETGEAAEAEGTQAPTDEQQENVTSPMDAHKRGRHHAKQTTRAHNQYGTNTPDGARACRAATHPTDPKTHGTETNAGPLHISPGKNRRGRPAKRKPRKTERRTTRNRTHGQRRQNTTAEELDARPRPHANPGGREDPAGRAT

SEQ ID NO: 946448 - protein, 187 aa, Homo sapiens
  misc_feature (139)..(139): Xaa can be any naturally occurring amino acid
  misc_feature (150)..(150): Xaa can be any naturally occurring amino acid
DVGLTKLPFFGSSPGLQGLNPQAFGSKLGLPGKAIPGGTWAFWGLSTTPLAQEPLPLQLAVFSKFPGSPTSPCWCLHLLPSILQCLLLWAWPQGYGQTSVPYQRPLVIVPWHVGPGPGWFAEELRMEAAEEGPDGAHHXGPKSSSCGPLXYFLGWAEAITWMPTWEGTSNVGPQPLFSSSFTDTGTP

SEQ ID NO: 946449 - protein, 103 aa, Homo sapiens
CAICGSQRTLFLDHTPTIVGSMEGVVGASDEQLIIGWYILPVLVWVFRYSLQRLEYTEWRPDEECEGSHTESPQLRTQLPALCGRIIGAPVHVGQTGAQAAQE

SEQ ID NO: 946450 - protein, 51 aa, Homo sapiens
  misc_feature (24)..(24): Xaa can be any naturally occurring amino acid
  misc_feature (26)..(26): Xaa can be any naturally occurring amino acid
  misc_feature (39)..(39): Xaa can be any naturally occurring amino acid
TTARLQAPGRPCSWLLACLCLALXFXEGQCLPNHSPYPXLFDRYGSAPIVC

SEQ ID NO: 946451 - protein, 120 aa, Homo sapiens
MCGINVIPWVFDFSERIKQVRTSHWELDLVAPKSERTSTVFWGGLVVAEGDITGNKEEVGQGNSWVLEGALAGSQRQQLTGGGTLYACSFGVTGLKLRNRYQGGDSQILQNGGSQSWATE

SEQ ID NO: 946452 - protein, 104 aa, Homo sapiens
AVLLVVRRTCRDGACSSSRHCRRALCLVPVSMTGGIVVWVSAAALWGLRVTSCRDTPSPASVAICVVPACCGRRWARGGVVVCGWERLAKGFYIVPLLVPGIAL

SEQ ID NO: 946453 - protein, 103 aa, Homo sapiens
KSLLPHGFSQDILQMTALKIGSLGAICQSFGSTLVPVISGSEDYLKITELCTIIEVSQNQATVLPYYWTIQYNGHCHAPSRRCVYNLSLTTFTYHILRLVQHI

SEQ ID NO: 946454 - protein, 123 aa, Homo sapiens
  misc_feature (7)..(7): Xaa can be any naturally occurring amino acid
  misc_feature (10)..(10): Xaa can be any naturally occurring amino acid
FPATTHXTLXTSKDRHGKGPSCCCWCQTVRPDVPCHRPGGADAGLQTLTPASSIIHTLLKSQDRYVTRRGHYKPQQCNFSCTRRQTATDNRFDQYRYGLNGSYIVLESVAEAGVSSSVREQGL

SEQ ID NO: 946455 - protein, 75 aa, Homo sapiens
HPNPLEASTGAVILIIAHGTYILITILANKLKLRTHSQSHHNPLSRDFKLYLPTNSFLMTSKQASANLRLNPPTN

SEQ ID NO: 946456 - protein, 168 aa, Homo sapiens
  misc_feature (27)..(27): Xaa can be any naturally occurring amino acid
  misc_feature (39)..(41): Xaa can be any naturally occurring amino acid
  misc_feature (62)..(62): Xaa can be any naturally occurring amino acid
  misc_feature (122)..(122): Xaa can be any naturally occurring amino acid
MNTDLVLCTENSASVRVLHPQFLGLVXGGSCFKLVCNYXXXTATISRYAIKTESDSKQVTRXCVTATHHDWRLLWTLSGVLCILVYGLAVLRGVGLDSELPSCVTYKGYFTYTKTEMFVPPXSRLMLRRVPTIAENYNIWVYFSNGSVDFRYRHTVSDTFYPSQGPGD

SEQ ID NO: 946457 - protein, 170 aa, Homo sapiens
QAPDVLLRLLAVCCLASRGSASNIPYQAFETYVRAIAGQLALRLQELKKLQPKDRRLILVNPRLPLFSELFDTSNRRDTQKSTKLSASPAGISRGGGRAVSECICTAGFGPLQKVITPKDYDEASYAMVEVWMESRTVRSLSSYRSRYNSPTMSLLRTTGGHWFRRRCQV

SEQ ID NO: 946458 - protein, 215 aa, Homo sapiens
  misc_feature (17)..(17): Xaa can be any naturally occurring amino acid
  misc_feature (45)..(45): Xaa can be any naturally occurring amino acid
  misc_feature (91)..(91): Xaa can be any naturally occurring amino acid
  misc_feature (165)..(165): Xaa can be any naturally occurring amino acid
  misc_feature (176)..(176): Xaa can be any naturally occurring amino acid
  misc_feature (196)..(196): Xaa can be any naturally occurring amino acid
  misc_feature (200)..(200): Xaa can be any naturally occurring amino acid
MRNVVALDKTLNQLYGXSSTERHMYPSLNLSQRKDTYITVIGEIXAVREGECPPGINIHTLNTSQYTKGRPILVGLSKVPIVHRLGKHNQXGVLSKQWKTEFPVVPAYTLSRKGCHTLGGRKKIPWPFVSATNYDGLREAEYPCVRAHTHDHRLCDQSTAITPRXLNSATETVANXARGRENITLARQHHRVAQSXADNXGAWCANTYLSHPGGD

SEQ ID NO: 946459 - protein, 126 aa, Homo sapiens
MASKLVSSQFPIRFGIVGGGVITALGPSVVIVREILCCTWEATEDVVATHTENTVDDQYGATIKRGNHLLHSTSISRCYTLSLDPFWAVPSVVISQDSCDSWIRKSGCFRYFDVRANPGKRVPVAL

SEQ ID NO: 946460 - protein, 121 aa, Homo sapiens
MQTALGNIVCNRVSNCLHRVVATSVWSRLESNREYLSRSTTPGNAPGTQFVRIYSTGNGHIRFRDQELSVPTVVSEDIPWVNPFQPPTVPISASRYPYEELSKPSVLRTLHDFGPSHSVSG

SEQ ID NO: 946461 - protein, 31 aa, Homo sapiens
MRCANHVILMGVIHTDDERAEQSRPRMYASA

SEQ ID NO: 946462 - protein, 257 aa, Homo sapiens
  misc_feature (75)..(75): Xaa can be any naturally occurring amino acid
  misc_feature (212)..(212): Xaa can be any naturally occurring amino acid
  misc_feature (257)..(257): Xaa can be any naturally occurring amino acid
LNSLSLAGEFGSLVTLELIRGLGTGGSRLVTPSTLARVREGRLVLELQAEHQTLGPPLDQKPPSPIQTLPQIGPXSLGGYPAGPQTTVGSTWKAGSNLLVGPGQGGRVEQCNPEHLRPNGTSQSPWAWTSRLKTPGLLKNNNNKQQTTLEGGGRPGYPQILGPNEMEVRQFTKFHMWPGTVFNPTGLVDMGGTKPLWRVKHQTFNSGPCAEXHIPPILANHGRVNISEKKAPRYTQIWALFHNKDVRQALKMWANGX

SEQ ID NO: 946463 - protein, 197 aa, Homo sapiens
  misc_feature (31)..(31): Xaa can be any naturally occurring amino acid
  misc_feature (36)..(36): Xaa can be any naturally occurring amino acid
  misc_feature (76)..(77): Xaa can be any naturally occurring amino acid
  misc_feature (84)..(84): Xaa can be any naturally occurring amino acid
QLDSGCPPSRGVVVVLFKYRSEWDHTADMSXPPVGXGLLFVRENEQGTARTILLIVANSMGGLNMRHTDVCLPPRXXGGQIFFXVARIRIRDGGEMSRYSIKCQNITRYKRMGRRRGSRAARLDGGRGRGVVREVGERAAEAEGEGGAVSVARGWTAAPTGAAGEAGDERPEGGAVVGERVRRSAVCGGGGGGRAPE

SEQ ID NO: 946464 - protein, 228 aa, Homo sapiens
  misc_feature (150)..(150): Xaa can be any naturally occurring amino acid
  misc_feature (166)..(166): Xaa can be any naturally occurring amino acid
MTARAHIKRLFLFAVPGTNYSPYGPGRDSIQDLWYGTASVEGLDQYLTVSYKCLWIYMGPTESTVKTAAEKAKYSFTDAVAVDKLRAARDRRITIDISLWKSDISQYYLTIIDAPGHRDFIKNTTTGTSQADCADLIAAAGSGAIEVGIXKNGQTREHALLAYTLXVKQLIVGVNKMDFTEPPYSQKRYEEIVKDVSTYIVGYNPDTGAFVPNSGLNGDNMLEPSALA

SEQ ID NO: 946465 - protein, 109 aa, Homo sapiens
RLLQEKRSNLRGRGCSELRLSHCTSAWVTERDPVVRKKKMSMVMGEAGKEFSSNMNVCAIQNMYLSQPCPLAPSLETIISRVVWTIFCHPLRKNMLGIFICKMELLLSS

SEQ ID NO: 946466 - protein, 117 aa, Homo sapiens
MVTRTTVGWASQETVPPPGSDWRKLVVFSPVDSLSWTHWLLQLTGIPWVKPGFGPGIRLAQVPPTSSLHSSEPLTAPASAWRHRGRHLTDVFRGSHIGWVGAWARPTVRDTPPCPFP

SEQ ID NO: 946467 - protein, 75 aa, Homo sapiens
  misc_feature (3)..(3): Xaa can be any naturally occurring amino acid
RQXQLMQAHIDRPYRLIIDPVVSPTYEAADDMEAYERIPLANTDLALILSLLMRDDRDTLADDNMNDTCVSNQLK

SEQ ID NO: 946468 - protein, 110 aa, Homo sapiens
WRNRHEGIFNFFGHFDQQALDECLVFLPNRVVYWVPVYSQGTRVNTTWVTLVRSGSSSFNSSFPGCAKAWTLNLGTQTQASPGRPFIPGGSRVNSFVSTDPPTGKLCLAR

SEQ ID NO: 946469 - protein, 188 aa, Homo sapiens
  misc_feature (63)..(63): Xaa can be any naturally occurring amino acid
  misc_feature (85)..(85): Xaa can be any naturally occurring amino acid
  misc_feature (112)..(112): Xaa can be any naturally occurring amino acid
  misc_feature (132)..(132): Xaa can be any naturally occurring amino acid
  misc_feature (134)..(134): Xaa can be any naturally occurring amino acid
  misc_feature (147)..(147): Xaa can be any naturally occurring amino acid
MPMLMYSGSILVFSSSPYYLVCDLTRYALKLIRMTVTKGSHGSESGQCTPRKSASRVREEWRXSSLGESNALLRKKLDVSGARSXSRCIHSAPHCVTVSVIPVRRSHEIVPXLGRLDLSVIECKVLFMSRAXRXSQSLLYALLIGGXAKEQGSLRNVRGITFDLRAPYNTKIIVYLATWAQYYSTRGM

SEQ ID NO: 946470 - protein, 193 aa, Homo sapiens
  misc_feature (156)..(156): Xaa can be any naturally occurring amino acid
CLLPLIIALTGKHSDCWTHSVRYFRLCVLDPMHGVPEVISVGYVDSHPITTYDSVTRQKEPRAPWMAENLAPDHWERYTQLLRGWQHMFKVELKRLQRHYNHLGSHTYQRMIGCELLEDGSTTGFLQYAYDGQDFLILIKTPSSGWMSNVAHTIQXAWEGNPHEVLDEKDMLAEQCIAWTKRILEYRDPTIDM

SEQ ID NO: 946471 - protein, 133 aa, Homo sapiens
MTRARSDNKNDDEIRIQRCQCKLIDYSPPVDSTIVCVSNVHGIDLVSPALLTLPADHFPDLLSCFNYNYTTCILGPSYMFSLLPSVRAYRLRDIKLCNVILMTKSSSDAYPPYALVLSVELCNHIEARWDEYL

SEQ ID NO: 946472 - protein, 105 aa, Homo sapiens
RRGRRRRLRSQRASQYKRPHPFPPSSPVAGTRKPHFLAHTLEHKQQPWRAGGKPKADFGNPTRNTPVLSSKGLAGPGAIQLEAPRKGRRRVWGMNVAGLNLVTFK

SEQ ID NO: 946473 - protein, 229 aa, Homo sapiens
  misc_feature (203)..(203): Xaa can be any naturally occurring amino acid
  misc_feature (208)..(208): Xaa can be any naturally occurring amino acid
KLFDHAMVRRPIGLEQAGLCTTNKSLKEAYIPKGTEVFIPGRNPKNSLWFLRSLIPSNTSNRGGEHNTENLKLRSCVRNLPCDVSIQGRWAGGAVASSLTGGGHSAKQAWVVTGGPLYHGKRSNETFLERNLRETRALHKRLNEGRAGKNGQGPGNWGRISQRQNLTGKVRTPKLTSQRMNATNSKKLTGLALTGFTGSLEPXVRRTXPGAFAGSWPVLVEGQAVGLLS

SEQ ID NO: 946474 - protein, 103 aa, Homo sapiens
  misc_feature (80)..(80): Xaa can be any naturally occurring amino acid
LNLFPCMFGSSQAGNRRVPLRTSSGAGFQGLGGGAKGKRSWARRGGGLGDRGLVARRGAVVLVPHSKRVPVLRTERNEGXGPDNSPLDDIDENAGQGGHAWCE

SEQ ID NO: 946475 - protein, 162 aa, Homo sapiens
  misc_feature (120)..(120): Xaa can be any naturally occurring amino acid
  misc_feature (156)..(156): Xaa can be any naturally occurring amino acid
RKQANWRTPWTLTIEVDSRIEAPIRIIITSQDVLDSGTGPTLGLKNRCNSRDGLNQNTFNGYTNGGYTTGQWLLKSGGANHRFHGPSVLEINSPKKSLEIGAGIYPYRHQKGISKGNLEXRNWYKSKGGLVDTGSNSCALEDRKQKTPTGWQKKTXDRETNK

SEQ ID NO: 946476 - protein, 38 aa, Homo sapiens
MLMARTVICLCGPFWHLAALASVIKVTLVLVFHSSWPS

SEQ ID NO: 946477 - protein, 230 aa, Homo sapiens
  misc_feature (86)..(86): Xaa can be any naturally occurring amino acid
MGKVKVGVNGFGRIGRLVNRGWFELWVKWDIGWHQWNPFIGTFNYMGLHGSKYVFPNHGPKFHGPPVQGLEKRGKAGHSNGEIPIXQSFQGRRRIPSQKSKVGANAWAPVGTVGGRSNWAVFQPTNGKKGLGGSLWQGGEATKGVNQSLAPLWLERPHWFGHGLVKPMENGMNKQAFKEFIKEMASLEPNLAVSKPMGQGGHSMEQRLGNRGGRGSMEHKVQRAINGAQG

SEQ ID NO: 946478 - protein, 226 aa, Homo sapiens
  misc_feature (65)..(65): Xaa can be any naturally occurring amino acid
  misc_feature (82)..(82): Xaa can be any naturally occurring amino acid
  misc_feature (102)..(102): Xaa can be any naturally occurring amino acid
  misc_feature (104)..(104): Xaa can be any naturally occurring amino acid
  misc_feature (142)..(142): Xaa can be any naturally occurring amino acid
  misc_feature (152)..(152): Xaa can be any naturally occurring amino acid
RGSEQAIITLRGGAGNWPASGPFLGHRGLKVVGGWSTIIFNLTKKAAGKARRDGPWNECNERPRXLCNPLERRQGGAGNHEXETKGQRNGLGHEGKLPSLEXQXVGPEGNGVSLCSRAVLASRTGPGGLNSPRWAWAQEFHXGSSTHPYKEXKPNPRYGIPKSNINVPFHLLLTRLGVIRLNSRDIPGSLKDIFYRSWKVVSTKKAREAVCACAGPVWCAFKASGV

SEQ ID NO: 946479 - protein, 158 aa, Homo sapiens
RSLGFRGPGTLVEPLSYQVAKGRVQGRVAPGWRKVARSYGVGPGMNRFGLRSDFPIRCFGPGGEITTVKNTPIWREHWGPSPFPLGGVGRPSQPNPWAINKVELIGNPPVRRQGGPVSVAPSAQVALRFPQPPGSPKRPTLGGVPGGEGPRVGVPRGP

SEQ ID NO: 946480 - protein, 176 aa, Homo sapiens
  misc_feature (42)..(42): Xaa can be any naturally occurring amino acid
  misc_feature (50)..(50): Xaa can be any naturally occurring amino acid
  misc_feature (84)..(84): Xaa can be any naturally occurring amino acid
  misc_feature (107)..(107): Xaa can be any naturally occurring amino acid
KTHVTHHPILTMSATLSVLVPWCFYPAGDHTVPWQLGMAMDXNSVTLDAXCDDQTEHGRLEALSRRWACLCVCALPVRQSMRLXPCTCTSMMGAAESPVTAADGEPXLPMSHQSPICVDIVCVALCLSLDMFVGPSGRLLVRRTGDCCSDGKQLPGVNNGRDCYSSVLAVQATSAQ

SEQ ID NO: 946481 - protein, 275 aa, Homo sapiens
  misc_feature (119)..(119): Xaa can be any naturally occurring amino acid
  misc_feature (126)..(127): Xaa can be any naturally occurring amino acid
  misc_feature (131)..(132): Xaa can be any naturally occurring amino acid
  misc_feature (136)..(136): Xaa can be any naturally occurring amino acid
  misc_feature (140)..(140): Xaa can be any naturally occurring amino acid
  misc_feature (153)..(153): Xaa can be any naturally occurring amino acid
  misc_feature (194)..(195): Xaa can be any naturally occurring amino acid
VAVELRSVARATDPGSGRKRLAARRPSSFERHGLQPGGPGSGRVTGCSSGLHFVFLVNRGALVLGRGDEPCTDMFACVDCNNAPYHLSLIDPLITNLYPQCLGSPIPTMLTIVVLDVHXTEYVDFXXYTPXXGHTXLSRXTNVLGDLGLLTCXQVCDIGNAPAALALFAITKTFGNKHWCVESWCKCVLQVPSXXEPSIVTQGRGSMVGLWEVYTLTHLLHDTLWAWPGCDRRSWDKASHGRFGRLFPPDCITIGVALAQGFPGYTEVELESPVV

SEQ ID NO: 946482 - protein, 204 aa, Homo sapiens
MRVPKQGEGLAPSGKRQGVREIPFPNLKKGGDRRVPGKIGVTPHRNIAPFLTGLNKTGTPRRIIFPEPGLRRGPTAPRESPPELVNTSSPEKSNWQGKAAEGCGGKGRPGHLAQGFPERINKSEAKKTWDLVVKTQQQGHKGGLAVAPGRGHPLGGGRGPKRKRTVNPCVNYKGPGQTDLKTARVFQYDTGDFVTGEGPPVGPA

SEQ ID NO: 946483 - protein, 191 aa, Homo sapiens
FPSFFIYLTCDIASRALTMVYLVFFEHGPSYKCSVNRPKEGFQLVAPINIVLGKLTFPLLEGYNTTKGTHIRSHKHNHNIHINTTMAWPFGKARTHTHTLHMAHIISTHNTIYSHLLVVCTHSQISMDRHTGHTKTLFTLDYFQRKLLFFLKVKPSSFLEVSILVFGVVELKWLELIFAGGFLIWGVLVPK

SEQ ID NO: 946484 - protein, 115 aa, Homo sapiens
  misc_feature (26)..(26): Xaa can be any naturally occurring amino acid
  misc_feature (48)..(48): Xaa can be any naturally occurring amino acid
  misc_feature (60)..(60): Xaa can be any naturally occurring amino acid
  misc_feature (69)..(69): Xaa can be any naturally occurring amino acid
MLIIVLSARRNCVRRSHVYYNTNLKXSIRPSHSSPHYRHKSMCVTLAXPRHIIELSLQLXSKSILSVSXTFRLIFPLDKQRDHRDNWTNSVDLERGGLYRQFQTFGRLSISTYGS

SEQ ID NO: 946485 - protein, 113 aa, Homo sapiens
  misc_feature (68)..(68): Xaa can be any naturally occurring amino acid
  misc_feature (72)..(72): Xaa can be any naturally occurring amino acid
QEGLEGWQTRISQKELEQQQQQVVQLEGVENGTGRNLLGQLINILLGWHGQSFWVFGLHWLANWWWSXLYVXNRPTEDGYRPHFNSLGRVILYAPLSPGKTTGGQAPPSRLMV

SEQ ID NO: 946486 - protein, 160 aa, Homo sapiens
  misc_feature (84)..(84): Xaa can be any naturally occurring amino acid
  misc_feature (91)..(92): Xaa can be any naturally occurring amino acid
MEGAGCVVGSHMRAKCTLCSSADGQLPKTGGRSEKLGELQQRHRGLGAGGVWNTDFMPREPRTDPTHDLKVTQSYTLYACVARXDKHLQIXXSPHWDLARRLEQKGLSLGWCTPPRHWDAVLPSSRKVGWRAHYGTGVKELYICISYSPDSNSHVTVCKA

SEQ ID NO: 946487 - protein, 323 aa, Homo sapiens
  misc_feature (79)..(79): Xaa can be any naturally occurring amino acid
  misc_feature (95)..(95): Xaa can be any naturally occurring amino acid
  misc_feature (104)..(105): Xaa can be any naturally occurring amino acid
  misc_feature (132)..(132): Xaa can be any naturally occurring amino acid
  misc_feature (174)..(174): Xaa can be any naturally occurring amino acid
  misc_feature (255)..(255): Xaa can be any naturally occurring amino acid
RGLGWATWTPKPINQKLGRQKVGNFWVCHTFLGPRADMEILTDRHTTNTVGATWVLEGQQMVWFQVQRGMFGDSLGRVXTRGIHSPTRGVVSHLXTHVLHPTHXXPEWRTHTFRHTGRRTISHRQSITLWRXGPQTHTHSADVESVAEGNARVIRRAEAPVTEWRRGTLILAEXLRIPSQRCHTYYPFTEHIYRRSGTHTLFVVTHGVYTIYVGGWSRHTIVGYAGGVTHLQADVGPRFPGTLCSHMSATEGSAXVGYVSRHIYKTLCEPNVGADVNPAIWKSGAAPDIRRRLWQQIWTRWFNPPGHMVGVPHMGPHPGSQGG

SEQ ID NO: 946488 - protein, 282 aa, Homo sapiens
  misc_feature (179)..(179): Xaa can be any naturally occurring amino acid
MRSGTGGACVKKRQASRVLNEAVTLGNCALSSKLAGEEYRGKYVSRTLKSCDASQVATKRSGVRRATKVICGTYATFRLGSRYPSVCSLTLLLVQSHARYQDIMPACGPEWYIHHALDVRTVNYRWQNRSCMTLAIERRQGSELIATDFSAHVRSFVDCETKRCPGDNTLCWWHPFEGXWVNREICVMFIECSTVCRHCLCHSFTESQSLALYIATVLRGTVHMAVRNKVHYGVHPVTFPRVTLVRKRDWIGRASVMMQLEGTDLVNSSETDVRSWGVRCEA

SEQ ID NO: 946489 - protein, 48 aa, Homo sapiens
MGRSRSRSSSVQATSKTRRRPDPTEWSVIRIGRGEWRRYGGREDGRLP

SEQ ID NO: 946490 - protein, 138 aa, Homo sapiens
  misc_feature (81)..(81): Xaa can be any naturally occurring amino acid
KFNGWRKRRGQLARRDVRTIVAVMCHVVNVLNYTPGSYREEGLDSEPWHNTRRPPCEQNHIYGSRTLGLIKQNQEKLSLVXTHTNHGRDRPKALGIVLTALVYTPSQHLAQGPHMGEHICVEGPRPTAERIKAFEAHA

SEQ ID NO: 946491 - protein, 103 aa, Homo sapiens
MASHSYLLQLPLTSDTNRSVLLSSHKKSDGVTGFSLLSLMFPFLAPSLLGTLAHPPEGQHRAITPAGLNPYSRTNDPDRHKGENATPPPEPNTPPLRTKTHTQ

SEQ ID NO: 946492 - protein, 272 aa, Homo sapiens
  misc_feature (95)..(95): Xaa can be any naturally occurring amino acid
  misc_feature (164)..(164): Xaa can be any naturally occurring amino acid
MRHMVIVVPLVSHVAIRTSVRICGGSEFCFVGGAPMRNVLCQYGSHTLPQSVRVDKTYTNYFMNNSDSHTPHVVAHRLRLPQILGVLSTHTMSAXNLCAHGCDESYVGAYMSEILGLADFHHVRVPSAMLVRDTMWSCWETSSRCKVHCAHLVTEPRSVYVVIXHWFNGSIPTIYESCRDALPGSSTLVVRDPGHLPEIGCRTVASSWANYRCEACGCDYPRITYGYSRVGTGTLTQRNHRHIDALVTSTSPTGVGRRTLAVVSHAGTCHNR

SEQ ID NO: 946493 - protein, 158 aa, Homo sapiens
TVDGAELCGGQVSPVFPAAPEWLSRESAQAPSGSALTLSSVSSLPRIERSTDQVIKPVNLEALSKWTGHIPGDVVRDMAQIAPMLAQLGYDPYANPPNYGNPDPFVINNTQRVSVHLYLWKCTLGDMGLLQMWKLQPPEEMVRLSIPGHLSWFCLMTQ

SEQ ID NO: 946494 - protein, 120 aa, Homo sapiens
MSYGEIEGKFLGPREEVTSEPRCKKLKSTTESYVFHNHSNADFHRIQEKTGNDWVPVTIIDVRGHSYLPENKIKTTDLHRPLHDEMPGNRPDVIGSIDSQVLQEARSSLIFADHEIYCTK

SEQ ID NO: 946495 - protein, 121 aa, Homo sapiens
GIRHERHETRVDLTFYTLSPAGPFCLLESGQAPVTSWEASARLLVVAIFRGGPTTIETQNPWAPSPFREQLIPDPHPQGDPAQDPDGVEHAGATTVCMATRNSSQRKPREAPLYVSEHGFT

SEQ ID NO: 946496 - protein, 425 aa, Homo sapiens
RRTDDDDDDDDDDDDDDDDDDDDDDDDDDDDDDDDDDDDDDDDDDDDDDDDDDDDVTDDDDDDDGLHRLLLTEAETDGSSEEQCDTTWGGSKQTRLRFRAYSPVNKCIHIRREVSSNKHAIVQYVNRGYLIPPNAPVHTCSGDDNGRMADTALSVRGEGIVYKSALLTVVHVIITTVCSVVREITLAVTYPSVSMSGHGDSPPTASHVHLYFYYRVCFSQLVDTYNYIMIQYLVASATITITTYDHTPISITHLPQYSHSSSFLLIRIHTLIYRTLSTNRSTTYSSPILYLNIYITITPYITYQPTRLHETHTTYTPQHISHILSHPYYIQLPIPNLTHTINMLTSHNYSSHYPLISLSLNYTYIRHRPYRSTYRMQQIVIIYTSLHQHKYPYITSQLPHTQLTHKRPHIMTTNTPSTQLTYPLE

SEQ ID NO: 946497 - protein, 328 aa, Homo sapiens
RAAIVSGIIYRGPHRQCVFMGPPVLIHIAEMPLKHSCSPRAHSVDFTGSHLSQFAFSKSVIPFGPKTKHTNNKNNKHKQKQTTQTNNKTNTHTTKQTTNKHNTNKKTSSGGGPRIPNIRPYIREVALNNFTWALRYNNSSHDLGNNPLGRIIPPHEIRPLTGNNPPLFRTGVGRLAEERTRTPNSAAFHQHVVREALYLENSGDTMISRSNNIGSNTYSSLEIIGVKLKRYILFHPTLGAEHSAITFPFIRITQALRTRGTGSVPIVLPPCGNHPRAPLSYATRWSPPTVTAGGQRAVLIRGAGRPIRGGHTRRIHRHLAVSEVAVQA

SEQ ID NO: 946498 - protein, 137 aa, Homo sapiens
MAVTLFLRFLGLYGTWQPSLTNTWTQALVRVGTGHKGAEPKTGQAGAPEPKGTADGRPKDAGDKDSGNLKPIHGTTQNRGPELTLGIPGESPGTPFMPGILTGPPVARKANPDGRKDPAPRDRAHRGPTGGPEDPTG

SEQ ID NO: 946499 - protein, 411 aa, Homo sapiens
  misc_feature (363)..(363): Xaa can be any naturally occurring amino acid
EWPVRSPHGVVLAKRLVVGGSDNHGYYFLKELKRRDSNAYIGKVEIMAAPGHWVRIFKPDTYKANSDNQLITPTIDAHYSQEHTGRWSYMGSMNGPWDPKSDDNSLWPSRCAVAASCVTGAAVGCPQPCPGLGYPLCEPLSPSLPASLGPWKVCDIPSCPPKPFALITTFNCLDPTKQQTPKHTTTPQRHHPPTTDITNHTLRTLLHVPIHNYSTDSDALTSPGGVPRDTDITRPPNRDGRIITNSSWARVILHSFAHRRNTLLRFPNQYSALEYSSSLLASLVLLTDIVRLLIALPNMFVPPLNGNWPLVRVTIGNHPVRSALCTIPNGESAAVNLENRTVQVSSCQPFNGTPGTHGTSTPXGVTSAIEERGPFIFLPAYDTLSMMLILTLHDHQIILMMCSTSYSRRTH

SEQ ID NO: 946500 - protein, 127 aa, Homo sapiens
NSGMVRIRDRVPNGTKARDKTSFTCSLTGFFLDQNHKGRIGILMVRSGSEAYLYGGSGKLLTMRINSGSGHCHLDAPHITNPFLVTTESYNSSWAPLVTPNSLLGKLGLRTSGDRPGRNSGGFRLCS

SEQ ID NO: 946501 - protein, 79 aa, Homo sapiens
GVPHNLRTKRTIGWANWLKKGGAQLEGLIQGGSKEQLLDLDAKVQTGQRLANWLYSLNPSFFGFCKGKPKMGKLGKALG

SEQ ID NO: 946502 - protein, 272 aa, Homo sapiens
  misc_feature (121)..(121): Xaa can be any naturally occurring amino acid
  misc_feature (176)..(176): Xaa can be any naturally occurring amino acid
FPWHKNGPAKATGKPAPVYKNTELGRRPPGEEPGSRRHDILSTVIDIYVTQETLDSNQRISQPQSANHNQTKAPDVWRAQPDVDIRMHSNTRVQVKDAKPADLAGGHTARGTGTERYALQXVGGPFRGKWLSRERLTYRRSTKSPENILYDTILLLLVYFTPTTKTWSYTKKAPCXITEYPYTMGFLGGEKRKVICTAILISPDPRLPYVRPDVGLEATFPKGYPQGCEDLVVPKPISKQKTTNQYVPKRGFPGKQQMDSKERKVGCTTPVV

SEQ ID NO: 946503 - protein, 233 aa, Homo sapiens
AEVGQNWELDCSNGNLLSGKPGRGSWFRATQGSGSSSSEAKALDNRFLGPLWGPRDRWWVDGIIGVWTLWAFNGDPSMALGRHPFWAPPKRPQGDGWAPGKPPLVAGRACGGWGLCGWEHWVGAWSGAGDSLKLRVARRAQAHTGALGFSGLSKAGENEWLNELNFFTGGAEGEPQAPSLGLWFPLVFWAANNLLVKPFDELTGWKEELLLDHPEGILTRSRERRLGGGAERM

SEQ ID NO: 946504 - protein, 66 aa, Homo sapiens
ILWPTDDDDDNDDDDDDDDDDDTTTTRHTTTNTTGDHNHDKHQITRRDTDITRESTSNTATHDNRT

SEQ ID NO: 946505 - protein, 223 aa, Homo sapiens
  misc_feature (91)..(91): Xaa can be any naturally occurring amino acid
KISRGAGGGGWNPRLLGRVREENSLNSEGRGWSEPRVGATGTPGLGRTEVGTPVSIKQKRRWRNSEVDILAIGFWLLPWGSSWVPEAPLPXIPASIGLWLLVLFWYWTWIFGIKGLKGPLHWASLGKLGNLPKQGPSGEFLSFHLVLVPLSPFGNFDIFSRFPWIPLDTSHSGHSGPPFKLAELFPLQHFSHFNIKGPWPKGTPNSGPAYDEHSYTQLEGGPV

SEQ ID NO: 946506 - protein, 114 aa, Homo sapiens
AEDESGEGFPLEFKKELTGQRLREGDGPDGPGDDGAGGPGRTGAQAGGGGREEGRGALQGWSTSAGAGRPRDKRYGGFMNSEKRQTPLVKLFKTRHHQERLTEGRMKAQRGPRG

SEQ ID NO: 946507 - protein, 174 aa, Homo sapiens
  misc_feature (83)..(83): Xaa can be any naturally occurring amino acid
  misc_feature (159)..(159): Xaa can be any naturally occurring amino acid
KGSVRDPPVMALSKEKGFQEITPPGVGMSKYGNIILSLHMDLCEDVWRELGSLYLHTDLDGYLSLWRFHWEGKMPNNRTALSXANVTYIIMGDFIGLCAIVGNVLDICEVKLNPSLQTTTFYFIVSLDLADNAVGVLVMPYALCQPVHHPLLQLAFYGXPTAYLYPQLLHVLVG

SEQ ID NO: 946508 - protein, 153 aa, Homo sapiens
LTFSLCPEPESIWQVGEVGPHTPTGSPISAHACAYTHFVLTPCYHWPEEAHTGKRIAASLSDSLVCTSHEEPTPVLPITLLSLRTVDHALVSEAVPSAPADCISEYPILEVRMENVTVLGEDVIVNDELYLNGASVLSHMYIDETVPEPRIIM

SEQ ID NO: 946509 - protein, 74 aa, Homo sapiens
INILTVPGSTEYTERESLREVRPAYGPLTAWGGSDTYRVDRAMMTGLRNRTPVTGFEHELVGTWRATLYPCPDP

SEQ ID NO: 946510 - protein, 142 aa, Homo sapiens
HIDPLSYDVKPRGDSQRLDLENAVLMQELMAMKEEMAELKAQLYLLEKEKKALELKLSTREAQEQAYLVHIEHLKSEVEEQKEQRMRSLSSTSSGSKDKPGKVGPEWLGDTLRLSDCPVTTGHTSPPCCLSSCICIGNAGHS

SEQ ID NO: 946511 - protein, 183 aa, Homo sapiens
  misc_feature (45)..(45): Xaa can be any naturally occurring amino acid
  misc_feature (77)..(77): Xaa can be any naturally occurring amino acid
  misc_feature (113)..(113): Xaa can be any naturally occurring amino acid
  misc_feature (148)..(148): Xaa can be any naturally occurring amino acid
TLGGNQGNGFGRNGPVNSKERWGLWVVSCHSPGLGEEPQLLNRWXNNGQGPAKGTKGATPANKGPGHEVGAPTSCEXNPVLGHRLAKAHSETTRKVENHNWGTKERGNFVPIXGPPQGKTSRPDQETPRNGAAPEASLLQYCGPQRCXYTKPVNLQTGCGPMGLYGNTRVSCETRGGKKGVPL

SEQ ID NO: 946512 - protein, 84 aa, Homo sapiens
GRGICTAPGPGACARAAPERSGAPRRSVAQCKRFVVTLHTCNLKNLFFWAFMFNGFRKLSVFSKELLFPVLKIQKGILALFDYI

SEQ ID NO: 946513 - protein, 173 aa, Homo sapiens
  misc_feature (168)..(168): Xaa can be any naturally occurring amino acid
MVGPRHEPRTRTWWCPVMANNVSWGNWKDNLGGFPLKGRTVIGLPQAFNPKGGGLASERCKKDGQRENLEILQEQLYPEAIETEPGGGPGKFTGHPQVTNVGPRRRMQKGGHRSLGFAMTLGNNTTPGGAPPRQGRNKRGTRGNRGTTTPCETQHPTGNIFRPRRPLXRAHEP

SEQ ID NO: 946514 - protein, 219 aa, Homo sapiens
  misc_feature (109)..(109): Xaa can be any naturally occurring amino acid
  misc_feature (136)..(136): Xaa can be any naturally occurring amino acid
  misc_feature (159)..(159): Xaa can be any naturally occurring amino acid
  misc_feature (170)..(170): Xaa can be any naturally occurring amino acid
  misc_feature (191)..(191): Xaa can be any naturally occurring amino acid
SHVRKQKKGGAGKVTWAKGVLTGFRLSTGVTKLGCVNWCPHELGGRHCGVRLVVVFWCGRGDIGGTNRTTVLYSGSTNVAQRERSGSCAEEFLVWLNGTVSHNPQPSPXLSGADKTTHGTFVQFGRNTCVCEIVRXLQGRNTRGLDTVFWRASASGWDXNLKANMGAHLXMCDWVVKIAGGAAASPRVVHXGILRAVSGKRLVEQTHTVSQEAPQGSKK

SEQ ID NO: 946515 - protein, 326 aa, Homo sapiens
  misc_feature (117)..(117): Xaa can be any naturally occurring amino acid
LWWRSTTKWIPRGLDGNSGHEGWDSSYTSEYLPTESWCQTARDEDWTVTTRHSNATLAGDKNFSGQAPVTHLWKRVTHGITLTPELNSSVNTWYPLYPQGDTTCCWRRHIVTWGQTXRPQEISRFHLGRNTTTNSSGSWFTTHLSNMATYTLLLSLRSVINQAHLGPELCLATSSLELGGKQRMGRYTPHILNRPNVQRPIHHHIAPTCGGSISGNERSRHTEFVPFPQPGLSPDLEHGRNAAHWLGRLQHMFDKFRGKNFRVKYTDYFFNPRCDHPASPYLSPRHYNRDTVVELVVPALGTRVLPLRTVDSQVTGGHRAIRGSAH

SEQ ID NO: 946516 - protein, 74 aa, Homo sapiens
  misc_feature (1)..(1): Xaa can be any naturally occurring amino acid
XLAGCPGSAVPGMVVSRILDDVRRMNKRELYYQVLNFGMIGSSALMIWKGVNGITGSESPIGVVLSGSMEPGIS

SEQ ID NO: 946517 - protein, 199 aa, Homo sapiens
MNIPKWFHWGNRPWGLPAECSRIGWPLRGKGGVVMGKNNMKRKGIRRRPGKQPNSGRKWWLHISGGMWALGFTREDSLSIRDMLLGQEGWPAGVPVLGGIGPMVKSLVAGPEHWSRGRRRTLFFQALSIYTKISRGHIEILNDVQLIQTGDQVGASENTLVNMLKFSPSPLGWSSSGGPHGSISGIVIYRGLDSASGVS

SEQ ID NO: 946518 - protein, 306 aa, Homo sapiens
  misc_feature (161)..(161): Xaa can be any naturally occurring amino acid
FLDVKFERVYFLNYRPGFKEGDYLAQNPQSWESVEQGQGENKGALGVELLGGGVTLGAPAGGLNRPFLEGGSWMMGVFETASPRGVWALLGGSCKPCVDAWSLGAGRGPSWKVGPILGRWRLRSFITLGWQPSKCVVRPSVCGLWRPCAPVNLARWQCVGXSSPPRKSAVASQALLLETPRVERALGELCSLARGEGTTFNWCARFIGQTVLAQAESGPNGSKKRLASARARVGNIGAGVGGGLKEGAESSAGEKSRASGWGVVPGGVVRGRFGQRIGHGTPGSRRGVAFRNWESGKVVDAVPGVR

SEQ ID NO: 946519 - protein, 142 aa, Homo sapiens
  misc_feature (133)..(133): Xaa can be any naturally occurring amino acid
MLLSELSLNASCCALHVRLISWRIALLRPASYNCRQHKRYTLAQVYLRARMRAMTEKATTESSGRSYAECEIINISPSNSSIHRHYTAEGGMVGKADVDRSALLEIPMHRLRRHTNASMCPHRHERSAGLHKXETVTTYGLR

SEQ ID NO: 946520 - protein, 100 aa, Homo sapiens
FDQVISENYRDGAAGVSPVQDGYVLILCTKVVPDVVTVCNSRSQSCAVKCDADAYCTRFDCKHDLHAGPTRLVLDCKDKSYRVTSVKFYIPLEQDRKYIA

SEQ ID NO: 946521 - protein, 185 aa, Homo sapiens
TLNVGPNPAWAGWLEAFWLVSLAPGRVRARRTGGHREVEDGLAWVGISGTIYEYGALNIDGEEYIPFKQYAGKYVLFVNVGSYWRLTGQYIELNALQEETCTNGLVILGFPWQQFGRNQERTQRYLPNLKYVRTSGGFGPYFQLFEKGDVHGEKEQKFYTFLKNSWFFQLGAPGDLLTALRARGP

SEQ ID NO: 946522 - protein, 53 aa, Homo sapiens
DYWLTKLPNAEGAPRFNPCVCATPLSLILSLGVNFHLLLRCRERSLEIHTPVF

SEQ ID NO: 946523 - protein, 283 aa, Homo sapiens
  misc_feature (45)..(45): Xaa can be any naturally occurring amino acid
  misc_feature (90)..(90): Xaa can be any naturally occurring amino acid
  misc_feature (109)..(109): Xaa can be any naturally occurring amino acid
  misc_feature (112)..(113): Xaa can be any naturally occurring amino acid
  misc_feature (161)..(161): Xaa can be any naturally occurring amino acid
  misc_feature (164)..(164): Xaa can be any naturally occurring amino acid
AASVPPSESSLPRQSLSLPGRCLRSVLQPLWGPCLLVPCLLQCLXWTVLCAVCLDDAAMCHGPSPREMQPLLDVHPGPCNAPTLSGLMTXPCSLCELLRDEHALLTLRXPPXXYVMVPTSCWGPDSCRLQHACSSWQQAAQVQKRELTSQLGERLAALLPXVAXPEPLSADGAKPGPREGKRSYSMEHFRWGKPVGKKRRPVKVYPNGADDESGEGFPLEFQRELTGSIREGNAPRACDKGRGQPTEQAAVRQKERPQMASWGRQKTGRTHDPSAQAQPGRRA

SEQ ID NO: 946524 - protein, 111 aa, Homo sapiens
YSPDFEKLKPEYLEELSTMMQHFSQILGKRPWFVGDKITFVDFLAYDVLDLHRIFEPNCLDAFPNLKDFISRFEGLEKISAYMKSSRFLPLCTQGWLSGATSNALKATRWE

SEQ ID NO: 946525 - protein, 69 aa, Homo sapiens
QALCAYDKKSPCRRKSSLDHIMDVAVIPTSVPLTFLLKELGRFEDNPYPSPPKAGEAFYRGLPLRDSFR

SEQ ID NO: 946526 - protein, 208 aa, Homo sapiens
  misc_feature (36)..(36): Xaa can be any naturally occurring amino acid
  misc_feature (65)..(65): Xaa can be any naturally occurring amino acid
  misc_feature (153)..(153): Xaa can be any naturally occurring amino acid
SQNSTGPRLGWEWKPRTRRGGGYQAGEESAPPPVRXRWLAPGKVGERQRRATLGGQQTDGPLTWXTRVPLIGQGYNQGPDGRGTSNSWVHPLPSFMVVLAIPLDTTGKSWEHGTFNIIFNSNTLESKPLIATRRGPGSGLTMCRFRTATQGTXTKISIQQHSLIKEFRKVAFNNNARKQSKAHFLQSRFPGSQGNSISFRRALTRHIA

SEQ ID NO: 946527 - protein, 96 aa, Homo sapiens
LTGVRRVFGTQLGGRRSAKGRCGAVRCLRAGSQPVGSTEVHERVLILASWIMKLKNMILAKKYICTYINGAREGSPSSQISGVFFMNLEENTEKAG

SEQ ID NO: 946528 - protein, 152 aa, Homo sapiens
  misc_feature (67)..(67): Xaa can be any naturally occurring amino acid
  misc_feature (97)..(97): Xaa can be any naturally occurring amino acid
  misc_feature (106)..(106): Xaa can be any naturally occurring amino acid
  misc_feature (116)..(116): Xaa can be any naturally occurring amino acid
  misc_feature (140)..(140): Xaa can be any naturally occurring amino acid
RGAGSGGRLEHSSSLWQLLFYLEDEAPSDWLRNPGEGPGIELWLESPRLKPLGTKWCLAGTSLWARXTEWGTKGSWKLTRMVLTWAEAAPACAGWVXQWAVFLATXAGGPGRVSQXTFATLGPLRERAVEGLPQSTGGWXFPGRYEAFGPTF

SEQ ID NO: 946529 - protein, 108 aa, Homo sapiens
  misc_feature (93)..(93): Xaa can be any naturally occurring amino acid
  misc_feature (99)..(99): Xaa can be any naturally occurring amino acid
NGSRKYETGLGTNPGPAINPSPSSALPSLRILNITDEVKDSLPLPIKINGPPRVMEPTSTPDKGGLIFNSYILPPIIPKNQATWRFLEGGQIXVVLPDXKAPIPVLIN

SEQ ID NO: 946530 - protein, 116 aa, Homo sapiens
AKEDSTGELHLLQRLDSSVDAQPCSCLSATTGAGTDTTVDNTAEQAAALFDGYKMFHGPYEPSDLTYCSAYGKDTGTALQERSWDIARRLGQANMSAIWNTTMLVTSELCIGGQWA

SEQ ID NO: 946531 - protein, 81 aa, Homo sapiens
  misc_feature (50)..(50): Xaa can be any naturally occurring amino acid
  misc_feature (60)..(60): Xaa can be any naturally occurring amino acid
  misc_feature (66)..(66): Xaa can be any naturally occurring amino acid
IKLRSVTSSEEVDVRREDLVEEIGEQASPSASAELNKLSRGTGQWWLGDXFFEGVKGRRXAFIVTXEDLAYLATFIPVYTR

SEQ ID NO: 946532 - protein, 133 aa, Homo sapiens
LQRDLVSHTIIMGDFNTPLSTVDRSTRQKVNKDIQDLNSALHQADLIDIYRTLHPKSTEYTFFSAPHRIYSKIDHIVGSKALLSKCKRTAIITNCLSDHSAIKLELRIKKLTQNRSTTWKLNNLLLNDYWVHN

SEQ ID NO: 946533 - protein, 125 aa, Homo sapiens
MGPRETANLVLPKAVTDTGVLPPQSLYHSVDPLAHTVGPTKTLYPGDTSPLSATVKKQIVLVDPTWKLALKSGKNGKLKSLEAQVHPHQALKKAMPPGPQGLKIRGNQKLGLTTLETIGDEFHSA

SEQ ID NO: 946534 - protein, 281 aa, Homo sapiens
  misc_feature (147)..(147): Xaa can be any naturally occurring amino acid
  misc_feature (242)..(242): Xaa can be any naturally occurring amino acid
  misc_feature (254)..(254): Xaa can be any naturally occurring amino acid
ADSDTKNAQGWGSQGNEPKVGRQAATSGWREEPTNITALLGKVEAPDECAESNEHFSLLQELHLAGERKKVMCKGNLDLNKWPGTGNVRAQTAFPAKGSQWSPLGVKAALTLELSMECNVNGGRQTQRGKRQGITCNHGVRQHLVSXAHVALFAKKSHITRAVRLTRWRKEKPHLWTVVSWGCKTGAHHISNTGGGSPRGDKETSQTHGQILGGRAGTAGKHGCTDTDTRGRVCGHRLVSAXACEGTVGVKTTXGTYCGLGLVAPRGGPGRKGWAFPRGTI

SEQ ID NO: 946535 - protein, 153 aa, Homo sapiens
  misc_feature (38)..(38): Xaa can be any naturally occurring amino acid
  misc_feature (125)..(125): Xaa can be any naturally occurring amino acid
MRVWGQVWRPQTPSEHPCGRHTHIWVLLMFGLSPVAHXVSPHLRSHLQGTISLLKEGRGRHVGASNNVIWGVQRDTKTSGGTLWAPTRGVQATDKLAWNYIGAKAMVVACKVSHCGISNEGEGSXSGNHPNTGVWRRTVWEHPVFGTPCGRLV

SEQ ID NO: 946536 - protein, 117 aa, Homo sapiens
  misc_feature (31)..(31): Xaa can be any naturally occurring amino acid
KVGFRQRITNMNIKGIRHGKGSLLCWLAGCXNLAPGVQRRVAPWPNLVPGGGWPNGRVNPSKNWFERAGRSGPLHPQQQLVSPHPFHLFLRRALMDPVPLARLLLVGISFGIHGLGW

SEQ ID NO: 946537 - protein, 112 aa, Homo sapiens
  misc_feature (63)..(63): Xaa can be any naturally occurring amino acid
LWSLPSKSPAHTSSWSPRPLGGSISGGRHLPQIFNLLGLLSGPGGELEVSLEKHLAKGAPGPXTPGGRRDPEALAAQRPPLVLSGGGHPLPGGPWWAPQQNWIRSRRNNFLI

SEQ ID NO: 946538 - protein, 159 aa, Homo sapiens
MGFGVNIKQCQLPAHGRIWAKGRPLDLSGFPNVGTMGPVDPDWDRGNQGSGQMGKSLNRGLHPWHLVAVPFGAQPVSNRGMYTQGLHVSQKGKHSTPHPQGVPRNTTPLNCDQGNRALGLKGLGPGDKRELRENYTGPRPFPVTAGELTAIHDGHVDSR

SEQ ID NO: 946539 - protein, 93 aa, Homo sapiens
  misc_feature (72)..(72): Xaa can be any naturally occurring amino acid
SGSPTRKGPHSLCGNSLGNVGFHPRNWGALCVNQLLDPKDSKFPCASWDKVCSLERKAKVFVVSPEERQWFXRWLVIFVLGSNVVCRVPSKAW

SEQ ID NO: 946540 - protein, 70 aa, Homo sapiens
REPGGFKRRLSIIVTVRLVVMILRMILAICLHNCIKAGVGLCMKRQIPTDCVILEVLGLFTQAAMLHCYT

SEQ ID NO: 946541 - protein, 121 aa, Homo sapiens
TGQGNTTDYGVAALRLTLGFLSRHCRMAVVKNSGSQTYITGLTCIFLGHSPRGQWTPGTRGLKKGIIPPGWSCLFTHLSYLKKKTECIESLVLKAELFKKVLSKPSYLGPGYMKTYCLGGS

SEQ ID NO: 946542 - protein, 193 aa, Homo sapiens
MSRPVHITHQSPTSWSSFKSGYKVFQHIISSSQCSTQLSISSLGPHPSGFPFTATLHPFKLRVPHYRGPALSSPSPFLCYYIVWSKGRVSASLVRPNAGKYPTGGRSSGDTWALLRAFLGVPTWTLPSAASPKVALGINSEGLRNQWPRATYRVYHGQQWGVTRGLAQTGPEIPEQNESARAHPPRGGNGEAR

SEQ ID NO: 946543 - protein, 103 aa, Homo sapiens
MGQPAEESPQSKGWVFPKRVFGKVTLRQVGHGFTRGLLSLTTQANRRNWLVPTNIPGSKQFRTGYFSLFSSNLEGGFTRLPHGSDLRQGTVWGPVRDVWYTIP

SEQ ID NO: 946544 - protein, 124 aa, Homo sapiens
MNKLDTGTSLEYLGWLKPGGLKIWGLEYGQGTRLEHLAATYTQQGVGPRVSRPGSLVQLAPYSRVTSRAPHHGPDTPNEGQGKPPTPRMVPPMGGRDTGHAHQFAGPHSGDGLRGDGAAGRPPR

SEQ ID NO: 946545 - protein, 239 aa, Homo sapiens
KTWLQSSFTNITDSLGVMEQVSHEVFYLLVKGPPEKEVSRPAEVVEPPSGSRALSVCVMIQQGTKLLSPTKTTAGGTFFAEPGGETFKEERHWLGLCVVSFEKTGFSPTKKSGLYYPNFISSKQVLDIFVEISPVQKIHNGVDTKKRVDFACEQVFGMFTRKYFPVLVLLFLVAALRALLLLLHERGVAQGGVADVVPRLVHLIGTLGPVPDLDLGTEDQIEGGGPMGNTRLVNPDTAG

SEQ ID NO: 946546 - protein, 223 aa, Homo sapiens
  misc_feature (174)..(174): Xaa can be any naturally occurring amino acid
QRVRGITTDISVWRFATSTYYVTIIEAPGHKDFIKNMITGTSQADCALLSVAVSVGEFEDCISNNGHTLEHALMAYTLSGNNYIGGVNKTGVTEPPYSPERYEELANGVSSYIEDGYNPDTVACVPISGWNDDNMLEASAYMPWLKEMVTREDGNVSGTTLFEALDLDTPPTLXTVKPLRLPLQDSYRSEGLGQPLLGRERTVFYTRPGGAYASINGQRKVYF

SEQ ID NO: 946547 - protein, 105 aa, Homo sapiens
  misc_feature (50)..(50): Xaa can be any naturally occurring amino acid
HNVTGNVPNKTLHQALNFKNWESFPTFLGITFGAILGIYIVVELLRRGYXTPKFRWRPPSFNRTTQPLESINRKHLLTTGLVTYIHIFPIRVGGLTGACVPILAH

SEQ ID NO: 946548 - protein, 236 aa, Homo sapiens
  misc_feature (65)..(65): Xaa can be any naturally occurring amino acid
  misc_feature (69)..(69): Xaa can be any naturally occurring amino acid
  misc_feature (132)..(132): Xaa can be any naturally occurring amino acid
  misc_feature (177)..(178): Xaa can be any naturally occurring amino acid
IDEYIGNGGERFWKSYRLPADPKPLVVLGKTGPGWYTAWIGNSTGSTWIRLIQQTPREWAGPPSXHGGXVVGDSRPGGWWWGEFIYTWSPPESGKTTNKNNKNKTNKNKQNNKQKQKTNNKTNNNKQKTLGXGGGRGVNPNFGPLIVWRSGYSPNSTWGRSRISPTVGGTWGQHRVXXLPPTCKSAIGRQQSPLISARTGEVNTPNEGARHPELRPIPKKGWGPTPEKGGKLARTW

SEQ ID NO: 946549 - protein, 97 aa, Homo sapiens
  misc_feature (31)..(31): Xaa can be any naturally occurring amino acid
MGWLGCEHFEKAGVNLSKGGGTEPRKESNVXPFLGLYHHLGGGVTHQTLIWVGVGSTQQWGISPIVKPNTLNRAQHNRHNVEGLGFQGDKSRAFSHF

SEQ ID NO: 946550 - protein, 228 aa, Homo sapiens
MALELDWLLQWAQGDALCGRKLWLQVLGWNFEGLTQGEGWASVPTELVQLVVAKNELAVANELGLLRGRGHLEAGEERGSHEEVEGLVEKNRFPMMVPEELFELEFNLVLVLEPLKAWFQKKNLEGLEFHTGAFQLLGRYKGLLNEDTYQARIYNSANWSGFVTDRSWSGRESQLVYQAQRGALVQYSLDDFQAPSDYRYNPTSPSRIHPKFSFRTEGSGPGYSPHSV

SEQ ID NO: 946551 - protein, 284 aa, Homo sapiens
PCLERVQKGAQDARGPQNILWTLKPQNQAHPPQTKPQQKGGQVVTWNWEGPAMGAMGQIQGKMVSQPWVHCRDTSDCKPGGLTIFQMVVHTDNWPHPRGQTLHSPLPGSIYWLANIGAWGIPDETVGGAIGGSIHPTRYRDGPQVPGLMGVKVANPIFHPTNNQHGRGHGLTLEPSNFPGHWWNIDPVGKILPEHAMVRPFPYRKGGVDLSWTFPRFPGTRFPEPLMGHGARRLGPPPVDANLGGDKRQGATVGSYGASPLYTKWNKIGNTGGPFPFPSNLLGS

SEQ ID NO: 946552 - protein, 191 aa, Homo sapiens
  misc_feature (50)..(50): Xaa can be any naturally occurring amino acid
  misc_feature (141)..(141): Xaa can be any naturally occurring amino acid
MVWWTSMFVTWYLGSRLQLAISRLGIHRSQVPLSNHFKTLIGQSHFQTLXSWPTLVIKHIKRFSTFNQIFIFGYQPGGTSFLVHGIYGGLEVPLLIFIAPWLISHTGKQINGQEHSIFPALDYCFTADLHFGSLLPFCWNXELPFGFSLFLVPGWERLCRETLSSRRFNPSHFVGWLGGPFHAASVGPGFA

SEQ ID NO: 946553 - protein, 36 aa, Homo sapiens
MGAIQPVNPRLFKGGPKVAGNSDIKSGKPLRESPGL

SEQ ID NO: 946554 - protein, 177 aa, Homo sapiens
YETSASFTDRWGSRRGTPFAHMGTCAISRQVFFGQHRAALLYREKGLLQARTGPTRGGWESKDRTVWTEYLRRAKWGETILFVEPTGPVGGNRRRSFSPLNQAHPKKRAREAQHHPERLGGTAQKQHPLRGVWGKICKESHLGGPKKKIFVRNPEREPNPNGKKGGGGTGPSVSGGG

SEQ ID NO: 946555 - protein, 181 aa, Homo sapiens
VVEQMDKMQFNEKDDEVTQTVEELLETWTYSAWQLNEEELNAISNRKFISDKKKFKTLKAKQNESGFFGLSELKELKKVIHEKDGEIKSVEELLEGELLKVANKEKTVQDLKQEIKALKEEIGDVQLEKAQELSITSKGSGAAELIARKRGTDEYHEGCVGRERERTSQYREVVTGSSRRN

SEQ ID NO: 946556 - protein, 62 aa, Homo sapiens
  misc_feature (6)..(6): Xaa can be any naturally occurring amino acid
  misc_feature (10)..(10): Xaa can be any naturally occurring amino acid
  misc_feature (12)..(12): Xaa can be any naturally occurring amino acid
GTEGIXIFLXRXPPNSSVSESIDLNRRKHNSQPRAAPHLPAAHPSRGLEPVQFLRSVFARLV

SEQ ID NO: 946557 - protein, 94 aa, Homo sapiens
VEITCTPEPDYTVANDKPTPVSLIALAHHCDACMCCVPTLLGTVSTPRSLTYRAQLSESLDDTLDADVRLRFVYVSRASLHSALARSVCRSAYR

SEQ ID NO: 946558 - protein, 56 aa, Homo sapiens
MALYKGGGHTAEQTEDKQPTRETNRRGEDMESGLVYAAPGETTQGNNNAGHPGAHR

SEQ ID NO: 946559 - protein, 133 aa, Homo sapiens
MNRKKLQKLTDTLTKNCKHCKKNVVLDRPRLLDRAWVPPRAKVRCVPASRLLGLCGLPTAPPPRPLKQKSERESRGASSLRLILGTQASASGATYTLTHAYTCFFQPSFFYLIETCDVSLTEVYHKCYSHVVS

SEQ ID NO: 946560 - protein, 269 aa, Homo sapiens
  misc_feature (109)..(109): Xaa can be any naturally occurring amino acid
MYWCCVEQCTRRSALPVILATVHLWIAVLEQDSLKQRHMDSFCMAAARLMPHETYTLISGETPAALLRVPRPQAPEGRLVNHYRSNQMTQEKLTRFRKGHPTLTPQRAXCHTSSLSRDARTCRHVYRWYPRPCSDIATSIEQVYHIENTRTCLINEMTSQRGIVSHDMACINRCGHMETQSSLKNVGFAKPAGRVFGGIQNILCTSTFKPYSPGTQHRSQKYSAFNCKIALHVITIVRDVIGSPIPYRQQVVAMFSIPIERGVNLGVTQ

SEQ ID NO: 946561 - protein, 139 aa, Homo sapiens
  misc_feature (1)..(1): Xaa can be any naturally occurring amino acid
  misc_feature (5)..(5): Xaa can be any naturally occurring amino acid
  misc_feature (18)..(18): Xaa can be any naturally occurring amino acid
  misc_feature (25)..(25): Xaa can be any naturally occurring amino acid
  misc_feature (45)..(45): Xaa can be any naturally occurring amino acid
  misc_feature (75)..(75): Xaa can be any naturally occurring amino acid
  misc_feature (94)..(94): Xaa can be any naturally occurring amino acid
  misc_feature (105)..(105): Xaa can be any naturally occurring amino acid
XGHPXAFIAQLSDVVCHXNFGGSGXSVDILLIRRMYHTTLFGKSXLRAFVAYCWWEIMWVYVWAFVLSIKDVPKXICLMYVPTCNVVFYASLYXYAFPFLFPMLXPTRDWFPVFGYSRTRGLFLPTHVVYQFTKAYVLP

SEQ ID NO: 946562 - protein, 108 aa, Homo sapiens
  misc_feature (30)..(30): Xaa can be any naturally occurring amino acid
  misc_feature (33)..(33): Xaa can be any naturally occurring amino acid
  misc_feature (43)..(43): Xaa can be any naturally occurring amino acid
  misc_feature (61)..(63): Xaa can be any naturally occurring amino acid
  misc_feature (65)..(65): Xaa can be any naturally occurring amino acid
MSYLFNDFEHTHLIDTEILFEHFYNTKQTXQCXFLYNIYNALXVVSREHMWTPSHTPLMRXXXEXHKERFHSPFSWPRDKEFYLTKTIPFYGIACIFYQLLYFYRDSA

SEQ ID NO: 946563 - protein, 90 aa, Homo sapiens
ATITNMNIKGSPWGSLLRAGYAQCPDAGGDFTAALVLYLIVIGHAVYARHLPAQTGAQFSLTLLASPSSSVRPVIGMAQVCIPPTMFRCS

SEQ ID NO: 946564 - protein, 67 aa, Homo sapiens
  misc_feature (14)..(14): Xaa can be any naturally occurring amino acid
QGLRQAVSIGCNVXSTTTRVPRPDREHKQAHTRTGAWLQQQHAEQEHTQPEEQKREAGAGRTYRIAR

SEQ ID NO: 946565 - protein, 135 aa, Homo sapiens
  misc_feature (101)..(101): Xaa can be any naturally occurring amino acid
MTGFHGLCSAIYGDPDECWYLSQRLVTAYDVQNTALMCQRNAKTLTELIKDVYSTYSKIPAHRKGHMPCYGLKPDLDDDEHDYVRILAQFQHLSAGVTTLXNCCFSGDTAPVNHFSLYEDLGKFTAELQTGVACG

SEQ ID NO: 946566 - protein, 145 aa, Homo sapiens
MEPFAQQLQLAASLTANLSNLCQGSEMPTTSRPALDVKGGTSPAKEDANHEMSSAAYSNLAVKDRKAQAILHYPGVASYGTKASGASTKISGSPIGSSTTTPVTKPPYFNLDPRPLLCWLGCPCRNIMQAQGMGGATSGPRVGSP

SEQ ID NO: 946567 - protein, 69 aa, Homo sapiens
KRRTSHNRSLLTEMNRLSINSCLLDGGSCNTENAISLQNDYRKDSDSGQDLCLMEGTHALWIPRGNNGL

SEQ ID NO: 946568 - protein, 105 aa, Homo sapiens
MHELHLSSNTQDVHSESHKALGCTCGMYAEYGLCPHGFPANSMGLGWAPMATHADVLDGLSMDDLPLKAWSNHGLCPQWTECVLELSRCPLLWTRIWLMATIELP

SEQ ID NO: 946569 - protein, 63 aa, Homo sapiens
  misc_feature (51)..(52): Xaa can be any naturally occurring amino acid
MVLMSHRKSQRCYSAHVSIDLTHYVNGIEVDWRTVACNIYLKALPMTFLSXXYTKLESLSGIG

SEQ ID NO: 946570 - protein, 146 aa, Homo sapiens
APSPHKMSEDLAQQLASYKAQLQHGEAALSGNGENEDLLKLKKDLQEVIELTKDLLSTQPFETLARSDRFASTQPTHSWKVRDKCMAVWSEDGQCYEARIEAIDEEQGTAAITFAGYGNAEVTPLVNLKPVQQGTKAKEDSGYQPM

SEQ ID NO: 946571 - protein, 68 aa, Homo sapiens
MRPGPGGIDHTPGQSAHSQGCEPVHTQGARHQQPGYQSKQTPDRQDISPNEHWVPMDRYNPSAPTTWG

SEQ ID NO: 946572 - protein, 71 aa, Homo sapiens
LSQPVAYFPFSRVCKRALDWLMPTISSNRQPLSPSYSSPTPGAGDSRCVLVRSIHVSYGWGADFTGMQVCI

SEQ ID NO: 946573 - protein, 71 aa, Homo sapiens
RGGEDQAVMGKAPIKSAIRRDRSQPWRNVHPRYGQLLALYLLHNDMNNARYLWKRIPPAILQILNLGEFGQ

SEQ ID NO: 946574 - protein, 518 aa, Homo sapiens
  misc_feature (465)..(465): Xaa can be any naturally occurring amino acid
IIVYPGHSYRNTSHHSELHEMRACKTRDHLLNHRFTPIICLHIQQLTGLRAIGLPFTHLESRPCSTNRVYGKGTHGPGTRVSHTSCHSFNVTPITQRSDQLLMQACMYMTIRCEHPIVLHSVVIPRGRRLIAGHTAFSHSLSMYHHNTTVCEPSIASHQRWLSSLVALAKDQEFLLQGSVFAPIHKTIGYGPDCMSLLVATCTLFHVSASLPDVSNRHRFADLLGTIMGALDRVGVTFLGRYVDDMIGVLKDLVTTHYTIKTMRFLWDTGVDPPLDKFLARRMTAPWIPDVTEKQTNLREAIETSCSPVSELGETPLVCQTRLEPRHRHHIHDGQHATQWQLVAPFSTCGPVVLRRPSYINVHTPMARELHTRHFFHTALPFSHQTHLRLQAPTYSPHKHTTLINHAHTHNSYNHTRRQSQHLPFHNSDNVLTNLSFLSFFLLIPLILLPVRSMHTYSHLTRTPXKPSIDVHHTDEPATSLTHDSHHTYNIHHYPPISADHRTSSHLTTHPNTHSLLT

SEQ ID NO: 946575 - protein, 209 aa, Homo sapiens
  misc_feature (96)..(96): Xaa can be any naturally occurring amino acid
MLLGPTRLIDKLLILTKSLPLSRVPDLVITRMYLNESSTARILLLSCAPNLGAHCPYVEPLTRALNIERLNYGQVLHEELYRSTCWWPADSETSGXGHAMSSCTCTYASYAFSLSPYVLDSVNRREQLALQSSTRKSYIATCYDVTVLYPHVTNPPGTLDSAHEFLLFTAVKRFSYCHCQYTGKRVRDSKQDLLVGPKRALRVSINAVR

SEQ ID NO: 946576 - protein, 93 aa, Homo sapiens
  misc_feature (38)..(38): Xaa can be any naturally occurring amino acid
MLDEWIRGPGKMDSEEDMMVNWPFYISNHSNTGVCISXRSHGSSVVPPVDITTVAYTNGECEYYYARFKGKGSCVARCEPTVGSPHRKGILIL

SEQ ID NO: 946577 - protein, 59 aa, Homo sapiens
  misc_feature (17)..(17): Xaa can be any naturally occurring amino acid
MQEQSTDTEGSSRSSLXKDVQGYTFTLHSRQQAHNAEPVHQGLHDYSPRSSILGPQASR

SEQ ID NO: 946578 - protein, 195 aa, Homo sapiens
  misc_feature (153)..(154): Xaa can be any naturally occurring amino acid
MEVLTGIGSLLSSPQEELERRVNRTNNEGEQSFTGTHQGTVHQIFIKRTISTVPLSSRQWMTKSNSRMHNWFRYRDQGILQKVVARDTEDERITDRQGGTASGVDCIRFRLENVLFSPHCLKGNIDSTMDDRKNSQPGDTGKEGCLVSVHRCXXDQRMHAQYYKEHIKYTNAQEKCSMQRQSTRTPHQNNILRHV

SEQ ID NO: 946579 - protein, 147 aa, Homo sapiens
HEEREREGGGKGDNLEEQHTAGATAILMSLIACRWCGSGWHQNSPMRRNEQTMEIYVEESEHGHRYNCQEELLRKLYRDPLPLLPVHHLTLTDHLMSITECYDGHVPMILGPNIMAGRDTEIDHRPLPSDATITYITEGPTPSLHKP

SEQ ID NO: 946580 - protein, 108 aa, Homo sapiens
  misc_feature (72)..(72): Xaa can be any naturally occurring amino acid
  misc_feature (94)..(94): Xaa can be any naturally occurring amino acid
  misc_feature (100)..(100): Xaa can be any naturally occurring amino acid
  misc_feature (106)..(108): Xaa can be any naturally occurring amino acid
MDHSTPTAYLAIASTTDLGPEGYPSVDSTSDVVHPITDRPEHRERLKCYTYGTRTSRNYSSLLLPSPPDRGXHSACSSMPNGLGVRGTVRPPRXTYYSGXRPILRXXX

SEQ ID NO: 946581 - protein, 67 aa, Homo sapiens
ALQQQQQQQQQQQQQQQQQQQQQQQHTAAAATAAAAADSSKTKQAEKTHTKETTKHETQKNQNRKHP

SEQ ID NO: 946582 - protein, 115 aa, Homo sapiens
AVRLPICAIQSTTTLDWPHVDSYMTGESLLLPNIPRVRYNTTSAADWNIMMAHTGRYLLQMGTTMPNEEVERAHDRQMLCQIVVAQIMVEPIGRASQASLLTKRIDLDSLACSSR

SEQ ID NO: 946583 - protein, 151 aa, Homo sapiens
LADKGDCRNCIQTVFEGVGCSADVAVVGVSVCEENYKPVRFGSRSNPVDNGFILRDSEGSYLGKSLDGEGILAEEYNQAFKQASQSIALAHLVGKGNHRWRCLIVKQRMGCKHIESASIHDGHTAQLAPVMQGTSYIVYAPLHLDSINGFQ

SEQ ID NO: 946584 - protein, 37 aa, Homo sapiens
PEKRAPKKKEEDKTKEEKKRHKKDKSDKGKQTTGKQK

SEQ ID NO: 946585 - protein, 207 aa, Homo sapiens
  misc_feature (34)..(34): Xaa can be any naturally occurring amino acid
EFGTSLGGRCWRQLGTAAARGVLPSTRPQPIKKXQRAIGAAGGPNRQRRANTGSPAQARRNEHRATSGDDSGEARTGIHGKPGEKTQAINANTNSRGGPRALFEALALVATTMGQTHYLKRILKAGESCKKPPPDGPNQEVTGTKHPWQRSPRQKENAGKKPLLGKLQGKTCPGGGPQPSSQGAPHLIGPPRNPTPGAKAATDRDLG

SEQ ID NO: 946586 - protein, 106 aa, Homo sapiens
MTPKIVMVTIDIGEAPKGQDMETEAHQNKLEEMINELAVAMTAVKHEQEYMEVRERIHRAINDNTNSRVGLWSFFEALVLGAMTLGQIYYPERFFEAREMFKKPLS

SEQ ID NO: 946587 - protein, 33 aa, Homo sapiens
MDLSRDLTRADSLLKRITLVVALPVLDIKRPEA

SEQ ID NO: 946588 - protein, 235 aa, Homo sapiens
  misc_feature (38)..(38): Xaa can be any naturally occurring amino acid
  misc_feature (57)..(57): Xaa can be any naturally occurring amino acid
NNGGTSVSKKERPKKERGGIKKKKRPPNTTKKERGERXGGNERTIHRQTRKREQRQXRRKEKGTTKKGNANTEKHEKGSGGNRKRREQKRKGENQAAAKGGGKKKPKGAKAKQGGENDNTERETAKKHKGEDKKKSEDQETGEKQKPRNARQEKGENDKTEKQRGAKTKREKRGKKGQGTKGQQRNARKGDKGNRNADERRDKETEQSNREGEKKAKRGEGDGDGETGAHDKENH

SEQ ID NO: 946589 - protein, 166 aa, Homo sapiens
MQKTAIIQWPLGMLTPSTCVCHFHLRLVFPATTTLRTCRKTGYKQHMFLTFQLISSSHISIASNALVPTSLHFRLPCHRARSTKGGHTFSSGGKMQSKSTFGKTTLITHWARYLTHTFPTDKRFRPDSYIMGQDFHTRLLNRRTRYILPPNPPPLSPHRADWSNAL

SEQ ID NO: 946590 - protein, 88 aa, Homo sapiens
  misc_feature (18)..(18): Xaa can be any naturally occurring amino acid
MSSADYSKLAVKEMKHEXILHYPCVASNGPRPVGHPLGTRDLQYVVVQPRLLLTAIINADPANTFCEHAPCKHNSRSRDSLPSRPGER

SEQ ID NO: 946591 - protein, 41 aa, Homo sapiens
  misc_feature (32)..(32): Xaa can be any naturally occurring amino acid
  misc_feature (38)..(38): Xaa can be any naturally occurring amino acid
PPAAAGVPAPVPERGPLPICPGGAARCQVTLXRPVCPXRRL

SEQ ID NO: 946592 - protein, 79 aa, Homo sapiens
PMAFCHLVNVHLAAYGGRGESNFGCTKVRHKSGEASASSSFGIRMTLASENELGRIPSLSIDWNKFQKEWVPSYSLYLW

SEQ ID NO: 946593 - protein, 69 aa, Homo sapiens
  misc_feature (9)..(9): Xaa can be any naturally occurring amino acid
  misc_feature (25)..(25): Xaa can be any naturally occurring amino acid
  misc_feature (36)..(36): Xaa can be any naturally occurring amino acid
  misc_feature (41)..(41): Xaa can be any naturally occurring amino acid
  misc_feature (50)..(50): Xaa can be any naturally occurring amino acid
RDDKRYRIXGRVDYGCEKPQKGILXLYTQTCFKKNXQGSKXKAAARRQAXKPGLGLPGLNPVVKNQLIT

SEQ ID NO: 946594 - protein, 76 aa, Homo sapiens
  misc_feature (8)..(8): Xaa can be any naturally occurring amino acid
  misc_feature (60)..(60): Xaa can be any naturally occurring amino acid
  misc_feature (70)..(70): Xaa can be any naturally occurring amino acid
SPKDETPXETLWDPERGPPRMFPQNSYWFPQTCKIERLVSKVILSALKIEKSTSKEPVDXNNGLKKIWYXQRAASK

SEQ ID NO: 946595 - protein, 54 aa, Homo sapiens
  misc_feature (12)..(12): Xaa can be any naturally occurring amino acid
  misc_feature (31)..(31): Xaa can be any naturally occurring amino acid
  misc_feature (54)..(54): Xaa can be any naturally occurring amino acid
RVATAMLNRSRXCHADPLQSYKPLKGTGIAXSGSSVFGDVSPLMLPAVPFPSTX

SEQ ID NO: 946596 - protein, 51 aa, Homo sapiens
  misc_feature (40)..(40): Xaa can be any naturally occurring amino acid
CFIDLEMLGRAQRLMPVILALREAEAGGSPEVRNSRPPWXTNTFRVCWCMP

SEQ ID NO: 946597 - protein, 82 aa, Homo sapiens
  misc_feature (12)..(12): Xaa can be any naturally occurring amino acid
  misc_feature (22)..(22): Xaa can be any naturally occurring amino acid
  misc_feature (29)..(29): Xaa can be any naturally occurring amino acid
  misc_feature (31)..(31): Xaa can be any naturally occurring amino acid
  misc_feature (65)..(65): Xaa can be any naturally occurring amino acid
MGHTLDSHPFLXFTLLVFMSVXRSCWDSXAXVVLTNLAALLGVKYGRPLTQPNTSCDFCQPEVCXLRRAFQDDDARPGFFRC

SEQ ID NO: 946598 - protein, 96 aa, Homo sapiens
GFPGVTTYADQNMPVVKDLVHASPEEETRKHKKKHLVQSPNSYFMDEDCPGCYEITTGFSHAQTVVMCVGCCTVQCQTTGRKARLTEGCFFRRKLD

SEQ ID NO: 946599 - protein, 107 aa, Homo sapiens
  misc_feature (25)..(25): Xaa can be any naturally occurring amino acid
  misc_feature (29)..(29): Xaa can be any naturally occurring amino acid
  misc_feature (31)..(31): Xaa can be any naturally occurring amino acid
  misc_feature (45)..(45): Xaa can be any naturally occurring amino acid
  misc_feature (47)..(47): Xaa can be any naturally occurring amino acid
  misc_feature (49)..(49): Xaa can be any naturally occurring amino acid
  misc_feature (65)..(65): Xaa can be any naturally occurring amino acid
  misc_feature (74)..(74): Xaa can be any naturally occurring amino acid
MGSLIQATAGGGAIHTPTISVGKKXTETXYXCRIPVSSGLYYSNXVXVXDSSGRISVKNTSPFCXLFEQLEDLXAFQPTNFCIRVLTIFKCYCGFKEAIDSEVVGFD

SEQ ID NO: 946600 - protein, 113 aa, Homo sapiens
MHLNPAEGGRILISLQFAHGSPSVVKPSRLRTFAKIKTELHPCERVQLLSLDIRYLHNLEEGATPKSVPWDAQMISQILKDLRDSDSELIVLYDKFESGLQSEAVIVDDAPFY

SEQ ID NO: 946601 - protein, 140 aa, Homo sapiens
GGLRCRHPVGGCGRRSHSFQNKRLKLLRMARRMSCIHFDTVRPTTEMIQAYGERTLECGLRVTPYRSHVTRQDTGKGSHIHYEDDDMALPNWLYVLLHDKAALTGTGPTLGYAFSTDYTHRLICEHYLNDDSNTLGATGQ

SEQ ID NO: 946602 - protein, 69 aa, Homo sapiens
GLIDKKGVEEEPTLHMKSFCDHVIDLEGTAGSSSSSGGSKTLETRRSHYDEGPGKTFPSTGRKHVARLS

SEQ ID NO: 946603 - protein, 96 aa, Homo sapiens
  misc_feature (7)..(7): Xaa can be any naturally occurring amino acid
  misc_feature (34)..(34): Xaa can be any naturally occurring amino acid
  misc_feature (39)..(39): Xaa can be any naturally occurring amino acid
REEPPGXVLDLFKICMEELFHYQFLLAEGRGNLXFIMPXCFMQVFWFLTCTNNCTNSLVPFRPQRVLEPQSFLLCIVGEGLSARDYVAFLSYRERS

SEQ ID NO: 946604 - protein, 67 aa, Homo sapiens
  misc_feature (10)..(10): Xaa can be any naturally occurring amino acid
RSPFGTFNAXCADPPEFGSYGRHISLILGFLTLYHPLWLETTVTVCKGIALNDKTNCLVQCQNIYCI

SEQ ID NO: 946605 - protein, 129 aa, Homo sapiens
MAGKSGPAATGVRAVGSGKLRLGGLWEARERDFNRGNYGGHRARFGHKFRELEFQPTGRSKYATTSISRMEARTRKEAKVHKTGREDLKRLIAAGEIPKEDDAWGPPPDRGARQKLEIAIEDNHISLTS

SEQ ID NO: 946606 - protein, 104 aa, Homo sapiens
MDIHLFVTTAAEAISIHAQDSNSYTVPFYNDDEGGASSPTIFFSGSMDIPLSSFSIKACFEKYSYKIREVTKNGLIVTAVFKTDAELKPIPTWLITLNWQIMTS

SEQ ID NO: 946607 - protein, 76 aa, Homo sapiens
GRKTLSKALRSFGPHAPAPDSPVKTLAEEQVEQEAHAQQPRLLRIPEKHPRSRWWHFTEFEGGNKPHRKILEKGVC

SEQ ID NO: 946608 - protein, 145 aa, Homo sapiens
MCDFTDDQTVAGSKLNGHQSSGGRRWINPQILSWHSFESLQFKEAFQLFDRTEMNVKEQDFEHFLPMLKTVATNMDQGTYEDYVEGLWVFDKEGNGTVMGAEIRHDLVTLGEMMTYEEVQMLEVRHDDSNGCVNSEELVRMVLNG

SEQ ID NO: 946609 - protein, 103 aa, Homo sapiens
GALYFINPSGGEITNNHFTLTPPLKLYLCVIPGDQIRHYRRSGTTMTSGQRDTILIRFNNKVERVSDKLRGPVQSHAITATILLENKLFEETMDMRLRGVLYE

SEQ ID NO: 946610 - protein, 99 aa, Homo sapiens
ASVHVRLWILVVMALRYPMAECLNKGHYMSKNESKLMHKPRQGLVTKHTKIWSDMNKEVCGYDPYERFTMELLKEFNDKRASEIDHGVATHIRSMKKQH

SEQ ID NO: 946611 - protein, 87 aa, Homo sapiens
MAKQQLIWERTTCFPKVSWLMYTPMIIWMGSLDQASLTTILDTPVKPMNDEQYDQQVVTMWWYRDTLDEGSEFHWNHSRGPRGRISC

SEQ ID NO: 946612 - protein, 98 aa, Homo sapiens
GISEADSIRAERSRSVALAVLMLLSLYGLEAIHRTPKIQAYSRHPPQNGQSKTLNGYVSGLHTSDIAVDLLHNGERIEKLEHSWSFRQGLVYLSLVLH

SEQ ID NO: 946613 - protein, 125 aa, Homo sapiens
MDRTLLLLTTARRSHRGTSRSGRPRAAAMAVKDTGKTPGEPEETRDRIGIALTSRNVKAMKKVCADSRRGAIDASLIGGPVRDAYQDFENHYKTPRGEGSKTWDLFQMRIHKRLIDLHRPAEIVP

SEQ ID NO: 946614 - protein, 75 aa, Homo sapiens
GECMYQHRFRQRQPYTRTRNDLCNRADMNYSALIMIDDEVTVTEEKIKNVIKAVEENVDNNLASFECKSHEKRIQ

SEQ ID NO: 946615 - protein, 35 aa, Homo sapiens
FKARKPKWNLKGSPFKLTGKPERAEKEGSQGALAL

SEQ ID NO: 946616 - protein, 140 aa, Homo sapiens
MSWMFCLAPGVSKLTKLLAARASSATCDVGARVYPSGQQKDDSDFRPRSLHREVGSAEHDAPVSPADDIYDDLRKRIAYAMIIAAVHDQFIIMSHAHTVSSDGARIDGAVAFMHKLMVLRPDDQLNCKHHSVAEVPHVES

SEQ ID NO: 946617 - protein, 82 aa, Homo sapiens
GLLCCVYCKNEDYGDQSDWRHPRKCRHYSEGTRRFRERPQSNPAEGLKSHNGLKLIGKSYKKAPDCQMTEKHNGTDYRTDYL

SEQ ID NO: 946618 - protein, 215 aa, Homo sapiens
MAHRSPMDAGLNKGHKLTNNVRKPRSSRRRGRLTKHTTLERYMIPKVRGYVPTYERPPMESLKDSKDKRAPKLIKKRVGKAHTSQEETEEPDHVPGRHDEKLMPHMTEPLPRPLPGIKKARNHTLLDQLHHRSPYLSNLPLTRGRLINLAKTRAYLPYLSYTGPSTITGPGLTPPQRENLEFPNTKPFILNRFLPMVLSQRASPNRHTVGQPIAA

SEQ ID NO: 946619 - protein, 189 aa, Homo sapiens
  misc_feature (12)..(13): Xaa can be any naturally occurring amino acid
IDPHVLILIAAXXRHCANSPMGAHMAGLPTFTRPFQIETNVGNFEGTFPNNRDNDQTKNPIITLKDHWNANFFAINLPTTVSNTIMKKPPTTSHCINEFKTTLLHLTDSTHSNSAITHPPHGPNFCLRHFNRSQHYLKFVPPLSVYLLGSDNLLDTHPYSYPDAVYSSYSLSSLSFSPLLGQILQFGYP

SEQ ID NO: 946620 - protein, 171 aa, Homo sapiens
GEYLFSMRGMKYWSCCRRKTSDLIHSSAQEGCTKGKHMWTKKDAGKKVVPCRHDWHQTGGEVTISVYAKNSLPELSRVEANSTLLNVHIVFEGEKEFDQNVKLWGVIDVKRSYVTMTATKIEITMRKAEPMQWASLELPAAKKQEKQKDDTTDWVGDGRKAITLFPNFNTV

SEQ ID NO: 946621 - protein, 34 aa, Homo sapiens
  misc_feature (5)..(5): Xaa can be any naturally occurring amino acid
  misc_feature (11)..(11): Xaa can be any naturally occurring amino acid
KGLLXPEKAEXLAGLPFPRLGYLGPPYSCTNSKL

SEQ ID NO: 946622 - protein, 148 aa, Homo sapiens
GGLVLFIKFYNKLFNKTAANNAHIISYSHISLSLQPLYLYSSSFSSLLFIPSRFFRLFFLLSGPPLPLLSSSFGPFFLSGPIFVSVALFLLLGGPPPSLAAAFPPAVVGTPGGSPSLFPPAVSPPLPPLVPPPWCPLLLLLFPPGPFP

SEQ ID NO: 946623 - protein, 175 aa, Homo sapiens
  misc_feature (25)..(25): Xaa can be any naturally occurring amino acid
  misc_feature (112)..(113): Xaa can be any naturally occurring amino acid
  misc_feature (115)..(115): Xaa can be any naturally occurring amino acid
  misc_feature (133)..(133): Xaa can be any naturally occurring amino acid
  misc_feature (135)..(136): Xaa can be any naturally occurring amino acid
  misc_feature (165)..(166): Xaa can be any naturally occurring amino acid
IYFFYRARHVLVHGIPGIYGPGPFXSRIRGHMGPINPPKRASTRVLPIIEKKAPPIGGKRHPSPTRGGGVFFNTGGQEGAPPLSTKQRGGGPKKKIKGGVWKNTNLCWRAAXXNXLKIFIFFWGGGGGAALFXFXXTPPHNKKKRKTRGRCLPLLGKKKKKKKKXXAAPPPPFIK

SEQ ID NO: 946624 - protein, 161 aa, Homo sapiens
  misc_feature (5)..(5): Xaa can be any naturally occurring amino acid
  misc_feature (12)..(12): Xaa can be any naturally occurring amino acid
LDPLXKGPRAIXLIPRNSAIMAGGGIRDADSIRSEMSSSGDLAVLVLISVAGLEDIQPSPKSQDYLRYAAKSARLNCLNRYVYDLHPSDIAGDLLNKGERIEKSGSLLLGLNKDRVIRSLRPPWSYRHCDENPLTLDHVNFLQPKIVKRDRVVRFLEGWSS

SEQ ID NO: 946625 - protein, 222 aa, Homo sapiens
  misc_feature (11)..(11): Xaa can be any naturally occurring amino acid
  misc_feature (13)..(14): Xaa can be any naturally occurring amino acid
  misc_feature (18)..(18): Xaa can be any naturally occurring amino acid
VGRPIDIIRKXSXXFSKXPAAWAIAPPDRRAVGNPYERTTIFNLYAQGHRHKGNGVQRGLVGYIIKRFEQKGFRLVAMKFLRAFEEHLKQHYIDLKDRPFFPGLVKYMNSGPLAAMVWEEQNAEKTGRVIAWGDQSSISKPGTIRGDFCIQVGRNIIHGSDSVKSAEKSAYWLSLKNWLTTSLVLMTGSINEDVDTTAGSFSTVVECPWTQLFIPLTYWQQD

SEQ ID NO: 946626 - protein, 52 aa, Homo sapiens
IRGRVDTVREDDRRGLLRRLRQENCVNLGGGGCSELRSSHCTPAWATEQDSI

SEQ ID NO: 946627 - protein, 194 aa, Homo sapiens
  misc_feature (1)..(1): Xaa can be any naturally occurring amino acid
  misc_feature (9)..(9): Xaa can be any naturally occurring amino acid
XGLGSAPLXGPTGFGHYGRGGLLSIGRRESGQLSHINCTYKATPAHVQPLDPEQYHFLRVNATTKKRTGRKTLRKRLCYLKRRAGPTSSQEKAFVDAGACPEGMRHNTLCNPEKRSQQTLRKYGERHGNNLEGARPTGGGTMARRISEREKDDCIHKNYKPGPPVIPKRRNSSTRARQVLSLQRVSQFGGGQGK

SEQ ID NO: 946628 - protein, 71 aa, Homo sapiens
GDKNATKGGAALTEKRKHIKSLIEKIPTAKPELFVYPLDWAIVDSILVDRRIRPWINKKTKVYRRRRSYIS

SEQ ID NO: 946629 - protein, 166 aa, Homo sapiens
GREDSFLILGRATLITAHNERRKDYRLASRISIVPDLAEEPLVKIITVGAAQRRMSTCRYYDDEDELVLSVLRSHIGLLENIHMEQLPLRLAARLQGSSWRLAYSSLEHGTRSKTLYRKSVSLDSSVLLVMKDMVNQILVAYATHALKLTDHYWHMRSLALHIQPS

SEQ ID NO: 946630 - protein, 33 aa, Homo sapiens
MAFPKSGSTLKGKGKLEAEKFGKNPGKILVKKG

SEQ ID NO: 946631 - protein, 68 aa, Homo sapiens
  misc_feature (2)..(3): Xaa can be any naturally occurring amino acid
  misc_feature (8)..(8): Xaa can be any naturally occurring amino acid
  misc_feature (10)..(10): Xaa can be any naturally occurring amino acid
  misc_feature (17)..(17): Xaa can be any naturally occurring amino acid
WXXPWIEXHXYRSARHXVDTPEFGHYGRGFLLLTAFLAEMSRSGALAGLALLSLSGLEAIQRTSKDSG

SEQ ID NO: 946632 - protein, 122 aa, Homo sapiens
  misc_feature (80)..(80): Xaa can be any naturally occurring amino acid
  misc_feature (84)..(84): Xaa can be any naturally occurring amino acid
  misc_feature (90)..(90): Xaa can be any naturally occurring amino acid
  misc_feature (101)..(101): Xaa can be any naturally occurring amino acid
  misc_feature (119)..(119): Xaa can be any naturally occurring amino acid
MENGYTYEDYKNTAEWLLSHTKHRTSSCNNLWFWIRSLTDEINSGPDFDYMKSPTFLEYSARFMLAELVFGFLNGRACVXMQGXFHMYEXYPLLGDIPVRXSTFVVWTPGSSPMQQRVXPNL

SEQ ID NO: 946633 - protein, 67 aa, Homo sapiens
  misc_feature (3)..(4): Xaa can be any naturally occurring amino acid
IDXXFGGTVRNCVGPGKLGHKGRPGINALKAFLNLSDREEAKLTKTELENMVETDTCSKTQPISRTC

SEQ ID NO: 946634 - protein, 168 aa, Homo sapiens
GKDGNARGTTLLEVLDCILPPTGPTDRPLRLPFQDVYKMGGIGTVPVGRVETGVLKPGMGVTFVPVNVTTEVKSVEMHHEALSEAFPGDNGALNVKNVFVKDVRRGNVVVDSKNDPPMEAVGLTVKGIILNHPGQIGAGYAPVWNCHTVNMACRFVELKERIDRRFVS

SEQ ID NO: 946635 - protein, 103 aa, Homo sapiens
FSAGPGVRIAYAGLCYAVWTWLSRGKPCRYPKEGGGRNLFGPGARENGAPRGGQGGGLPEGSKRKNPPGGPLEPLLKNRGAPAGEKEIGGIGGGNKKNPRGWG

SEQ ID NO: 946636 - protein, 58 aa, Homo sapiens
MQGPGVYNGWNGKTLGVPNLNPLEENPLFPSGGIPKKAPPERPFRCPTLMGNGNGAFF

SEQ ID NO: 946637 - protein, 107 aa, Homo sapiens
  misc_feature (46)..(47): Xaa can be any naturally occurring amino acid
  misc_feature (66)..(66): Xaa can be any naturally occurring amino acid
  misc_feature (100)..(100): Xaa can be any naturally occurring amino acid
MASAYELACIYSALILYTMKETAMEDKIKALIKAAGANVFFEGGSXXAKALQKETSGAPYAMQGRXTMLKKKCFQAERPDPFIDYGSTEENIANLKSQDXGVSGEDQ

SEQ ID NO: 946638 - protein, 74 aa, Homo sapiens
GIPESDSMRAEMYRSVALPVLALLSLSGLEAIHRTPEIQAYSRNPSKNGKSDFLTGYVSGWHPSNIEGDLLTNG

SEQ ID NO: 946639 - protein, 109 aa, Homo sapiens
  misc_feature (3)..(3): Xaa can be any naturally occurring amino acid
LNXNRIGSRAIALRPRNSAIMAGGSKRNLNISTLDTGCQKLIEQAKKRNLRTFNEKRMVTNEAELSYGRKMQGICGTKQMDATTDTVSALNKDVLTHGSERLILNEGKL

SEQ ID NO: 946640 - protein, 76 aa, Homo sapiens
  misc_feature (67)..(67): Xaa can be any naturally occurring amino acid
MDNTLSHPTFLPAPKTPFPRRSLSKKAPLKKHNAEKAHFGVGKILGPKIEGKFLGKTLEKTTFNNGXLVPPPLFRL

SEQ ID NO: 946641 - protein, 87 aa, Homo sapiens
  misc_feature (6)..(6): Xaa can be any naturally occurring amino acid
GLKLIXSGQGAGYHKHPNGTSLTTRHHQKQAKQTFYEPNDAHETTTYRSPSSDLLDMLRLYSENQGGAKNVMKKDITRTRGLSLGQS

SEQ ID NO: 946642 - protein, 69 aa, Homo sapiens
  misc_feature (4)..(4): Xaa can be any naturally occurring amino acid
  misc_feature (9)..(9): Xaa can be any naturally occurring amino acid
RFCXSAPPXVGTTEFGHYGRGGKFYFERKRRVNIKSQNPLGSNTDSQEIYDNHKIPGDYHPKPPKSEPH

SEQ ID NO: 946643 - protein, 187 aa, Homo sapiens
GSVLSSERNSSLVLCRKVEIKTLFQNWQSVSEFLKQALFIENEEQEYVQTVKSPNGGFGSAVFSYPTFNPSSDVPALYKAIVVKGVDEATIIDILTKRNNAQRQQINAAYLQETGKPLHETLKKALTGHLEERSVVALLKTPAQFDADELRAAMKGLGTDEDTLIRDFVHQELTKNSYPLTGSTERN

SEQ ID NO: 946644 - protein, 265 aa, Homo sapiens
  misc_feature (10)..(10): Xaa can be any naturally occurring amino acid
  misc_feature (13)..(13): Xaa can be any naturally occurring amino acid
  misc_feature (20)..(20): Xaa can be any naturally occurring amino acid
  misc_feature (22)..(22): Xaa can be any naturally occurring amino acid
TQREGPLHTXPLXTLNTYSXNXSNWGKTPEGGKKGGKTKRRTGSRTKRRGKKEGENLRKKGGTQKKKRKEKPQEKRKTKKTEQTRKKEKKNKKEEQKTKRKRKTGEKKTKSEKDKKRTKQKKTKEADKSRKNQDKTAKKERNHNKRKKKENNTKGKTQPEPNYSAKKKNPQKANRQKREKDPNEGQDQPGEKARTRKEKWHATKKKEKRRQKRKRKAKKRENPKGTETEQNADWGKKAKTENAVKHRTNKETKRTTKKETGQTGH

SEQ ID NO: 946645 - protein, 83 aa, Homo sapiens
  misc_feature (67)..(67): Xaa can be any naturally occurring amino acid
GAFFSKYARGEGLSTLISTSPPTYTSRIEHAIGVSEHNGPAPHPLTLDAYGTKRPSLLREVQRVSNXATGYFLKIYEKVPPYS

SEQ ID NO: 946646 - protein, 106 aa, Homo sapiens
  misc_feature (17)..(17): Xaa can be any naturally occurring amino acid
  misc_feature (40)..(40): Xaa can be any naturally occurring amino acid
  misc_feature (45)..(45): Xaa can be any naturally occurring amino acid
  misc_feature (47)..(47): Xaa can be any naturally occurring amino acid
  misc_feature (50)..(52): Xaa can be any naturally occurring amino acid
  misc_feature (58)..(58): Xaa can be any naturally occurring amino acid
PLGSLAVRDMSQTLRWXSSSSGQKAAGAGRSPVCPKLRGXMILSXYXPPXXXPVVENXLRTGFNWPFKFSSKRLVNDNNAIVKPSEGKENGGPLWFSFLRVAVLSY

SEQ ID NO: 946647 - protein, 231 aa, Homo sapiens
GEYTVDCVRVLGKHAGYYTDTHGCIANRMLVIYLMQALRLRERGDACKEYIDTGMKSGVVYTMGLFELLEYVGLHTAKFIEDGWIEMDAVNPLHKPSQYLNELMADNTFGMKTGYGFNKFIDEQLSPALRRTPESAFQPMLLVPAGMLCAQTFAHTVQPNKCALVIVIYLSDYYASYSSDRFFIQNYYRLQSVAFWVFAKQIYTIGCQSTHVVRTLVIVTSGLHSSVITVV

SEQ ID NO: 946648 - protein, 71 aa, Homo sapiens
  misc_feature (2)..(2): Xaa can be any naturally occurring amino acid
  misc_feature (64)..(64): Xaa can be any naturally occurring amino acid
TXRTCLSLVPAGKDGAPECVYPYFLPENGTAILNVSSPQFLPGKWSRHLETCLVPSSCPEDGAXILNVSSR

SEQ ID NO: 946649 - protein, 168 aa, Homo sapiens
  misc_feature (6)..(7): Xaa can be any naturally occurring amino acid
MAGEKXXETGELTSPQDMSRQETSGRNQGSVSTTGKRKREAPESSSEPQRSRAKAQPRQGELKNRQARRVTTNAKPGHAKQIKERTASDRGPQRANTEASAKQADGRELCTEPKENGPQRDAKTTRQRADSPKEHACHSRRQEPVKTTPTHQAPDEHKHERGHKKAQP

SEQ ID NO: 946650 - protein, 105 aa, Homo sapiens
  misc_feature (2)..(2): Xaa can be any naturally occurring amino acid
  misc_feature (5)..(5): Xaa can be any naturally occurring amino acid
MXTLXRNRRYGVVPRKFGHEGRGLSSTAVAESQVLLARQNVRVNVDCGGYRQPWDRDDVSSLLTYYRLQEVALRLCSLELRLVIHGRADYAARFLSYTLEEKLYS

SEQ ID NO: 946651 - protein, 107 aa, Homo sapiens
  misc_feature (3)..(4): Xaa can be any naturally occurring amino acid
  misc_feature (9)..(9): Xaa can be any naturally occurring amino acid
IDXXLPLTXMSWMYCLAPGIMQPDETAVVARSDTTCYVVARINPSGEQMDDSYFGQRSLHCEEAEPNMTPQCAQLMISMRTSGTRIAYASIMEPAADQFIIIAYAIL

SEQ ID NO: 946652 - protein, 142 aa, Homo sapiens
MPNGWPERYYGLPKAQANCRSPIAECQFPVPRVHRHLTPRTSNDQPWTSTPDCHCAHIMHSVTPDLLGPSTDASCVLRLKGITDYHLQLATRYDEEWRTVIKDTGSNGCGRPHIPHSLIANRGHGQLTTGCLEPGIPDDSRL

SEQ ID NO: 946653 - protein, 69 aa, Homo sapiens
  misc_feature (5)..(5): Xaa can be any naturally occurring amino acid
  misc_feature (11)..(11): Xaa can be any naturally occurring amino acid
  misc_feature (13)..(13): Xaa can be any naturally occurring amino acid
IEAPXAPFALXIXNGLSPFSSNPANWPIMAGTTFYVVVIVHTKLRWDSCAYVGLYFVSMSDKPDMADIE

SEQ ID NO: 946654 - protein, 83 aa, Homo sapiens
FAAASTRRQKGTPIRKINPLIKLINHSFIDLPTPSNIIRMMKLRLTPWRLPDPPNHHRTIPSHALLTRRLNRLFINRPHHFET

SEQ ID NO: 946655 - protein, 40 aa, Homo sapiens
TLVKEPGIKGPEPIETQPLRELLSNSLTVAHDPRREGPIC

SEQ ID NO: 946656 - protein, 152 aa, Homo sapiens
MPVDRTFRSDSLVVCEVHPQLTEKLRKSRFRNETDTAAIIMKADIDRHMVVLTVECSEHLPKELKMADPVRHAKFEDYSYKCPHDKRYNDLPFESSNIQSCGLDATTNHDECRVYKQASAYSRAYKSVLRTTYDLTEDWLQETPSFMRRSTI

SEQ ID NO: 946657 - protein, 69 aa, Homo sapiens
GAPEISIRKGGRSIWPSDYNRDFRYTFCIRNSLEDLCKESKLDPGTGRATYEQLIDHTPVVYQDRREDP

SEQ ID NO: 946658 - protein, 132 aa, Homo sapiens
MVQVKKYLNFLVHEATSLMATIIHLGKSSLPNKPLTGDNVDRIYLCLKVLSACSPLMPDILNKVCRQSVPHMLSAKLEERTYPKEIIGKRNVTVRLRPHLLQQLPLKCKDCPAIYAELLAPWATPVEEGGNP

SEQ ID NO: 946659 - protein, 54 aa, Homo sapiens
MYFKFLRDLKVWTSKACFTKRLPAYKIASQLTLIPRPTQQEGLLKQYNSRLLVD

SEQ ID NO: 946660 - protein, 140 aa, Homo sapiens
GAQKREKRWVLTSPSWATLGTLGNLAVLSCLKDIAIYCRPEPLPLKTWKGWKNINTAWNIQGGLISKLHNEQGTTWTYVRAMIKLDLNLNERIMHAQPVTNTKEVKWHKVSYERQPFPDNYVDRRFTEELRTSMLGTYWA

SEQ ID NO: 946661 - protein, 138 aa, Homo sapiens
MAGGPIETSVFQKETNGSNGEIIGENARDPQEAKNNTTTLEATGNANEFATNLPTTEVNAIRGLHRTTAHGSCERGTGERRPADLTDENSEYTQGLDGPCCRDAARDAPNIPRSSSDIRLVDYAAVLRIKGKAHGQPH

SEQ ID NO: 946662 - protein, 184 aa, Homo sapiens
  misc_feature (127)..(127): Xaa can be any naturally occurring amino acid
  misc_feature (153)..(153): Xaa can be any naturally occurring amino acid
MAKFVIRPATDDDCSDILRLIKELAKSEYVEDQVILTEKDLLDDGFGEHLFYHCLVAQAPKEHWTSEGHSIVGLAMYYGTYDPRIGKLLYLDDYFETSDYRGYDIGSELLRNLGSFNDVTLQQLHLXVAECNDHASTTIDEEDAYDLYNDDDXRLIKIAKSTRFGTRMKTAADDDTYILFEFPL

SEQ ID NO: 946663 - protein, 214 aa, Homo sapiens
GDTQVWIHFKRATHKETTMSLLPVPYTEAACLPTGSTGTIKGRPLACFLNEPYLQVDFHTAMNEESDIDLHFQVCFGRRVDINSREYWACKQHVESNNMPFHDGQEFELSISLLPDEYQVMVNGQSCYTFDHRIKPEAVNTVHVWRDMILTKFNSSYLKKITRLHVVKEYLTVRELGIPKPANSMIFSHFNPYSCSFLIACGRILSLRVARLGQ

SEQ ID NO: 946664 - protein, 150 aa, Homo sapiens
MLFKLGQFLARGQNWAQMGKMPQRGGGKKKRGRVLKTVKREKPGGPQNKTPGKKTPFPQGGKNEKGPTKWAFKKGGPPKGERENGTEKIWKKTRKKCGKNTQFLTKGGKMGKNPYKQKKIPQKGLRVPPCGKKAPLKKTGPPNLRGKTRI

SEQ ID NO: 946665 - protein, 72 aa, Homo sapiens
GPAVFDAFFPFTWVHADRSGTAARYHGESDLELVLLIRKPCTLHVINVVIDGCLATLSGTCTCEQTFVSLPL

SEQ ID NO: 946666 - protein, 151 aa, Homo sapiens
MTKLKLFQASAGTVADGGYANEYKRLRRNSLTTRTTERAKTTHKPEDADCSENNDNMTERQQRADENTEAAKRSATRDYNPLAVHMRHCSRGHHASASYRTAQQTKNCKKLLHHRTTVSYALKERKAPVNVPTPMTTGDEHHNASDSLSPT

SEQ ID NO: 946667 - protein, 70 aa, Homo sapiens
GRRGHLNLLRTAPVSWPLRVFTIDAWDHSGYSLVTPTCVRDENMHKAVDDDVGMEMNMMIIMQQYMDDGH

SEQ ID NO: 946668 - protein, 115 aa, Homo sapiens
MHNAVDEVYWMHNALSNMLNFRYTEIDMHLDTAGCIHADSDQCNTFFRSFGDMISDTMGLRYQANNLENARLTQVVQVYRIPLKFADVVPVELPMSTIDAAAATQCRDFDRRTYG

SEQ ID NO: 946669 - protein, 66 aa, Homo sapiens
RDLVTEAFAFYRRYHALSGPLFLMLSLTVDVDLVCRTLIADSLCTMRHPRITVSEMHWTILTEPFT

SEQ ID NO: 946670 - protein, 156 aa, Homo sapiens
SQVLFTFRLMCIRNSPRLVWVTVPAVLTRGLSRETNEETIYYYCSSTGAWSERARKAYDENWLTFEIRPATDAECRDILGMIKELAHYAWTNKEYYLLTICWKTVLESTGFTSVWLQKCRKSTGLRKVTPSPLQKPERPSAMLEDAVGCAATDDTA

SEQ ID NO: 946671 - protein, 103 aa, Homo sapiens
APEGREDKGRKGGRKRKEEKGKEGRERKEGRGGEGGGKEEREGEEGGEKRGKEGRREEGKKRKEEREGERRKEKGGKEERGGGEEEEGRDRGKGGREKRGRGE

SEQ ID NO: 946672 - protein, 276 aa, Homo sapiens
  misc_feature (14)..(14): Xaa can be any naturally occurring amino acid
TSDPLHPLTAVASXRAMCRHPQRRPLWPGTTEANPDFTHAPTRKQTNRRTSPHPIKSRHQTTQQKTSKPNPGTQNRNRIPKNQNYKATTAETTEHADRANRNQTMDSTLKTTANVQRDANSSTRTPIQIRHLKHAATTNTRTHTHPPNPRRPCPRNRPPAHKAHNTRPHTKQEPQHPRDHRPPQTHGNPQRYLPRTPDALSPRHPEHSKPHPPAEQPRPQPPTRLGQAPTPTNPPPPSSRHQGPRTHGTTARRPHRAPRPHQAKVPPNYPADPPRS

SEQ ID NO: 946673 - protein, 105 aa, Homo sapiens
MPPRKGFTTLPRLTDSPGTNRTRSMLVYMLRCSLHHGISGHYHQERLSSVLYKTLKMAQVVSCNFTNLSTGDFRLLIPLPPLFTSLVDLERSSALRRAPRAVPPL

SEQ ID NO: 946674 - protein, 117 aa, Homo sapiens
MHKEEHEVAVLGAPCSTILARSTVINMHSETSVPDHVDWHLCNTLFLNWCCLVFIAYAYSVKSTDRKTVGDATGVQAYACTRKCLNIWALSGHAHDHWIQPDTGIGLCDSLPYYDTV

SEQ ID NO: 946675 - protein, 46 aa, Homo sapiens
MHTLSQAIVIDPWYLSADLTVPLAEVRIPSISHDQDLEVVTCCIGL

SEQ ID NO: 946676 - protein, 160 aa, Homo sapiens
WLLLLTTIRSAMPEALPKLSACYSLFLPWRLFCVLTSCSCLPRSSVLSYVNGPGFNVIHGHTSHITLALSDESPTVYLFLSLPHSASGMNQFTLLQAFQRDPATVGPAFHTSSNECDSSKVHALLRPSPFILYLNARPKAYLFVSELYLSAFITGASYAA

SEQ ID NO: 946677 - protein, 171 aa, Homo sapiens
EEKRKKRAHRIAEAKREGVRETGRKKKGGNRKKRRKKGKEGEKKKGKRRERERRRKKREKEKKKEREEEGKKKKKKREKKRKKKKKKEKEEKKERKKRKEERRERRRKERKKKEKREKRREKERRRRRKVEEEKKKKREKEEEEKEKGKGEKKRKREEERKKEKKKKERGK

SEQ ID NO: 946678 - protein, 182 aa, Homo sapiens
ERRWKGREEGADNGVARLGEREGGEEKGGEEERGRKGKREKEKEGKGGKREEKGEEKGEREEREKKKGRGEKKGRGKGRGRERREKEEKGRRGEKEKEEKGRRERRRRRGGRGEGGEEKGEERKGEEEEKRKRGGGEGEEQEEEKEKRRGERERKREGEKEGGGGGKEERREGRGEGEGRER

SEQ ID NO: 946679 - protein, 148 aa, Homo sapiens
TETQGFLEEGGDSKEYGHPRFEGEDGRKEGADACRANCHLRDRTVYQRRTRPQAGFRITSLKATASKIPRYNGSLTISRVGLPSTKSQFQAYMRHLGDHSDVTGGKPAASQCGLEARYKRHDVRMANVLQSDVYNQCARVPDRELSRA

SEQ ID NO: 946680 - protein, 212 aa, Homo sapiens
  misc_feature (211)..(211): Xaa can be any naturally occurring amino acid
MSRGRYGAQASRRARFKTSSGDAKERWDLPAQRREDTPTAPPLLQSESSRCPCPGRRLSIFLGPQSSKTFLRMTTRRSGCSGGARGSLICSSALTHLAHWPPAPAGVLTFQLLFPSLQTRSLRNITAPDETVHWYITTKNAFGEHLHDMMSETHQQKDTEPTNCVAAATMDASYQIYAARVDARHADEYRVLDGLVRAAPVFVRSLAHVAXC

SEQ ID NO: 946681 - protein, 185 aa, Homo sapiens
MASKRALVILAKGAEEWPTHIPADDMRRAVIKDTDSDLLEETQYSVTVMWTFVLMPAFMMQTKEVPYDVQGLPGGNLGAQNLSESGAAKDTLKEQEHRKDLIAAICAAATDMMTHEKGYGSKATTHPLAQELNDGVLYSYSEKCVDKDALILTGQEPEDQIEFALAIVEALNEHEVPPQGMLHLS

SEQ ID NO: 946682 - protein, 101 aa, Homo sapiens
DELMGSFLTGVHHEARDTPDLQKSTDAIEANLETRNMMRWELYQSSKGLYSDMPGEGVRLNRPLNTVSSDTILYALEMHKSYILLIDTSLGQLLINRNSPN

SEQ ID NO: 946683 - protein, 211 aa, Homo sapiens
SLSLQGFTGRGCEASLCKSFSDIIEGEATHAIDAGMTEQMTFRGTLKGHNEWVTQMATTEQFQDMILCDYRDKIMSMGQLTRDATNYGVPQCALRGHSDFASEVGMCWDDQLGLSGCCDRTLRLCDVTSGTNTRRYEEHTKDALRVCFYCDNRQIESGSRDRTMKLWHTVIECDTVQDESHIKWPLRVRFSRNSSNHMIDSCDWDKLLKEL

SEQ ID NO: 946684 - protein, 188 aa, Homo sapiens
  misc_feature (16)..(16): Xaa can be any naturally occurring amino acid
EKKEEERGGKNREGKXERTKTWESESKEREGRDEKREERKEEEGRKEEEKGEKGGEKKEEGKKKRRREEEGKEKGGGKKEKRREEKGEKEKGRGERKGKKEKEEERREEKKEREGERREKERKEGRKRREKEKKGRRRGRERGKERGREKRERKREGEEGEEKKKGRRKREREKKKGEKGGERRREGR

SEQ ID NO: 946685 - protein, 182 aa, Homo sapiens
TYLAGLILLSNEGGFSQGEAYPLCSGCADLCDFPKRGLDCIICVSAGLRSRCPLELLRCEEEMSRKCFWNSVFVLVFSGCDLPGQVHRTAPRRPQVGLYSKLQHFTCHSFCCLSNLILLAWTRYSLQPILSLARVSFTAALPSLPLALIFLLVTLLISLLSIRRFTPSPPFLHRYTPSPFLL

SEQ ID NO: 946686 - protein, 199 aa, Homo sapiens
ALARLSCESDIVFKPCVAIPDAPSRCPGTTVRSGSPSTSLRSSYYPLITSRVLSESSRHVSLQADAPSCDRAFTRWQICIGTFTSDAQAHTRAPEDQTRHLLIGVSSERGLCLAIHSSIAKQVQCQVAPLTAAGKEPIPAPTRDQIRGIPLSASLLPISWLPLKHSSRKPPTFCTRFYSFSSDILSSLLLLSNSPSHLN

SEQ ID NO: 946687 - protein, 149 aa, Homo sapiens
QPGHYGRGGRGLTRLILAPRETEGERGGMRSRDSPPTYGGRVAPNKQEGAAGPWLNTQKQTAARGTAAPSPGQEFENRHTHKGKPRCEERNQTPAGRGGTPTETHSPGRLRQEDHQTPKPEAAPSPDPTNDPQPGPEHDSRANMPGGGS

SEQ ID NO: 946688 - protein, 177 aa, Homo sapiens
  misc_feature (110)..(110): Xaa can be any naturally occurring amino acid
MLWLNHALPSRQWRLKIRYLPLPTHRTRPILRIISLLRNLKHRHYPPACNYSNSLHRLCPPVRPNIILRGHSNYKLTMRHPIHCDRPRSMNLKRLLSRQSHPHTILYLSXYLTLQYCSPSSTSPSILAPNGMQRPPKDQRPIPINHLSTLLHIQRRPRLTLLPGLLMDYNHYLTWTS

SEQ ID NO: 946689 - protein, 135 aa, Homo sapiens
VRHTMLTVSVKRDLLFQALCRTYTDQEFDELGFEFGLELDEITVDKEIISKEQGNVKAAGASDVAIYKIDVSANRYDLLCLEGWCTGLQVFKERIKAPVYKRVMPDGSNIDYTGETGQIRTFAVAVNLRICLLDR

SEQ ID NO: 946690 - protein, 112 aa, Homo sapiens
MGEIASSDKAKLNKTATLEKNTLVAKETIEQEKRLKFQDPGGFPTPVLFSDPSRNVGEEPPARWTRATSCTVNLGTSAPMPPACGALKGSLPNRTAKILGLPRDIIDYQSEL

SEQ ID NO: 946691 - protein, 189 aa, Homo sapiens
  misc_feature (13)..(14): Xaa can be any naturally occurring amino acid
EKRRKESEREEGXXKETDRMESEGRGKREGGEEEEEKRKGERGGKGEKRRERKGERERKKGKRKGKKRKKRRGRRKEKRKGKKRREKGKKEKERERGKRGKKRERRRGERKGGREKREERKEGRREERERRRGRGKERKRGKKGERRGREKGEEKRRERKEKKERKGERERGKRREERGGKEAKGGRGG

SEQ ID NO: 946692 - protein, 83 aa, Homo sapiens
HWTFRPARVCLALFPSSWDTDAQRHTKIIVGRGERPGSTALGQPYLDLRTSGDEPDLASKSSVIQVVANVPGLIKIVNHRMEP

SEQ ID NO: 946693 - protein, 129 aa, Homo sapiens
NLKRQGKGGLSGHRPSIADTTAALRSTQKTTLLKPSLNTILTQSQKMHMEEHEVAELEAPTSTILPRSTVINIHRETSVPDHDVWTLVNTMFLNWCCLGFIGYAYYGTSRDRMMAGDVTVAQAYASTAK

SEQ ID NO: 946694 - protein, 171 aa, Homo sapiens
FKELISSMREMPDHNTIIKQLIIQMGRSLINAAFTMITRANPVNVIIMIKRREPGSTLNNKPASILIKNIAPAVLNTMIMAYTGTKLATTIATKESKNRYITPAMAAFILLISLLKPYIQSNNNPMATYIGGESYLVAVISIYLAPQASPAVATKPKAVMSHIPFNILASC

SEQ ID NO: 946695 - protein, 191 aa, Homo sapiens
RHGTSGDAETRTTKRARATIEHPWDTPQSSKDDPTGPRAIDAGHANSGIRVGGGTDKDIFYGEAAFNITRQHHPGKEHDGGDEQHATRTAPEAADTRPPTEAPHPTGRRATVRRGAHPRPATRPKTNASAPEGAPPRAPTRTRHGGTPPRTQRGRAGARSARQRAQPNYGNPDEKKPETKDEGKNNRARPG

SEQ ID NO: 946696 - protein, 142 aa, Homo sapiens
TVFDGRGFNAYHREILRGAARYSEGATYSSKALVSLLSAYCRDSQVTTTVFMVVTWVTLVRTYWWNRLKRNYFSIRGTLQLSHNLSLLGYVDYSPRALVTSVSLSQDAPITTRSQLLILTHDPAYSSVVPCRLFEYSILLNW

SEQ ID NO: 946697 - protein, 119 aa, Homo sapiens
NNNESFLYRIVMCAKRWILYDNLAMTSSVAGLKEAPKHFPKPNLLQKMVMVIVWWFAASLIHYSFLNPGETITSDKYAQQINEMHQKLQCLQPALATRKGPILFTTTLGRTLHNQRFEN

SEQ ID NO: 946698 - protein, 99 aa, Homo sapiens
VFKVKTVFVMHVRRVYSVGDSKLDPPMDACVLTAQVIILNHPFLLTAGYAHGSDCHTINIACKFAELMDKIERRSGPMLKEGLKLLTPSEAAIGLLGPG

SEQ ID NO: 946699 - protein, 303 aa, Homo sapiens
  misc_feature (11)..(11): Xaa can be any naturally occurring amino acid
  misc_feature (21)..(21): Xaa can be any naturally occurring amino acid
  misc_feature (29)..(29): Xaa can be any naturally occurring amino acid
EEGERERGGPXGRSHAHGKTXGKEQEKKXGEENTGKEEEKGKREGKEEEVGEKEGRRKGGKKEREKRGTKKAKEEGRKEARGEKDEGGTKESREAREEEKGEKKGGRGRKEKEQEEGEKRGREEKKGERKGEESGGRKEEEGGKGKGKEKGEEREKGERGRERREKGREGQEEGEEQREKERRKGGERGGKKEERQGGRREGGKRKGGRKKGEGREEREEEEEKKEGKRGKGGKRERKEEEEGKRKKKERRERAGEKGKKRGRKRGEREREKKGKGGEKEGKRGGGEEGEGKREEKRKRGKEE

SEQ ID NO: 946700 - protein, 252 aa, Homo sapiens
GHYGRARWFMPVIPALWEAEVGGSPEVRSSRPAWPTLVKPRLYQYISWAWWRTPVIPATPEAEEELLEPGGWRLHAAVIMPVHSSPWSQARTSGSHLYSSIRYALLLVLHWYPSNTHVLTPASTGLSSFYYMSSYHYLPTSSLSPFSSQFYPFSLLLLRTDLPIFNLSLPSFLSASLLSFTTPSSTSPLSTCLAFIPFLSFALSPSHHPPSPLPHFHASTPLPTYPLSLSFHPTPALYSRPHPSSSFTPPPP

SEQ ID NO: 946701 - protein, 217 aa, Homo sapiens
  misc_feature (10)..(10): Xaa can be any naturally occurring amino acid
  misc_feature (27)..(27): Xaa can be any naturally occurring amino acid
  misc_feature (168)..(168): Xaa can be any naturally occurring amino acid
MYAEARNGLXCVAALLLYITPKGRVSXDSYDCGVLRRRENYHGRSAGREEALCTLLTDSGALCTYNKFTLAKLRRSICLQCIALLPQCTYTVTLSLDLDHVCRPRSLASFFDAMRGISLQLLVPLDSRALARDRTYERHCDCVSCILLLGINHDPKTIMHRLSRSRYXGTHKALPQSTHVPLVHERPQYATIVGNVQRAYRSYDLQPGRGLIIAFHP

SEQ ID NO: 946702 - protein, 289 aa, Homo sapiens
  misc_feature (129)..(129): Xaa can be any naturally occurring amino acid
MNRSCLDHVRDERTETSSYYYGTPLSLYRMEESHHLQRSTHLTHRDAHAAITCSATSDRRQAQRDVISYLTHDILMILYDTTSRAIDIELSDAYATCTQTANQPIMTDRPHLDNMTMDTRQASDITTHXSLTYPHIVSHKYSDRTYHYFITQLHRLMIDVYRDNGISMSARDTLGPSTVYEIETQALIRLHAVLTRMHIRPRRSELDIGTASTSIATNVSTLISGVRPASELPYIRALSPDINLTIDDTLTSSARVPTIRTNTKVVIALRAYSDINAYSLFTALSHVTK

SEQ ID NO: 946703 - protein, 144 aa, Homo sapiens
LSHQILDRASSDRGAGYDYMAPGHATHPAVPMALGGGYHASPSGGGKALSESAVIPVMSYGEALKEGVAVTARADSCLYSEHFESLSGAESRCQELGTILDSTAKPYLSYNHCRLVCRGDERLQCQTRASREPRNRFNLCGEAS

SEQ ID NO: 946704 - protein, 126 aa, Homo sapiens
MDRKYIRNYIVYYSCQGFHGVTTDYAQRAYRHQVACTPFSGLYTFSRRIHLSSSWRLQPGSALVRFPTFRIVPKSYFIQFADLNAIFSRLGLFHNTAVRRIAPFSIMAQSLDLMYGGFYSSYFAKR

SEQ ID NO: 946705 - protein, 70 aa, Homo sapiens
CVELGVSRLRYVAVARNQAMPFAHGHDDQDHEGELCVVSAHDGLRPHRCFRVTVCHVSPFDDYVCTDYEA

SEQ ID NO: 946706 - protein, 76 aa, Homo sapiens
HNESTLWRQDVASAGDMTGLSQGVLDRQKNLGREDLHKVQRLDDDISADVRTQRYSRIMQQMKEEEDEKTRLPKML

SEQ ID NO: 946707 - protein, 249 aa, Homo sapiens
  misc_feature (206)..(206): Xaa can be any naturally occurring amino acid
RLMTRGPYTFRGYYKSPQHNASAFDANGFYCSGDLISIDPEGYITVQGREKDQINRGGEKIAAEEIENLLLRHPAVIYAALVSMEDELMGEKSCAYLVVKEPLRAVQVRRFLREQGIAEFKLPDRVECVDSLPLTAVGKVDKKQLRQWLAVTRISLKERTDGYSLQAYALAESHDIPQNKVDWAFEPQRAALLIHDMQDYFVSFWXEKLPDDGQVIANIAALREYLKQDNIPVITPANSKNRTMSAAVC

SEQ ID NO: 946708 - protein, 218 aa, Homo sapiens
TFAEVTTYAHENMTVEQDILHTSPEEENRNHKTKRLEHSSKFYFMDAKCPQCCTSTTCSSHAQTDDSCEGCCTEHGQPTLGKARFTEGCAYKRKQDCTLSKEEWETISMNTFRMMDGDVTGAQAYAYTDKCLNISCRTLGTIMIRVVLLPGCRNASYYANMPRESRITSHCTRLYKSGLLELSVNRCNCTVGHAAFGSLCKPEMHQTYALPRSVTCER

SEQ ID NO: 946709 - protein, 77 aa, Homo sapiens
EHNQNYYTKTNNINKGETQDINGNPHKTTKGTNTLKKPTPQNKTKKTKPKIEINTITKKPPTTHNTKNERKTIKPPQ

SEQ ID NO: 946710 - protein, 137 aa, Homo sapiens
MARDPKKHLKRLAATKHGMLYKETVAFAPRPFTVPHKLRERQPFMIYLRYRLTYALTEDEVRMICMQRFIKIDGTVRTDITYPAVFMDGISIDKTAENCRMTYDTKSRFAGHRITPDECTDRLCTVRIFVGPGPSFA

SEQ ID NO: 946711 - protein, 251 aa, Homo sapiens
IGHKAGDSGRQPEVQHKPRRAQAQEESQKAPRDEERKETRTPTQRRRGKAESDSNQSHRDSENKQEKEPKRTENNRDHRKDEEDEPTREPTDGKQEDTQTTHERPTEQTTGPTNHGDPNEKKAQDSAQEQRKRPKPMTERAKTRQGGTTTKAISDNSRQHPKDRTGAARTREKTDTEGRLNKAQNAADGERQTKTPRKDESWQIKTKRRPRKINKGQHKKANPGKKAEKPQNKQDDKRCPQATRRNKASGR

SEQ ID NO: 946712 - protein, 94 aa, Homo sapiens
ELSRLPKTEKGQRGRGTCKEDSPTRIDNATQRKLEERQTKEKNTKTGPRKTKKEEKKRKQNDRNKEAKGERKTKQSNGVKTEEKEKNLTEKKDR

SEQ ID NO: 946713 - protein, 140 aa, Homo sapiens
SSNVVHCDPTMASRIRDLITQREVTRALLGGLNECDTLELTLESRRLEVAKPNSKDSYNANGLCLPVGSTVRYLYLRGGAEDASMTKIYGGRQERSYAQPLQLSFQERDPVGSCTHCGVLYPFCLLPKLADLSATRRFTL

SEQ ID NO: 946714 - protein, 136 aa, Homo sapiens
MAGSEAADVIEGEAWDNQRIRATMMNRLLKDMRIKLLMSSYLWSVPMNKSTCIAFMLLTSVNDARVTIVRVQEQTRCCQWTRFMSSGAIRYKNVTRVSSYTRATRYKDIDMSMDSDLRKRYIDLVARYTGGSRAMV

SEQ ID NO: 946715 - protein, 144 aa, Homo sapiens
GRARCRIPDLTEICFTKASMANKMEQIANAQDDPFDRDIINIKSMPMNEPQTTCYDSNTLYALTRYSRLVQCSRRTRSSEMTRYQALRGYQLQQPYTGYLKHTGSEDMELRIPQYTSMAKRIIDYVAYTRVSRAIRRRLSPYEV

SEQ ID NO: 946716 - protein, 177 aa, Homo sapiens
MAEDMECMPVTKLIRLLKHMRIKALAEKYLCLLPITESEIIECFCDALSRMRLRRLSQSARAVTDRDMTFTAFAAIELYNVQVELDDTESMQVHHDLGDQNIVIAPVHQLGLHELLFVTSANADLLIVSASADAVADIVMHTSTMTSAFNVALPDIVNELSIITTASTLACITQVVD

SEQ ID NO: 946717 - protein, 115 aa, Homo sapiens
YDSYLIYSAIWEIMARMVYKFERLLTAWTTHLIEVISIKSMPCDHLMFIAMILIDSITDSVVIIVTVQLEEQTSVLTHYQSRLCNSISTLLALPDYNGRMDLDVDISTYMSMVMT

SEQ ID NO: 946718 - protein, 206 aa, Homo sapiens
  misc_feature (13)..(13): Xaa can be any naturally occurring amino acid
  misc_feature (21)..(22): Xaa can be any naturally occurring amino acid
  misc_feature (24)..(24): Xaa can be any naturally occurring amino acid
  misc_feature (32)..(32): Xaa can be any naturally occurring amino acid
  misc_feature (41)..(41): Xaa can be any naturally occurring amino acid
TRTHIPTQRYHTXHSTPHCNXXSXTTHDHHRXPMQRTEPNXTTQQDANNSHMTTNNNMKYHGDNPIPNATTTNDPNLITAALLLLSLPVLAAGITILLTDRNLNTTHTQPHQPTNQHKTQKPNPHTTTPHHQPHTTHLTHTKPTTHQPPPPQQHPTTTPPNKPTNTTQQQQTQHPQTNPNKPHNPNRPLPPPKYTPITHTPRPNNY

SEQ ID NO: 946719 - protein, 77 aa, Homo sapiens
GRARCLMPDLSAICFTMARMAYKTQRLLMVLADPLAIVITSLKSMHWTQSRAHTQYYPYSLCTDSEVTISPVKVVDQ

SEQ ID NO: 946720 - protein, 78 aa, Homo sapiens
HYGRARWLTPVIPALREAEAGGSRGQEIETILANMVKLRLYYGKRKKIGWALVAGAFGPSYSEAEAGEWREPRRRNLQ

SEQ ID NO: 946721 - protein, 226 aa, Homo sapiens
LPLRFFAVMADRKFSAPRHGCLGFLSRRRTSRHCGKVKSLPMDDPPKPLHLTDFLGYMAALTHIVREDNRPRSKVNKKVVLEPATIVQTPPMLIVGIVDYEETPRGLRTFKTVFAEHISEECKSRSYLNCHISKKTTFTTYCKICHDVDVPKPLLDDSKGMKMDCQAILVLAHNQSPCFFTAQRKANLFEYPVDRLHCVQLYCSPLHGSTGPYEPRVWTGEMFHGL

SEQ ID NO: 946722 - protein, 105 aa, Homo sapiens
MSDHGDVSLTSKDRMRPLSQMSRAVDVNEDIPTRDTFSSGVEIIPMGYIYSDEGNIEHAFMLYNKYMTLSIEKLPKHRDYKSAGIPGKTQSEKLKDIAFSKAEEL

SEQ ID NO: 946723 - protein, 228 aa, Homo sapiens
  misc_feature (4)..(4): Xaa can be any naturally occurring amino acid
  misc_feature (16)..(16): Xaa can be any naturally occurring amino acid
ALCXPHSSITRVYHPXPLLTLPRVTPQALDSMHMPLFFCGHLRRQRLAPKPRLDHTHAIERMHSSKKGNPRRTEASVTKGSPIIEPYFSQEETKGGNQQRYPTCAKEKAQQRGRTQPTGEKRIVDTAKNPRYPHKTLNNCRHMQNPIRSPTPFQEGGLRKHNAHKKSGGKTTDTLLADNLPREPPTGGEKGEDLSIGSTPISGNADKAQTTQMNQKNPPHTKLTKDPG

SEQ ID NO: 946724 - protein, 116 aa, Homo sapiens
  misc_feature (95)..(95): Xaa can be any naturally occurring amino acid
  misc_feature (108)..(108): Xaa can be any naturally occurring amino acid
MSVETISGHVLDGLISHLLRSHFEDSLTLEYHITLMSDNALLNRCTIAIGTSHVTYSNNDSSSKVACIHQLHQSTLHVDDLRSAVFRPHYEAKYXFIRIDAMHLSERXTKWRIHTR

SEQ ID NO: 946725 - protein, 177 aa, Homo sapiens
  misc_feature (17)..(17): Xaa can be any naturally occurring amino acid
  misc_feature (27)..(27): Xaa can be any naturally occurring amino acid
GAGERGGGARKSVGKRXPWRAMATGRXERRRGPGRGAGGRGAEEDAELGERGGRRREGGDEARREGPKRGTRGNPGGREGAKKGSGRSGGRAEDERGGRERQEKGENPGGGGEEGAEKGEKGGRQGDRAREGGGREEEKREARERGRGGKRKAKKGEREDERRAKRARGGERERRRE

SEQ ID NO: 946726 - protein, 72 aa, Homo sapiens
MSNHHQSSALDPYFAYRIVTTSQYVAFTTQYASPLTYCQNTLGYDPRLTGQIMTRLLTGPCLLCTGPIALRF

SEQ ID NO: 946727 - protein, 169 aa, Homo sapiens
MPKTISVRVTTMDAELEFAIQPNTTGKQLFDQVVLIGLRQVWLFGLQYQDTKGFSTCVKLTKKVTAQDVRKESPLLFKFRAKFTLRMCPGNDQAITKRCSSAGEEGILMDDITARLNRCPAAPHAGQSKKATSIRSAKARLLGRNQVVPERGLDRLLQDHWEERTQVAL

SEQ ID NO: 946728 - protein, 139 aa, Homo sapiens
MHDIDDQPYSAAPRLPTQPYLFHTTSQLLAPSTGPLHPHPPTPAFASPLISHHSLPPHHPITIPPPPPLHSPPPPLLPSPLLPPPPSSPPPLDPTLRLSPPPLSPPPFHHPLFPYHLTLLFHPPRSLSLSHPLPSPPSA

SEQ ID NO: 946729 - protein, 189 aa, Homo sapiens
QDSLSVRYAGLPDRAEMPKVEETLKRLRSQKGVQGIIGANTEGIPIRSAMDNGSRTQYDSLMHSLILKARITVRDIELENDLTFLRIRSKKHELMDAPDKDYVLNVIQNPYRVATLWLHESLLNLMCRKNDNVNDVSELMTWKMVGPTHSHPVTVCGLAAFYLTTEPLRDSTFPEIRSPYLTPELEHEL

SEQ ID NO: 946730 - protein, 217 aa, Homo sapiens
DTDLHRLGSSAMSPSRKVFADGNWKMNDRQQRLEELIGTLNALKKPASTEMNSFPPNELHRLDRRKLDPTIAEDAQPWYNVRPEAVNWGKNHWHDQHLPQDALETGALSANATVSCVTEGTPPPMCPPISPVCPVSPSNLVRLISRKVPPPHGHGPPPPSIAYPLSGPLSPIPYPLSPPPPPLLLSSSSPRHPRPIRSIVLTPYHRLSPPSPRAPPL

SEQ ID NO: 946731 - protein, 238 aa, Homo sapiens
RAKRPGSLKRRTQFKTRPKGHSKRGTTPTPRSTNKQKTTRQQNTQTKTQTQTTTQRQTHPKKRRRPNEANNRQHQNRATPAHRANKAKQTTRSELNETPTQQTNAATQQHEQNTHQLKEEQQTQTRQAENNKKADNQRAPTGHQQGTNPTTTKRPQEARTPRTTSLTPSTESPTTQRHYLPPTTTQTKDPKHPQPSKQPKQAQDNTKSTEAKPTPHKSKHPKAEPAANQTQTHPTHRR

SEQ ID NO: 946732 - protein, 140 aa, Homo sapiens
MPLHSSLGNRARLHLKKETLEKSNRYQLRKNVGINSFSFHNSLDPVAMPHVLTPNTLVGRGGCITCRQQLTTGPYHMSKLPSLINIPPIPHMLPDACHPSSFGTHGRLTRRTQDPTAPRVPLLPYTFQPVPYGLAPPTLR

SEQ ID NO: 946733 - protein, 72 aa, Homo sapiens
RADVGILLIAITHRERHPRDLTALLLMPTNPTCVLPDVGPDYIFLKVRLEQTIPPAWHLVRIPDGRIGVETL

SEQ ID NO: 946734 - protein, 96 aa, Homo sapiens
VIDIVIILAFTITLLGVLVYGSHLISSLLCLEGVILSLFIIATVITLNTHSLLANIVPIAILAFDACEAGIGLALLVSISNTYGLDYDHNLNLLHC

SEQ ID NO: 946735 - protein, 242 aa, Homo sapiens
  misc_feature (171)..(171): Xaa can be any naturally occurring amino acid
GVADVDGAGAEAAELRGGKAEDKERMPVSKMSRLVKDMKIRSLEEIYLFYLAIKESEIIDLFLWAYLKDEVFEDYASAQTRAVQRTRFKALGAIGDYKVHVGLNVKCCKEVFTDIRGAIILDKLYIVPVRRGYWVNKIGKPHTDPCWATGRCGSELVRLMPVPSGTGIVCXPEPYKLIMMAGIDDRYTLIRGSTVTLGLRHGHFWMPYEDLQLPDTGSMQAGLVNQDSYQELTATSVSSPVC

SEQ ID NO: 946736 - protein, 267 aa, Homo sapiens
MAKERPCTLRGPKKHLKRAERSKPSLLRKITAGSGPTPCTGPYNLREGLSMMRFLRIKLKCAATGDDDWNILMQGYIKIDGDARVNVTYPVLSMCVMRMENTGDHYPLTYHTQDQLKKAHNHNPGGPVQVGLRQGDYWGSEGNSTPVDFMTLEPSNTHNRTLSANHRGTHWFTDLAILSTVMQIGCRPFTCLRKRRNQPLFGETCYHSQGKDFAGLLNGGPCKRMPVRTRSTLRFTKNMVLEGAKYVEFAQWGKGVPLSFLRRISGP

SEQ ID NO: 946737 - protein, 114 aa, Homo sapiens
  misc_feature (32)..(32): Xaa can be any naturally occurring amino acid
MRLLGYCLAASHKRDSNTAQSVRETMKTYKTXPDEGKDRRLLIMTAVEMKLYMESNLYLTENWKIGLHSPECNTTRMALLVDENEGDYTAHSIDQKLQVITIDGRPSFTKRLDA

SEQ ID NO: 946738 - protein, 141 aa, Homo sapiens
MTNAFNRRIEKAEVCEPQGQESKTILTSMAKLWLYQNYRRWTYWSMHDSPDTHKTVLDTAFEPKSSGMDGAEIEAIAHKPGRKSIDSAYDRTKSWLEEFCQACFLQSNTCNASSMKGRGRHATCVHRLRTRPTTMETACLF

SEQ ID NO: 946739 - protein, 68 aa, Homo sapiens
EVSDLFSLAAPLGSRCIFPLRGSHWRLILVQPVPAKQKAKALPTGKSAMASVTDSMSLVHFHGERYLQ

SEQ ID NO: 946740 - protein, 148 aa, Homo sapiens
SQSDERRWSWLYTSNQTDPFFSPVKSGEALIYDMPMEEQEVAVMWYRNNPDPQTWNVSHIHSETLEAEHATGALLRPSYEPVMHVSIDYGYSAMTMHRMTDGDETVAQSYVFNAMRLNIQDPDFAKRIYILRICHSSADVPGYWIGGL

SEQ ID NO: 946741 - protein, 176 aa, Homo sapiens
MAAGTLYTYPAGGAFKALIAAQYSGAQVRVLSEPPHFHFGQTNRTPEFLRKFPDVKVPAFEGDDGFCVYESIAIAYYVSNEELRRSTPEAVAQVAQCLSFADSEISGPASTLRGPTIVIMHHITQPTVNAPLEARRTPLLVGYLETRAFSAELTQIRPPVTTRCPPLCGRIVWECA

SEQ ID NO: 946742 - protein, 45 aa, Homo sapiens
MCHSVASRPYRLPQYPGLIIQPVPHIHLDAQFLRKAGFVLVPILA

SEQ ID NO: 946743 - protein, 106 aa, Homo sapiens
LRVREHVTDGICDGSQMMHALLGATTLVLVDVAPWVLSVVAGGKNLKSPQKVEVDIIDDNFILRRNRRDESGGNVTFSFEYQKTAMDNWIKTSGRQNITSTKCNFV

SEQ ID NO: 946744 - protein, 132 aa, Homo sapiens
LSFRLNSAMRKANTDAYKCIHESMGKEAVGCHALSSEGTLVGVSDSCMLSTDLNVLTGLNKRANCWYKAKIGYVIHRICVLRGKGAQFLMEQLTGSLNIMAVNRYMATLNLEIVDEERGARHMGTMTVRKFY

SEQ ID NO: 946745 - protein, 141 aa, Homo sapiens
DTDLQFLECRAMAPYRTAFADGWQMNARTRTSEAAHRDSDKRSRCRPTPSRYAPLYCPSRLRRTSPTSQDRRRSAPRQPSHQRNRPQGTERTASASTVPPTTARPRTLRAPDGPYPVPAPHTGPMAHAPAPPLAPHTTTPP

SEQ ID NO: 946746 - protein, 161 aa, Homo sapiens
MPGPPVSSRAISYPARLLLLLVVYTITPPLSLPLVSYLFSHPLSVLLTLLSLRCSLPYTHTVLRHIPPYPISLARLSSLLLTLRVAIALPRFSLSSRRSLIMSLAALSCTLTRSSPLLFLSLSLSSLSCTYTLVALQLSVRLFSVMSVLTRLPLPAVPLSL

SEQ ID NO: 946747 - protein, 141 aa, Homo sapiens
MADLSLLRRVLVTAAAALSGRPLGTSPRIWGLPNYAAFRRLLLLFDTVETMLKDYLPSDLLDSMTGVFRSYVGFYIALTGIPGATFITVAKVFIAQAELAEISDRYGPEHWDNYQHPISGRLARTLASPRTLHITTRRPSP

SEQ ID NO: 946748 - protein, 137 aa, Homo sapiens
HQQQLKRFSFFIKKKWNQLSSSKNSSPNELPTDFGEEQREAPAVPDWQHKLSSSKKNLDASENGAGQICELPDALAEGHMRWCSHPELLTSEDHEVASANALLHEHEPYGNAYRNVQTAHHSARTPPSRPPSPLTSL

SEQ ID NO: 946749 - protein, 176 aa, Homo sapiens
LDERRTPEHAYRKGIIFIPLEKRTRGNHMMKRLGHSPNSYFMAGKCPECYKFTTFVSHAQTVILGEAAPLDSASLQEEKHGLQNDVPSGRSSTKSTLSQYEWETMSIHTFCVNLKGNLCCSLVPASANSKIESILLMHGAKIQIFLARFALLGGSLDLFGRSFTTDAIGKTLASPN

SEQ ID NO: 946750 - protein, 116 aa, Homo sapiens
ALAYGYLFPEYSLALGPEISPGILSHELRVQSKVGHTTHQPAPASTLNQPSVPELSAFVDYAQQSSPGPIKPAILGGPVERLTEAASARAVGAAAVECPGPGARGDGVNNYHCLVY

SEQ ID NO: 946751 - protein, 108 aa, Homo sapiens
GFPAVTTYEHRTRLLEREVLNPFPEEERRNPRRKRLVQSPNLHSGMKSAQWVINSPGFLPVHKRNLCVWCATVACETLGGEKQGLQRDAFEEEPLKSFLGQEEWDTIY

SEQ ID NO: 946752 - protein, 233 aa, Homo sapiens
RCRIPHLGKAWDTKWRPVTKMDRLITDMTIQSLEVIYLLSMPMNESEIIAFILLDSVNDAVLTIVPVQKPTQTASVTRFQSFRCISYYNEHGYLHAKCCEDLAIGIRKDITMAKALDRSRRDILRNKIANSHTEPLQDDSPLSFHAAPTQPCTHGTATAFRHCTNIFTHMLTPTSRRPITSLHCHPWHLVNATLLALPLTLLDPYTLNATRSHPLASYHDNLTTPFDPTVLLF

SEQ ID NO: 946753 - protein, 138 aa, Homo sapiens
DFSEIFSLPLTHMRIQGMHLILQMSLVDKKLYFEWLSMEHASSPASSWKGVSTITWPTTNRSPPIIPAIHWTPVRGFIFSNTALKNALLRTNTQYPASTVFPPSPTFLSQFLPVSRFVSDLSLQLGVPSAILSYYACC

SEQ ID NO: 946754 - protein, 232 aa, Homo sapiens
VDTYFKRIWFTMARMADKTERLLMDRTSHLIVVIKIKSMPMTELTSTRCSPIHSINDSRFMIDPEQQSTRTSVVTRFHAADASVTALFQLTCSQWQRDTALAIAKYTSMVKLSTDYAGDSCGHNLFPCLPSTMNVSATSLSTLYSPPSHQLHQNRYHLSYYALPTPLPLLLSLFPSLPLPPCAPLTPTFAIFPRLPLFIPYFSFSLSQPPLPSSLPPLPQPASALSVYPTPS

SEQ ID NO: 946755 - protein, 141 aa, Homo sapiens
VSLEALYFEAVMANGLDKWITGIDETAVLHREASKLNTLQLEPQLALLARQLAQTEHYLNNLMAHLDLLFVRVTTLAGAQQELLNMKLWTIHELLQDSKPDKDMEASEPAEGSIGESAGGGDIVSAGIPCLCRHRGQQTFP

SEQ ID NO: 946756 - protein, 134 aa, Homo sapiens
MAAATLYTYPGNWRAFKALIAAQYSGAQVRGLSEPPHLHFGQTNRTPEFVRKFPAGKVPPSEGDDRFCAVDSNAIAYYVSNEELGGSTAEAGAHVALEASFADSDIAPPASTWVLPTLGMRHHSRQATENAEGA

SEQ ID NO: 946757 - protein, 138 aa, Homo sapiens
RLLKDAVFTFTLADRANPVELGILGNTPCTRRGHESDFHEQGARPVHAGNRHLYSEAVGDQNMENFGVSNIAWSCLDWIAAGTIDAGSATMGYLAYDFMLKISESSMRSRPIQNDNPKKHAFEMEVMDTAGYRRRLWA

SEQ ID NO: 946758 - protein, 252 aa, Homo sapiens
  misc_feature (3)..(3): Xaa can be any naturally occurring amino acid
MAXATGIKMLILDYVEILSTFKSKDLHLIKLLNYYPHFTDGKLNINGSDSNLHNLDEKFQNNIATDLLKSQLKEKPVRNKAINYCTVFSFGYVNSEIPIRPPRYWEKFARDMATGDTNARARYLKPLDLTEENTQGVATNKDAAGLTEPCEPSNIYRQGRHGRLALTAKASDGPRPDIQYEDTNGPAPVLANMRNPALIKPHITGLARLPAPFLHPSPTTVNPAKRLSVARSALACLATRHASSHTPPVPGA

SEQ ID NO: 946759 - protein, 80 aa, Homo sapiens
  misc_feature (80)..(80): Xaa can be any naturally occurring amino acid
MKKGREEKRKEERREGKKVGRKERGKEKKVKERKEEMKEKKRKREEEEREREEREKKRKRREREREGYREREEREKEREX

SEQ ID NO: 946760 - protein, 142 aa, Homo sapiens
GGYCEYGGVKGEAGHASGGGLWAHRLHNVRCRAGGLPRYRMLAIGIGTLVYGHWSIMKWNRERRRLQSEDFEARIGLLPVCQSETGRRTLQMLRESLEEAAIIMKDVPDWKAQSAHQTSHVTATPRSLAPHDGAHYAGLYSI

SEQ ID NO: 946761 - protein, 144 aa, Homo sapiens
MTLGGQCELVLQKHMKKHSDSDMGKRRDDDLSAAARKQRDLEIMHHKQKKANENNEEPKSLCSYAFNPLPFACVPGASPTTLALASVVITGTSTDSIAFALSLHRYPFALTSPQVASVPLCHSRGRGSYPFPELFIPERLTPMH

SEQ ID NO: 946762 - protein, 93 aa, Homo sapiens
MAGPTYAESKPGYPVDSEEVLTMEEAKNALGMAFTSGHTCVIRGLKGNFGTDLKRVIGNRLYLLQTKTFNQTGKCKVMQPDKIREWGLTGRFG

SEQ ID NO: 946763 - protein, 118 aa, Homo sapiens
MRGALNADALEDESRNKTRTYDMNSGKRNFAFYEFWPFWFTLLECCGDMTTTLENYSYEVNTWEDPVAKQLAVTAYDKPVLLLDLETVNLYKVKSQSSANQTCLYERPPRILHMLAVF

SEQ ID NO: 946764 - protein, 151 aa, Homo sapiens
  misc_feature (139)..(139): Xaa can be any naturally occurring amino acid
MASQDYGTTRHVDHLISAERDQPDKHTALALLTFTELAQCGEVRLLIKLLRTMLQDNLSDLEGRSSSELRPIHCTDRQRAGLCLTAVFTDVFSLMLAVNFRLIYDTEGRSADSLLHLRSHVHLCKVRMIFEDTYGVSDXVTHDARMRSRSP

SEQ ID NO: 946765 - protein, 186 aa, Homo sapiens
RRTTEEQGPNRMAKAKRPGGGKPEEKEEGGRMEKREEKKETKGGKKKEKGEKKGDKEETGKSKKTGKKKGKEKKKERKKRRREKKGKREEGEKREKGRKERGKGVEGEEEEREEKEKRREGGEGTKRGEGEEKGRQKRESEKREEEGEEGKEGGKERERKGKRTGEEGEKGEERERGEGMRGGGDR

SEQ ID NO: 946766 - protein, 264 aa, Homo sapiens
  misc_feature (7)..(7): Xaa can be any naturally occurring amino acid
  misc_feature (11)..(11): Xaa can be any naturally occurring amino acid
KQGSPMXPWKXERERKGEEDGNMKAKRREEEEGGRGRRGRERGERKGGKEEGGEEKEGKREEEGGKKRKEREGEKEGKGGGGEKRRGGRKEEGEGKGKGEEEKKRERKKGRRERKGRREGEKRGREGEDKKRRKGEEREGEEEEKGRREGDEEEEEKKGEKEEEGGEEEGRRRRREEGRGKEKRGRRKREKKGRKEEEEGEAEGKGERKGAKREGEEEEGEREKGEGERTKKEGEEKGKEKRRKGRREGKERERGEGKEREGGE

SEQ ID NO: 946767 - protein, 207 aa, Homo sapiens
RANRRPPPNRMGMSEKAREHGVTTGTKGNGAEERIRETEDKRDTRRDDSGEAEERKDEQEERGKTREREGEDTREEQRRKEDEQAENGGEKERRQQREAMNRRQKKEKRERETKNREEERRRRTARRKQKTEGRHEQEKRRGETKRKRKREERHESNAEEGGRRRRKENRREKRKKKRQKGEENGEGRARHSGEERERNKDERRKRR

SEQ ID NO: 946768 - protein, 120 aa, Homo sapiens
MLRSQNKAADVLRMDAGFTMSNSIPAIRIPFEQAQKVITMLEQRQELAENKDEIALAPLGTEGTDNPLSGEEQHQNHTGHRHLMLPDFDPLQHIGHNQPRYQQADFLRAQQCASTPHHPP

SEQ ID NO: 946769 - protein, 129 aa, Homo sapiens
MPKRLDHFVARSSGTALSMWEARGFAPTANDPPVLVLTCPLIQSVLWLKHMKYPLLVRTGRGNTIAGSRNALLNAGLGAHSDMISDCRIRIWKMHIHADATIRKSTGDRRQASGSWNITGPCRQGVGCP

SEQ ID NO: 946770 - protein, 199 aa, Homo sapiens
MAPSRKIFDGGNWKMNGRKQRLGELIGTLNAAKEPADTEEERAPPTAYIDFARQKLDPKNAEDAQNCYKETNGAITGEISPGMIKDCGAKWEVLGHSERRHVIGESDELIGQKEAQAQAEGLGRNDCIGEKLDEREAGITEKVDIEQTKAIADNGEGLEQGDQAKEPERTIGTGKTATPRTRKNTRSSEEGGNPFIDGG

SEQ ID NO: 946771 - protein, 54 aa, Homo sapiens
MKLVNNYSMNQNPIAKTGKGALGKRGNLYRNGAKIKGISSAGNAHPGGQTSGSL

SEQ ID NO: 946772 - protein, 235 aa, Homo sapiens
FCRRPHLGENCENQSMTATKMYRLLKDMRITLLMDNNLFSLPMNESTCIANMLLTSINHARLMIMPVHKSSRSYQQTRTKSSSAIRYNNVTRDTTYTWAARYRTSTFLYTMILAKCYIDHARIDIYSLHDVSPATSPCMIASHYSYYAATYQPSIHCNRNSSPNLPTLLSNSPILNGFTYPSIYCHYCNLSMAYLVIFHPTATPPLDLPINLDFIISHYYLSTRTPFTSSRPFLP

SEQ ID NO: 946773 - protein, 291 aa, Homo sapiens
  misc_feature (23)..(23): Xaa can be any naturally occurring amino acid
  misc_feature (26)..(26): Xaa can be any naturally occurring amino acid
RYTRTQNRAHANTHEHPHHRAPXGTXRDDQREETPRRRMKTRGRERGRRKWRQERRQHDGEQDHAKDVTEERQHGTKKKDKKQSRRRRNGKRRRRQTDIKRSKTRKKEETQEEEGEQESKKEGQEEEDREETAEMRKKSTREPNPRRAKKDKSKPRKRQKTTHSMRRKTRKQRGKQGDQAIRKEKPRRNRERRNEGKKTRGHARREEEAQQKQKWNPEKTKGEKKIQRRKTKKGESKNKETTKKKREEQKKDKAKRGEKKKRAEEREDTSRKKRPGGTNTERGKQRQAQKE

SEQ ID NO: 946774 - protein, 204 aa, Homo sapiens
LCRIRVLSAICEIMASMAYDKERLPMTKSCRLIEVIKIKSMTVIYLLSMPISEIDFIDDFVCPFVTDKLRISIPVLTHSQSGQGTSFRAFVALADYNVHVDTGLNRSKEHDIVMRVNRYAWQDIKGHNRRIYCLSMIMQCDTIPSRVTRRCDYVIVRIIAAAKCTRMLIVPLPKELVMMNAIEDWFNSVRICIATLGKIRQGQL

SEQ ID NO: 946775 - protein, 90 aa, Homo sapiens
AGDKHWKLFLGIGILLLLFIEILGEPWIRLTIKANSKPCRDGLRSEMERRNGTHLLQQELTEAQKGYQDVEDQADTCNHTEMDLTGYLDA

SEQ ID NO: 946776 - protein, 246 aa, Homo sapiens
  misc_feature (11)..(12): Xaa can be any naturally occurring amino acid
  misc_feature (15)..(17): Xaa can be any naturally occurring amino acid
  misc_feature (28)..(28): Xaa can be any naturally occurring amino acid
KAARQEHELDXXWKXXXDEKKPHPHDTXEGRRKRCTREDGQYGREVRRRNVWMKHQKGACGEEEEADQERPDPSSRTQQTMALETEREMRQIPLQTDDLENGSGYQPRDQPTQPNPEDAYRAQNYLQLDPKPLCKAAEPRWKAEEEEAAMDRRNEAQKRSRSEDGAKGSLTEKPTTKGHWLRKNQNYSKNLYTGGDRKEGGGKPRKQQAQKKSENRTERKRNQGFIEEGRPKRAGQGAAKRTRQYT

SEQ ID NO: 946777 - protein, 110 aa, Homo sapiens
MLRVYVNGYVVMLAGIELRVFSEDGGDNNLVEFIMLRLGAKIGPGRSIRWVGGVSCPGTTAVYRLFFEAGFRGRTRRPPAPLLRCGLSNSWKVDMLIVGEGGGLAIRFLL

SEQ ID NO: 946778 - protein, 219 aa, Homo sapiens
  misc_feature (1)..(1): Xaa can be any naturally occurring amino acid
XVDTRECGHYGRVRGHMPDMGAVREAKGGRALDDEEPETHQDNKAKPERYEKDTKLARHGGTHLEAEVLRRLRQDNDLNLGGTGCSEPKPCHCTPGWETERSETPSQKEIARTRQARKVNGLHIELNTESEDYQNREDSDNLTARNYRTRSRQDAAKKAPRGRPLANDHHNKRQLKRSANQAWANGRHSGRQTARTQAEGAEDQAHKRQPRNQAGRATR

SEQ ID NO: 946779 - protein, 270 aa, Homo sapiens
GKEEGDEPRETLDNSVETVERAEEPKGRKRRKGKGGKKGGTEGNQREKQGEKRGQKRGQRRNKEEERDKRKEKERKEERKGREKKRREGKHGGKTEKGQREKREGNEERESNGTKRGRTGERQKASKGTKTGDGKERERKRGKKPENRRQRKRATRKRETDEKRRSKEEAMEGRGTARKRRATGRERKRGEQKARRRRRGEKQGGRNQRKGGGKREQKRDRDNRNGEQENRRMKEANNERRGEGGKAKESQRAQSDTNATEKHEGRGGTD

SEQ ID NO: 946780 - protein, 233 aa, Homo sapiens
GDEDTCLFSSESDMEGISQRRDDELATGHEEIVNPDRYIKTLAEKDLEPLDLMVRYYVNCALMMTMTEQNQNLVSQNHHTKVQVGSEVYLRPESQDYNGLGKPEVTLIRKMNHRADIVRTRSDRIGPVSRHKLKSQSDDSRGYIARGDMQELVTTSYRMLCTRSPLRITHANLHPSYTLTRGQTCQANLLTNRPQEEPLPKTSALSTKRLYSFSNPLTPCHHFTSTALLPHTA

SEQ ID NO: 946781 - protein, 219 aa, Homo sapiens
AAAVRVPAYPALGSTVFGRHRFVNSVPVCDRPPISSPLATSGTIFSAICCFWDLPGPFLTIARSCQPTMSSQIRQHYSTDVQSDASSLGNLDLQASYTYLALSCYFDRDDMHLQGVSHFFRKLHEKQRRGYERLLQMQNQRVVRALLQHIKKPAADELHKIADAMKAAMALQQLNQALLHPDALNSDRTDLHLCDYLETQLLAEEVFIKKKADYLLPPR

SEQ ID NO: 946782 - protein, 265 aa, Homo sapiens
EHRQRLDTSDRTVEKAEGPEGSKRGKGRDGSKRVPKLDQREKKGEQGGQKRGQRRKKEEDDDTRKENERKEDRKGTEKQRKEGQHGGSTEKAQREKREEKEERECNGTKSSEQGKDTSPAREQKRGRAQGREGQQREKTGRAKTNQNEEKEESSGQKGRQQKRAEQGKRPDTQKDAHGGERKRGTHEERPRRTERKKSGENEKNRGEALKRESNKSNRTRSRRKNASNRQTAKGEKNPDEDKEQQRERHQEQLEEQWRKNGARGR

SEQ ID NO: 946783 - protein, 250 aa, Homo sapiens
MDAGSVYSSILHKSRYEYTLKGATGYPRSPQTDNRVHVLHAYETPNKTRQMHYQNWIIARQEAYCVSVATVSSISTPVLHSNSFLSCTRQSLRELHHAVHSLIAPTNHNHDYSYLQRYITRPTILHSIIPTTEIILTICFVPDCLNWILLSLYANSIFGLLRRTSGYRVYPLHYSDLYCSTLALSDFNLYYPIPLTVFTSSALVTFHASLILHAQPVAATIRSSTYSLTWTFYTAYLSRFLIVRYTDLLA

SEQ ID NO: 946784 - protein, 272 aa, Homo sapiens
PTAPEAGRITTAPPLDDLGRTPWKEPEAPRGTTRGRGTNGKTGGPKGNQGDKEGEKRGQRGGQRGSREEHRDTRNERDRKRRGKETKKKREQGHQGGTTESAQRPKGEQEAETPSRGRNRGERGKDGEPGGGQHPRRGRSAGPTGRRARKADRHQREQQRGTRERGAGAKKAQSGAESPGTQQGAQRTQKKGRATKRNDDGQEAEERRTTDKEDTTPHAGKRHTDAKPRPEEGAKGAGATPGAGKKRRSPKQTDGRSRKGQQTTTGHRGNPA

SEQ ID NO: 946785 - protein, 103 aa, Homo sapiens
MSPRLIQFLALSLAPRLRLLRPVPLRPHTDLLPAYVSAFAPPPPRPLPPSTPRSLSPQPPSRPPLPLHSALLTPRLSSPLLHAISPFLPSSPPPLSLLPPRPL

SEQ ID NO: 946786 - protein, 134 aa, Homo sapiens
GSQQLSMTSLHNSCYRKDTVVTDYTYDWIKAKLKASIAGSIDLAAALLKLGECGLRRLRLMVNPLTTIAYPFLELSLWGITMTCWICLRQTDLRTIIAYSRMSHIALEVTAILIQTPWRFTEANIVIIEHGLTC

SEQ ID NO: 946787 - protein, 183 aa, Homo sapiens
ARGERLSVTTIAVMSDLGKQGGKARAKAKSRSCHSGLQTPVRQVHRLLLIGNCSLRVRALTPVYMDRGLEYLTVYILDLADNADRDNKKTLIIHRHLQLVIRNDQELIRLLVRVTIIHSGVLPNIQAVLISKKTESYHKAKGQVRMTYGPIEPNPNRYKKGTCKLKRLFSEPPTFSYKRVVNG

SEQ ID NO: 946788 - protein, 226 aa, Homo sapiens
ALKAKGEAPAPGEAHPKAKAPKAKKAELKGVHSHKTMKNRTYTHLPAVEDTATPETAQRSPEERSQVKQARPYATIKFPLTTRAAMKKIEDNNALVYIEDAEANKDKTKQALKKLHDNEEAKVNTLIRPDGETKAEARLAHDDHAQHEANMSRDHPELITKLPKSRKQTHIYYALTTRSRPALAIIHGRPGFDKNFRPRATRNAVRPATTESHVVTSTALIVHIRL

SEQ ID NO: 946789 - protein, 162 aa, Homo sapiens
MVTKPAIRETQQRQATTEPKRPREQKAHRQISALESNPLDTPTEERAQDRATPERIRNIRKPNKNTGEERNKKSSTDDEKNPKNLCTEAEQTAKPNKRQTTPKARRTKGNSNHVTHMKTAATAAKAQKHERKRKPKRTADRNPTHRSQSSSTHQHTVTALCA

SEQ ID NO: 946790 - protein, 113 aa, Homo sapiens
MNNLVTLPIQEAEAIEWFLINSLKRELMGTIPPQKQTLAGQRHMIMVQVFEREYTYTISRIHIALNGTEHCNAGGPDSCALPRPRRIVYVLHHTAAYTGHDCRQSATAICARP

SEQ ID NO: 946791 - protein, 188 aa, Homo sapiens
EKREHEEPPWESQSAKGSPMDSRDEGKEREERKGSRRGEGREGEKREEEGGEGGKEKGKRGGRRGQRGRKEEHKKKRREKERKEKGKEEEKERKEGKKGRRKEKEEGEERKREGEKTRRGRKRRERKKKERRRKEEREERRKEGGPKEGKDGKEEKKEREGKGERRGGEGRRRRRRGKAGRGEERGKT

SEQ ID NO: 946792 - protein, 202 aa, Homo sapiens
MADQGEPQVQFKLVLLADDCTGKTTFVKRHLTAEYVKKYVATLSAEVNTLEVHTKEDLSKCNVWDTAGQKKYIGLRDGYYIQAQCAIIMFDVTSRVTYKNEPNWHRDLVRVLCIHIVECGNKVDIKDRKVKAKSIAFHRKKNLQYYDISGGTTTMRCRYYDQLGSTLETLTLFDAMHALAPADIVIDPAFAAQYEHYLEAAQ

SEQ ID NO: 946793 - protein, 260 aa, Homo sapiens
  misc_feature (17)..(17): Xaa can be any naturally occurring amino acid
  misc_feature (23)..(23): Xaa can be any naturally occurring amino acid
  misc_feature (31)..(33): Xaa can be any naturally occurring amino acid
  misc_feature (148)..(148): Xaa can be any naturally occurring amino acid
  misc_feature (159)..(159): Xaa can be any naturally occurring amino acid
  misc_feature (211)..(211): Xaa can be any naturally occurring amino acid
RESTEETGIERMKPHEXLEEEEXDRTPMTPXXXERRTNRHEQEEKETTGEERVRQERPTEETAGQEGHRKTEKRRRKEDEKRTGKDEDRREKRSRAEKQRREEGERGRHERGERRERRTERSNGRARGTRKEEKEEKDRREEQDRGEXGGARQREEREXTREREGGRKQRRHGKERRRGRTEGQEGKDKTKTKRRRQKKERQKRKKARSRXRQERRRREKKRKQDRGREKGREQTREEERRTSETEEQERDRRGARRAES

SEQ ID NO: 946794 - protein, 66 aa, Homo sapiens
DDKYFFMSDIDMLRQATLADMESLLKTMINHEIQNVKIMSLAENDLDETCLDCTRVSKFCTEDDYK

SEQ ID NO: 946795 - protein, 227 aa, Homo sapiens
KHWGGLYTVSLTLATVVPRGGDRALYRAYVLLVVLAMLSLDCSDYARCMNWHQISYQVLTFAVNVTSELTIMEGVHDEQLELKELIVELLTGCKEPALHPGDLVYLARVEDSIPVSEIVASTYAGGEIAIVHPCLMIHEVHSGPIKLLTTGDNNANDDPGLYIMDDIRYICRTMQESHEILVIMTYWDDPMTEYLQYAMQSPVAGSLSLTSRECCLMFWQIQTFLLV

SEQ ID NO: 946796 - protein, 95 aa, Homo sapiens
RGRGYQALLVHYIHTESTFNTKQLRLIKTSNYYPHSTDDNLTLTRNDSDLHTLYETPYINTATSLDNPPKEPPVRNNSITYCTAFSPVYPSEIPL

SEQ ID NO: 946797 - protein, 119 aa, Homo sapiens
MGTEKTEKGQYKSDEETRRRRHEKHKETKGGQNTEHTKKLKDETQREGQAKQSKRRGTKQEQEDTGKQEPKQEKKGTEREDRKKGAQRSTRRRGERKRRDKDAIRSQSGDEPAERGTKK

SEQ ID NO: 946798 - protein, 158 aa, Homo sapiens
MVLTNQTVQKPTGEEARPYTVEHESRQLKRSLYPQREQDYQLQARIRGATTDSYLSEVNPTAHTKTALTEESDLDGAGFQNRADDKHIMDIDTLEDTPVAHLLHMTADSKLFDIHAKSDRMMPKDVKLARPILLETCPYNTVSQRDSEPYWSFGLVQH

SEQ ID NO: 946799 - protein, 246 aa, Homo sapiens
  misc_feature (21)..(23): Xaa can be any naturally occurring amino acid
  misc_feature (35)..(36): Xaa can be any naturally occurring amino acid
  misc_feature (39)..(39): Xaa can be any naturally occurring amino acid
  misc_feature (47)..(47): Xaa can be any naturally occurring amino acid
REQERRKQKAPTPWKTHGKAXXXKKRNTGTRMRTXXKLXQASKPSKXGGRGRRKERVQENKTRQGNKAKHRNNGKKKKKKGKRQEKAKEDERKRRKRSKEARNRGKGQKKQHKGRRRREKTEKPGGRDRREKRKRQRNPDRERERHPTKNKEKKKKTRKNKRKRRKQKKKRREKERAKAKKRTKKARGKRKGKKKANEKEREEERQGQEKKEQRGKKGERKGKNGKNGKKKKGEGQDKGKKRNRGG

SEQ ID NO: 946800 - protein, 152 aa, Homo sapiens
  misc_feature (3)..(3): Xaa can be any naturally occurring amino acid
  misc_feature (70)..(70): Xaa can be any naturally occurring amino acid
MTXSYTSHSIVSCTTDTRKIERTATIDTPRIKRISTPSLSVRDDRQLKPSSHARVTHEQPPQSTRSSMRXSSILLTLMRITFTSHDLYQRTACHYRYFYRVVLERHDNNRVRPSTRRPDSSSRIISPTICIRTVLWTYHPMPDLVSLYTPGG

SEQ ID NO: 946801 - protein, 205 aa, Homo sapiens
PLTEPTRLFERRRPLVRDMAMLRVQPEAQAKVDVVREDLCTKTDNLLGSYIPKKISELDAFVKEPALNEANLSNMKDPLDMPLPDPVKVKEKDERKKQHEKEDKDGIRGRMKTKVLHAARCTAMKMIVVLLDRYKPEINDVIEQINLVTTCQQLQIPGIEDGNNFREAEQEKVFELMTSLYTMLEGLHTQICKYISERGEAWTGA

SEQ ID NO: 946802 - protein, 79 aa, Homo sapiens
MVCRGFSSICTGSRPALNAQRAGHTDGGYRVQASLFVESCVSYASLSSYIGLLVIAVSSPMSQPNPLPLCRTSLPPLVS

SEQ ID NO: 946803 - protein, 120 aa, Homo sapiens
PITLHRGPGTRSRYVWKKMILNKAVVLGALTLTSETQPLWRIRHCGCPHGLLQCKLVPLLTGRMANEHMNLVDTTSSICTWKGPTLSEKRLCPTYLDTDPDCALTRCVCSNISLTILTKR

SEQ ID NO: 946804 - protein, 200 aa, Homo sapiens
ARIRLDDKGTSPLESVPLDTYQCGRCGYKPTTFRSRTCGKRGYHVKRKRKYNCNGNAKSRTTTGTGRTSHLKIANRNSGMDIVKDNTYTQEGSCCSIQFILRMSTIIHAINVLLSKNISGSTDKFVWAAYSQSTLNSRMLNHRAAIGAHLANSPISESNTLQWPELYTLANGKIIAGYPTLIASQVSTSVHMPNEGAPHL

SEQ ID NO: 946805 - protein, 140 aa, Homo sapiens
MWLRRRLLYTAIGRDLIFGSLSNGFLASSSRILRGYRWVACSGRVRDCRTAVRWPSQANPVSREMRGDSPGYYAEQSIPLRAQLPSTVAFARPRASAYISRSPLELDVATFLIRPTLAPSAYNSALPCSNRFYARRTFSR

SEQ ID NO: 946806 - protein, 106 aa, Homo sapiens
QYFLRERGVWNTGDFFQVYVSTQGDEEQVVRYHQSNAWVSHRIDCCGVTSKAIYSKAVCLMVPDHMSKEYVLQGLEQTVVMHAESTLNILEADNRLVQVSVSMAHI

SEQ ID NO: 946807 - protein, 145 aa, Homo sapiens
RGREARLVKDEDKEWMPDTKLVRLIKDMKIKSLEEIYLLSLPIKESEIIDLFLLAYLKDEVLKIMPEQKQTRAGQRTMFKGSVAIEDYNGHDSLIVKCCKEPATVIRGAITLSTLCIVPVRRGYVPHDTLRRHCPLQPDRPAVLC

SEQ ID NO: 946808 - protein, 135 aa, Homo sapiens
MAPLPFLIALVNSRPRLSRWFAQPYYLRSALLSAAFLLARKLPPLCHDLPTQCDDGNPCDFDCRDVATLMLLSAIVTMKNRRSITVEQHIGTIFMFSKVPNTILFFRLHIRMALLYITLCIAPLMTPKPPLYTLP

SEQ ID NO: 946809 - protein, 145 aa, Homo sapiens
RFWKVGRILTVLGGLICDSDRVNSGTVERATEPQGLEIGEMRIEQRSEFDGYMVTMIDEGGYHGDLMRTRGDVRYGGILTMGEWKLLLGTEVISEEEMIRACKRIRTYEGGHDIWQSCEHMFEVLGEWDGGREMKGADCYVGNWG

SEQ ID NO: 946810 - protein, 73 aa, Homo sapiens
LSSAETMEGVEEKNKEAPAGPETALEKANELSRADNQAPEKEVRPNDAVEGTEEAYVSRSKALSQGIKADVQN

SEQ ID NO: 946811 - protein, 60 aa, Homo sapiens
MGGRLTINWPRFNNVGTGPWGYQSNSLWRKSPFRQCRNTEGARTDGLSQQVANPEGHCLG

SEQ ID NO: 946812 - protein, 93 aa, Homo sapiens
MELPRRRFSVPDGRMNAGSSHRPTKSTFMDEEVQSILTKMTTLNLQKTMKPAIHELQPPTYKLMTQAQLEEATRQAVEADVRLSHQFWKSEYH

SEQ ID NO: 946813 - protein, 134 aa, Homo sapiens
MEDIRRFDKDRMKITMTLVKNSLPSNETIEHEKQISILLTSMKDLVRSTFEDLNLDAEQEAHDEMDTCSRDNCEPGHFRPLPQACGFLNGDFYNRTGRYIHISHRILMKFMRLINDYTTTRYIQTGRPSKFHFA

SEQ ID NO: 946814 - protein, 186 aa, Homo sapiens
MNRRVTLLKAEDPVQGRIKSEEKERHGTSEGLISIKGLTEGLQALHVHEFADNTGACTTARPYFRPLSSTVGQRMKRGMLQTRQRDSVDQDGAPARPIADSPIPLSGDHRIIGRTLLRHRQRDASLPSLPAHATSPLSAEAPRPRPAPSSPYLLLSNAPDIPSPTPYTLVSSRPPTIIPLSIRGSP

SEQ ID NO: 946815 - protein, 243 aa, Homo sapiens
  misc_feature (19)..(19): Xaa can be any naturally occurring amino acid
ARGRRRRKELEQRGSAMNXIGRTREKGERRGKGGKGERLRKEKRDWKGEGKGGKEGKKEEKEGEREKERKRKERRKEKGKEKERERKERKREEKGKREEGKRREKRKKGRGRKREREKDKEKRREREGKGGKERMREREEKEERKGGRGRGKRRVEGGRRKERRRGESGERKKGGKKGKEKGKKKEERGGKREEEGERGEGEEKKKEEKEGKGEKRERRRGREGERKKGERGGGRKRREDRKG

SEQ ID NO: 946816 - protein, 224 aa, Homo sapiens
MPVKFMSELSICEYGIEDKTSITSSRTHCLLRPLLSEVHSCDKQLRTVDGLRLPVRGPLRVPNMPVLNHRMLIKRDDAIHGLTGSYTPSHSFDIIEVEDIANFPMPLNNLLAATLLQERPSINQVGTVRPTHPTFNHLDAPHVLLSHGPFSVCPHMFQERPAEAANMLNSGPATDEAKAICMNTLYKSRPFFFIGHFNFDDRLKIVGGNNLVVSRISNYAGGGP

SEQ ID NO: 946817 - protein, 154 aa, Homo sapiens
  misc_feature (126)..(126): Xaa can be any naturally occurring amino acid
MRITLLIDNQIWSESINRFTCSGNFLVNSVKLARVMIMPLHVLTRYYEEPGPWHHVAIRYNNFRVKVGNIGKLQVDVYMWLEIKLRTLYHSQGRICNYSLQNVDADAMPCSMQSYYWLLGATNPPXHAEKRNWVTEFDQCPTNPSPTEQGLTDH

SEQ ID NO: 946818 - protein, 148 aa, Homo sapiens
ADLILAHTARISVSPLSELDRLHNVMRIKLLMANYIWSEAMNGPACSGKFVLDSVKLARMLIMREHDQSRDDELTSIIVHVISATECSRGSGNNGHGCVRHHFLERTCAAAYIMVAGYISYRALARAGLEHDGFTALLLRSAFIHEQN

SEQ ID NO: 946819 - protein, 205 aa, Homo sapiens
  misc_feature (188)..(189): Xaa can be any naturally occurring amino acid
NDAGLILARFARISRSPHSELDRLHNVMKIKILLDQLDLVRVYEKSTCIGIFLVPSVKHSRLVIMREHEQTRVHERTRILLSVGISYNSVHVNEGNNGNLQVDTSSARTVTLACCTTSVRMVYLSQQIVHADARPCRETGHYGSGVRGFSSSIKGSCNRFTEFRLICFIRLSRIEDAVNLSNGMILEXXGKCWHGSSLEELDQGH

SEQ ID NO: 946820 - protein, 102 aa, Homo sapiens
MERLLNDMKITVLMDIYIYSLSMKELACIGIIVLDSIDLSLLVIMPEQNLTRMYERTKIMASDDISVNEFHVIVGNNGYLDVGRQHAVDSDLGQALLSSMCA

SEQ ID NO: 946821 - protein, 277 aa, Homo sapiens
  misc_feature (12)..(13): Xaa can be any naturally occurring amino acid
  misc_feature (16)..(16): Xaa can be any naturally occurring amino acid
TQPRRPPLKTNXXGRXLLRRDPGIRPLRAGGMHKTISAHDSSNITTRGHNPYSKATGRTQEVQRTEQNALSQHRPPRKITEATITAKDSQQNSAEQTRLISSTKAHSEGYHREEQPNKTKSPHAAGQAHAARRTESRRNTGSGEDGLTIEDTKTERIRGQHRPKPARYKKTQNWLETKERRQQTQATKEGDGRTNTWNQGNQENKAKAKNTLTGPADQTHRATNIKNDKNPHDPQHKRLRNTHQGKRTPSKAANSKQGGTKLYAQTGTNTPRDDSDA

SEQ ID NO: 946822 - protein, 110 aa, Homo sapiens
MRQHKYDTLYERTSFLSNADIRLLSLSRDMNETVADCTSYDNILLTDELAHDWQHLAQNGHLMYQILILTRCLVSSEPHWIRLTRHARLMKLKHKWIADSDYSSHQARKY

SEQ ID NO: 946823 - protein, 127 aa, Homo sapiens
MEIINHSLIDLTDRMHNVRMMKLLLTPWRLSEPTNDHRTIASHALLTIRLNRLLINRPHDSRRILWLNHTLPSRHSRLNIVYLPRATHGTRPIVRIISLLRNLGHGHYRPARNDSNSLHRLCPPARP

SEQ ID NO: 946824 - protein, 137 aa, Homo sapiens
GDSRFSDGSHWSNFSGLTSDCPGHPVSSEQHYHTRIDMDRKYIGNCLDDYSCHRYHGLTPYCVPRAYRHQVGYTPISGLNTFARSIHVGLSRAQSPRSAIDRRPTQRNSPKSYFYQFEDSSACSGRLRMYPRERALP

SEQ ID NO: 946825 - protein, 288 aa, Homo sapiens
  misc_feature (4)..(4): Xaa can be any naturally occurring amino acid
TSQXRRNISEHNHAISLETTFSAIPCTGGDLERAHLHHGDGRPRRHQKNRTGQRANTDKRPNGDITNRRTAPEARRLTDRKNGSSSDHPVTIARATREHTRNPATSQPKAHGAIQQHQQETQESTYHPTATPERGQTSTSTGCATRNTQHGQSNKPRGPRKERCQLRKSIDMAHLDPTDHTTTLDTEPPQTTNAGAPSHHQTTPHTHSQMIHTMPHYPHNSYYHTHANNNYSSHKGERRQLHFSRTRNPHVHTHHTPLTTTKATQHAPSIHRRHNKHTDALNYAHRHR

SEQ ID NO: 946826 - protein, 175 aa, Homo sapiens
RCRMPGLGKIGDNQAITCIKMDRLVKDMKIKILEEIYILSLTMKELATIASIIVDSIKLEGLKIMPVQTQTRVVKLNKIIVLVDIGVNIVHVILGDKGCTEEFVVIYLDMIMVKVYYCLGRKDYFGYKIGVPHTSPCKETGRYGSVVHDLACIQSISIVPANGLCYYAVCTDTVN

SEQ ID NO: 946827 - protein, 128 aa, Homo sapiens
NLPSAAAGARCSSRWLVFQPSSLRSVENQSTYSLAQYIPCGELTQQHLTMRPRVHIQAVQRANDIGATSRAALSAHPAILAPASYDPFCALRCSDPPVPTRPPPPLFSVPDSLSLVSPPSRGPPSFVV

SEQ ID NO: 946828 - protein, 95 aa, Homo sapiens
MTLRGTLKGHNGCVIQIATSLQFSAMTLCASRDQTTTMCRLPPLRPSAPPQRAPAPPLPLCRCRGTTPPLRPPPPPPPLAPGPAPPPRPPPPPSP

SEQ ID NO: 946829 - protein, 145 aa, Homo sapiens
GLTPVIPAIWGPRWADHLRSGVQNQPCQHDETPFVPKNTLAGHRSGCLSSQLLRRLRQENHLNPGDRGCSEPSLCHCTPTWGDRVRLHLKYYPSSHPNKPNNTLDAFEASQQFSNDGRIGIQETHLTLSDHPLPCNLICQSSLRG

SEQ ID NO: 946830 - protein, 136 aa, Homo sapiens
  misc_feature (96)..(96): Xaa can be any naturally occurring amino acid
EVLALVLDFRGHLLGRLSAIVPKQALLRRTAPVVRCEGINIPCQLLQKHVEVPGFSSVKLMNTNTSRGPYHFRTPSRIFWRSAPGIAAHPSEARSXFTVSQPARIPPALRHGRPLVAPPPPHSRALLTLLPSSAPP

SEQ ID NO: 946831 - protein, 147 aa, Homo sapiens
MKMGPQILQAHKKGIMTREGNSIQEHQAQKKHAQQTTKTAQRHNNRHEATTPSNKRTERLTTEGRITMRLNTDRNPAQSTEVAQSGPRAEDTQTPKDNTTTETQQNAPRPKRKAGKRAQTKPIGTKRKRATHRHNNTQGNNTKNDGS

SEQ ID NO: 946832 - protein, 136 aa, Homo sapiens
FLEDGRVAAILREEEALDLQRCFSCLDSRNYSALHSPQHTQRNGENRDPPAGTRHCPDRMLSDDFDTAIEAMPVSSLISTSMSNTAKTPNKDHPSTTHQAHHHPALPRPALRSTILFRHGRRNRTLSPPHAPSARP

SEQ ID NO: 946833 - protein, 226 aa, Homo sapiens
SGFTLLLLVTILVNRGFVPRKAEYPIPETSPEFESSTSSPLLELYIIFALMAPLTPPNITSPYAHAPFAHPPVTIPLFLFPNSPLPPPPLPLPYLPLSDPAPLLIPPPSPLFPYPCLLPIPHPSRSITHPSSPPLLPQLSPTSLFYTSSSPPPPPPPLPLFPFSFLLFYTLFPPLLASPFPSIPPLIPSLLPPCHPRLTPLSSFPPPPLLYYSTTQPLSSLFSLPP

SEQ ID NO: 946834 - protein, 109 aa, Homo sapiens
ERHGEGGKRLRKGGRGRGERGRRGGERKKAGKEGEKKGRGERGERRERGERERGRGEEERGRRGGERRKRGSEGAPEEEKKEEGDRKRGEQRAERRDKRQTEERKGGRA

SEQ ID NO: 946835 - protein, 161 aa, Homo sapiens
  misc_feature (11)..(11): Xaa can be any naturally occurring amino acid
PLTHRTPGRWXAPAGGPHGRRAPPRLAVAIREAKMGASGTSRIYGERSSLTPGALQGGSAAGSTGSSLLSTGLPAPPGLTKRADRATRPSKVTIYIGTAFAEAAENAQILRAHLTPSPAIMGLTSYSSLEAFSPPHRNELDATEALREARTTGPAKPTSPP

SEQ ID NO: 946836 - protein, 71 aa, Homo sapiens
  misc_feature (32)..(32): Xaa can be any naturally occurring amino acid
SPLSSRPYDTNSPTFHYIILLVVITQAVTTSXFTVRRLTPVIPALGEGEMGGSQGQEMETILANMVKPRLY

SEQ ID NO: 946837 - protein, 219 aa, Homo sapiens
VGALLEPPAVVALTVPNPDPARSPHYGSPAAAKGSARSVNALLRKRRYHAAMPGLTGTREIAGTGAAERAPNAQCMTVLYRDGSLQEKLWAILQATYIHSWNLARVVFTYKGLRALQAYIQGKTYPAHAFLADFLGGIQVFGAITSTEQINMYLLSRVLFALSRLAGEKGYIPGPRWDPFPVITAELWWLYFRLFEYHRTTLKPWLSPPDLPYEASGGR

SEQ ID NO: 946838 - protein, 124 aa, Homo sapiens
CRRPHFGKACENQPITASKRDRLHKVMWITLLFANWIWCVPINESTCIGIFVLTLCTSLADVGSCQSMSRARYDGRTSFMAHVDIRFNSVHVDPGTNGTYAVYVYISLIHDLGHAVYYPARIGY

SEQ ID NO: 946839 - protein, 174 aa, Homo sapiens
DDADLIFGAICDNQLITASKLDRLHKDMMIKLLSAIYILSVSIKEIASIGIFVVPSVKLSRVMIVREHTQTRDYECTRTIVLVDIGYNNVHVTQYTLDNPMCTPNSVYDIILGTGYIVMLATVSGGPQILRSRREAIDACRASPVFTLLRSAIHPWRRTGYHNMANMLIKQCPT

SEQ ID NO: 946840 - protein, 195 aa, Homo sapiens
RCRRPDLGAICDNEQITASKLDRLLKVMKIKLLLDNYIWSVSIKESASIGIFLVVSVKLSRLMIMREHTQTRVDERTKILSSVDISVNSVHVIRGNKGMLQVDVIIYIDSDLGTRYISHARIGYYSIQIVYPDTSAQNEMSRYGICVLRISHAINCSRSCSALPNMLIMLSVTDVVIYEHCSETDIMAKFASPPL

SEQ ID NO: 946841 - protein, 110 aa, Homo sapiens
MDRLHKDMKIKILLDNCIWSVTMKEFASIASFLVDSIKLDALLIMREQTQTRVDEWNKIILLLDISVNSVHVIIGDKGSTQVGVNMLLDSNLAMRDMICSHSLHSHRSAS

SEQ ID NO: 946842 - protein, 106 aa, Homo sapiens
MKLVTPLADTGFTKAPVMYQNMLLSAYCVHGIILSAGNITMSKPCSSPETERTNGLKDREESHIYLEMCQFRASHERCSHACMCDIERVCVLVAENALASESILCY

SEQ ID NO: 946843 - protein, 121 aa, Homo sapiens
RCRRPGLGKIGDNQGITGTKMDRLVKDMKIKILLEIYILSLPIKELATIASFLVASIKVEGLKILPVQNQTRAVELNKIMALVDIGVNIVHVLLVDKGMSEVYVLIYVDIILAMLCIVLDA

SEQ ID NO: 946844 - protein, 103 aa, Homo sapiens
MTLPDLGKIGHNLPITGTKMECLGKDMKIKILLEHLYLISDKKELATIASIIVDSIKLSRLLILPEQTQTRVFTLNKIILLVDSGVNIVHVILGRQRLKHKYE

SEQ ID NO: 946845 - protein, 171 aa, Homo sapiens
  misc_feature (7)..(7): Xaa can be any naturally occurring amino acid
KKHKGEXERHLQHPLKAVEKPRDIEQVPGNTTIMTVGKNDLQCLRSSAMAPSRKLFAGGNRKMNGRKAEELRELIATLNAVKGPADTEAARAPPTAYIDSDREKLDPKTAEAGQKRYKATKGASTGETSPGMNRLRSHAGGSWGTKREGKSSGSQKSRWGRRPMHWKRDPG

SEQ ID NO: 946846 - protein, 100 aa, Homo sapiens
GAAMFAMISMPRAIRAAVTAMSGQHPRTLAIGFERLVSLETYTKAAAPVRHSVDHEDYFVMRPYRVYDRRSLKLLRLYIALTGIPVESYITLENVFIGQR

SEQ ID NO: 946847 - protein, 134 aa, Homo sapiens
MVDPFASDGQGFAYDLGSRVQDQGDQHGRSPDPILRIHITVRSQWHMPVVRGTPEVTAAESLKPEEAHVAGEPRSATDSTLQLHIETPSLMRLHLYSARIMRSVGNLSLWEIDHNSLARDIQLADVEHPSRCLW

SEQ ID NO: 946848 - protein, 79 aa, Homo sapiens
NEIWHWFVADSYRFVQTLKNLGYNMKRKRRRSMEAVAIMTKFHYPMLSLHVKYLLIGPFNLLESSSTITWTTLKNFQIG

SEQ ID NO: 946849 - protein, 171 aa, Homo sapiens
  misc_feature (13)..(13): Xaa can be any naturally occurring amino acid
VRVPRYSCTKSLXHHSSQRYSDSFGNNHLRYSPSGRSELTFSVIGSSAMAPSRKLFAAGNWKMNGRKQSLGELIGTLNAAKEPADTEVVRAPPTAYIDFARPKLDPKIAVAAQNCYKVTNGAFTGEITPGMIKDCGATCLALGHSREKDVFGESDELIAQVAHALAEGLGL

SEQ ID NO: 946850 - protein, 120 aa, Homo sapiens
NDADLITARIADNQRITVSKLYRLHNVIRIKLLMDNWIWSVSINEHTSIGNILVDSVHSRLMIMPEHDQTRYYERTRIMSSVAIRYNNVHVTRGNNGSLHVDVIICLDSDLRTLYIIMLA

SEQ ID NO: 946851 - protein, 69 aa, Homo sapiens
RWRMPELGEIGHNLAITGIKMDCLVKDMMSKILLELCSWSLTKKELATIASIIEDSIKLARLLILREQT

SEQ ID NO: 946852 - protein, 221 aa, Homo sapiens
HCICANSGDPRMVDRDSTNHFRCSRRTVFALWNGYLIGRKGSMHCSIEDAIVGDKSGYFPCAVLVQPRQSYSVKLIMNGLELSEDMTDLLNTRMGRLICELENYTIVSNMKTLSYDKPAQINQANLAPYFDRACRPNRSGALDSCMLKPAQLIRSVLGQSTLDRVASHALLAVNSPVSVKIPDGPEYASGKPLVATRLIRLALTDGLPKGPSTMATPCSLF

SEQ ID NO: 946853 - protein, 192 aa, Homo sapiens
AFSGLVREGQGYGRRRRDEPNAMTITPAKINTTKKRPHRSLSNAFTLYDQSQIEEFTEDCCTIEQNTCGLIDEVELHDMLASLVKNATHAYLDALMNEGPWSIICIMPLTMLAYKLNGADPEDVIRIDFACCDDKVTGTIQEDYLSELLTTMVDRFTDEDAYELDREAPIGTLANLTLIEVTCNLNDGSKTK

SEQ ID NO: 946854 - protein, 103 aa, Homo sapiens
  misc_feature (98)..(98): Xaa can be any naturally occurring amino acid
AGHRGTCRLASTVAGTEQIRGLYYSLRPTSDFLSVRSLRYHVLGHILLLRPASTGFVVSDFLPTNHELPDSDRVIQPPWRETTTHWAICSLQVLYNYXSLSWY

SEQ ID NO: 946855 - protein, 112 aa, Homo sapiens
SEEEGGDFVGDCAEPGDRMAGHRLVLVLGDLHIPHQSTSLPAKFKKLLLPGFSTFSAQETFATKESYDYLKTLPVDAHIARGDFHDNLNYPDQKVATVGQFLGLIHVHQDIP

SEQ ID NO: 946856 - protein, 98 aa, Homo sapiens
RWRRPVLGKIGHNLAVTGIEMECLGKDMKSKILLDICSWSLTKKGLATIASKIVDSIELARVEIMPGQTQTRVIRLNEIINYVLRGVNVVHVLIGDKG

SEQ ID NO: 946857 - protein, 132 aa, Homo sapiens
MALAEVGKIGHNLLIACIEMGCLGHDMMSAIISYFCSIITDLVTISDHRQRDRRISMTRTRMINRGQTLTRVFRLNLIILLVLRGVKVVHVLLLDKVLTNEFVLIYLHMNMVKVYYDYARIDIVGLLICFPP

SEQ ID NO: 946858 - protein, 152 aa, Homo sapiens
RQSSPVSQQRIRPRQMEQPRGKIPDPTGKPRGTRAPCKQNQQQGRLKQDKGPNHRGGEGSEQRTHHGAEAGARRENPTDREARDTARAAQTEEKNPPPNSDEQAVTNMGQRRESPQKNDEKRALGPRNDNRANQTAQNPTRPQGDDSAPSGA

SEQ ID NO: 946859 - protein, 119 aa, Homo sapiens
MALPFPPLPSRASSSHFTRSSPTLTLRSSSYSLLSDLRLSYLSQAPAYHVSQCSCLSLHPPLLPPPTTQLSFTLSQLALPPPSHIFSTISIHTPPYHLRISSPSLTLLLYHIYRSLAFL

SEQ ID NO: 946860 - protein, 226 aa, Homo sapiens
MLTTRSTTFPSGATKTRKGDHNNHTPADHHPPRHQNHDRPKHTKRTTAHNRPTEKTKRTQRDRHAARKRNTSRQNNDTHSNHTRKGTTRKKQTPDRHTPTAHTRKKRTSKKKSRHRRSPSRHRSTRHTTRPARNSPSANATEPKKTTTHEPTKRKDLEKTTNDTQKPKPHRHEPGTTKKPTQRGKISAKTGNPPPPHNETTKEEGRTRPHDNTPSNRTQQQAEYKT

SEQ ID NO: 946861 - protein, 102 aa, Homo sapiens
MTTEVPLRARTVPVRSGKLTYRSARDAQACDTLLEETCRDCISCRAGAQTDGRSNEALVQAAQMTRMMTDCDHDGAGLRAISDSQKVAHSPYTGTRVRESAD

SEQ ID NO: 946862 - protein, 59 aa, Homo sapiens
YTPKPTQKRLRKHNTKSHRTIKPTQYKTLPNKPRHPRPPKSINTQTHETLPSSISTRTP

SEQ ID NO: 946863 - protein, 119 aa, Homo sapiens
DTRRKFFELMSFALSEYRIRGDDDEWSEAENKAGPNASIIMLKSDKKRKLQAKQEPKQSKNVKNRETENTNDMKLSRKKYEEKLRHLCLIMGRYLHNVNSLWLYCCNERTRHTWKLAES

SEQ ID NO: 946864 - protein, 142 aa, Homo sapiens
GYCRRTLFPQRTASPKSLGELNRCSWDDQRLKRLRYYLAHRFNMSTLIVRRTAPRFSERCLTHPPDHIMFIIINFPSVLKMAAVCYNMCVFTGLLIKLQAYKGDHDISPYQTLSHNSSFYLFCVLGKACAYDLSGPRISLFA

SEQ ID NO: 946865 - protein, 38 aa, Homo sapiens
MAWKQYPFSPVGVIPGPEPMAFSQLPSLIGDWNLVRVF

SEQ ID NO: 946866 - protein, 149 aa, Homo sapiens
MVDELTVMKFGAKFMIMLSRLWPYTSETLYSQQAAQALPVLESPRATREYMHKLSRLLSAECSRQHSCHNTYASARDVHDIDALQAHRRLRISIIHCTNVSHLHHRPITDACNVSVRPMINPHANTNYLTLYYSQSFEENASYPANHDH

SEQ ID NO: 946867 - protein, 78 aa, Homo sapiens
ALYQPALLQPEFLQSARDFSDEDILSIGQIPMTQELEKSRPQDTNILITGELSNVITVAEDFKRTYQDLKNSPEEGNG

SEQ ID NO: 946868 - protein, 142 aa, Homo sapiens
GRGTDFVGTRFTGISPGVRLPGRVLHPPLPVLGDETQRLEVTMSILKIHAREIFDYRGNPTVEVDLFTSKGLFRAGEPSGASTGIYEALELRGNDETRYIGKGDSKAEEHMKTTIAPALGSKKLNLTEREKIDTLMIEMDGV

SEQ ID NO: 946869 - protein, 112 aa, Homo sapiens
SKRTRMIPGHWQGAIRNEEELNKLLGRLTIAQGGDLPNIQAELVPKKTVSDHMATGKVIGQESELPEALSPEGSLQGPITGSEDEPTSLMVRRRGIGTEVARASHDRATPGS

SEQ ID NO: 946870 - protein, 136 aa, Homo sapiens
IEGTNRRMMGAVDAAMTGLNQRELAYQSNVLGASRLRGAEMTDLSVADSRLSVLADQCSTLQRFGMTRAKEEPRDTRGYVNNPYEPFGCAPEASDNMFELTTVALTGPRTDGRTLALSVARFRLVLLQSGRLSASG

SEQ ID NO: 946871 - protein, 137 aa, Homo sapiens
CLLSLQGGGRRGGGARSCTSCSAILGAAVTHAVAVGMTDHMTLRGTLKGHNVWVTQIATTREVRDTILCDSRDKTIIMWLTSDETHYGIAQRALRGHFHFVSDVSISSDGQFALSSYWDGTLRLWDLTTGTTTGVAG

SEQ ID NO: 946872 - protein, 216 aa, Homo sapiens
FSCPRCYRLRLGMLHLSERNMKVLLAAALIFWSDLLLMLPGPSAADEKKKGPKVTDKVHFDLLIADEDLCRVIFGLFGKTAPKTVDNLVALATGKKGFGYKNSKFHRVINDFMNHGGDFTRGYGTGGKSMYCESFPDENLKLKDYRPGWVSQANARKDTNGVTSPSSRQPRQTCIDAKHVRFGFLEGMAARAQGAEHHDRQPDPLKDETIPTGASV

SEQ ID NO: 946873 - protein, 67 aa, Homo sapiens
ACSAKPQRLEGKVLGTAASLHSGQVLIQAKHADPDKRGEVSMEHPGVAWAREPRLDLDVCGHCDQRF

SEQ ID NO: 946874 - protein, 154 aa, Homo sapiens
  misc_feature (9)..(9): Xaa can be any naturally occurring amino acid
TLSPDSGTXDPKWPMDGAILEGSKKKRTPEPRKLKPKRTLKNAKKAGVKGDHSPYEKKIRAGPTYRRPKTQGLRRQPKEARKSAPRRNKLEHYGIIKLPVTTEPAMKKIEDNNTLEPIEDVKAHKHQMKQAVKKLEDIDVAVNTLIRPDGGALF

SEQ ID NO: 946875 - protein, 108 aa, Homo sapiens
  misc_feature (3)..(3): Xaa can be any naturally occurring amino acid
  misc_feature (5)..(5): Xaa can be any naturally occurring amino acid
MAXGXCFVPVFPALCQTEGGRNRCQDFMTILVSTAIPCVYAYRTLSSRVAAACTPTVPDCCAVDLPTPRRLPLLQHDSARLTAGCSTVQTVLYVEFYTYLSLGCYLDH

SEQ ID NO: 946876 - protein, 114 aa, Homo sapiens
AVSYACDPSTLGGRGKWITKSGVRDQPGQYGETPSLLKIQKLARCGGGRLQSQLLGRLRQKNRLNPGGGGCSELRSHHCTPAWETEQDSISKNNNNNKIKIKLKNKASYRTVCI

SEQ ID NO: 946877 - protein, 67 aa, Homo sapiens
VALVRARGITTSSPAGTREHAGMVLTLAASVQTSTDCFGNMVKIYPDSVHVSARRITVNQAALNALP

SEQ ID NO: 946878 - protein, 72 aa, Homo sapiens
GATIRLERTGLASFFGIGGGRPTVFVDLQKGGASGKKGTFAGGFKGSISPNIWDFVHNNLRKNNRQAYAVSD

SEQ ID NO: 946879 - protein, 110 aa, Homo sapiens
MGQVFGSKKTSTAVAHLIRGYGLIKANGRPLEMIEPCTLQYKLLEPDLLFGKELICWLDIAVPVMGGGHDTQIYVIHHAISKAWRPLPELFEVSRWGEYSFGSGPYASCP

SEQ ID NO: 946880 - protein, 103 aa, Homo sapiens
MAVNAPAKYYRMAHHNYRHTPYTIPHDPTQQYYTQTSTYLAHQSPETYLIITHPENQYERRIATFIARAILGLPVTVLIILCAPLLIATSKYLMNIRLITTQH

SEQ ID NO: 946881 - protein, 188 aa, Homo sapiens
  misc_feature (15)..(15): Xaa can be any naturally occurring amino acid
  misc_feature (28)..(28): Xaa can be any naturally occurring amino acid
  misc_feature (32)..(32): Xaa can be any naturally occurring amino acid
  misc_feature (34)..(34): Xaa can be any naturally occurring amino acid
  misc_feature (55)..(55): Xaa can be any naturally occurring amino acid
  misc_feature (57)..(57): Xaa can be any naturally occurring amino acid
  misc_feature (75)..(75): Xaa can be any naturally occurring amino acid
  misc_feature (82)..(82): Xaa can be any naturally occurring amino acid
CVGYPAEIRPHYGPXDVMILCGSSGKAXHGDXGXAVREVLDAVGSYDDPTAALEXRXLSETSHHSPWKRCSSQVXLMRSVLXCDRYAEDITPSPPMDTNTLFPDLREIEKLDRFPSAHRSPPTIQCFASSGGPIFYHYLDGSSYCLPGTTVKPGHFSQQPAQGFHFGPFDQDQAGHFNASIGPVLGGF

SEQ ID NO: 946882 - protein, 272 aa, Homo sapiens
EEETAAHPLNPIDRATLEMSGEPGREHKGKGEKRKRGRQRMRTTEEKGGKKGRKRGTKRKQGRGRRHEKRKGRKRKEKGKREKERTRERGEKEGKQTKGKKKEGGEKREKGKKQKSRENARKGEEGARNGRRTRQGGQQTEKPEKKKRRRERSKGGEAKEGAGAKRERTGIKGTKAKWQKEENRKTGGRQEVRRGGKRRLKSGGKQEKGGRWRIQGEIERQQRHPEQGEKAKEDSQARKEENKRIERGRGQNDKDEGKGMQKRREKQRETGP

SEQ ID NO: 946883 - protein, 373 aa, Homo sapiens
  misc_feature (288)..(288): Xaa can be any naturally occurring amino acid
  misc_feature (344)..(344): Xaa can be any naturally occurring amino acid
  misc_feature (362)..(362): Xaa can be any naturally occurring amino acid
MHSSTVYRHPALTVTFRSSGLKHDSARLSVHHKAVWMRIIIAAYRSTITGPHYYVMNSLKSHIDYHLGGICIRFYRPMRDLYKSALLVENYVYLQTAASGGHNNCAINQNHLAKRHLSNGGSFPSNQRLNPYNMFTNLSLPGSLIKHRRFPQPIYHSLGEISPLTRAPPSFQSCCRTHSTDTQENNRVTPDNIGPYSSTYIGTFYLVLSTARILLLGPRDSLTRVTVKAFQLQLRPLTLFVLNRVSHSTHGQSVPQSYDTYYTLSRPTSAPKRIPIPISALSHPLPPXTLLHRISPLFLNLRMSHLHITLNSITMRACRYLYNTHYVIIVTSLTSYHALTRALXCEHSYLLSPTLLHRLLYXPITQCPHLPSV

SEQ ID NO: 946884 - protein, 74 aa, Homo sapiens
WVVTRQLDHYDRYYSSNQQSSTKHGSSVLTSYRYLLTTVEDHLTVLGRSYFLADSACDRTYVCDSDYLLRLCES

SEQ ID NO: 946885 - protein, 77 aa, Homo sapiens
HITRRGITRGCITRGSITRGGLARGGITRGGITRGQCSGGWISGIQITRGWIARNWFSRQFRDWFWSYIMGRQRFTI

SEQ ID NO: 946886 - protein, 142 aa, Homo sapiens
  misc_feature (115)..(115): Xaa can be any naturally occurring amino acid
  misc_feature (136)..(136): Xaa can be any naturally occurring amino acid
MICIGHDYFCNSAAHDTDMESRGISNIVLRLDSNYLLSVVTLSGTSVYYYADESESHMMCVMKDMYYQHRRIVCAQHSQTVVASGIWMYCQDSVIYYDTVASRSLTTECASCISXDDASALARVRYRAWKYTIHRXYSSHIA

SEQ ID NO: 946887 - protein, 147 aa, Homo sapiens
VWWSTLFWIPVDVDVMMGTFTESFAASAGYIAGNKEPTDYLRTHSHSAVHAASLPPSVAQQIITSMYSIHAYDGTSLAIECFHQLAALTPPFSTLLAHMPSITYSDHSLALPMMLYIPASCPLRTSRCFIVPLLSTLILSLPPPLSS

SEQ ID NO: 946888 - protein, 75 aa, Homo sapiens
AVYGFGRFRAARAGKAEDKEWMPVTKLSRLVKDMKIKSLEEIYLFSLAIKESEIIDSFLRASLKDEVLKIMPVLL

SEQ ID NO: 946889 - protein, 146 aa, Homo sapiens
LFPFGVPLKILVSPWSAALPVVYRNCKNKPYPKSHLCRGVPDAKIHIFDLERKKAEVDDYPLCGHMVSDEYKQLSSEALEDARICANKYMVAVAKMAIIIRWRLHPLHVMRINKMLNCAGADRRQTGMRGAYVSQGTSDRVHIGRY

SEQ ID NO: 946890 - protein, 217 aa, Homo sapiens
IRPLWSSDVSTTSLRHLRPDGSAGLTRMNRLDRQRYRYMPKRSMSVPPGAAHKNEEDEHPEYGRTLIANRDKAVKCISSISSRHIQYYSHNEDQKRELTISVLEHDRTEYTQALVINIQLGAYVTLIQVSVHLEAAFTIFDGIYGLTLIVATESHALNDNASIFVSIVLITEVILHLTFTDLAGVITSRLILAFRRSALTEPPKNSSIGEGLCRPAW

SEQ ID NO: 946891 - protein, 120 aa, Homo sapiens
MPHAIAIITPLPSLHRPFPIILYFRPGPPQRSRHPSCFPSSTTSPPSRASLITHAPQRSSCSRPPRTPPCPHRMTFALPPPLLLIPLAFPLPPSFTPLTSFLVTPLPSFLLPPLPPCLLS

SEQ ID NO: 946892 - protein, 55 aa, Homo sapiens
MTGGTHRKAHLITMLRNKSWMSVILTSTLVDTYLEKFLVPGSLDCRANCYACLDC

SEQ ID NO: 946893 - protein, 103 aa, Homo sapiens
MPKHEFSVDMTCEGCAEAVSRLLNKLEGVKYDIDLANKKACIESDHSMNTLLAPLKKTAKTASYLDLVQQAPDDPQSTVRTNACSTLILPLTFQTDLFLATPP

SEQ ID NO: 946894 - protein, 106 aa, Homo sapiens
RGRRPDYCAPCENQYITASMLYRLHKDMRITLLIEYQLWSVAMNEYTCIGMFLVPSVKHSRLMIMPEHDQRRVYERTSFMASVDISYNNVHVHVVTRALACGRYIR

SEQ ID NO: 946895 - protein, 125 aa, Homo sapiens
NAAGLIKARTAIISQSRISKLDRLHNVMMIKLLMDNWILSVPINEITSIGNFVLVSVKLTRLMIMESMSRDVSDGGPTPCHHVISVSTIFTVPLANKGSRQYRTSTFLYTVTLGMRYYTHARIGY

SEQ ID NO: 946896 - protein, 109 aa, Homo sapiens
MDRLHSVMKITVVMDIQIYSVSKNELMCIAIMVLASINFVLLVIMPEQDLTRMSERTKTLAGDRISFKAFHVIMGIQWPLGSGRNISMEVTIGMRYNILLRKVYIVPRS

SEQ ID NO: 946897 - protein, 226 aa, Homo sapiens
RGPRYGKAGDNEWMPVTKLDRLLKDMKIKFLEEIYLFSLPIKESASIGFFLDASVKDEVLKIMPVQKQTRADQRTRFMALFDIGDYNVHVVWVDKGYKEVASDIRVDINLAKLYIVPVRRVYQRNKIVKPHTVPCKVTGRCGSELLRIIPSLSGTCSRSAVPNKLIMKSVTEDVLNLALRCTCTLANFARPPLYHCYDYIYQTLTSEGDCITSLPIAVTATRDLPG

SEQ ID NO: 946898 - protein, 130 aa, Homo sapiens
WGFYRDVGCQGVFISRPILFLRAPVLPRLTYSARTGLSLSAQKFPGAMREYSYGKSTKLVLKGTKTKSKKKKSKDKKRETKMTKPSLILLESAGREQTLVKFQETIAIETEKGTYLHALENGLFTLGSST

SEQ ID NO: 946899 - protein, 236 aa, Homo sapiens
RRRPDFGEICETEFFSRKRDGEIAQGHDRPRYSRLIKIKSLPMTESSTMASNVRASIDYALVVIVHQQDQTLMRELTQTLLKMISESTVFLVTVGDNGSIDMERDCCIVVNMGTRYTILVRKVYSRPKSLMPRTITMKGAGRYSSALQGPSGSPIEAAIGSPSWPNMLFKLFSHRPVVHLKNSGNLQPRQVWHSTLGILPRPHLSHLRLLRNGLNFMIRDNDNSLRAYCRPARPVL

SEQ ID NO: 946900 - protein, 183 aa, Homo sapiens
RQNKNFLKKKVETKKTKKKKTTQEKKKNQNNNQIVWAPCPQGFSPVPCFVWGPYYGPLGKTAFLGGLFPFTGGPFPHVSCGKTRGFPQLLPWEISPFCPGGIYGRGPPPGPFSKRSPPSLGLGKCAGQFFGKNPRKIFFNRPVFSTQGPVPGTLLFIKSFPPYGGGCFHCCHGAPFLSRGFPL

SEQ ID NO: 946901 - protein, 131 aa, Homo sapiens
MKIQLLKDIYIKSLAENYLSSMAIKELDTIDFFLVAILPDQDLTRMPVQKQTLAGQRIRFKAFHVIEDYNGHVDLDVKCCKEVTIAMRGTIIAGKVYIGTSAAGTRVTLIMNARHLPFYGAKPLRFIQWYA

SEQ ID NO: 946902 - protein, 113 aa, Homo sapiens
MAGIRRLVLQRPSGRLQTVTNGVEDLICADRIRYKCTRSRIPVKGFQASPEDHEKYHGDPQNPYKLHIDTSIKKYKKTAILTERATKDARIIQSTYPSCSQEYPYSECRIESR

SEQ ID NO: 946903 - protein, 147 aa, Homo sapiens
MTRAWFGKIADSKGLSCIKIRRLGKVQDDPDRVGDLYQVSDYESISAHRFHAGRLYKTCGAIDTARARSDTCHGVYLDDVKVDVRVNGVHRLLGGKGSTEAAYTVVRNDRGHELYHYARKAYLDSRSVCPHCALKVDRPYPDCGART

SEQ ID NO: 946904 - protein, 114 aa, Homo sapiens
RLGPEFGPIQQIQVFTSIQSNNVLQALLTPMMLLLGRMTLTYCRERHMDFVIADSLQGPQVDTLSADTVTRARTLHQIIAKVHRPVDAVDGVLTYTAYKRAPALMGLQVHVAIA

SEQ ID NO: 946905 - protein, 102 aa, Homo sapiens
MTSDFVLRSLDVNMVNAYFYYTRKDILGSMLLRSTHNTFKVEGHDLFGSAVTLYSNQSIRHSCYRRPEVGSECCNVFSTTQTIAVHGFNRPGHQKPSITNVG

SEQ ID NO: 946906 - protein, 166 aa, Homo sapiens
  misc_feature (147)..(147): Xaa can be any naturally occurring amino acid
MQLLRHRQRSTRSTSRQSSYKRYLLCYPDSIMVKACYCFTRKDTVRLLRCLHSHRPIHSKKCMISSVEAMTYYMNTHDYTFLLQGGLTSGLISTCKVLRPILGILGQCTGLRTTHAHPMKHYHEAQCANFGLVPAALRPDMYGLLAXVCLLLTAPVAFQYGPHSRF

SEQ ID NO: 946907 - protein, 67 aa, Homo sapiens
SLSHQILDSSCSDRGAAYDYMAPGHATHPAVRMALGGGYHAYPSGAGKALSESRCRMCDKLLNANQP

SEQ ID NO: 946908 - protein, 140 aa, Homo sapiens
SKRNLTISTLDTGCQKLIEHAEYRKLRTFNEKRMATDEAADALGRTWKGYVALRQGGNYRRGFRTKHGLLTHGSEQPVTEIEANCDTTIEHWTQNIRMARECTSKAEPTELNLIIVDRRVFLDWLILHCLTVLYPDEFAV

SEQ ID NO: 946909 - protein, 142 aa, Homo sapiens
LCEEDTAFRAEDVWSERFCSMTNCCSLYAYGTRRPGSPRTCSKALKDTGKTPVEPDVAIHRIRITLTSRNCKYLEKESADLIRGAEGILKRKDQFNCLPRLRESLRLRRVEKVLIRGIDSRVELTRLIGLHSPYEIVQHISS

SEQ ID NO: 946910 - protein, 141 aa, Homo sapiens
FSVVTTYADEMMPLVKDFFHASPNEERRMHTKKHLVQSPNSYFMDDNCQGCYKITTAFSQAQTAVLSVGCSTVMCQLSEGKGWLTEGSLFRRNRTKSTLSQDDWETESVIDTLGKINFIDKKKRFRPPITLALDLGFWCVR

SEQ ID NO: 946911 - protein, 122 aa, Homo sapiens
LVFEAVMALPRGLRLSAQARKQGEVFRQNLFQEAVESLYSILATVIYLNQLLQEDSLNAADLTSIRTSLDMLIPDPSPKDDEMETDKQETNRSPYSVDFSLRMRKALALLALRKPRSLDSQS

SEQ ID NO: 946912 - protein, 172 aa, Homo sapiens
  misc_feature (11)..(11): Xaa can be any naturally occurring amino acid
  misc_feature (14)..(14): Xaa can be any naturally occurring amino acid
STHTPTFETIXRAXGLRVDTRGRGQYGRGQTLNLFCPGSSAMVPSRKFFVAGNSKMNGRKQSLGEPIGTLNAPKVHEDTEAARAPPTAYIDLARQKLDPKTAGAAQNCYKVTNGALYWRDKPWQDQRPRCHEREPRALRENRRCFAQTREPDCATAAPALGTTTRRFTRLGG

SEQ ID NO: 946913 - protein, 104 aa, Homo sapiens
  misc_feature (20)..(20): Xaa can be any naturally occurring amino acid
  misc_feature (95)..(95): Xaa can be any naturally occurring amino acid
MYRWQVGAAAVAMTRVNQCXLAQPEDLSTQRVSFKGQRLYNTLSVAGRKQIYTLILQYQHNTPTDLSGFPSFLLVWRSIPLPSAFAPGPKMINGXGQISSTPPL

SEQ ID NO: 946914 - protein, 181 aa, Homo sapiens
GRVRGRRPDEGKAWDNQRMTVTKLDRLHKDMMIKLLMSNYLLSVPMNESTSIGNFLLTSVKDAGLMIMPVHKQSRGWQRTRFKAYVAISYYNVHVNLVHKGCMHVDIVISSDMILGKLYIILLAQYTRGYRAYSLTLPIDDFGLLQLLRCYVSAMPYIVTESVHRMCLDTYYTARHDECLT

SEQ ID NO: 946915 - protein, 167 aa, Homo sapiens
MTATKMDRLLKVMRITVTEDNYLLSLPIKESTSIAIMLLDSIKDDRLTIMPVQKQSRACQLTRFMASVAISYNNVHVPLVHKGCYDVDICIPKDMILPKLYIVMRAEDILEQQSVKSDTSPCKMTGYYRIYAAKISHAINCNSNWLPQIALRYLSNSLTLKTDSTYH

SEQ ID NO: 946916 - protein, 241 aa, Homo sapiens
TREFGHYGRGLCLRPVLRALWETKTMTANKMDRLITVMKIHVLADNYLYSLPMNELTCIAMILLDSINDAVINISPEQQSTRISELTRFQSLHGTSYKNLHVNADNKGNMDLDDDICKDISLAKRYNDLCAKTTRATRASSPTLTHECSLTISLLTVRRLMHSDKVPAIASAKWANMLVDLGYRARVNRALKCTVILATIGPTLFAKSHFNTPLDPLTIRLNQLTFTSYQHPVRASSALCA

SEQ ID NO: 946917 - protein, 173 aa, Homo sapiens
RCRRPGLSQIWYNKSRTATKMDRLLKDMTIKFLEDIYIISLPMKQSAIIAIILQDSIKDAVVKIIPEQNLTRTAQLTRFQAYHAIRFKHDHGYWITSATWILGVDIRKDMIMVKLCIIIVAKTTGVTRSASPTTSTLMESDHYTFKVRRLIDVPICNSIASETVTTMLLMTVG

SEQ ID NO: 946918 - protein, 108 aa, Homo sapiens
MGYTQFFETGPYTNLGGGFVPFHYPIQTTQNTLTPLIPTPKLTFVPHMAHLLQALIAAHLLFKTGTAGYLPLPPFPYLATRRPGFTFHNFITSNQILPNVNTIPKWAS

SEQ ID NO: 946919 - protein, 96 aa, Homo sapiens
MLFSEHDLALLYSFAVRRVFLLILQPFPPSANLTPRPGLSPVEHGLLKIPPLSHSPTSYDSSLHQLLNLHSFHYSVIDPFRLNPHILLQSPPSPFC

SEQ ID NO: 946920 - protein, 137 aa, Homo sapiens
LRCFTEDPGVSMGRRPVRCYRYCKNKPYPKSRFCRGVPDAKIRIFDLWRKKAYVDDFPLCVHMAPDEYEQLTSEALLAARLCTQFVHIRCVPPAFHISTRLYHFKPCASTRPFPSLLLTASKHARNVLPSLITFPFS

SEQ ID NO: 946921 - protein, 109 aa, Homo sapiens
MPCSASSPFLFRNYKLCVLFACSSSFLRRSSTLDAHAVVQWLDLGSLHPPACNDAILPAYAFLSRCDFSSVAPMPRVIQHFCNRRIPSLHARVRLASDFGVIPLSGFPG

SEQ ID NO: 946922 - protein, 39 aa, Homo sapiens
MWPTWPFPRLCVGPNSLAPCFDAELAPSRVLPVTSVLTD

SEQ ID NO: 946923 - protein, 119 aa, Homo sapiens
MAFLQDAELRAQKYLVSLEYLLLNGQTGMQSVQVFLTLPGTYFQSPGLVVSICLINDEVGEELEWGGWEVSDLTSGLNLEVHLEIDINIAQGKYHQCGFSYLSRLLSCHDFVITLFWPF

SEQ ID NO: 946924 - protein, 118 aa, Homo sapiens
MAHKPDMGDIPSFYKAKLRTTDTHEKNTLPPKRGGSKISRMKFTKILHDSLPPSSPRPYSCCAGRPTYKMDTSHKLHWEPGHSALMPPACESLKGPPPNRTAKFSGLPRDIIDNFSYE

SEQ ID NO: 946925 - protein, 233 aa, Homo sapiens
MDRGGYVGEKTRRPSTPPQYTAETRPPQVVYIRTVHRLISSPCYAWPSSLDADDASTTDHLCIYRHHAVLRSTYRFCLPLKHLCVSLVFTISSTIFLHPRPSFTIPYHLLPTLSRLASHSALLSTLFSPSFLPCIILLLSLPLPFSSSLITPLSPPPISSSPPPSLLYSFSLLLSPLFFSPPPPHLSPLIMPTSTSLPPFLSHTPYFFSLPPSPHSCYFLLSSSSSLFPPLSP

SEQ ID NO: 946926 - protein, 144 aa, Homo sapiens
MVVAREVTRVRAVRILTCGVAKGLRMHGSQHGKQTLEYLRYEDTLILEDQSTGENDMVIMRPVNRYEYKFGFELPQGPLWTSFKGKYGCVDYWVKAFLDRPSQSTQETKKNFEVMDLVDVNTHELMAPVTANGVSCMFIPDGRE

SEQ ID NO: 946927 - protein, 110 aa, Homo sapiens
FGTAAIMAPPVRYCIPGERLCNLEEGSPGSGTYTRHGYIFSSLAGCLMKSSENGALPVVSVVRETESQLLPDVGAIVTCKVSSINSRFAKVHILYVGSMPLKNSFRGTIR

SEQ ID NO: 946928 - protein, 123 aa, Homo sapiens
VAGVNLALLQVINSQYAADSSKTILVNTVKPRLYYKIQKNEPGKAATACIPSYSERLTLENKVNLGRARCNETKCATALQHYSLGDSETLSQNKNKKYKKLTMLAVLAQFTLNPTKYNHAAAI

SEQ ID NO: 946929 - protein, 145 aa, Homo sapiens
  misc_feature (133)..(133): Xaa can be any naturally occurring amino acid
LLHKTAPIANKEAAATPKAEAKAMALKANRATLNGVHRHYGMNIRTERTFRCPKTLRLLRQPKYPWTERYQGETSYDHYALIKFSVTTVYVMKNIEDNNTLVFIVDVKANKHHIQAVKKHDDIDEASGILIRXDGETMACVRLDT

SEQ ID NO: 946930 - protein, 109 aa, Homo sapiens
IPEVDSIFAERSRSVALAVLVLLSLYGLQAIHRTPKIQAYSRHPPENGLTKTLNGYVSGLHTSDIEVDLLKNGERIEKVEHSWSFSKDWAFYLLYYTEFTPTEMSLPAV

SEQ ID NO: 946931 - protein, 128 aa, Homo sapiens
MDRTILLLTHRYDALAEEHDGEEARAQQPWVLRIPAKTPGEPEEAMYRNGITLTSRNAKAKKKEYADSRRGAKEETLKGGPGRMPTKTLRITTRLQVVKVLGQWDRCQRRIHKRLTDLHSPAEMVADY

SEQ ID NO: 946932 - protein, 138 aa, Homo sapiens
LLFRNTLHERLTIYGPHAPAPDQPIDALAEEQVGQDARAQQPWVLRIPAKTPVEPQEAMYRIGITLTSRNVKSLKKVCADLIRGAIEKSLKWGPVTNAYQDFENHYMTPSGEGSKTWDRFQMRIHMRLIDLHRPYEIV

SEQ ID NO: 946933 - protein, 139 aa, Homo sapiens
MIAPLHSSLSNNRATLSSILPAVYSELSPFTGTTPASHLRPTVSSTQLALRLPDAPTARPIVPPPCFYPPPSFPPPHYPPSSPAPPPRIPSSHPPPLPPLPPVPSPDRTSTPPPPPARFYPLVSSRVPTVCAPLLSPSF

SEQ ID NO: 946934 - protein, 171 aa, Homo sapiens
  misc_feature (14)..(15): Xaa can be any naturally occurring amino acid
ERRRERREEVESHXXGGEIGEKNGKMRKKGGGEEKGRVGRGGGRERKRGEEGGGKRGKRGREGGKGGGRGRGEGGVGGRGGEKGEGGERRGKERGGGGEREGERGGRRKERGEGEKKREEEEGERERRKEEGGRGEEGKEGGREGERRKRGRRRERKKGGGGRREGGGGGG

SEQ ID NO: 946935 - protein, 135 aa, Homo sapiens
PHRALSLGRPCIRKGPKLVLIHTIVTTFNSQAFSNQGATFSSYPGPCKLYSRILARNPGPPDTLTFLSSFLNAAASFLGVRKQVPEGGEVSDAKLTGDVGEFLSCPEAGDVREASSHGPLEQQPLILSACRVLAE

SEQ ID NO: 946936 - protein, 99 aa, Homo sapiens
MQSIMRTLWYPICETVSPFQVKMQEDDTIKLLQLKTQRSLLVWEPASISQKHCVLETNVAGFTEKSVGSTETDYSRIAASILKLPVTTPYFTIRHCVCP

SEQ ID NO: 946937 - protein, 70 aa, Homo sapiens
MTPVRNMNRLIHLLNHSGWSEDKEYAIYGMRKRSLTACGLPDPASYDCDVPSRALVTRPVRKLVINRPHD

SEQ ID NO: 946938 - protein, 224 aa, Homo sapiens
KGSYPNSHSRQHDPYNPTTNPQPPRPPIPPNTDRIQHLPPHPHHYTHNPPPPPHPPPPPHSPTTQPPPPQPPHTPNPHPHPPTPPPQPTPPPPPPPPPPPPNTPPHTHPPPPPHPPPPPPHTHHHPPPPPPPPPNPLPHHPPPPYTPPPPPPPTPPPPPPPNPPNPTIPPPTPYQTTTQPPTSHSILPTTPHTLPPPHHHTTPRTPPPPPPPPPPPPPHHLPPP

SEQ ID NO: 946939 - protein, 181 aa, Homo sapiens
LRAAWRFDERLCLLDCRLRIFLGLLDASSWSPMCAKTVKLGRENVSLSNQTAVSPPRVNTAAYSWTRTPARYALTSTCGDIKPHRYRLGTVALTEILACQKSTELLILKLPVQRFVRDIALDSKTDLECLSASILALDEAIYSYLVGLLILSNLCGITLRERPSCPKTSHCAWRYGERELT

SEQ ID NO: 946940 - protein, 125 aa, Homo sapiens
ANRGSPWAIGTRGLWFVGLVFEIHEEKWLQRTYWAKHCDTLHKGPPAAPRRISAFLRADMDWLCVPTLSSRIAIPMCQRKALVGGDCIMGADFLLAALAIVSEFSRDLIIGVRDIPRYPPTAPSW

SEQ ID NO: 946941 - protein, 179 aa, Homo sapiens
  misc_feature (82)..(82): Xaa can be any naturally occurring amino acid
FGEFRGWPTHDQEFNGGSEWVRKAPGDTRPYAKNGRFESNIDRSLLKTRAGVGEPELKGSSWWIKVQGRFLGTSRSLDAVGXDSGHIRGAVNMPFMDFLTEDGFEKGPKELRALFQTKKVDFLQPFIATCRKGVPACHVALGAYLCGKPNVAVYNGSWSEWFCRAPPKNRVSQGKFKKA

SEQ ID NO: 946942 - protein, 114 aa, Homo sapiens
ILAASQRTHSTATTYDMLGIYSIHYSTLPSGPEFGIGRQQLQHPNQAQEVHEKLRAWLKSNVSDAVAQSTRIIYGGSVTWPTCKELASQPNVDGFLVGGASLKPEFVDIINAKQ

SEQ ID NO: 946943 - protein, 206 aa, Homo sapiens
RIAIAFSGGLDSTVLLDAAVRVAGASRCVALHVHHGLSANADAWVAHAEAEAARLGVAFESMRVDVPRDSGLGIEATARERRYAALDAMCERHGAATLWLRNMRTIRPSPVLLQLLRGAGIAGLAAMAPRYRPDGVSVERVRPLLRLLRAQLERYAEQHALAWIDDESNGDTRYARNALRIDVLPALAVHFPGFRDALGRAAQHAA

SEQ ID NO: 946944 - protein, 115 aa, Homo sapiens
MKQALLPRQLAGITCIHLLHRFLDLTDAIEERTLDGLGPFDFQDTDIPFGGPFQLNSMFRRLKKKRFELGAYSFHGPTGGTGFSSGLAWGLPGLPNGNEHWCLSPALPYYRIPPF

SEQ ID NO: 946945 - protein, 120 aa, Homo sapiens
WLEIDEFLFLKNANKGGTRWLMPVIPGLWEAEAGGSLKARSSSPAWPAWREFVCAKKIKIGQGWLCAPVIPVTQEVEGGNCLSPVGGGCIEPSSCPCPPAWVTEPEFVSNSPSKPTRICP

SEQ ID NO: 946946 - protein, 116 aa, Homo sapiens
VPGIVCTGPFVVWAIQPLCLFLECTRSHEDFTVGHGVYVLPINSPADMVFSINGVQDPGPPRAYILQREGGWISGFQGMTLPPEFGGVWVLGDVFIRQDFSVFDRGNNQGGVAPVG

SEQ ID NO: 946947 - protein, 116 aa, Homo sapiens
LVPMHLAPERPQCLLTMARVLPTSCQSFPKETHSKYFFFPVESEKENGIVVHSVVPCNLRSLMCSLSDLKDPGVNILGIVIIPLNPWILNPVIFQYKGWLFLFMSLIWFPSCNSAP

SEQ ID NO: 946948 - protein, 42 aa, Homo sapiens
GQSLVIPPEIGNIGFNPINSVCVAAVMSLTSFEQMKITFNSF

SEQ ID NO: 946949 - protein, 68 aa, Homo sapiens
VLRAGFPAVALGLQAQVQVPGPRSLDLWPEQGNPRARYWRNCPEPLARGSITKFKPIKQYEYLCFSAL

SEQ ID NO: 946950 - protein, 35 aa, Homo sapiens
GHVRAPRGAGKELPPDPGDPPIDARGHHNKEPSTL

SEQ ID NO: 946951 - protein, 148 aa, Homo sapiens
  misc_feature (114)..(114): Xaa can be any naturally occurring amino acid
HLHTFSAHPWCVAGALESVRILKSAEGRVLPRQPQRNVKLMRQMLMDAGLPVVPCPSHIIPVGVADAAKNPEVCDELMSRHTISGQAINYPWVPRGKKFLGIAPPPPPPPQMMXYFLENLLVPWKQVGLELNPPSSGECNFCRGPLPF

SEQ ID NO: 946952 - protein, 70 aa, Homo sapiens
MVSLFKSKDLEEKKEEKILYVTDPQKGAHESELFASSTICTYKRSMTVRLMPENSENISKKCYLLTAKRN

SEQ ID NO: 946953 - protein, 67 aa, Homo sapiens
  misc_feature (13)..(13): Xaa can be any naturally occurring amino acid
  misc_feature (44)..(44): Xaa can be any naturally occurring amino acid
ARRGPFFAFFNPXSSGRGVQNLPQNLFTFFRIGLKPFNKGKEQXFPQNFFKEVEQFPQVAKAYQGRY

SEQ ID NO: 946954 - protein, 113 aa, Homo sapiens
KSQPRGPFFEPPLGKRGLGNTQTGLSGGGGPPPPLGKVPVFVGQAKTKPGWGYGKVKNFFVPPKFKMVRKTILKKTFQNSRWGKNFKNPFFLYTLKRPFPRVLSKKPKKVGFF

SEQ ID NO: 946955 - protein, 72 aa, Homo sapiens
ICAGEGSYGRIRLEEQGSPSFPGLKGSLELGFEGSGKSSEQWSSGEMEDGGEGVPSGDIQHLSLETFEVATT

SEQ ID NO: 946956 - protein, 45 aa, Homo sapiens
HWARDVIGATVCDVCGKVFSQRSNLLRHQKIHTGERPLRVQRVRP

SEQ ID NO: 946957 - protein, 76 aa, Homo sapiens
MEFHVNRTQVFLEIRLLSLSIWSLEFTHAVAESSSLFLFIAGMHYSLSICSVVLIYYEYSCYNEIKHILKHPKKTK

SEQ ID NO: 946958 - protein, 65 aa, Homo sapiens
  misc_feature (19)..(19): Xaa can be any naturally occurring amino acid
VFKPNQASQHDMCRFHSEXYIDFLQRVSPPNMQGFPKSFNAFNVGDDCPVFPGLFKFCSGYPGML

SEQ ID NO: 946959 - protein, 108 aa, Homo sapiens
MSYQQCEVHFGAKPFKYPPSMEFSPFNGYAFLTAEEKILLPRPRRLALFKPVRIPENCCSLCCDEVADPPLKPCGPSDLCMDCALQLETCPLCRKKIGFRIRPIFHIS

SEQ ID NO: 946960 - protein, 72 aa, Homo sapiens
IANLSFDITGRFLASCGDRAVRLFHNTPGPRAMVEEMQGPLKGASNESTRQRLQQQLTQAQKTLKSLGALKK

SEQ ID NO: 946961 - protein, 183 aa, Homo sapiens
TRRKNVEEENGSDESEIDISSTDSENEEEQNGEEEIVNIDFDFFGGNPEVDFHALKNLLRQLFGPQESTRIQLSSLADLILGSPTTTIKTDGKESDPYCFLSFVDFKANHLSDYVKYLQKVDMRLSTFFKTMIDSGNKNCALVLSERLINMPPEVVPPLYKITLEDVATALGDDKHYDFYIIV

SEQ ID NO: 946962 - protein, 129 aa, Homo sapiens
ARGSLSPLVPSPLYSPEQLGPGRGDSAYLVPPWPPGSPWLFIRVCLPRGIDPFPPGWLGGGAQGPCDPSFFPPVPRLGLAAKLASPWPPVVSWGGRGVSPPLCLPLPSSPLFRILMSFLFLPNKMMETH

SEQ ID NO: 946963 - protein, 80 aa, Homo sapiens
QTFMSCHLIPGMFQRLAQLRKNAFASVILFGTHNSSSLFGVWVFRGQELAFPLSPDWQVGFESYPWRKLDSGNEETPTLV

SEQ ID NO: 946964 - protein, 87 aa, Homo sapiens
ARAHTYNPTIGATKRKSEYTVNSHKNTFIHYNGFEANFDASLKILPLVTLLECGKVMIRFSSELLASLIERQTPKNLLATPKHQLDG

SEQ ID NO: 946965 - protein, 123 aa, Homo sapiens
FYFLGTGKMIPINLFRRMGSEGNMWGGILLTGEGKQRLPFLFSLRQTGGDLKGGGSQGEGVGGTPFSKAKTGGLFLFFRGVFSGGRGAQLVGGGGNQHSLVGKPRGLKTTFNPTGLGGGGNFF

SEQ ID NO: 946966 - protein, 104 aa, Homo sapiens
SPPQPWLDAGPRPSFFGGQMTVSWTFDAPPALPVANVMLPGAVEKLGDWAKQKAATNPEALPQKAGEMIGECMGPGALGSLPNPFQKQRGMKKQAGSSGLMPFL

SEQ ID NO: 946967 - protein, 69 aa, Homo sapiens
RHELANPFQEIYNHITIMVYHLPFRKQAFEGFSQYQSDARQFPALQVIDQLRKEWPSCNELGAIGMLNQ

SEQ ID NO: 946968 - protein, 107 aa, Homo sapiens
HEANTKDNSNSDDEEHSSKKRKTKKKSITDFFKKQKKNEDTTTQNGAPDDAAIKQPRLLKNCILKPYQLEGLNWLITLYENGLNGILADEMGLGKTVQSIALLAFIY

SEQ ID NO: 946969 - protein, 41 aa, Homo sapiens
MQRSYDSYYYPAAGPGPRRGTCALGGSLGSLHASPFRIPED

SEQ ID NO: 946970 - protein, 133 aa, Homo sapiens
ARAKLKCRGKGLIQNLNVKRQIFRIVMTVLGLTLATAFQNSDFDIGNEEFVNTDRETIFSKCIIGFHIDYIENGQRQNNNDTHSPYRYRSTVAMTGMIRNLMLLYLHQTRVVTGIAMLINTIKVSTSYYLKYA

SEQ ID NO: 946971 - protein, 92 aa, Homo sapiens
ARECSLKSKDRVRPYEKSNKTFRMAVDFQRNWVDIRGVYRFYVKELVDGKLPKTYGKMGVREFGDKKVQVELDENEKTINIFWPTTEKEDRT

SEQ ID NO: 946972 - protein, 71 aa, Homo sapiens
HEEVYQSITSQAAAAYALVLNGKCVDSAKASLSFPVCETLTSLHGNTGPLHLELMFPDGYPQTLCSNKLYN

SEQ ID NO: 946973 - protein, 89 aa, Homo sapiens
TRNNYIIDCYVQYASSALATKVFLRSAGGAAFPLFTIQMYHKLNLHWGSWLLAFISTAMIALPFAFSYWGKGLRHKLSKKDYSIDSVEM

SEQ ID NO: 946974 - protein, 118 aa, Homo sapiens
TRESMGGTTLAPERVAQTVKFIYDMPQTVNIREIDIAATNQNAVIFNILAKKDTSYSLVSFLAIYFIFYLGDKLCLQKLLFRKYFLKKIRSFRFFGCFNNISCHKFWSYVITIVKFFF

SEQ ID NO: 946975 - protein, 43 aa, Homo sapiens
PQQNLMVSHPLRQRSVSLDSQMGYLPAPGASRSCEIERCAFVL

SEQ ID NO: 946976 - protein, 63 aa, Homo sapiens
EKRAQANARQTLKEHVQDFAMQFEQQHGLRGCWTDRGGAQQDCSLFLPQIPPDPPGAIIKRIL

SEQ ID NO: 946977 - protein, 118 aa, Homo sapiens
FGWNTEILCSGEVQVRFGWNTEIPCSGEVQVRFGWNTEILCSGEVQVRFGWNTEILCSGEVQVRFGWNTEILCSGEVQVRFGWNTEILCSGEVQVRFGWNTEILCSGEVQVRFGWNTE

SEQ ID NO: 946978 - protein, 184 aa, Homo sapiens
LGHDLCGIVFIDPGEDFKLGTIKGQLTFVQVISPGGDYECNLVSLQWRKDMEGFVDTSVAKFVFDRNLPFVGRQMALHANMASQVHYSGSNPPDIYPSKWIARVRHIKGFRQRIWEEAAYSTPGHPLVHPPSHSKAPAQTPAEPTPGYEVGQRKGLFSSVEDFTEFVEAGALPPALALEGIACQ

SEQ ID NO: 946979 - protein, 51 aa, Homo sapiens
MLIVFSKDEFPEVYVTNSYENYVADIEMDGMQVELALGDTAEQEDNDRLRP

SEQ ID NO: 946980 - protein, 98 aa, Homo sapiens
VHTPVPARTVDASVPPAGGAPYRAESESLESRLFISLQLLSCSRCSDRLCVLRRRHSRLCRNDFLAFSSSMGDTPSSSTSWISSKVTGCVLKRDWRGR

SEQ ID NO: 946981 - protein, 99 aa, Homo sapiens
PHPILELVKATRDLLPVPSQTGLWGLRCLLCFCTSVQPLAWLRSEELPVATEPLERGQFHSQTAVSAKLMLDFEDLIAGQAWWLTPVIPALGGQGKRIA

SEQ ID NO: 946982 - protein, 37 aa, Homo sapiens
MPHADPSFPPMASGPTRSGIVVAANFAIKTLCQSLKK

SEQ ID NO: 946983 - protein, 172 aa, Homo sapiens
  misc_feature (21)..(21): Xaa can be any naturally occurring amino acid
SRASGDVPAVAPARLRHGDVXGVDLGALPHQDVAEGAGALDQFQAPGREGVRVVDVLRQERVGQGLGEGVDPDHAHQKARQRRFGIPVLGEEPGIELHVVGGGIENGELLGDRGIARDLRERRRPRHAEMLAIGVVAGEPVGAGLLDGEPFETEDRLTGVADAQGAGGLGGR

SEQ ID NO: 946984 - protein, 130 aa, Homo sapiens
GGPPGFPLGKGAGGPPPLIGVGPPFGPPRVSPFGSRVVFWGELGGGTLFPPGPGLPGFRFLNPPPRGIGPPGPKIGRGGGSPPRGGEGEGVFGGGDPGVLSKGNPGGWAPQDSFFFKFLSQKPGKKKSFS

SEQ ID NO: 946985 - protein, 119 aa, Homo sapiens
CKSKDIVLVAYSALGSQRDKQWVDPNSPVLLEDPVLCALAKKHKRTPALIALGYQLQGGVVVLAKSYNEQGIRQNGQVFEFQLTAEDMKAINGLDRNFPYFNRESFWEPPPNYPNSDEY

SEQ ID NO: 946986 - protein, 103 aa, Homo sapiens
RDRKMVGNVTGAQAYASPPKGLNIWALILGILMPILVIVIPGVFFQAYDRSGGIPEARGFAHALYPPDSNFHSSPRPRSRVLYQPFILPRFFQWHSIKGTGFW

SEQ ID NO: 946987 - protein, 67 aa, Homo sapiens
YPAVSAVWGQCQVRIRYLGERRGEPHSLLPLSRLCVRPNLGDTRVGQVFALPLPPAIKGYLFYQGAL

SEQ ID NO: 946988 - protein, 98 aa, Homo sapiens
RASLKGYQWLKDKILSEEGRRQQAKLKELQAIAERLGCTLPQLAIAWCLRNEGVSSVFLGASNADQFMENIGAIQVLPKLLFSIIHEIDSILGNKPSS

SEQ ID NO: 946989 - protein, 125 aa, Homo sapiens
KENFSPPPKKFLAPPPPRGFFKNLVGGKGPKNPNPPPPLFGPPPPFGGGFKPPPGGRVFPPPKGFVFGPPPPVVFVFYKNFGGGVFPPPAGPPPPPPREGFFFGGGAPPPPGGFFVFGGKNFFWG

SEQ ID NO: 946990 - protein, 102 aa, Homo sapiens
AGPPSGSGTGAPGPILEPLSFREGAGVSPPLASLRLPYTRLHLQSPRKLALKLQGFFFLQILDQSLIFVFCLPLMLGPGRRALLLFFLCSFYRPRVLSRGLS

SEQ ID NO: 946991 - protein, 136 aa, Homo sapiens
  misc_feature (100)..(100): Xaa can be any naturally occurring amino acid
PPRPEIDEESPAPLEGFNRTASGGAFVGFTVPSLSLPGPYPPRQIPGLDAPGYEGKIFFSWAAPGDNFYGGKGPRFFLRIRARIFGFKGRFGDAFPGKTXGLAPKGGPSQGRFGFFPRKFFRRKCPPPFFCPLKDR

SEQ ID NO: 946992 - protein, 123 aa, Homo sapiens
KTPPPKIKGGFFGPPPPPPGEPFRGIKMAPPPPRFFPGGGGGFFPFKRPPPPRPFGQKGGGPLKKKGKGKGNPVPLFHCPGGGAPGEGFPVPPGPAPASFLARGDFSGGVSVGGLGGGFFFFF

SEQ ID NO: 946993 - protein, 111 aa, Homo sapiens
EIPGLGFEAPEAVGEVVYPQEMFSQPWITAGCFILPGLQVILYINEEEYNPFLVSSTGAKVIIHRQDEYPFVEDVGTEIETAMVTSIGMHLVREYSHFHRLGENRSFFFKG

SEQ ID NO: 946994 - protein, 89 aa, Homo sapiens
ESEIGGAHNPGFGLLCISLITFVSFSLRKSDGHYPVSLLTSSIRFRRSSGPDDQSLEEVFCYANRSVQLLEAILTPFMGIVPPQFLLPP

SEQ ID NO: 946995 - protein, 43 aa, Homo sapiens
VQDIICVYYLEPELQVPSLASRVDTHNPGAVRALRGEVRGGAA

SEQ ID NO: 946996 - protein, 111 aa, Homo sapiens
RGPKTPIFPDAKESSPVFEIKGIVEGILKRPPDEQRLYKDDQLLDDGKTLGECGFPSQTARPQAPAPVGVAFRANDPFEALCIEPFSSPPKLPDVMKPQDSGSRANEQTGQ

SEQ ID NO: 946997 - protein, 104 aa, Homo sapiens
  misc_feature (77)..(77): Xaa can be any naturally occurring amino acid
IAQDRTVHRKVAKGRKSFERLSSCSPASAPAPPALRPSTFSPAAVDPAGLRSEGGGQSGLVIFEREVVAQKVGAGEXLNLEAERGDEGKEDDGVGPRTAGRGKV

SEQ ID NO: 946998 - protein, 85 aa, Homo sapiens
NAWGRLPVDLAEELGHSDVARDLGAAAGGPRGSNHARINAPEGPSDIPDFKEPKRVLENLRKLRSSVPEGPTGPQLPPPQPPPLL

SEQ ID NO: 946999 - protein, 191 aa, Homo sapiens
ITTADLGFQHQPRTLLQEDLGHFAPIVTTKRGVGVTMLPPPGCTVPDTLHGAKRRKQLQHRALVPPGRRHDPATRVSPDTSTAPSRRVPLPPHGDIGRGRSRRRDSQPYPTAGFPQHLLIAKEAETRGLGGVQGGTAKGSGITDQYGPSGQPDPKKAEELRLHAPSLKRPESTRGRPPPTPPRPQQARARP

SEQ ID NO: 947000 - protein, 129 aa, Homo sapiens
PSPSTVSSAQRYGSPSQQRLSPQGQQPLSPQSGFPQQQRSPGFPQLFRASSGSSPNQASKPGATLASQPRPPVQGRSTSQQGEESKKPAPPHPHFKKFQFLTYNPQHNRTPPRVGPQVKTRPRLKPSAT

SEQ ID NO: 947001 - protein, 135 aa, Homo sapiens
ARGIWGGLWGANGPPGIRRFFKGKRPFWGTRGAGLLGPQDQRGWPPKGGGRGPPQPRAFPGRPRGLALGGGFFPFSPILKGGFGPIPLFPPGGEALKPPLAPFFRPLTPAPGGGGGVFWAPGFFLTRPGTPRGPG

SEQ ID NO: 947002 - protein, 32 aa, Homo sapiens
GPPGFGGWLAGGAPSHPPPPPPDVPLKLLGRG

SEQ ID NO: 947003 - protein, 137 aa, Homo sapiens
RAGGKGGVERRDAREQKAAPRRDAREEKAPKEDLWKKRDSVQYTMYHREAGYNLIKTFKKKRQVETPGDGIGRQTKSKTTKDKETPGKTKSCTINVTNMMQSKTYHDYKKLTVKKKKKQARKKPGLHATDNLTKMLR

SEQ ID NO: 947004 - protein, 70 aa, Homo sapiens
KTPPADPCCEPYGPTAKWPNGSPRKNRVCGIGKFALTGEEFLSHIYMRNQCPQVFERGVGISPSLLSLIF

SEQ ID NO: 947005 - protein, 186 aa, Homo sapiens
  misc_feature (128)..(128): Xaa can be any naturally occurring amino acid
TALSRAKGGEGFLKVARPFPHKFFPGEYTPRGVGFGIQKGMGPSPSFGTLGVPRPGPLNRGGFEFFGASSLFFRTTPVGAQAQVFKGGVLTSPGPEKIGFPLSPFPGGGGGGFGGKFTPGGRGNPVPXGGSFFLGKVCSPWPPPHFPRGPKAWGRGFLSPPPPLARGVVGPVFFFLGGGPAPPPPP

SEQ ID NO: 947006 - protein, 100 aa, Homo sapiens
SQPPAARPAQLPPRPLAAVPLLVPSRLVRGCAGGRAGAQGKLEGRAREGSFVDFTAANIWAQRGPPLAVSPPRRLGDPRGLSPKDGDFDSGPAPRDAVAA

SEQ ID NO: 947007 - protein, 127 aa, Homo sapiens
PQTPGLNPSPSPLGWAPGVGGGVSPGGGWAPPPFGVPREGGPGPPWGAKPKGSFLGVPLGPFESPFLFSPGIEKDGVPLFPWWAPPGRGAGPLFSPLLLFFPLLGGPPPFGGGGGGPGKKKGFWRFL

SEQ ID NO: 947008 - protein, 165 aa, Homo sapiens
EEPGLSMREISDGVSELPVAKPPKRTCQPFLGSLALPAMSLPCKPARANCPAARKISGQAVKSHNLRWTFKGPAVGRNDASMSPKALGRRAAQHSGLIPGRHWVWVGHPVLLLTQGASSALNFVNTSTYLLVPLSKPSCYCRGMTLTHTLPAWSSSEWTQRSLSE

SEQ ID NO: 947009 - protein, 104 aa, Homo sapiens
  misc_feature (3)..(3): Xaa can be any naturally occurring amino acid
  misc_feature (35)..(35): Xaa can be any naturally occurring amino acid
LHXFLRCPGHWDGFPGKAIGQSAFQPFQGAVFHQXEFCFPGTAPMGGGRRATLFFLKKKQKNSLVFLVPSWVNKEARKKGFFKNWGFNFVFFAPAKKKFFDGPP

SEQ ID NO: 947010 - protein, 102 aa, Homo sapiens
LGHHPRFWATPPPVFQAGGPSLIQQVGIDPGTEIDPQARFPGKGRNGLGPKDPLHLGHNGLVMAQVRKKLFQFLRVEPHNSLAKAVGRFSLMLHGLVTPSLP

SEQ ID NO: 947011 - protein, 74 aa, Homo sapiens
ACEVQGEQFAVSIEPLTGFVTSDFGMELEAVILSTLTQEQKTKHCMFPLISEELNEQNTFTYVTNLDILHMYPG

SEQ ID NO: 947012 - protein, 176 aa, Homo sapiens
DAVVEGVFTVPGDGCVDYKALLAVLRDGGYSGWLVVEAEQDPKKAHPLTYGRMGFAHMSRLLADLRMYRRGEAPRGDTGPPSPAPRGQRGGPAKLLGRALVGQPLLHDCDLVGLVRLVDIGGLGLLELDRDLADLTGEPERYLVGLADRGALIRAHIRAFVRRVEAALGLLDPCGR

SEQ ID NO: 947013 - protein, 118 aa, Homo sapiens
NVIASINSRIDQAEERISELTGNISELSQTKIRIKKNEQNLREIWDYVETKSMIIGILEREEEKASNLENLFQDIIYEDFPNIAMENNIQNPGNAENPCEILYKKTIHEPHGRQILQG

SEQ ID NO: 947014 - protein, 113 aa, Homo sapiens
GGECGGGWAFPPGFLGPFPKLEKGASPLLRGGGGGFWANPKTMGIGGGGGHKGKPPPPLSLKGGSPNWGGWGGEWPPPRGPCWVYGGQGQPGGGGFWGWFPGGGGGFLEFFSL

SEQ ID NO: 947015 - protein, 50 aa, Homo sapiens
DVHNEPGTTPEVAPYTRELVNRVERSQLPPRGPEVIGVWPPGSRHAARGR

SEQ ID NO: 947016 - protein, 83 aa, Homo sapiens
GDLPTVTCPCPDPAKLRTGWRLHPPSCLTHAESTVAERQRMQERGSPLMPVLAGVPMGTGDVDVCGLRGYASLGYKTKQGEET

SEQ ID NO: 947017 - protein, 100 aa, Homo sapiens
PGFFFPRPRVFAAGGAPWFQVSPFRPQGGGVRAAAHRPFRQVLSLFPGGQAPEAPRRGAFLSGGSLSRGFSPCVLICGRPGGGGKPGIPQLPPGTLTPPL

SEQ ID NO: 947018 - protein, 88 aa, Homo sapiens
MDRALVPLVPLLGLVKFWGVFGAPGLGGFWRLFGFLGVFSFLGFGVRGGWGVGVLAFPLGAGGPGGRGPPPFPAPGPSPFSPSGFFFN

SEQ ID NO: 947019 - protein, 103 aa, Homo sapiens
LGRWFRPKIVLVCWLKGLQELPREKYFFWDSGGGPSRGPPPFVLTSILGVAAGDWKKGDPFFCLVGQGALRLAFTKKTFAGLGGKPPLVIVFFFLGGVGGPCF

SEQ ID NO: 947020 - protein, 75 aa, Homo sapiens
PGLEESTSLVCQGSEGAVGHGGGPLPGLRPRADRVQHHRARDRAMEARKTARRRDSASGDAAKAEAKKETEPAAA

SEQ ID NO: 947021 - protein, 123 aa, Homo sapiens
QPIRYEALRLRVATVHSTSIAFLFNFFELFDFVRCKEVGSSFNDCAAPFTSKNYCDEGRACLSHLSIYLAGRAAPPLHVGFARSGVEAPRWPPRALSRVPPPARGVLQAPPSLFRVPFFFLFK

SEQ ID NO: 947022 - protein, 73 aa, Homo sapiens
NEVSGNAAIGKPDSGRSGFSCAQVDYVHINPMKHGLVKRVADWPHSTFHHLVEQGVYPKDWAGGDETALDYSD

SEQ ID NO: 947023 - protein, 129 aa, Homo sapiens
EVLALGSKKGWPESGSTAGVEQAVHAQREGPRARERRRDSLRVPAESWTSGGPLPILTHAARNTMPHLGEPHSHTRSLVQTPACTCTPRFTGQRPDCTPKRCGFSRLPAALGSLIPAPAESSPGGEEDA

SEQ ID NO: 947024 - protein, 128 aa, Homo sapiens
SGAGALCKNLTSLQPTEMAAASRALRWGSPEGVSPGGGRGPSAKPTRHSPMSPGGIATSLGGRRPAAGAGPDPGERESHEPGPGAAETSPGRPSAAPARARCGENGPGRERPLSGRPWEALGSLLCGR

SEQ ID NO: 947025 - protein, 155 aa, Homo sapiens
DLPKKESRRTHPQRRSKEKGEIWGSAPSFRKAEVQGESPSERSLVELAERGGSRRPCDETPTLTPAAPRDLREDSSGGRASERGLFGFQAAPGPAPRDPAGLSLPARQQKRITEAGAGLTVGPEPAPSRISAKTSPRTPARRVEARGTRTGPEAA

SEQ ID NO: 947026 - protein, 129 aa, Homo sapiens
GTRIGLPGTPRENVLRLAVLVKQSGLDGVVCSSLEVADLRQNQGADFCLVTPGIRPQGALCDDQKRIMTPYDAIRAGSDYLVIGRPITASEDPKGVLLAIEAEIEAALCCLTSCKVMLRCPRSKKAMAA

SEQ ID NO: 947027 - protein, 47 aa, Homo sapiens
GGPRVPCWGGIFQFFLRFPGAAFFIKTLVIEFKAPPKSRMTLQDPLF

SEQ ID NO: 947028 - protein, 79 aa, Homo sapiens
KKFTLMEIKLRNAERANDVAEKRNDMVQKEMEQFFSTFGELAVVTQENRGRKHNLDSVSLLLPALFDGFGKDSRDFDGI

SEQ ID NO: 947029 - protein, 50 aa, Homo sapiens
ARRPGLGTDDRSVKDFADCAAFSKRTRAMLRFLKDAAVEALNLTIIWFAT

SEQ ID NO: 947030 - protein, 37 aa, Homo sapiens
MRFPGASIHCKYQIAQVTNPRLYDVKPYAFQFKLKEN

SEQ ID NO: 947031 - protein, 60 aa, Homo sapiens
LAVGGEVPGKSPSTVSARKLILHHGEAHGVYRHVSALGQRRENQRQEAGDARHLAQHAQR

SEQ ID NO: 947032 - protein, 202 aa, Homo sapiens
  misc_feature (52)..(52): Xaa can be any naturally occurring amino acid
  misc_feature (89)..(89): Xaa can be any naturally occurring amino acid
PSSCRGGGGVLPVLNFPRGRPPGVGGNSWGGGGPPIFPLLFLPRVLGGAPKXEGAPPPPPPRGGVFFVWCWGEAPSHTTPPGFFREFFXPPKGGGAPPLFFLWVKKKRGWAPPPPPPPEGVFFMGGGGVFFPRPFFFFGPPPLFFFFLKGGEKLFWARGGGGEKNFFFFPPRGGGPGAPPPPGGFFFSPPPGGFFFFFPGPP

SEQ ID NO: 947033 - protein, 72 aa, Homo sapiens
PYTGIVMTPVRVTHTVPIYDGYALPHAILRLELAGRDLTDYLMMILTECGYSFTTTDEDKKSCVTLIRSCNT

SEQ ID NO: 947034 - protein, 82 aa, Homo sapiens
RRKVLHEIGAHNRRPKVGNKDVGSVPNHMFWGSHETEVDMRPRKLPRQDFIKSYGPKVWAEEKRCRRKNSWVTPQGECLVVS

SEQ ID NO: 947035 - protein, 114 aa, Homo sapiens
ILENRDSAYLTPDLLNSESSRDGARQSAELMRSLTNASDAVEVGDHGAWARSARAASYMLGYRHVEMGRRMQPQKQAKTFGSNAKACYIYGPQKTIPERCELIDTFRVWEYKDS

SEQ ID NO: 947036 - protein, 88 aa, Homo sapiens
VRYYQITLQDLYGGPQLTAASWSTSGSRSSTTTTLCPGSRASFWIPSSAFPYSREEEPTECGLAASPAFGLAAAQSKLLGQVGAKEEA

SEQ ID NO: 947037 - protein, 114 aa, Homo sapiens
TGCTQEYPSSHLLTLGCVNRLQSNPNHTLLPRFLNDNVKGRYDLASSCPMHGWAPAKDPPSSTPILATILHANVSLRAQKTLKGLCLRYRALKFFALRVLLTNSGHQPCSRNYP

SEQ ID NO: 947038 - protein, 54 aa, Homo sapiens
MAHWVLASLPSSQAVSLLSHLDPWLQVAPQSGLYHLGLQIYWYVLVGQDISGSY

SEQ ID NO: 947039 - protein, 75 aa, Homo sapiens
LEQKKTNTQTKTTNKANQTDNRKQNEGGTGDNTDQQTKPKSSEEGKAGRRGRCESKGHGAEGGPAPRGGQARGAG

SEQ ID NO: 947040 - protein, 59 aa, Homo sapiens
MPKWAAVVVLLEGARYPACQHGGLPKPLTLRWEPSSQPNIPIVGIIAGLVLFAAVIAGA

SEQ ID NO: 947041 - protein, 65 aa, Homo sapiens
MAGQEPALSTSQPDYDVARHGLLHVAGHDRFARPVVTFSCCRNATLPRAAPTAAAGLIRRTHCTN

SEQ ID NO: 947042 - protein, 191 aa, Homo sapiens
TDKNDKSCNDHKELSISQVLNAELLESHQEEKNQLLKKIAAKDDDLKPTAKSYAEILDAREEEMTAKVRDLHTQLEELQKKYQQKLEQEENPGNYHVTLMELQTQLAQKTPLISASKLNEQEFRAQHHNLDDRLKKYEKNVYATTVGTPYKGGTLYHTDVSLFGEPTEFEYMRKVLFEYMMGRETKNMAKL

SEQ ID NO: 947043 - protein, 59 aa, Homo sapiens
MAGRRTCGGPETGRDSGDKGQDRNDDEGQERVQVRSKESTCVPGQAVVALPWGTEHVTS

SEQ ID NO: 947044 - protein, 45 aa, Homo sapiens
GAGESGKSTIVKHDEESCMLMDLMEMRSHTKVQDIKNNLKEAMGT

SEQ ID NO: 947045 - protein, 40 aa, Homo sapiens
ISAAGQENFFKERRLMSGQYPGVSENSRTWCWGCCKSPGR

SEQ ID NO: 947046 - protein, 37 aa, Homo sapiens
MRYHRKTPGERDQKRVIQEGRGELPDFQDGTKATFPY

SEQ ID NO: 947047 - protein, 66 aa, Homo sapiens
VSDHQDPVRLSSSALKRKTMMSDLREVRVTRAGRCRRHPDMHLMRTFTTKSPRAPARPNIIVAKHR

SEQ ID NO: 947048 - protein, 73 aa, Homo sapiens
RLHKDAWKLKCGLIDLVVGPVCPPKEYDDELTLLLKFQKGKPNSPLGNSELRPPPREHKASDQPGERPHYTHQ

SEQ ID NO: 947049 - protein, 144 aa, Homo sapiens
MGHFARLDRIASSSFVTATQPVHALAHFTGFGRWKGLSQTLTPGYTTVLANGQIKHAGRNRVHNPQHRNSSVLECSRQDVLSVVAAHTLRLVPKALFRSLIDLTNQRIPCKRDQYTLDVAIQNRSTVVPCLRQNRSRSTAANTG

SEQ ID NO: 947050 - protein, 68 aa, Homo sapiens
LPKQLSTNEKTYARLRKSRWPECVDINVTRMAVRATGWYKELIGPQVKGKTLWSSPLQQIIVMVYYPV

SEQ ID NO: 947051 - protein, 92 aa, Homo sapiens
GIYESSSVIARKLFQYVRLCTTLIYWTYEVHLNEPRKSHANAAKFQGQVRSIMLCSVRKCRYIPKFIYKHDHTMFVAVDEWIDTFHVVLLSS

SEQ ID NO: 947052 - protein, 100 aa, Homo sapiens
KHKLGDSALLLHSFNSLYRAQKIKTNPKNVAEACPHTGVQNLVGAEMFPHRLKEYSSEERGEGSSFGHPENMLQLFKGFPLLVDCYKLLTYSVLHKLMLT

SEQ ID NO: 947053 - protein, 105 aa, Homo sapiens
MNELVQSMVLAGRWTGSTENVEVPDDISAGEKEKRIGSYGLLYYSQQFYSCPTLLQATDPSRRLIIKILHPLKTEVHEGVSDDASDGIKSSCFKTSQACWWENIH

SEQ ID NO: 947054 - protein, 196 aa, Homo sapiens
GLRSDTTHLCWVNNQNSRSAQASSCPMTTGPSIYSVSQGMSEDPMSEEIQTKLGVDQGDPIILNVLYTQTTPPFTPHTPINVQEMNLSLSCHTASKPPAEYTRLIDGNIQQHTQELFISNITEKNSGLYNCQANNSASGHSRTTVKTITVSTELPKPFIFHKNFKPVEYKDAVAFTCEPEPQKQSFLWWVNGQNLP

SEQ ID NO: 947055 - protein, 105 aa, Homo sapiens
MVKAKSNSKFSEPKFEILRPVQDVGPDNGICLHEKPLQSPETLNQTECMHLRKSPLTSKEFNLYKLVGYSEKGSTDSDTIARIQRKLQGNTFCLFMYALQSMKIK

SEQ ID NO: 947056 - protein, 110 aa, Homo sapiens
MISHLSEVQMWCIHSKESSGTFISQPPHRRAGLGTVCPCTPDTVTCRYRLMKPQSLCDLLDRTHINPYFSGFFRPSCSIFHRGGPEWAPKALRLSCAAFTLAPACGRTLQ

SEQ ID NO: 947057 - protein, 189 aa, Homo sapiens
RVISQYMQYPDLTRSQRENAGSVKILGDSFLEKFFSYPSRTGSAKGGEQAEQERERFLVLGRGGSFGTALEQGVLDSLGVWQKRARFGEPQWWSFSTRASLRSPVNKVSDQAFANNLKSSRTGSSPEEQFGRTQWATPQEYDQLAAKTGLVRTEIVRWFEENRWLLKTGTVKWMGQYSTSHWRFIDLSR

SEQ ID NO: 947058 - protein, 37 aa, Homo sapiens
METNTWRTQAYTPVMPMYGSREIESRGGYLLVGYGAI

SEQ ID NO: 947059 - protein, 107 aa, Homo sapiens
YARPGVTSDEMKGLDLVLDLHKPAQGPIHDGGEVEQPQGVARGLPVLNTNRPSKFMPIHHASSYLVKYIHGLDRTARIDRPHRPGRRFAGALLSKSPSWQCHSLGCA

SEQ ID NO: 947060 - protein, 70 aa, Homo sapiens
RHNPGHVEVGQSVTTIPTVVFNGGDGDLQRMSRSTYGMWAARTTIRPLWRHYYTGTQGLIFVGGLRRPRT

SEQ ID NO: 947061 - protein, 129 aa, Homo sapiens
MVSWAELMTARMSVIRSTGIESAGGGPPREFTAGLIEGIIVKELPQRSQFCNWRLLDRNNGVQNGGTTVFITSGKSSLMKHGGAGNFPPLITARDTDRAVNFPGCFIRQLWLMKAIEFRYRARGDFREC

SEQ ID NO: 947062 - protein, 41 aa, Homo sapiens
AAAALIIPCKNVQRHCSQVPSAPVACIHHRALRISGGRIRF

SEQ ID NO: 947063 - protein, 93 aa, Homo sapiens
GPPRGKIPNFPLAGGGGLGPPPPPPFLGGGPPFPPPGVVFNKGVPPPPPFFFFGGPRGRAKTPGGGAPLGFPSLGEFSRGPRGGALSPPGGFF

SEQ ID NO: 947064 - protein, 88 aa, Homo sapiens
PPPGGGGGPPPNLGPCPGPFLGGGGGGEVLVPPPPGMGWGPPKGFFGAQGFFGGPPPPPKGIFRGLGGPPPWFPPQGPPPGERAFLGF

SEQ ID NO: 947065 - protein, 71 aa, Homo sapiens
  misc_feature (5)..(5): Xaa can be any naturally occurring amino acid
GLAGXKPNGAKFSKGAAFVSKQEGSEVVKKPRGYLYQWVGAPVPYPDPLEPRREVCELNPDCDELGDHIGF

SEQ ID NO: 947066 - protein, 106 aa, Homo sapiens
TKRGRDLGAYLRQRVAQAFWEGKNTQVAKPEACDQMYESLGGLHSKYYKHKDPCPKNTSFSGLLLEKDKVILSPDPLEKVKEINKGMWKKLQEKFAPKGPEEDYKA

SEQ ID NO: 947067 - protein, 99 aa, Homo sapiens
IADYESGRAIPNNQVFGKIERAIGLKLRGKDIGKPIEKGPRGKCTQSLEISGLQLILFRRFPLAASSVFLTGRTEQGVQLGGDPPQPIPVVKQTKPCKG

SEQ ID NO: 947068 - protein, 112 aa, Homo sapiens
PPPQGPLWGGFSPPLWGGGGAPVGPMFFFPPPGPSRGPGGGGFFPGFFGPPPPGGLFFPPGGKKGGRGAPFFGGVFLGPPPPPPGFFFFFAGGGGGGLSLFFFLRGDIGPRG

SEQ ID NO: 947069 - protein, 79 aa, Homo sapiens
  misc_feature (53)..(53): Xaa can be any naturally occurring amino acid
GHYTALCRCQTGWHVYNDSRVSPVSENQVASSEGYVLFYQLMQEPPRLPVTPXSFGTCEATLNTLKPQAPPSPIKKTQK

SEQ ID NO: 947070 - protein, 210 aa, Homo sapiens
  misc_feature (70)..(70): Xaa can be any naturally occurring amino acid
MFGPVLLCERVAAALSWWREGLLGPRGGVPLSIIRHALVALGHLALGRGRLPKVDILPLQGGVFRGSFPXPPSGVRAPPGVFFLGAPGGGPTTSVGLTKGPGAGPQVGFFSLGGGGAFKGGKRFSFPRGGGGGVPSYPFSPPFLAPPNPRFWDLGGGGPPPFFGGPGGKGKRGPLFPLFWGGGPPSPWGGGGGPRAPGVWGGGFFGGFFF

SEQ ID NO: 947071 - protein, 45 aa, Homo sapiens
GKKVFAGPGIWFQPPGPPLFGGLGFPFGGAQGFPFPHQKRNPFRP

SEQ ID NO: 947072 - protein, 119 aa, Homo sapiens
SQGAPLFSLAFPPKFKRDFRPWPPPPLNLNFFPPRGAKIFFGGGGPFGPFCPPSPKFGSPTRNKMKPALPFSPPKGFKTLSRSFLFLAPPGEFPGELAPRFFSHSFLPQVFPLSPFFFF

SEQ ID NO: 947073 - protein, 84 aa, Homo sapiens
  misc_feature (11)..(11): Xaa can be any naturally occurring amino acid
GDPATFTQPVXKVARKGFLDTLGVLPRAGGGLKGAKSWGLLPGDLAEEWGLSDLAGDRGGVGGGPKGGNQARINAGEGPPKIPD

SEQ ID NO: 947074 - protein, 100 aa, Homo sapiens
  misc_feature (65)..(65): Xaa can be any naturally occurring amino acid
KGCPEGPGGTNKRGEDGDRQERKCPFLAQTERASVWPFTRPVSASERSWALWEGCVQLRNIQRVXDVPPLPPCPPHRLPFFPVFLKVSLLNKTSLCLKKK

SEQ ID NO: 947075 - protein, 182 aa, Homo sapiens
QSSRHSKLEKADILEMTVRHLRSLRRVQVTAALSADPAVLGKYRAGFHECLAEVNRFLAGCEGVPADVRSRLLGHLAACLRQLGPSRRPASLSPAAPSHAPARKVYGGLPIAAIARRALSIVLGATCSCRVSPHRASRQPPPGGGGRCPEWRPGVSGCFDVVALRMHWRGCPVKGPWPLPRM

SEQ ID NO: 947076 - protein, 179 aa, Homo sapiens
MSMARHVSRAISDLVELFEKRGLQAVHSPNPYGGVSVGPSPEFGAKYRKITEDIVLMISRQRLWVVPPPNLERPVSIPVSSHNSLVYSNPVSSLGNPNLLPWVPLFLKRNSMFFGVKNRPPRAGNTGGLMGGALSFGAGPSAGKGYGNPRNSPGLGVSPGNLNKKRQANFPPPFPPLEP

SEQ ID NO: 947077 - protein, 46 aa, Homo sapiens
MGGADCWCSSTCLIVPIKDATFCWNDASQNKDCGYDPSTDGSPMTT

SEQ ID NO: 947078 - protein, 102 aa, Homo sapiens
  misc_feature (28)..(28): Xaa can be any naturally occurring amino acid
  misc_feature (33)..(33): Xaa can be any naturally occurring amino acid
  misc_feature (44)..(44): Xaa can be any naturally occurring amino acid
FTPPPTLLFTRLVWDNEVCLLTPSRAPXPRPHXGCTQPLGYITXMAGCPVFHSSWFCCPPGLSMMRQPTPALPYFFLLALIYCRSAHGIGSRPLLSSIKFLK

SEQ ID NO: 947079 - protein, 78 aa, Homo sapiens
  misc_feature (26)..(26): Xaa can be any naturally occurring amino acid
  misc_feature (36)..(36): Xaa can be any naturally occurring amino acid
KKKKAGGGNPMARVVLDQVTLQNPSXWCPRALGILXYEHSPPTLTGPQFFLPFRGPQKKKDVEWDVEPSFKSEDNFLS

SEQ ID NO: 947080 - protein, 66 aa, Homo sapiens
  misc_feature (52)..(52): Xaa can be any naturally occurring amino acid
SYGPPKGPRFGGPFGKENFLAPFPPPPQEWFIKGVRATKALIDKPRVPPPPXTGHFGVNIPPNVRL

SEQ ID NO: 947081 - protein, 133 aa, Homo sapiens
  misc_feature (79)..(80): Xaa can be any naturally occurring amino acid
  misc_feature (86)..(86): Xaa can be any naturally occurring amino acid
  misc_feature (89)..(90): Xaa can be any naturally occurring amino acid
  misc_feature (94)..(94): Xaa can be any naturally occurring amino acid
PFLAQPSLLSFAGKAGTHSGCLPPGGKEREGGWVEGGLPPGNVTFPGPRIVSGPKPKAQPGTRLRGSAGRRIFFPSRLXXWVPPPXVLXXSLTXDSPPSPRPWSHSCPRPTSAPPHHLWTLEFGINAVCHINT

SEQ ID NO: 947082 - protein, 140 aa, Homo sapiens
  misc_feature (9)..(9): Xaa can be any naturally occurring amino acid
  misc_feature (89)..(89): Xaa can be any naturally occurring amino acid
MNSLVFWQXLLFLCATHFGEPLKKVAFVGNFRPTGQQVESLGLLAPGEQSLPCTERKPAGPVRPPQPPDPRTPGGGVGATGEGPAELQXELLRPAVRQAGGGTREPRQKRWAGLRGQVRGSELQTPKESKHVGRGRGGAT

SEQ ID NO: 947083 - protein, 51 aa, Homo sapiens
SLLFFLKTGDKNAQVKDAFPVEESFFARYREARHSQQNSDTDIKVIKVIPV

SEQ ID NO: 947084 - protein, 43 aa, Homo sapiens
TTKLKIKQRDKVSYKNTLEYYAFNMKATVEDKKLQGKINDEDK

SEQ ID NO: 947085 - protein, 90 aa, Homo sapiens
DSQDFHRRPTTTASVTTIEHKAQDGIVKIFSNSKKEDCVWLTPKKPPADNYTGHSCTPAPGKSYCNLGSYHNPETIAFLVVDYQVKAQTH

SEQ ID NO: 947086 - protein, 148 aa, Homo sapiens
RRVSTCGTPRFVVGGRCVQLHTGTMSFRMCRNSIRLRHRLTFNSQRCSCWPYLHRTWLHRGCSNRLLMHICTCYRSRLNRCMMLLHFRVLNSVHMPAEMRVWPDRAAASASVDSSESSATGCILIVWNLGAVSHPYPTTTTPTTTNSI

SEQ ID NO: 947087 - protein, 86 aa, Homo sapiens
  misc_feature (9)..(9): Xaa can be any naturally occurring amino acid
IPTFVVGGXLRVQHSYFGLAYYTLFVYHASFGEYLIKVVHHYPVTALSHKGKAAVPVETSAKSKTVLPATAYYTQVECGSPTRHPI

SEQ ID NO: 947088 - protein, 83 aa, Homo sapiens
MWYPWWEAATRTTNTTKPTSKVQTATECHQLHPTHHGSSWGCHFPGVSSRGTLCLCLNWVKFHTWGPPWAHWCPCPAPLSSHH

SEQ ID NO: 947089 - protein, 53 aa, Homo sapiens
NLWYPPGEWSKAQEGVNPQAEHEYKSVRKRVQEEILRAAHSNNTTTEQTSTTT

SEQ ID NO: 947090 - protein, 74 aa, Homo sapiens
VPTLCGGRLDRAYGDESSEGEYGTTEPSIYRTLHICFPVYNTFPRRARRSKQTQITAGEHTTIQGRGLFTVLQC

SEQ ID NO: 947091 - protein, 72 aa, Homo sapiens
IHVVPTFVVGGRRSGDLLDSQHGEFLTPNTLDFLMKNNRSQQENRLKIKPSHIKATENLLGEEAKTKKIEIW

SEQ ID NO: 947092 - protein, 140 aa, Homo sapiens
MLQLNYTHHKGIRARYRLLDYDINLQPYFGGHYFPTDLQVVDFYQLQVPTQGLPDTGLAETHVVIHLMSPTGIIYRTTCKVEGSLNSLYPEADCTPTKYEAHIEGYAEGRERCPLILRLLLHQQQQPWVGRLLSCLVVAG

SEQ ID NO: 947093 - protein, 152 aa, Homo sapiens
IDTSLSLWAIDVVVNAVNDDIVVVLCDGVGSVPPGWKVGYYHCASPKPGLMVWFAAWADTTLWPLYLYKSNYPSRLSVNHQDNLESLTVLSSFSYQSLLAERLEFTSVKPQHYGPQQPDADNLYEVPADYPDLTVALLELWVVAEHCLLLFD

SEQ ID NO: 947094 - protein, 108 aa, Homo sapiens
VHRLWWEDGARFRGLENYSCPWLSQEPRACNISSVCEHPQSGAQRAHILEGLVVCWANCCCSLGQGRSLMQNCLPCTAFKALLFLGVPITHSRSTPDVQLCLVCLDAP

SEQ ID NO: 947095 - protein, 72 aa, Homo sapiens
NPWTSNHERQIDLNISKLSVDFDKILNLIILEIFEIQTIILQPFWNSYFFKLEIMSFNPSVYISCVCSKVYL

SEQ ID NO: 947096 - protein, 94 aa, Homo sapiens
TTHLNRTQRSRARLQKQLPFPNPRLFLVSHPHNRVQESAKGQTDPLRPWVTPTVTCIVLGPGQVRKQSLVAAAQQGCARPRPSTTNVGSVHVND

SEQ ID NO: 947097 - protein, 62 aa, Homo sapiens
MSVQCSLLDQHGCQLLTEEYGGSVHLVAPGAVGQAFVEPYLRDAAQSHAHCGVLLPSHHKRG

SEQ ID NO: 947098 - protein, 32 aa, Homo sapiens
MSMHAIKRRKQGVKQQHSSRETHEEKQKQNYN

SEQ ID NO: 947099 - protein, 57 aa, Homo sapiens
FRGMDDATLEDRRRRADPPLQGGVASHTTTLAHELEAGGHDVTLVSWSHLYPSFFYP

SEQ ID NO: 947100 - protein, 52 aa, Homo sapiens
SPPGRPKQCMIRLLQRSHMASSVGYKFKIGNNEYVKKKGLKKKNNRASCNPR

SEQ ID NO: 947101 - protein, 59 aa, Homo sapiens
LDTSGSPVLVVLASFIMVAHLAIYVSRARKKYKGEYPIMYSTDPENGHIFNCIQRAPPI

SEQ ID NO: 947102 - protein, 55 aa, Homo sapiens
SEPLYRGCLLNAVEDVPILMVRVYMIGYSGVFFLRALQILMARRATIIKLTAPPI

SEQ ID NO: 947103 - protein, 71 aa, Homo sapiens
DPSTVSHVLPVLAGRWQWVEEVGDLAAEEQLRAEGADPGRSKHVLYNIERARRDYVYDRPGRDLERRRQQY

SEQ ID NO: 947104 - protein, 54 aa, Homo sapiens
  misc_feature (2)..(2): Xaa can be any naturally occurring amino acid
LXIPGARRMQLKMCPFSGSLLYMLGYSTLYFLRARGSIDGYVGHHYKADSTTNT

SEQ ID NO: 947105 - protein, 97 aa, Homo sapiens
LIRVVVPQSGNRDINSRDQLSAGVTAQAHMLQAWASTDKEVLLQQYTSKISEHPLLARNLIKRYTYIVSLNLCALANLKAQTCRDNLIDHIGRKWQR

SEQ ID NO: 947106 - protein, 94 aa, Homo sapiens
TSFNITDNLETYPRDPEKAVVWAKHVAKTNGYLGQAIRKGLNAYLEGTWHAGLLNNVIAAETGIGVSQTNIAHICEERAELARRYLGVTSVRRY

SEQ ID NO: 947107 - protein, 113 aa, Homo sapiens
MPICTALATDSPARDPAVLAGVSGMLWSALLSSIDGRLLYCVVGEFPLGKQGLVSAIRDQRIECVGHSLLQRLFLDRQRDTRELRRERVTDRRVGAGLEVHHIRQRLVTLHGG

SEQ ID NO: 947108 - protein, 47 aa, Homo sapiens
  misc_feature (39)..(39): Xaa can be any naturally occurring amino acid
MDRITRGVEIEVRAEHGVVLTEAVGQRGFATGLTPRVDXAPGCAEDV

SEQ ID NO: 947109 - protein, 73 aa, Homo sapiens
MRIVANLCFFQLLHDMTLKRKSVAYGLETESVLVHSRDEGKVGLVAASKDEIIVIDCGTAAIVGLVLYGARIK

SEQ ID NO: 947110 - protein, 94 aa, Homo sapiens
HRGSVEDSHAHRSDRSVRLSDYQPYPFRLDSVDLEFQLDLVATRVKARLAFTRTGESGAALRLDGERLKLLSIAIDGAPLSSNAYQLDDESLTI

SEQ ID NO: 947111 - protein, 77 aa, Homo sapiens
  misc_feature (5)..(5): Xaa can be any naturally occurring amino acid
  misc_feature (30)..(30): Xaa can be any naturally occurring amino acid
  misc_feature (51)..(51): Xaa can be any naturally occurring amino acid
RSQCXSPRTGPATATFTFFRNGSPRSLSQXAYAFPDLPGTRSSSLARVFPXLSRLRSTMPVSSFGPRLLVVDVMPDV

SEQ ID NO: 947112 - protein, 166 aa, Homo sapiens
SHPGDCDKLAEVGALLHTETITHSYMHCWRHKTPLIYRATAQWFIGMDKEPTSGETLRKRAIKAIEDTKFVPAWGQARLHSMIANRPDWCISRQRNWGVPIPFFLNKESGELHPRTVELMEVVAQRVEQEGIEAWFKLDAAELLGDEAPLYDKISDTLDVWFDSGT

SEQ ID NO: 947113 - protein, 149 aa, Homo sapiens
  misc_feature (9)..(9): Xaa can be any naturally occurring amino acid
  misc_feature (53)..(53): Xaa can be any naturally occurring amino acid
DLAALPAPXMQALADLYQRRIAPQVHHFWEPLLPDTGIFPSDNLAMQQPELLXDNLEVLAKGGSSAGEWGRAATNDLVRSKIKIKSLNFMRGRTFLNKFVIIDEAQNLTPKQMKTLITRAGPGTKIVCLGNLAQIDTPYLTEGSSGLTF

SEQ ID NO: 947114 - protein, 103 aa, Homo sapiens
MAPIFVALLATLFFRYMRPMVEAGRVFSAVPPLHRFELINPKRGMDKYLYTYTDAEYQRTAAQLAKKGVRFKEPQRYKGLGEMDASQLKETTMDPRHRTLRRI

SEQ ID NO: 947115 - protein, 163 aa, Homo sapiens
  misc_feature (150)..(150): Xaa can be any naturally occurring amino acid
TATRSGTRLWPAWLAPDLFVVVPAALRRALPAYSNEMILMLHATSLAFTATVADILKVARDANAETFLTFQAFGIAALLYMLLSFALVGLFRLAERRWMRFLVPTRGYPMNQSAQALATYPVDVPATRTATAAVKLQVEGIHKRYGEHEXLKGVSLNARNGDV

SEQ ID NO: 947116 - protein, 166 aa, Homo sapiens
EPTAPDCCLARILGILLDGRGESSMEDAVCSSELACSSVREDRSMLPAAISREALANGIGAIAHLAYQVRQAVAHFAQRMQHAGLVAGLCVDGNGQIACCDAIGQFHRVGRFAAQLASRLRVIRKAAATLITRAMPASASIRLRVLPYSLAESKPNMMLCLLTSLA

SEQ ID NO: 947117 - protein, 105 aa, Homo sapiens
RRHGAVVHDELRRALRLLRHRPSHLHASLVLGGSAGRAPLVLHVREEAEERHAQALLDVLRGLDRAVRLIAQEHEHEARDEADERAHARDRQHLRANRRLRLRRP

SEQ ID NO: 947118 - protein, 156 aa, Homo sapiens
VAPGAFAFTRATAVVKLTQLCDPSSFLRDTLDQKLRCATGEHEVGLHGCCLRAGSEAVGKQMLLQLLDHPRSRFMAVVGCNQGVALNTCFTVGLVYFPTPKAASSQSVTLPLTERASNVASIALPSAVPLSELIKLLINCRGFSCSCAEIDLPLSR

SEQ ID NO: 947119 - protein, 124 aa, Homo sapiens
  misc_feature (18)..(18): Xaa can be any naturally occurring amino acid
  misc_feature (55)..(55): Xaa can be any naturally occurring amino acid
QRLHEALMGQAQQGEHQXRHQDIDQHDRSRRLPRIRAQLRTAQLGVVKQGIAQGXDAVHWRHELRGEVSRSHAKPAIVMPRGQDRLHQRGSMHEVVLFHGGMDLDETVGLLQQAHAQGQQMAQL

SEQ ID NO: 947120 - protein, 140 aa, Homo sapiens
  misc_feature (33)..(33): Xaa can be any naturally occurring amino acid
DERATGGLISERRKASRGRNSELHGSITHARRXFPSAVEIVLVGPSLVHATEQAERPHSVESTTGERSEDGESIRLKPAPDTSAITEQRQLRAAAGEERENGSAMSGRKLVDQLLQPWMRGQVIDTRPKADQVVVTDRVD

SEQ ID NO: 947121 - protein, 120 aa, Homo sapiens
  misc_feature (13)..(13): Xaa can be any naturally occurring amino acid
GIAIVQHATLKAXEEVDQHRDRIDRPVRIGHVTLAALDRDPGVDAAAPADLDHVAQHARAGRLADDAVVEDLALGGQGLDDLDGAVIGHALLVAGDQEADRASMLGDLRHGGDEGGDGRF

SEQ ID NO: 947122 - protein, 128 aa, Homo sapiens
IPDREDRAGRAKTMGMTGQRMTPQGSVHHATEAELAALDVDRDHIIRAEAPLQDELGQRVLDALLDGALQRASAEDGVEADLGQFVQGRLADVQLHLHLVQARLELAQLDAGDGLDGVGAQGMEDDGL

SEQ ID NO: 947123 - protein, 90 aa, Homo sapiens
LNLIRAFTQGGFADLREVHSWNKGFAQNPANQRYEGLAAEIDRAIKFMEAAGADFDELRRVEFYTGHEGLLMDYERRMTRIDFRTGTPYS

SEQ ID NO: 947124 - protein, 108 aa, Homo sapiens
AGPHRRLDLRGAPRLLGESVDHRQAEARALALLLGGEERVHHPGEHGGRDAGAGVLDGDADVAAVAQRPDLATARGDLAVLGGDPDGAALRHRVAGVDQDVQDRDLGL

SEQ ID NO: 947125 - protein, 128 aa, Homo sapiens
KGAYCSRRQCLIPSFICNGLMHGYHACLVVRRYLLLTLLELLKDGRFHSGEALGAALGVSRSAVWKQLQHLESELNLPIHKVRGRGYQLASPLVFLSAKEIEANAASLVWPVYISDSIDSTNAEALRL

SEQ ID NO: 947126 - protein, 90 aa, Homo sapiens
RVGDQIGRLHQLAPMLIMRRQKMREKGHARAHGVEAAEHQGLDQRACIVIGNGLAVDLRRQDGADEVATLRRRAAFGHVGPHIGDHSLAS

SEQ ID NO: 947127 - protein, 103 aa, Homo sapiens
PRRVADETTHMAARKTSVLPTRIWKFPARVAQAGEPRVRDLLLACSRYYNRLVAIEAERVAQFNEIRRRHVPELAEAESRRAALQAQIDAVYRKIRQQRQERF

SEQ ID NO: 947128 - protein, 70 aa, Homo sapiens
DVPIQEVPRCTEPRSRDQEPHVEVRRLPHDRRGTGRLRQIHRQRARGDAMPRAELRPERVEHVLAARDER

SEQ ID NO: 947129 - protein, 77 aa, Homo sapiens
ELVNANTVGLAVLWIDLDALKEVNDRLGHSFGDIVLATIATRLQHTARQYDVVGRLGGDEFAMLVTRVKDLDGNAGL

SEQ ID NO: 947130 - protein, 102 aa, Homo sapiens
FGRGARSQLGSDLRHLHPGETEQDLGAFAQPSKPSTHKMNGSFISNIYPLSLLGIYPKDYKSCCYKDTCTCMFIAALFTIAKTWNQPKYPSVIDWIKKMWRV

SEQ ID NO: 947131 - protein, 58 aa, Homo sapiens
MSHLFEEDDDVGHTHLTRQQDVLAGLRHGAVGGRHDQDGAVHLGGTRDHVLDVVSVAG

SEQ ID NO: 947132 - protein, 66 aa, Homo sapiens
KLDCCALVRLRDFELLRRNRVVISVIRIPSLAGMDTKYLSESSSVPIAYRPSSEKSRSLNLTSVSG

SEQ ID NO: 947133 - protein, 47 aa, Homo sapiens
  misc_feature (37)..(37): Xaa can be any naturally occurring amino acid
LRGGGDRGEDREREERDRRLAPEAVAEQGRRDGRGDXRRIRLHAEAD

SEQ ID NO: 947134 - protein, 98 aa, Homo sapiens
VITSPHKIVGPESNDLVLQLRKRGVTQVILAGMAANLCVEGHLRELLEQGFEVAVVKDATAGPRLPEGDGYLAALVNFRYLASAVWSTVQAVAIIGGS

SEQ ID NO: 947135 - protein, 96 aa, Homo sapiens
GTGSVAVTDMGGAFGADTIPQAAVAGEVMVAGQQPPGTGKRCIRDTACTITLVFRSLSIEHIASDQHMRDIMLRSCFADRVNRIEPRLAKRSAHVA

SEQ ID NO: 947136 - protein, 56 aa, Homo sapiens
RGVNVSLTLSNTGAVPGTINAIEATFNTYDNGWTPEEVAQAFQKLAAKHPESHPHH

SEQ ID NO: 947137 - protein, 44 aa, Homo sapiens
LHPVATRHRGVGAGPARDEVDARDLLRELRRDADLLRGDVTVLE

SEQ ID NO: 947138 - protein, 55 aa, Homo sapiens
ARARRRGRSPDSLLIMPGVMPFVAESADEAKRKLDRLQALVEPRQALRLLSTFLG

SEQ ID NO: 947139 - protein, 124 aa, Homo sapiens
RVDPPGQTEEVQAIFCITDTGADPVMLETLDVKKTQFRGLIELDEDDYDEDVSDQYNELEPVMTPDRYALIQRIAANYLAQVGQDDEEDCMNPREELVAHQAAVEAKYASVRQRHLDGLAREAG

SEQ ID NO: 947140 - protein, 63 aa, Homo sapiens
  misc_feature (13)..(13): Xaa can be any naturally occurring amino acid
ATEAPPSPNAAVXSGKADVEGGIIQIASRTAGIVREVIAQEGDTVTKGQVLARLEDDQPKLAV

SEQ ID NO: 947141 - protein, 36 aa, Homo sapiens
MLAAFIERITHQPDAEARELRPAVLKTVACILHVSI

SEQ ID NO: 947142 - protein, 58 aa, Homo sapiens
MADIGDAQVAAGCDRHDGVFVIALDDLGQHGPGRDRLVAARLAQEHAFLAAGRQVVVK

SEQ ID NO: 947143 - protein, 53 aa, Homo sapiens
CGAGALRRIFDRMVEMVMALLIGKSPARALTPQGRLIYGRCAVWRRRTALSAY

SEQ ID NO: 947144 - protein, 127 aa, Homo sapiens
ADLLLQHDEVLQDLHGLHGAVVFGSIHSAASNSAGGERSRQAKKAVRGFIAFSGGCPVLALLRIFSSDLSNNPPAYVADPTKSGGLFQRTSAVFYRKPILGPLPEVIRELTMFALMHSTRLESLHLS

SEQ ID NO: 947145 - protein, 33 aa, Homo sapiens
  misc_feature (9)..(9): Xaa can be any naturally occurring amino acid
AASTAGPPXRVDIVRDRGTLARVVDEGFVEDVY

SEQ ID NO: 947146 - protein, 77 aa, Homo sapiens
NTLDRTLYGGRMPAHSATRQHGVMIGFALGRNAIAAYLHQKQQQRKTSLNTPQGKIYPQASHIQLTPHTDHASITIT

SEQ ID NO: 947147 - protein, 100 aa, Homo sapiens
GRADKDTIEADETVPAEADRSFHRNLDRSLADQRALVVFALLFEEFKAGHGNDAGRMTILFQLRTGRQSNFDFRAGRENRHRSLAAGRSQFIGTVGALVL

SEQ ID NO: 947148 - protein, 41 aa, Homo sapiens
ESKRGGSDQANGGAGVEDEFYRSLHCFSGDGEELQTGEIGA

SEQ ID NO: 947149 - protein, 97 aa, Homo sapiens
GQAQLVHRALAAGAVAVDVADVGLLHLVVGDAGVGQGLLPGFARHLEYSALAPGLANLVMPTPITFTRFFIIALLVISIRSDQLAEHGQPVRQAHIA

SEQ ID NO: 947150 - protein, 94 aa, Homo sapiens
IIHPVRFVLPHENALRPWWMVRLGLYLYDFLGGKMTLARSRGLRRSDTAFTAPLKGAGKGFVYSDAFVDDSRLTVLNAVDAAANGAEIAVGTAL

SEQ ID NO: 947151 - protein, 60 aa, Homo sapiens
VGIHIVSVQKTNDITRCKLQAFIECIVDAIVWLATQHSDVIHVTMQYVHRAICRRSVYDD

SEQ ID NO: 947152 - protein, 102 aa, Homo sapiens
EGSQAAIAGRAWAVAAGDDGEHSRSIHLLHAAGERLCDVDAPVRTDGEILQTVERIGRQRRARHARTVAGERRDDPVWSDATDHVRRRSTRDVRCDVDVACG

SEQ ID NO: 947153 - protein, 112 aa, Homo sapiens
QIGLQRIVLQVAGHIGKILPVLLQRQQEFLRPWIEIVGIDALQHELVLRARRRAADAQVLDGDGIAVDAGRLGQRLAQVRQQRVERQALGFGFELNEETALVEARGIEAAAD

SEQ ID NO: 947154 - protein, 34 aa, Homo sapiens
GHGLLLVVGHHDEGDSQMLLDVDQLELGMLAQLA

SEQ ID NO: 947155 - protein, 137 aa, Homo sapiens
YFNVLYDRDAQGGELFHVYTEPFGDRFFFEILQRKKGYVGYGAAKVAVRLAAMAKSRRGAARQAQALNETSFRETLSPYIGRLQRGREPRMTNFADAGAPQPLEARHKGRKNSPEQTRKDILQAAIVEFVSLGLSGA

SEQ ID NO: 947156 - protein, 124 aa, Homo sapiens
DDLQQIHTGIMLSTRLLNDVNQPEEALRKKKGLIMSEKSIVQEARDIQLAMELITLGARLQMLESETQLSRGRLIKLYKELRGSPPPKGMLPFSTDWFMTWEQNVHASMFCNAWQFLLKTGLCS

SEQ ID NO: 947157 - protein, 88 aa, Homo sapiens
MANGVCSFCILRSTSTSPCVSGTKSTSRRSVTRLGSFTFRASLEKILPVEIPDDLVELFALRERHARVLVRAQELERRGAGDVDRHVE

SEQ ID NO: 947158 - protein, 46 aa, Homo sapiens
MASALPVSTFDTFYVYKTIPGGDDFDALTAERYGWLNRALPDVELD

SEQ ID NO: 947159 - protein, 119 aa, Homo sapiens
  misc_feature (70)..(70): Xaa can be any naturally occurring amino acid
ARGGHGFEIILSKVELPEVTGAQLYETEKRKCPHLASQMIFVSSHGSAPEVRPLLRKPINRDSLLRTIGXMSKRIAEVHQKKRFWAKKLVSVRQLHTAEIGKLVEAFSPGATWSEIATP

SEQ ID NO: 947160 - protein, 92 aa, Homo sapiens
LAGTTGTEHKLHWMIGGNYQHDRVSDVQHVENQGSNSGVGPFRFLKFDNDASRQHIETKAIFGSVDFELIDTLALQASTRYTEQDRNLHGCL

SEQ ID NO: 947161 - protein, 71 aa, Homo sapiens
MVTRSADLRGHVISYNRLGNRSICHCRLPYEQLPLTKERGVHQERDEMGCPVVVKRSDWRRKVRESRTSTL

SEQ ID NO: 947162 - protein, 148 aa, Homo sapiens
RKKKNIFQRCCICMRNIWNIWFMMVFLRLLGPSAALGLARGAFGSRRKGTNRLVALADQAIDGALFGFPPVVHVEVREPGVLGKLVSGLGQGGFEGQVDQVRLLQADAVRANRIADESRVLRVDVEVVHGLFHQLVLRFLQREDAVVE

SEQ ID NO: 947163 - protein, 83 aa, Homo sapiens
SAPGVAGTTDTHRHDVSPPSSRDHGHAPPRRQPPEYAGTTDTHRHDVSPPSSRDHGHAPPRRQPPEYAGTTDTHRHDVSPPSS

SEQ ID NO: 947164 - protein, 103 aa, Homo sapiens
RIGRVRDRQRLFHVVDVEGRYAVIVLSRMVEQLTNVIRAMCLSLRLGLRRGRCLLFLPTKLFGAKHLDAGQGLAFHPFKKCATGGRDIGELTGHMGLVERRDG

SEQ ID NO: 947165 - protein, 128 aa, Homo sapiens
  misc_feature (34)..(34): Xaa can be any naturally occurring amino acid
MRARNPRTREECVGSGAVKIMYAQAASTGQITKXQSNGGVDSAPKSPSASTTQMRYRGAIVTGAQPKSASMILSENHAQLSLVPLHEAGKESVSSEIKRDAGGEEAAARRVGRLAGAVRELGVVRGVP

SEQ ID NO: 947166 - protein, 114 aa, Homo sapiens
PEIPDIGHLGDGGFQSRMVDRQSERSGLRNLNGFGFITTLASISTRAPLDTLAIDRNSVLAGGSPGKDFEAGVSCTSRIEAPSIADTETRKTNDICELTAFVLDDLLDVRDGGG

SEQ ID NO: 947167 - protein, 89 aa, Homo sapiens
TDGVVQRGRRVGVVVDVKLASLKVPPLAGRNLTVNGDCFCPAARVVAGHDAIRAGVAGETPGRVPGVTVGSAGGIGGFDDLVELVVSIG

SEQ ID NO: 947168 - protein, 137 aa, Homo sapiens
AVDVPGVLGVVIDRQLHTLVGLLGHPVAGRLDGDERHDRRLGDETRGAAAVLDGVGHLVARRDRRLVGHGGHRDVGLDEVGVLAQAVELHRGDIAQLGHPLLGRQAVFTAPGPVGQQAVARHAQDRRDLQIVHEGPV

SEQ ID NO: 947169 - protein, 105 aa, Homo sapiens
ALADRFGQTTEVLPLSRRDELGGFLAQHKARAIARGEIEFLGDCVDHDHDDDVEQVRHRLETLELEHDEFVVADVEGRGAVEIMAIGAARPEIAQVEGELTRGRH

SEQ ID NO: 947170 - protein, 71 aa, Homo sapiens
MNPNQNSSRTAFDVIIVGGGTNGLSAGCYLGLEGKKVLVLEALDKVGGMASSGYLIPEAPEHLVHPCALDM

SEQ ID NO: 947171 - protein, 88 aa, Homo sapiens
HSIVAGVSATGDADGWLILPADMPLVQPATIMAVAAGLERYPVCYAQYRGIQGHPVGFGTELYSELMALQGDEGARRIVARYAAQPIA

SEQ ID NO: 947172 - protein, 65 aa, Homo sapiens
NQVARLHRCQAALTQIQRRDDSIGFLVEARQAGAQPGADFDVLLHPLAQGAVQIRLVESHELGVP

SEQ ID NO: 947173 - protein, 97 aa, Homo sapiens
GFSVMETASSLFGLMLCGEMLCRPCVMGSFSEVVEGQHDAYVGAAHQLDGFLQVVLVLPGHADLRLLDARLHLDLRVLDHLDDLLRRLLGDASLDLQ

SEQ ID NO: 947174 - protein, 76 aa, Homo sapiens
GRQGVVEVDGVRPERHQARARLVRIERVELAGQTELLHQAAGVLLDIARRRDTPATQVLLGIGAGLHHGRRAVVSP

SEQ ID NO: 947175 - protein, 137 aa, Homo sapiens
DPVAEASDLAGMPAVFRIGEPIGSALIGHMGEGTHEATARELGTPEHPGHQRKSMPRHCRLAFACLRVLRIPPRLASSMSSTPALRNHIGHHRSCGLILRMSRASRTSSGKGRPSSSAGLHIGVKDTMARCSAFRPG

SEQ ID NO: 947176 - protein, 109 aa, Homo sapiens
DLAVLETHRNVVDQRALVGQRLRTHDMAIDPPPMRRGEDLFGRDVGVAADAVLGGRGPTFPLVAVRKPDGEVGAGTRILQRAGTQAVEPVGALAQDRIVARPIRNRIPA

SEQ ID NO: 947177 - protein, 94 aa, Homo sapiens
  misc_feature (82)..(82): Xaa can be any naturally occurring amino acid
EAFEADQETGVVVDGGGRCNQQARQRAVKAAIVKVCAPAESPEMPISRAPVRLTDVARSALPVSVRSKKTYMAASKAIEAPXMISVWPVRLSGP

SEQ ID NO: 947178 - protein, 30 aa, Homo sapiens
MACPGQYVLARSVAIDRTKKSLSWDCSFPR

SEQ ID NO: 947179 - protein, 106 aa, Homo sapiens
MEALPRARALVHPRGLRHMVDPKALWLGALAVYGEEEMQRSYGKLIPVPAERAQATHDEQIVHLAGRPLRFIDSPGHAKHHHAIWDEKSRSWFTGDTFGLSYRAFG

SEQ ID NO: 947180 - protein, 97 aa, Homo sapiens
VQCASPYEGTDGNQFYDQVDMFNGALDRYNWKLVGKKEFYLPYNSDKIAGNTVKYKDIIRPKHLNQDLPRYELHRYWVVEADLKPGTNHTFKTRRLN

SEQ ID NO: 947181 - protein, 101 aa, Homo sapiens
MSTFDDNDPDKMERGYVVVDTRYAEWRTRWPKVVTECDTQAAAGLVKEYYSTMPSGRQKYSGSQFEAIAARNPDLNSIDTADIVAVSMLSVDVPGPAALRL

SEQ ID NO: 947182 - protein, 43 aa, Homo sapiens
MTPPTGRDPLTIDKVAIRGGDVYVNPRTEVRLPVYGALETALF

SEQ ID NO: 947183 - protein, 61 aa, Homo sapiens
ELPERDVTEGAFVKVLPPCDSNGRQNGSTVLFIDAAEDASFASALNAGAIGAYEVEMASLL

SEQ ID NO: 947184 - protein, 116 aa, Homo sapiens
KRQKLEVAIPKGVDNGNRIRLQGKGEAGPNGSPAGDLYIFLHIKRHAVFDRESTTLLTRAPISFTTAALGGQIEIPGMDGVRHVIDIPAGIQTGKQLRKRGAGMPVLNGRGMGDMV

SEQ ID NO: 947185 - protein, 47 aa, Homo sapiens
MMDKVGRPRGLIRFDTLANQACRAKGEPATHKFIRKRTMIYAGVLAL

SEQ ID NO: 947186 - protein, 126 aa, Homo sapiens
VLWKKVAPKLSAGRVQSSRPGSLQRERERMAFRSAGYWDVTAELDASVSDPEASPPKFTAKLSTVDGRRVATGRDFDSLGAVKKPDEVLVLDEVAAGALAAGLRGESLTVSSVEQKPYTRKPYAPF

SEQ ID NO: 947187 - protein, 31 aa, Homo sapiens
MAIQKHIIISIRYHNRMPLRVIPENVARVLV

SEQ ID NO: 947188 - protein, 58 aa, Homo sapiens
  misc_feature (25)..(25): Xaa can be any naturally occurring amino acid
QAGRGLVEDEHARRDAQRAGDGHHXLDGQRVARQRRGDVDVEVHLREDAPGFGVDGGP

SEQ ID NO: 947189 - protein, 86 aa, Homo sapiens
GSQSLEGYEGGQRQRDHGTSGLGKVKKGSEKPVKPEGAGNCCPEATEVIQRAGAENAPNNDEFIRGIRSRRGCFPTIRCYPEGGRF

SEQ ID NO: 947190 - protein, 115 aa, Homo sapiens
RHAQADEIAVRLCGIALEVAVQQALALGDGQRVVGQREMVHADVGIALAEQRADRTGQHGQLVAGRRQQLGHDAALRLEALRQMGVGIHRDAVGPQLGHLADGAGEAGGRLQRQA

SEQ ID NO: 947191 - protein, 65 aa, Homo sapiens
LPLRIGCGEEDRLHGAHMREIRGADHGAKCTNERHCSHHAPPSACDVPPGASHDLRVLRVVALTM

SEQ ID NO: 947192 - protein, 91 aa, Homo sapiens
MDCSSEAAAISCTRSEVLAIRRHNLIQQVARPFSQGHAVLGHFTDFLCGNLAALGQFAHFCRHHREPFAVLTGPRGFDRGIERQQIGLVSD

SEQ ID NO: 947193 - protein, 59 aa, Homo sapiens
AALVARRRAIGAVANADGRGVAGRAGRDALHAGVVAELAQRGAIAAAVAGIAHHVVVAI

SEQ ID NO: 947194 - protein, 47 aa, Homo sapiens
HFLDDAVAAAGPGDLVILRIGRIALDTFTLGENHTIVKVPGNGLDGL

SEQ ID NO: 947195 - protein, 113 aa, Homo sapiens
PGQPVQVVPQPAAGAVLQRVDAGLSRRHPAIPEGEQLHDPAVVPVDGAVRTVLVPAAAAAGLAEVPVLHHGDVVVHPLLVMGRTDRPQERLGDVAEPAPVVVRIAHRAAGCEP

SEQ ID NO: 947196 - protein, 79 aa, Homo sapiens
DLAGDTETLMVDKSRNRGQVADPFAGPGGDRLGDRMLRSILQRPGHLQHLRLGHPGGGVHADQAHLAGGDCAGLVQHDR

SEQ ID NO: 947197 - protein, 84 aa, Homo sapiens
EIIQERLSREFNLNLIATAPSVIYKMHLNTGTEIEIHNPIDMPDVTQIKEIEEPWIEATILTPDEYLGSVLKLCQERRGNQKEL

SEQ ID NO: 947198 - protein, 66 aa, Homo sapiens
IGFYLLGARGCEAEGGVGALVDGVEGLAAGEDVDLEALFGAAGEVDEVAHFALGGDVGDEAVHRLR

SEQ ID NO: 947199 - protein, 100 aa, Homo sapiens
  misc_feature (5)..(5): Xaa can be any naturally occurring amino acid
FDTAXSLAARRQDSATIDVQAAGDVIRVLATEKAVTVSKGLAMGSVCRCVDLLAEEFAIVDCAPGRVRRFLRPYCLICSSTVRGLPVRADVMGLSSRTEV

SEQ ID NO: 947200 - protein, 34 aa, Homo sapiens
MIQAEECLETLFNLDDGRVKCGLDVAVCAFYIGR

SEQ ID NO: 947201 - protein, 74 aa, Homo sapiens
GGEHPVHRCDLLVSASNAVGSGQRESPAHSEIQRPEGGHVKGHGVRGVVDLRDGRGRSRSLNVHSPGTFGITHR

SEQ ID NO: 947202 - protein, 124 aa, Homo sapiens
PGSVHRQPFCSVASSRANQKVVTVMGSLSKKLGVLVPAHLAADAGLLEDEHGLPDLRLLEAQAGRHAAQGLALGEGAEDRVEVMHGMANLVDGEFLGHAQLALFIEGLLLEEAAHLVAAVEEVV

SEQ ID NO: 947203 - protein, 141 aa, Homo sapiens
FEKWQQIIDVTFNGVFHCIQAALPDMLEAGWGRIVNISSSSTHSGQPFMSPYVAAKSAVNGLTKSLALELGPSGITVNAVPPGFIDTPMLRKAEGKGFLGDTDKQIEQTPVRRMGKPEDIAAACAFFVCRGSRLHHRPDSR

SEQ ID NO: 947204 - protein, 109 aa, Homo sapiens
TFPLGKLIPGWETMLLLMHPGDEWELYIPPEYAYGEKGVGPVPPNATLIFKVELVSVKPPPKAEASQAPAPALISARKRRECVDGIDLGALNVEFRAAGARRIDDELIG

SEQ ID NO: 947205 - protein, 106 aa, Homo sapiens
ADLPLDVRRSEVLDAIDLDRHYTVRMYRLHVVTIVSLVADRVQPISHRRLASSMVTHCHVMTPRGGTQLLTTASWLAPPPAANQRPKLDHRARAEAPRGQLVFAET

SEQ ID NO: 947206 - protein, 113 aa, Homo sapiens
  misc_feature (21)..(21): Xaa can be any naturally occurring amino acid
EITQVVAIAVKMKATKADFDXHGCAASDRGRGTRDDAHPDGAPRAAGGGVGRPRSLTPGWFVVGCQGRRLVHRDESPSHRDVLLGADLRIVVGPALAGIVEKDDPQQVELRSV

SEQ ID NO: 947207 - protein, 135 aa, Homo sapiens
  misc_feature (43)..(43): Xaa can be any naturally occurring amino acid
LADDEPCHQNRLVAWGCAMLGAQLPPLQTLDEAGLSPAARALXRRKPPRRERPGETITGLDAALSEFSRGSGRLPLEQHVDRVDQHANQPANQRSVDADILQVVADRIFQPVGDRLGIPAADRVRHQFECSLAMA

SEQ ID NO: 947208 - protein, 147 aa, Homo sapiens
GNSRKAGSSPNVLGPMEQGQAPIFIVLNAAPQEIVFRMPRMAEYKSWQQVLNTTKSEQTGDQIAAGAEYHRTAAFGAGICRLRMSAQHFGPELTADGARFRLWAPAAKRVDLLLDKPHALTRDAAGWYVAEIPGTRDGTRYKFRIDE

SEQ ID NO: 947209 - protein, 121 aa, Homo sapiens
  misc_feature (27)..(27): Xaa can be any naturally occurring amino acid
AAAVGSGTLGLCLSLKVLGIGPGDEVXTAAYAWHQIAHAITIVGATPILVDIDYWSGCIDPVKAAEKATPRTKAILASNINGHPADWKALRELADRYQLKLIEDSTEAVGSRYQGRLTGSF

SEQ ID NO: 947210 - protein, 122 aa, Homo sapiens
  misc_feature (65)..(65): Xaa can be any naturally occurring amino acid
  misc_feature (75)..(75): Xaa can be any naturally occurring amino acid
  misc_feature (109)..(109): Xaa can be any naturally occurring amino acid
MATPFPRPRLASAGPRLAAFARSLPKSISLNPSPPFIESRSFSNLLSFKSDTIAHGAQQLSPRPXWFRASAGAAXLDTVHGRSQVLINIAASFIGKDRPYDPSTHVFQXNPYNRIQPARNRH

SEQ ID NO: 947211 - protein, 98 aa, Homo sapiens
SFGRQVETVLLLGGSPAGPANFFSGVVRTRAFFECLSPTLVVKLKGNRFSAPGFLGHFANIDFRFFIERLLNQARFSQELADTAFDHVFNDVFRLAGD

SEQ ID NO: 947212 - protein, 62 aa, Homo sapiens
IRDRVDEGLIELSREQVDQRRFEERPGTEHFTERHRVPAQQVQRALQLLFTVVEDAQYAIAL

SEQ ID NO: 947213 - protein, 73 aa, Homo sapiens
SGAASERPLRRAHIDPDAVLTPSSQAAVLASLPRRCMVSFAACNVESNTALAPFYNGAEHMVREPVARDAADL

SEQ ID NO: 947214 - protein, 74 aa, Homo sapiens
ISFNLPPGESLSQATEAISQAMNKLGVPVSVRGSFQGTASAFQQSLSSQPMLIGAAIVAIYLVLGMLYESLIHP

SEQ ID NO: 947215 - protein, 30 aa, Homo sapiens
LPLLEQIAGELPLGPEGGNEGDQGDEAGIH

SEQ ID NO: 947216 - protein, 115 aa, Homo sapiens
  misc_feature (6)..(6): Xaa can be any naturally occurring amino acid
  misc_feature (36)..(36): Xaa can be any naturally occurring amino acid
ARGDRXITAQALTEAEAQGGKGKAITPFQLARIRAXTGGRSLATNIALVKHNAVVRCANGPRDAALARRRCFTVPAICEQNSADKLACFSRQSPLLLAGPAVMRVTFPLNLCGLL

SEQ ID NO: 947217 - protein, 128 aa, Homo sapiens
WLNWLRQQRLAVWDAGWLMVHAGVLPQWDAARTVALAGEIEAILRSPDLGDFLTQMYGNEPARWDDTLTGVSRWRCVVNALTRMRFCTPEGEMEFATKEGAGGAPQGFVPWFEVPARATQGTPVAFGR

SEQ ID NO: 947218 - protein, 99 aa, Homo sapiens
DQAGGVRVLWMGPHVVLAAVFTEAPGIHHRDRVTGLRHDAEVVGDHDHRQATLVAQVQQQAQDLRLHGHIQRGGRLVGNQHFRVAAKGHFYHCPLTHAA

SEQ ID NO: 947219 - protein, 142 aa, Homo sapiens
DRWSRSLRLVRSPPADSPQPGRILLRCGRSIRKLAHMFGHVGIGAGGAKVHDASVPDAIIHFARVEAESALGRFAAIADLVALRDDDQGDRQWWACDGWDAAVAEVGAALGIGRREASGQQSVAVALRDREPRVSAVFGDGK

SEQ ID NO: 947220 - protein, 45 aa, Homo sapiens
TLFSAQVKERRRKLPALRGMSFSSAFLDRAHNPRGLRAQRGVQPG

SEQ ID NO: 947221 - protein, 116 aa, Homo sapiens
AAGGTILVGTVEGKAHDLLGRCQAFPEEAAGAFKREVEDSIRSLCRPPPRVDVIPLVVDAGFVVAINVHPYPGQLVGLQVKAAATSSQGYAGDAFVFPRRLGSQCEYIPADIVPLF

SEQ ID NO: 947222 - protein, 96 aa, Homo sapiens
GGLAADRLRREVVEVEVVALCAVLLLHVRGGDTEVEQLVRALREDDVRRLHVAVRDARFVGSGERGGGVDAHLDGEGDPLCMARRQIDDGLLRELP

SEQ ID NO: 947223 - protein, 74 aa, Homo sapiens
HTQVDALGAGLVVQGGRVGASVEGQGVEEMVLLDLHAQGGQALGQDRGQLVNALSDLGQSFGTVVHGIHAGDVG

SEQ ID NO: 947224 - protein, 72 aa, Homo sapiens
MATCEGGFMSGYKMDPAGVQKVLQAVGDRASELGTALDDVESATADVVQGSGGDGIVGQALATFLTDQKSAL

SEQ ID NO: 947225 - protein, 130 aa, Homo sapiens
DLHNRKAVCPEKASEYVGEFRSKGGVLADEMGLGKTVEGTYTYQIELICCAHCLAFSYGLIASNPAPKDLPELRDDYEPKLYNSRATLVTCPNHVAQQWIDEIAKYSDKKMKTVLLSTSNDLRSTSYQEV

SEQ ID NO: 947226 - protein, 79 aa, Homo sapiens
EKFDVTTVRSRSDEEELAGIRRRQFLLYFPVKRQRHLRFAADRKIDATGRTCQTRWRRWIFVAQPDECRSRGSSRHPAL

SEQ ID NO: 947227 - protein, 78 aa, Homo sapiens
KAGDVFSEMDSNSDGSISLDEMSKALKSGCHGHHAQGASGSGDGSDSLLSSSGGWTSTTTTAADGSTTTTVTYADGFK

SEQ ID NO: 947228 - protein, 78 aa, Homo sapiens
ATAAIAVASFQPGHSAGSGAATVTSNAELLAPLRAIEQRAAVEEAAARVEPGLAHRIVVGVDLVFQRQRATAGDAEAA

SEQ ID NO: 947229 - protein, 118 aa, Homo sapiens
MTALPAVRAVISRPSRIGTPELNSVDSVRQNAPPRILRIIIPSTGIFSMMAVNPVLPSHRPVVRLERIAHREDADDDEWHEGDEEVAEEDDDARRQRQLRAKAGEQGRESRNDLPEND

SEQ ID NO: 947230 - protein, 100 aa, Homo sapiens
GFEALETPFVEYTESLGKFLPDLDRPNAGVFSFQDDDESWLSLRYDLTAPLARFVAEHYDTLPKPYRSFRAGYVFRNEKPGPGRFRQFMQFDADIVGASS

SEQ ID NO: 947231 - protein, 118 aa, Homo sapiens
PIGTCVGVRGSRVNAVTTELAGERVDIVLWSEDPAQFVIGALAPANVQSIVVDEERHAMDVVVDEENLAIAIGRGGQNVRLASELTGWRINIMSAEESAAKHELEAESVRKLFVDKLD

SEQ ID NO: 947232 - protein, 112 aa, Homo sapiens
MLEDGVMAERLVGIFESGERRALDDRDGVAREFVLREQLADFELDELEQLRIVDHVALVQGHDQRGNADLAGEQDVLAGLRHRAVSSRHDQDRTVHLGGAGDHVLHVVGVAG

SEQ ID NO: 947233 - protein, 72 aa, Homo sapiens
RLAGLDTRLDHARQCKAEGGCNADRHRRALRDEGAGVVEQFLDVLVLDRTRQRGHGVGRRAGILTILITQLF

SEQ ID NO: 947234 - protein, 68 aa, Homo sapiens
MAGGTAVVTCVPDHRICLNHVRAARLVRCLRWLNPQQSKSTLNLHPHRPRIWQAQSFRRGVREIDNSA

SEQ ID NO: 947235 - protein, 31 aa, Homo sapiens
MTQVQRFLVKLKPGASHATTSLALDSGKIRF

SEQ ID NO: 947236 - protein, 122 aa, Homo sapiens
QVLNEDQVISETAMTNGWAPEADLPLDCLSDFDLDDEDSIDEELEGLVVVEQDPERVYYGHEVKVQAKLDVARLGYRLFGEVQVRVIHAKLKWGGADDDEDTPPPVPMNQALADLLGFSVEE

SEQ ID NO: 947237 - protein, 104 aa, Homo sapiens
HHIGAHVLGTHHAVRAAVGLAGDDGDLGDRGLAVGVEQLGAAPDDAVVLLVGTGQEAGDVDQQHDRDVEAVAGPDEPGGLLRGVDVEAAGELGGLVGHDAHRAP

SEQ ID NO: 947238 - protein, 95 aa, Homo sapiens
LYSSSLPPALSASGHCARPAGIAPIGSCSCSISCLRPSFFISVALSSTRISSPLLITPIRSAIFLGFLDIVRGQDDGHATLAQAAHQRPHVAAQL

SEQ ID NO: 947239 - protein, 78 aa, Homo sapiens
MNNRTNGGARRQADIADRLADHFARLCITMGNRLDGFRRAPAQGVHADDIATAHVGQQGADGGQLRADGDVDVAALAQ

SEQ ID NO: 947240 - protein, 118 aa, Homo sapiens
MTLGSGWRLSNASGSTVVGTSSRSVTSFLEMRAGSALTCSASRRLGCLISPARANSVSRSPYSASNCAAVLMPIPGTPGTLSVESPASACTSITLSGVTPNFSITASGPIFTFLIGSY

SEQ ID NO: 947241 - protein, 84 aa, Homo sapiens
LSSMMPCKMVRRPIGITVLPATRLYRSTCTLHVSQKNGLHREPLFTVSAPQPRHSSIARLYSYAFHRGSSGSHAHRCVRSIRLK

SEQ ID NO: 947242 - protein, 69 aa, Homo sapiens
VVNGNIFRNQGDEHGQNSPLFAIVYTIAIEPLPVRPSLVERIDSAPRTMQSCAGNVLAFSGFRTVEKLD

SEQ ID NO: 947243 - protein, 112 aa, Homo sapiens
  misc_feature (26)..(26): Xaa can be any naturally occurring amino acid
LGRGATLSGCQISTGRSVIQAAFLLXAIRAPYPARSLRSGPFGPPLTRLGRESARAGIEPALALLTHPKAILQHARRNAARAQHQGAGIIAGEERERVDAVSTKEVEMTITF

SEQ ID NO: 947244 - protein, 133 aa, Homo sapiens
GRRSRGRSCDAGAEDVVGVEWRGRALREPLFLLVLEDERRHLARRLVNAPVGEFVAPGERLSVEIEQITKPPAGPETLAHEADSALDVGLSGGARRATRGDREAAYRGVLDEAWMEHRGCPVLEDDGLHVVEH

SEQ ID NO: 947245 - protein, 32 aa, Homo sapiens
  misc_feature (8)..(8): Xaa can be any naturally occurring amino acid
  misc_feature (17)..(17): Xaa can be any naturally occurring amino acid
VVAEFRDXEAIRADGSXERHDERADFLEAEHF

SEQ ID NO: 947246 - protein, 102 aa, Homo sapiens
QSFTLVLLSPRLECNGTTKAHCNLCLPGSSDSPASASRGAGITGMRQLAYPIFVFLVEVRIHHVGQDGLELPTSGDSPASASQSAGITGVSHCAQSTVHLKS

SEQ ID NO: 947247 - protein, 37 aa, Homo sapiens
KTIPAVNSKTGTLTVSLVNTKTRWFADEMPCFAKSLR

SEQ ID NO: 947248 - protein, 106 aa, Homo sapiens
DPDRIEYDREQLRKFYRNRGYFDFRVVSSVAELAPDKNGFAITYTLDEGPKYKFGKVTVETELKKLDGNLLAQILPIRQGQLYEDQRIEQATDALTFAAGAAGFAF

SEQ ID NO: 947249 - protein, 110 aa, Homo sapiens
RRLISVGNLVNANNTILTTIVSLDPIDFYFDVDERNLLSYAKTARENGSNLQEGGGGLEVTVRLTDSNQPPFKGKLDFAENRLDDATGTMRVRARFNNPDFVLQPGLFGR

SEQ ID NO: 947250 - protein, 89 aa, Homo sapiens
MGVQYRDGAQQLRRELAQQQAFELYLAAVAHLAAVGDDDTIGAAGGQCVDRLDRRDFQRLPFQRGIEPGDSFTHQTGEQPALLRVLLHG

SEQ ID NO: 947251 - protein, 106 aa, Homo sapiens
DSLGALTRGQRQTGGQNLFDPADNLESDYAREALNQWYHLLHDGKLASTTLEAFVELTGLKLVNADDGSLLEHLPPIQRWLNRILALRIATQNAIFEEYLGPIQAR

SEQ ID NO: 947252 - protein, 58 aa, Homo sapiens
SLAENTAAPGLAPYNASKAAVEHFANAMRLEVGYRGVDVGSAHMSWIDTAMVRDTKSD

SEQ ID NO: 947253 - protein, 60 aa, Homo sapiens
MIGNGVDPRGHLAGRRTDAVTATRQMARDQQLDRALGIVVDEDQHVAGIDTGADDLGDPP

SEQ ID NO: 947254 - protein, 39 aa, Homo sapiens
EQHRLVPHRHAGTVGPQVNDEMVHTDSPDVAVPGTVDAG

SEQ ID NO: 947255 - protein, 111 aa, Homo sapiens
EGVGCAGAGVLQVGPAPEFVSREALDERSAQATHGGRFDGRPATLEPMKRQQVVVAGLFRGPSQVDYAARDAEGAVLLAVRQQFLQDHAQRRGLGGGDADARPLDGDPARH

SEQ ID NO: 947256 - protein, 109 aa, Homo sapiens
DNGPARFPASVPVEGSGHRCGVNRVDRGTQSLIELLLRLCDVKPLGQSTRGARDESPVAGQLLVGLLTGVPTRQGDNAQDLRIRNEVGIQVFGTRDRQLQHDFGIERRR

SEQ ID NO: 947257 - protein, 137 aa, Homo sapiens
VGAGVLSGGVVDEFARADRVPRGQERQDRDVDLLAGGSRVKGDDAAVAGGSRLADEVNARRRHQRSVSIEGACVIVIACHRNHFRASVFQLDQCVYDETLCLRCRCRRLVQVARDEHCIDVLAGGDVDDLLEHQSLF

SEQ ID NO: 947258 - protein, 47 aa, Homo sapiens
IPIVKDVGRRVPSYLDVFGRTAAAYTLKVEFSLVLVAAGSLMGTRVA

SEQ ID NO: 947259 - protein, 91 aa, Homo sapiens
QLPAKRSAIVFPAKAWYDLGWPLGPSAGTGSAQPDSSIDLHGHTFHTAYQVLDAGLARAIARGDRILLLITGKPPRPESERPHQRGRIRDS

SEQ ID NO: 947260 - protein, 73 aa, Homo sapiens
PTYISTKDEPVVMNIEASASPAESARQEGLAGARRADEENAVRQLGVVPVEDVGFAQPFADLAQAVYGRRLTG

SEQ ID NO: 947261 - protein, 109 aa, Homo sapiens
FGQGHQGLRPGHEVLAPTHRQQMLPVVVGRQIELAGAARDADAAADAHQPVVRGQGGAGLAAQRIEPLVGAVDAPDHLVQARFVEAGAATVGVVLGLVLFELLEQVALQ

SEQ ID NO: 947262 - protein, 78 aa, Homo sapiens
  misc_feature (32)..(32): Xaa can be any naturally occurring amino acid
  misc_feature (43)..(43): Xaa can be any naturally occurring amino acid
LRGVIHSDQLTVLAQVVDVVFEAVDAGGNAPXHALREAALQVXAHGEVDQGSETLCGVRSWGDGGTSMPPRDSLTTAR

SEQ ID NO: 947263 - protein, 121 aa, Homo sapiens
MADSSKTMVGFRYRIARSRLALMCFKPMKSSVLAQVVARKTKPDNLPALCTAQQGGFAQRLSMLAPSPPGHRQEHREGHHHAHANHGKRVGSQAVHQLGHDGLAGKRHSPGHSEQQTVVTL

SEQ ID NO: 947264 - protein, 87 aa, Homo sapiens
MPDELSGGMKRRVALARAIALDPQILMYDEPFVGQDPIAMGVLVRLIRLLNDALGITSIVVSHDLAETASIADYLYVVGDGQVLGQG

SEQ ID NO: 947265 - protein, 70 aa, Homo sapiens
  misc_feature (5)..(5): Xaa can be any naturally occurring amino acid
  misc_feature (34)..(34): Xaa can be any naturally occurring amino acid
  misc_feature (53)..(53): Xaa can be any naturally occurring amino acid
PGTGXPADLSWGATAAPAGPTAYRSEQRNEYAIXTTPPQLAARTPPHMGDTLXPLPVLPGGVWLSSDGAG

SEQ ID NO: 947266 - protein, 64 aa, Homo sapiens
ETVTVRDMLYGDASVQPTRALADSLHQSGTVSNLVARFPGASPLVESEVATQTDGFFRWVCSIW

SEQ ID NO: 947267 - protein, 96 aa, Homo sapiens
AGQSATEGGQGVHIADDKESRPGLTQGAPGLDHDLGPDAGGIAEADGEGSWRSRSQGRDRLLSLDGRGVAQIPQEALGEHRNLFAAQAILDGLARR

SEQ ID NO: 947268 - protein, 82 aa, Homo sapiens
  misc_feature (42)..(42): Xaa can be any naturally occurring amino acid
QSKPKDPVKDTSWIETLNNTGRFWLLFLGIMATLVGGTMVAXWDEWKAEDEPEKSSNLVGAGGRGGSGTTSVETRAEDRKTF

SEQ ID NO: 947269 - protein, 80 aa, Homo sapiens
HHRPGRQQGEVFDHTQQIAEGLAFFPELPSRESVIDLHDHLHRRRRQDDLTDYRHERYSQRQQAQTGFAVGVQTRLAHPG

SEQ ID NO: 947270 - protein, 88 aa, Homo sapiens
NATCALCGPTVKKALSRVEGVKSVLFKEADAGSGAVATVTFDDATADVPKLIAAATNAGYPARLKKLRRRLMASEPDASAEAAFDLLN

SEQ ID NO: 947271 - protein, 95 aa, Homo sapiens
QYRQAIGMVVGTYQVVARRLARRVRAVRLVLMSFGERRVFLGQGAIDFISRHMQEAERLLCISVQSFPVGAHRLQQAEGTDDVSLDKIFRAMNGA

SEQ ID NO: 947272 - protein, 122 aa, Homo sapiens
AIEAPFNRWDWALLPLAFAVLILLALAASQMAKPFHLGEQLPLSLDVAYLPYYLLRTTLRMFIALAASVVFACVFAVLAAKVRAAEKVLVPLLDILQSIPILGFQAIAVAPFIALFPGNLFG

SEQ ID NO: 947273 - protein, 156 aa, Homo sapiens
ADAEQAPQAPGQHDQLGVDVRTIEVEHLEADLVELAITAFLRALVAEHRADVPQLLRLATTGEAMLEHGTHASGGTFRTQGQGVAVTVFKGVHLFFDDVGHFTDGALEQLGEFDDRHADLLVTVVIQQARDRVLEVAPQWRLLRQDVVHATNGLQR

SEQ ID NO: 947274 - protein, 75 aa, Homo sapiens
GTPRSFAKPTARSVASGSGSPGPPRIRYAEMTSAAAESNTDGGTLSGRRWFILPALMANVRSPSGVMSAKQRPIG

SEQ ID NO: 947275 - protein, 109 aa, Homo sapiens
  misc_feature (94)..(94): Xaa can be any naturally occurring amino acid
EEVLPLHQLHAHLLGQEGMLEVGRVVHARRHDDDGRVGHARGRDAAQRVQQQVRVVGHRGDAVVDEQLGEEPHHHLAVLEHVAHAAGHAQVVFXHVVVAAAIGVAGAHD

SEQ ID NO: 947276 - protein, 77 aa, Homo sapiens
WSGVHLGCDSTSDREADDAATKRLARPSPGVRKCNVAVTALFGLGVAAAIPLSFVNLFEAVIAASVLRLIQIPERPL

SEQ ID NO: 947277 - protein, 48 aa, Homo sapiens
MIGLVIVTHGRLAEEFVAAMEHVVGPQPGVRAICIGPEDDMEQRRADI

SEQ ID NO: 947278 - protein, 50 aa, Homo sapiens
NEQVELLFFSVELLLIVLLVLDGHGVIDHLEVVGDFIGLGVGSGDVVESA

SEQ ID NO: 947279 - protein, 73 aa, Homo sapiens
HLRRTDHRYVRSARNRMHPKADARMVDGPERLDAEGVQGRGLGARVHLGADGRQAELGEGEPFLPAEHDRAGR

SEQ ID NO: 947280 - protein, 34 aa, Homo sapiens
FVQILPFTDRPLPFEAFTFCSGPLLAEQLHWTLS

SEQ ID NO: 947281 - protein, 98 aa, Homo sapiens
GPADGQSGITGVVLLAESHLAVHTWPELGAVTLDFYVCNYGGDNRDRARTLLDALVRVFEPAEVSRQQLLKAEPGRCLDPGRVGLLEDRICRQVAVRA

SEQ ID NO: 947282 - protein, 55 aa, Homo sapiens
CTGVLLILRVEAYPALDGLSAGRLLCGNHRIDPQVAVGRGGASTLDGFAYHLHMQ

SEQ ID NO: 947283 - protein, 94 aa, Homo sapiens
GLDKQLLELLNQRARVAEQVGEIKRTEGTAFFRPIASPQVIDKIRAANRGPLKAEHVSAIWREIMSACLALESPQRVAVLGPMGTFCEQAALEY

SEQ ID NO: 947284 - protein, 101 aa, Homo sapiens
AVKAKISTAQAALPKGVELKAIYDRTEIVAKALKTAESALVEGSVLVAIVLFLFLGEVRSAVVVIVTLPLAMLIAFLLMNQFGLSANLMSLAGLAIGTGMM

SEQ ID NO: 947285 - protein, 80 aa, Homo sapiens
ELFTQAENVRVDRSLHHAHAPALHFADQLIAGEHAALVLGEGHKELEFIGRELHGLAVDAGFVGRFVDLERPHRKSCFLA

SEQ ID NO: 947286 - protein, 60 aa, Homo sapiens
RVLGGHAIPRIAFKLLHAEADALRVLVDADDLDPHRITDRDHFRRVVDALVAHVRHVEQA

SEQ ID NO: 947287 - protein, 72 aa, Homo sapiens
MPSMKSTSRSAQCLRIAARYSARVEERSYLTCTNDLAGTSLNFTRVSTPRVPNEPCIMWKRSDSSLSGVARR

SEQ ID NO: 947288 - protein, 134 aa, Homo sapiens
MRAGPCSGPIGIAAPKGVVPHPGALADARQPELEEPRLLQAGGIAYSVDDHRGAQGPERLGDQEQLHRRHGVQHEIVEGHARRHLRARQGAKDRITVEFAHQSEDPEAADLMPATMAAAPKTMKLPMITVMPRR

SEQ ID NO: 947289 - protein, 40 aa, Homo sapiens
MARMPPSRSATTVAACVRVIVAAELAQLVLDRVLGGLLHV

SEQ ID NO: 947290 - protein, 109 aa, Homo sapiens
GKVGHGRDRTLRLFLRFTTCVAHEMCNLPMWTMYNRVPNGALAEAEPCDGKLACTALRGLDAGNRVRLPDNQIRPWALGRKNWLFAGSLRSGKRGAAIMSLIQSARLNG

SEQ ID NO: 947291 - protein, 35 aa, Homo sapiens
MAIAPEIARMKRSVGFSARNVEVHVDVVVVHRVAD

SEQ ID NO: 947292 - protein, 71 aa, Homo sapiens
MTFTLRGRPLSRGRRAMQGNSKYPKSMRIPEIKGSSGITRRGAQADSRESKRKFLSVIGAGWCEPSAAWES

SEQ ID NO: 947293 - protein, 98 aa, Homo sapiens
WPTREATVTVWPSCNWREAASRGWIHRVQRGLPDTRRALQCIHELLLRTSRRPISLRVGRAAGSLASVASSVLAGVVGTSAGKTLIRLGSSWRMASGS

SEQ ID NO: 947294 - protein, 36 aa, Homo sapiens
LSGGFELTSISAWREWRNKQIRGGDFHSTNSNYANS

SEQ ID NO: 947295 - protein, 113 aa, Homo sapiens
MHARDVGGLEQLVDGLVPGLAGDGLDHGAQQHIAGVVVGPFLAGREVHRQVLELLDQLGRAEVAPHRVAHIAGDAGVALDARGVVEQLEQRDLAAVGIVGQEFRYGVIQLRLA

SEQ ID NO: 947296 - protein, 82 aa, Homo sapiens
EHLKREPQLVEGAIEESLRFDPPVLGHFRTSLQPTSLHGEALPNRAKLMFSMVGANRDPDLFPDPDVFKVDRPANEARKHLS

SEQ ID NO: 947297 - protein, 91 aa, Homo sapiens
AQHQAVAIEQHAAVRPDIEMAQPDLFVDERHDLEDRALLVIGHANIGQAENLQNVVLGAPDRTNLVIGPAALDLAQYLVVRNEFERPAARL

SEQ ID NO: 947298 - protein, 72 aa, Homo sapiens
TLRTEWPCRIWSLRTAVSNPSMELIERGDHGLRAFPVGEDRPPLLEFCHEVVDAAFGELVHLDLAQFGDGCR

SEQ ID NO: 947299 - protein, 67 aa, Homo sapiens
MSLFCQRCDTYAPYSAVVLSALRRRFRVSSSLYCSAANVMVRTSTEGSTSTMCVGFVVVPDSGPMAL

SEQ ID NO: 947300 - protein, 52 aa, Homo sapiens
AGPHQRLRGLIDKQIASSPQHSFRRRPEGAFPVAGYHDRLLEGQKGLHQVLT

SEQ ID NO: 947301 - protein, 55 aa, Homo sapiens
ADFTGHDREASTLFTRASGLDRGVERQDVGLEGDAVDDADDVEIFFDDWLITSIV

SEQ ID NO: 947302 - protein, 38 aa, Homo sapiens
MKSQVGLSRHLQAGLVEQVGAVHHHRALAVERRGVELA

SEQ ID NO: 947303 - protein, 89 aa, Homo sapiens
HAGAREGGHFHVAVVSDRFTGLQRLARHRLVYHCLSDLMQRGIHALAIEARAPGEPSDRSSMIEPRAQQRARFFEPDSHHPMKKLALAA

SEQ ID NO: 947304 - protein, 83 aa, Homo sapiens
RVDLVGCDPVRRLALQPGADHRVVPAERLQRLADVVLALPGQALHLGRIILQLVGRLAGVHALGVVEQAQLGVGVVLLVSAEA

SEQ ID NO: 947305 - protein, 73 aa, Homo sapiens
PHQAQATQQPDDGQRDPAREARVQRPVLTEGDQRADPPDQGGQDQKEEDPERDRVEQDGQEFLHGQRSCTISV

SEQ ID NO: 947306 - protein, 57 aa, Homo sapiens
SPRSQMIADDHRVLHFFGQAQHTGHGATGRHAAEDAFFTCQAAGGVFGFTLGHVDDA

SEQ ID NO: 947307 - protein, 77 aa, Homo sapiens
VAVVVAHPLHRVAQARLVASPGRQVDEVVGPHHHFDAATEGRVGVEDLAGLVPAEDADAGRLLAREGRHVEVVEHLA

SEQ ID NO: 947308 - protein, 36 aa, Homo sapiens
PLQPEQRRHGEIDEASLDESAHVTEQQRQQQRRDVL

SEQ ID NO: 947309 - protein, 63 aa, Homo sapiens
ELRAQGMSIDAAITELLRRRGHTVMKAISLIPALVQSLLTLIVVSAALLLYDRTVVRPALRIG

SEQ ID NO: 947310 - protein, 64 aa, Homo sapiens
ACLNTEGGSLATRPPKRTPKEHDGPCNAQPPKVDRAANVVINHFGRIAELVREGKHNVFHHSDD

SEQ ID NO: 947311 - protein, 66 aa, Homo sapiens
VNQTPGFSARALALVERGGVWVSSVLRGGGELGEAWHRAGMLERKQNVFDDFYACAELLIQEKLTR

SEQ ID NO: 947312 - protein, 54 aa, Homo sapiens
TDYSDVIRELKKTQITGSAILPFYKKRLADIEAIMRREHEITVPERHAVIRLAT

SEQ ID NO: 947313 - protein, 89 aa, Homo sapiens
VVLGGLAGGRTECALTDDVQPDLAVRRLAGFAAFDADGLAQFLGDVDGAAVVEVEAQRHDVGFAGLRLGLRGIGHDLDVGDAGRDASQL

SEQ ID NO: 947314 - protein, 90 aa, Homo sapiens
LSASYQSNQVELDNYVKTIKEAVGIANVKSDKIDQILRDAVSGRYGDSRQNLDGSAPVKNGQGGSFISAIVEAYPDIKGQLNVYDHIIAK

SEQ ID NO: 947315 - protein, 33 aa, Homo sapiens
EAAIAVGSDRGVRAVLYVAGDLLEHVPDAGPAP

SEQ ID NO: 947316 - protein, 90 aa, Homo sapiens
HVHTAFVEVQLFHVAGTARGGYRRERRCQNAFDPGVPGHPAGVQRSVAAVGQHCEILWKVAAHTQFLTDTDGHLLVDAVLDHPGDVDGVH

SEQ ID NO: 947317 - protein, 30 aa, Homo sapiens
MCNTRPRLCGTRRVLRVSHGTDLARMRDQQ

SEQ ID NO: 947318 - protein, 58 aa, Homo sapiens
MVEALAPRPRPFEELDVAVDGGTLLVPGDEEAEGSGEGGAGGVEIVEGGGEHEGDATL

SEQ ID NO: 947319 - protein, 104 aa, Homo sapiens
TRGHPAEKPRRKPDSWPGRERLVAAPLLTRLEGILDIAALELDPVGGFIGVSASTDEVVQTLDSIAQMLGLFRPQDLGQGVLSRRNQRPLHQLARLLALPALQF

SEQ ID NO: 947320 - protein, 113 aa, Homo sapiens
EGVPDGLSTAGPHRSECKRDRLGTMTWGEQNSEAEAFAQIERAKSAGINFLDTAEMYPVPPKADTYATTERYIGNYFKSRGDRADWILASKIAGPGNTIDYIRDGHLRHNRKR

SEQ ID NO: 947321 - protein, 51 aa, Homo sapiens
MAGNDATLELGDGYVTSMRTLSTEAMDEGSLYTCSLTLRSLYANDPRSIEL

SEQ ID NO: 947322 - protein, 99 aa, Homo sapiens
PSRDSADGSLRSPGTPDGRQLFLQVSANYSCRWSPGSSFSRVVVVHAMYLSSVQCVVVAGPARSCRHGAASTAGGLARCSASSARLGRPENSRMTGIVD

SEQ ID NO: 947323 - protein, 88 aa, Homo sapiens
VRRIADVKMVDPRGITHLRLRICRVVDATEANIGCGQAYCAVWCIGRGGTDAAGQVQAARQAEINIAVKDEKIARVERKRSKAALLAL

SEQ ID NO: 947324 - protein, 69 aa, Homo sapiens
MCVQHFLMRSTSNVFTSMNAWMNTVFTRLSPMWRRSSSASALSSGYMRKIALRSAAGIFFASGTCPALV

SEQ ID NO: 947325 - protein, 83 aa, Homo sapiens
WQVEVRHQCIDHFVLEARIDKDLGIVEERFNEIVFRCLSRAFQRTYCSGANRNHPVTARFRRQYRVYHILGYFSVFRVHDVIF

SEQ ID NO: 947326 - protein, 105 aa, Homo sapiens
YDAMVRLAQDFSLRTPLVDGQGNFGNIDGDNAAAMRYTEARLTQAAADLMSGLDEGTVDFRPTYNGEDEEPEVFPGLFPNLLANGATGIAVGMATSVPPNNVSDL

SEQ ID NO: 947327 - protein, 139 aa, Homo sapiens
HDGLRGGAAVGLGVDGSRRDRVDADVAPPQLTGQLLRQTVDPDLRQTVEVGVNPCCRRRLVDDRPAAALLHVRKNRAGTHQRTVEVDAHELAVVAPVHGQQAVEFHAAEDRGVVHQVADAAELGHGLRCHVIGRIDVGG

SEQ ID NO: 947328 - protein, 109 aa, Homo sapiens
  misc_feature (18)..(18): Xaa can be any naturally occurring amino acid
QRLAQREHADAVAVLFAXQRHRAGLDGLLRGHFLGLGRDVLADDFVDLGLDAVEFVGRQRAAVAEVEAHALAIDHLPLLSDVRAQHMVQSSVHNFRRRVVRARGVATVG

SEQ ID NO: 947329 - protein, 98 aa, Homo sapiens
DRGDLGLLEGDAEVAVGREDRAFPLNLRRRILHHRLVGRGDPVEPVGDVAAGDLHDHQRDALGKIDPAVGEMLGEHLEIVDDGIEVARDPAEPLADSL

SEQ ID NO: 947330 - protein, 82 aa, Homo sapiens
GPRVESEVIRAMMTMRLKTMASGHTGVRPKVVTAYADLLNSGLVPVVGEYGSLGCSGDLAPLAHCALVLTGEGTVLTPDGDE

SEQ ID NO: 947331 - protein, 61 aa, Homo sapiens
YDQWRQMGLSGWSYEEVLPYLKRAETLHGEPSPYHGFEGPLHVRWGGLDQHPLNAGVIKAG

SEQ ID NO: 947332 - protein, 108 aa, Homo sapiens
MGVTLCAVEHEHPLATVAAKSKPEVAAFIEECKAGGTTEAELAMQDKKGVPTGLFVTHPITGAQVEVWVGNYVLMRYGDGAVMGVPAHDERDLGFANKYGLPIKQVFA

SEQ ID NO: 947333 - protein, 50 aa, Homo sapiens
QAAAQGTDAGKAMQDGFNRGVKQASVDWSKTSKADPRADFWAGVGGFFGN

SEQ ID NO: 947334 - protein, 127 aa, Homo sapiens
TNSDIRVLFRKAQLGNSGSVAYMFDRVGLVEATHAEARDPEEAAIEAGAQNVEPMKELDKDAKSGAIFYTEISDLNAVSNALTAAGWKVTTSELGFKAKNPVELSGDQLKETAEFLQSIDDNDDVTP

SEQ ID NO: 947335 - protein, 98 aa, Homo sapiens
RPGQQGIADLDSGSNANLKPETAKTWTVGLVNSPEFVPGMDVSLDWWKIRINNAIVGESATDILNQCYVQGVDSACARFTRSTGAQTLGQVTALDRSL

SEQ ID NO: 947336 - protein, 98 aa, Homo sapiens
ALLALFGQGDEHPALVFGGFAPAHDAVTLQPAQYAGHARLEDAREVRQLVTFEFTLLTQDADHPPLLFGQVMFIEQWPEERHGRFAGLEQGERKGRSG

SEQ ID NO: 947337 - protein, 55 aa, Homo sapiens
MSACAAAPDARIPLRGAVGQNVRLFDTRTAYGQFLAGQAALRDGKSKEAASLFEA

SEQ ID NO: 947338 - protein, 132 aa, Homo sapiens
VIVTSFSAAWAVDPQPSNRASSAERATVMMGASVIRQVHIEAGAEGARAQRGRSALGADVVGQPTIARRYEPGRGSTAQAHVIALDIEQAKAEAFGADHLDQPGRVCIRYRLESHGGHGFDSAPDQGALLLI

SEQ ID NO: 947339 - protein, 54 aa, Homo sapiens
MLLRHAGSRNMASDIERRWFLDIGANGDAFPLKNLMQISERDATAVCDHLRRKP

SEQ ID NO: 947340 - protein, 132 aa, Homo sapiens
GHHFYRRDVEGIRTHKVHVCVGGHEQVGRMLRFRDTLRQDSDIRQQYQDLKFRLEASNREGIGEYLAQKAPFIDALMGAQSCNCKCLVLPDRLLQRLSGPQLLLQQLGKGVPGAVVLYILVPDKAVIHWLQV

SEQ ID NO: 947341 - protein, 73 aa, Homo sapiens
DEAACEQGGEHLYIELSHVVGYVARAREKVFMLVPLLYVHELPIVADLPHVEGRVLLEDAHGENFEAFFGVGA

SEQ ID NO: 947342 - protein, 87 aa, Homo sapiens
MRLAHFLPACNGLRQLPIGVARRQIGTRCQNLDDALEARCVIRGADRPYTWEIAAFFLDGAEMLRYVELLWHNCGCGRLKVCAISHA

SEQ ID NO: 947343 - protein, 60 aa, Homo sapiens
IVGHVDVVSGLCERPEGAMERGKDGKERGGPDISRVRRKIEQHDGQLAVLALAPSELNRL

SEQ ID NO: 947344 - protein, 95 aa, Homo sapiens
FVNSVPNMYIQDQGPGGSTEIYIRGLVAQGGAGFPVATYFGEAVTSVLTNHGGMTNLQLVDIDRVEVIRGPRGTLFGANSLAGVLRVVPNAPNLN

SEQ ID NO: 947345 - protein, 74 aa, Homo sapiens
FQSWVSRHFGEAQAMNGMVNIGAVGRDYVAPQGVMAGGVEDVLAVVREEQQETVGVGLGVVLDQVRDPRSRCTA

SEQ ID NO: 947346 - protein, 131 aa, Homo sapiens
HLPPVLALLFPGGAEARVYDMYRSDSPKGAFCDAIGDACVADLAVENAFFQNPAVLATGESDWNFDGDIAAKTNLEPGSDPGNLVTETESNGGVGISTGRFGVGASMSWQKDAVEGKLLIFDENGNPLTAR

SEQ ID NO: 947347 - protein, 101 aa, Homo sapiens
RAWIGFEKMKGRLRRRAGGSVPGIVGEPAAFFGAAARLETRGFDGIVFGHTHHAGSAPLPLGGIYLNPGSWMLGSKYVLIANGAAEMRDVRSRRGRDRRAG

SEQ ID NO: 947348 - protein, 79 aa, Homo sapiens
GADHYLDDALVAALAGIVRGQLAGAEDGGAAQDLADIGLVRIALGLDLNFLTDGDIRDVGLDDFGAGDALGVGLEVEHG

SEQ ID NO: 947349 - protein, 97 aa, Homo sapiens
TSQMPVDNWHELIGDPTLADAILDRLVHNAYRINLEGESMRKRTQKLTRRAPQTNNATPASLRSDCLSRMIVEQVSGSAWAECPNGVEIRSVPVIVA

SEQ ID NO: 947350 - protein, 66 aa, Homo sapiens
GSLGLPLGVIQGQNLALMLESKLAHASDTRDLDKLPIPFRAVATDIASGEKVVFRKGHLPQVIRAR

SEQ ID NO: 947351 - protein, 54 aa, Homo sapiens
RTGGTVHVVVNNQVGFTTPPSDARSMTYSTDMAKAIQAPVFHVNADDPESVARV

SEQ ID NO: 947352 - protein, 128 aa, Homo sapiens
DQLEQLGVVNHVGLVQEHDDVRHADLTRQQDVLAGLRHRAVSGRAHQDRAVHLGSTGDHVLDVVSMARAIDVGVVTDRGFVFDVRGRDRDATSLFFRRGVDRGVVLELATEALGTDLGQCGGQRGLAV

SEQ ID NO: 947353 - protein, 102 aa, Homo sapiens
PSKLPDLSAIEDMREPIVRANILVPQEHLGNVITLCIEKRGVQHDMLFLGSQVQVTYDLPMNEVVLDFFDRLKSTSRGYASLDYHFDRYQSTNLVKLDVLIN

SEQ ID NO: 947354 - protein, 62 aa, Homo sapiens
YATSNVFSASGDQNQYNDMNGVMFCETPWLLDANGPLRRQVTAQWPPAGGSLGRLYAMGVDA

SEQ ID NO: 947355 - protein, 97 aa, Homo sapiens
AQPIEQKGGFRQGKTRVFQPVVFGPDRVVFRPTKIRFLQVRARKTSTGEIGTAQIRTAEVGFAEVGLSGWTIPQNSLLQIEARETRQSDHALLELRV

SEQ ID NO: 947356 - protein, 35 aa, Homo sapiens
  misc_feature (24)..(24): Xaa can be any naturally occurring amino acid
QRKVSSSFSTCPCPIQSRNRVITXTSAPAKRLIGC

SEQ ID NO: 947357 - protein, 59 aa, Homo sapiens
MSEELYGHELCAHVVFAGTESGFEESFGAQAARIPVLACFGERRCARQVGIHEHRAHIH

SEQ ID NO: 947358 - protein, 116 aa, Homo sapiens
AVEVVVAHVVQAPADRVVGGVYPGIAPEAVEVPFAQGGTGPPQEKMSLEIFSEALSEWARAVATDRINLVLQFLVVRVLLVFVEHPCGIAQQGFGSTQGHGVFTDLLDDVRLFAGV

SEQ ID NO: 947359 - protein, 67 aa, Homo sapiens
GRTGVGGLCHRRRGRQRPDLHPPQKAFLPVPGGLSVVGAASAGASCRVGCVRGAVASRPEALQKTSR

SEQ ID NO: 947360 - protein, 46 aa, Homo sapiens
FTGLILSVAPIDIQVHDTYYVVAHFHYVLVAGSLFALFAGTYYWLP

SEQ ID NO: 947361 - protein, 53 aa, Homo sapiens
PYRVYTREEWARLRDDTPMTLEPGEFDRLRSLHDRLDLKGVEDIYLPLSRLLS

SEQ ID NO: 947362 - protein, 89 aa, Homo sapiens
GFHETRNGVCHRKRAEFTLIGSFEMSTNYTPAQLSAMTVAQLNALAASQFASFTSAQIQALSPLQLNGLSKANLAAVNVSYFTKAQVNG

SEQ ID NO: 947363 - protein, 48 aa, Homo sapiens
PEPDSAPGAVRILFIGNSHTQGAAETPEGNYPAQVDARLKQLAPGKRF

SEQ ID NO: 947364 - protein, 39 aa, Homo sapiens
LGSALGPHQRGAFSRERQDREGPGGQKMFFGAAFMVALV

SEQ ID NO: 947365 - protein, 72 aa, Homo sapiens
EDHQQHRRLAVEQAEVAQVLDVLVDVVQVGDAHQAAVVLLDHQVGVVGALEQLVVGTEHMVMLAEDDRALGQ

SEQ ID NO: 947366 - protein, 65 aa, Homo sapiens
RFGLRGVLVLVRPVEAVFGAVHLHDLHAGAADADHVRGLRRDGGRERIRVIGGERLPHGLFVVVV

SEQ ID NO: 947367 - protein, 62 aa, Homo sapiens
STLYNQLITQDKVDLLVADSGSVLTAPAVAIARDHKMFLFDQTGTGASFFSKDNPYIALMAD

SEQ ID NO: 947368 - protein, 71 aa, Homo sapiens
RHEPCLDAGVGVGLEGLEHHDRTQVGSADADVHDRRDPLVGDARELSRAHPLGERADTPEHLVHVGVDVLS

SEQ ID NO: 947369 - protein, 50 aa, Homo sapiens
DPIAPAEKFETLKVKLGDGFVGTTFPDEVANPDGMMAKGRKPHSVFTGAV

SEQ ID NO: 947370 - protein, 83 aa, Homo sapiens
VPVLLPQRATQVGLEAIGNRLQHIEIEHARAELRSLETEGELIGLCADGRLVVDNPGRRGKGIALRRDAHPHFASANKPVREA

SEQ ID NO: 947371 - protein, 54 aa, Homo sapiens
RQPVDQRAPLIGVVRMPVQHQHDGAATGLQHPGPHRQFRHVEPVFFNPGSNLNL

SEQ ID NO: 947372 - protein, 59 aa, Homo sapiens
PPLRTIIAHVVAVVRVVLSDVSAVLVDDVCLVVHHHGLIDHRGVVDRDAVLVPAAKRRL

SEQ ID NO: 947373 - protein, 92 aa, Homo sapiens
HQVDEKERALAKLQLQLAEQEDLIRKGLVQEEIAMLRSTKEQLAALRDERDRLHLSNEGERAQLMEAARRESALIVDQGLSLKAHWEGLISA

SEQ ID NO: 947374 - protein, 61 aa, Homo sapiens
GRVDQHVRVMIRPVDLAEAFHGGLEERENVRQRSRLRPLLRRVPHSLFLAQSIEHTYDIER

SEQ ID NO: 947375 - protein, 63 aa, Homo sapiens
FAWGLFFATWAKVNRRRSDGQNGMSSSMSSKPVADFGAGAGAGRGAAAGRAAGRLTGAGASWL

SEQ ID NO: 947376 - protein, 70 aa, Homo sapiens
MSGYLPVLILFVVALTIALAVIVLVAFLGPKRPNKWKNAVIECGVPPSGDARKRFSVRFYLVALSFLLFG

SEQ ID NO: 947377 - protein, 73 aa, Homo sapiens
TRALLVGPDRHFQGLAGLDPEVIERAHHFQSGQHTVDPIKAPAFGLGVQVAAHHHRGSVRVAPGAPGKQVADG

SEQ ID NO: 947378 - protein, 73 aa, Homo sapiens
MPGLINLDFADVRSVMQEMGKAMMGTGEASGDNRAIEAASKAIANPLLDGVSMKGAKGVNVSITGGDDMRLLE

SEQ ID NO: 947379 - protein, 73 aa, Homo sapiens
MTELRPPMDRFRPERADDVFSRYGDQRVDSRTEALRRHPRRQEFRYRQWRFKADGSSDADACAGGASGVVPLE

SEQ ID NO: 947380 - protein, 97 aa, Homo sapiens
KTALSRIVGHLDLSTEEMRSVMREIMTGQCTDAQIGAFMMAMRMKSESIDEIVGAVSVMRELADRVELKTLDGVVDVVGTGGDGANIFNVSTASSFV

SEQ ID NO: 947381 - protein, 106 aa, Homo sapiens
VELLDASGMEIQHAVQRLAVPEAQARGVSVHEIIRAYQALIDRAIDRLVKDGRKKVFPKFTVTTFPQAVAKCQGESESQYLLGGAVAGFIAVAPDWNAKVGLILGL

SEQ ID NO: 947382 - protein, 37 aa, Homo sapiens
GYGVADLMAHWNFAPGATFNVGVFNLGDKRYIDWSNV

SEQ ID NO: 947383 - protein, 30 aa, Homo sapiens
MSVVVPVLANAVASGNMPAIKTRVFQLINR

SEQ ID NO: 947384 - protein, 52 aa, Homo sapiens
DVFHGAFALAITEKQELRQALRFASAAAALKCTRFGGAYAAPRRTEVEAFLG

SEQ ID NO: 947385 - protein, 38 aa, Homo sapiens
VSLDNFVISMMVSQAGTTTLPIFIFGLLRMGVTPDVNA

SEQ ID NO: 947386 - protein, 71 aa, Homo sapiens
QAEQMAVEGRVGDVADLLLVVADVGVGAALDQAAGRLPGVVLGVAVVAVAADVIDAAAHQRGRVRRPFRLQ

SEQ ID NO: 947387 - protein, 80 aa, Homo sapiens
AAANHRHTLALEQRPSQCGQKHTPLALYSCSPGTPISRQRAPVARITDLALRLAPLSNWISCKPPTSLAGTRALARCRFM

SEQ ID NO: 947388 - protein, 89 aa, Homo sapiens
MGAKKITYADFDVYTDAIGQPRTAQYPMDLEYRNLPDDLAAGVSWEAAQNYCGWVGGLIGRKMELPTEAQWEYAARNRGQFIIWPTDDG

SEQ ID NO: 947389 - protein, 64 aa, Homo sapiens
SPKLVALQGKVDSFKKNLEQTGLGKLDIRGLFKGGSLITPFLDGIKACDAFKGKLAEVGDSSAP

SEQ ID NO: 947390 - protein, 35 aa, Homo sapiens
MVRNRLRILSAVALPLALLACAKRDDDRNLDSLDN

SEQ ID NO: 947391 - protein, 52 aa, Homo sapiens
IIGADGKLNEQTTLGLAYRYATSDVDSDDGNSTDVKSQALIAYGSWKQGPVC

SEQ ID NO: 947392 - protein, 92 aa, Homo sapiens
LLEARLATVNRMAAANDLPDAIVTESGLKITLLDAAVPDTAQAMIDQTAMVLPHVKITELLLEVDEWTGFTRHFTHLKSGDLAKDKNLLLTT

SEQ ID NO: 947393 - protein, 90 aa, Homo sapiens
AVGHQQVVADPDLDLVAGDRVRHVQAGGQAFLFTRGQFGFGGAAQLALFDEGGQRRIRLRGVGGQGVFRRHGAEGHAHDGVDAAANFFAA

SEQ ID NO: 947394 - protein, 90 aa, Homo sapiens
MIAQSAAMREAYVPIPVLVTRTSSVPFSLRVPANTGLPMPLSFVSLRVRERFGHEAGAESYHAVGREHSLGWHAANVSFPERLGGNEAFD

SEQ ID NO: 947395 - protein, 52 aa, Homo sapiens
DLINEATGEIYIEAGDEVSAENLEKLDKAGIDRIELLDIDHIATGPWIRNTL

SEQ ID NO: 947396 - protein, 81 aa, Homo sapiens
YDAKRDGFAIAGGGGMVVVEELEHALARGAKIHAEIVGYGATSDGYDTVAPSGEGAIRCMEMAMSTVDTPIDYLNTHGTST

SEQ ID NO: 947397 - protein, 64 aa, Homo sapiens
DDLVLHAGRQGPTDQAMGGVGVGRESDGLEVERDAFLGAAFHQSGVDSLQLVRVLELLGHVGLP

SEQ ID NO: 947398 - protein, 86 aa, Homo sapiens
CNGTLIPMTPGDNGAISKNGSTYANYSIPLSQCNTVTIPAITSSRIYLSVGSPMYLRSAGNPVYGYVGPDINNPADPNIDVTFDFI

SEQ ID NO: 947399 - protein, 100 aa, Homo sapiens
FLNKCDTVDDAELLELVEMEVRELLSKYDFPGDDTPIVKGSAKLALEGDKGDLGEQAIMRLADALDTYIPQPDRAVDGAFLLPVEDVFSISGRGTVVTGR

SEQ ID NO: 947400 - protein, 81 aa, Homo sapiens
LRDLGHPVEVWGWDEANVGAAVDDPFELAEKIRAVIAAETGLSCSVGISDNKQRAKVATGFGKPAGVFALTAENWMTVMGD

SEQ ID NO: 947401 - protein, 46 aa, Homo sapiens
LFHGLCSSPLELIFLARGLHRAGYTVRVPSMTGYTYRNGKTLKAKD

SEQ ID NO: 947402 - protein, 60 aa, Homo sapiens
QHGEKADIGAGVDHAVSGLDGAGHDVDHLGFGQLAVLRVPEQVAVGLKLLGLEVEQELGA

SEQ ID NO: 947403 - protein, 56 aa, Homo sapiens
SLKQGCGHDHGPSLAEEHLHKDRNLDSALLHVLSDAVNSLAVIVGGVLMYFSHYYW

SEQ ID NO: 947404 - protein, 64 aa, Homo sapiens
VELLCDPDPVSVGRLIEAGGSALKMVTIAPERAHGLEAVTTFTTAGVHAAIGHTECDNTTASAA

SEQ ID NO: 947405 - protein, 67 aa, Homo sapiens
GPVRTIAAPHETGHDRPLCARCRRHAGKERIVGRNELGLGFEVRHRTGRKNLDSPVRTTFDLRLVGV

SEQ ID NO: 947406 - protein, 73 aa, Homo sapiens
NGLQNKIVDGGDLKVCRGCRTVRVDRGPINGALDSKFGTVALLNVIERARARRMPDNGDEPDIAPADVLIAVR

SEQ ID NO: 947407 - protein, 79 aa, Homo sapiens
MRKHAQVLFSANRGSSAPCLSSPPPVFEPFRLKELNVIRFGKVSLHNGRVSRMRVRADLRLFVHEIPKSMKQAVSSFLS

SEQ ID NO: 947408 - protein, 38 aa, Homo sapiens
LGRVCEIAAIDDARQAVLLFCRGEARRVVHGAGLDARQ

SEQ ID NO: 947409 - protein, 63 aa, Homo sapiens
MKSEMRGTISERNREPLNTPYMTDALLHVMHAAVIRNRRAQRMRRFGLAKTRDVILLAFHRHR

SEQ ID NO: 947410 - protein, 105 aa, Homo sapiens
RTDRQTEDTRMIQDHHPLAKDFPEFKDKIHALKTSNTHFAKLEREYEDLDKAIVRLETGVEHGSSIELEQKKQQRVTLKDELYNLLKADHQAATLKAIAARYLIG

SEQ ID NO: 947411 - protein, 47 aa, Homo sapiens
VDDSNQQHAETMPSRHKGEAVFLAPKCVDRGGGRTAVKPALSPASLS

SEQ ID NO: 947412 - protein, 74 aa, Homo sapiens
MQDLGRQVGIDNVQLRVVGDNHLPGRARMAYDPGTGTFLIRQSDILKTNWLDAQYLYHEMIHAEQDVLMAKVGL

SEQ ID NO: 947413 - protein, 34 aa, Homo sapiens
PTSFAHVTSSNLSTATGIGAQNTGITVGAGNLIP

SEQ ID NO: 947414 - protein, 98 aa, Homo sapiens
CTTLAGLVSDAFKVNDKGVCCHADGHDRAGDTSQRKGESDGLAEQHHGCVGSDTGNDEGAEGHQSQAPVVQQAVAADQNKANDASDNASSKLLTPKGG

SEQ ID NO: 947415 - protein, 52 aa, Homo sapiens
PHLMMDDSEAPQAVVHSLELREVRYSPPPVEGSEPFHLGPINLNIKQGDIVF

SEQ ID NO: 947416 - protein, 81 aa, Homo sapiens
VVITSRGGVAIRIKDVATVGIGREMRTGSASENGEEVVVGTALMLIGGNSRTVAAAVDAKMQDVRRSLPPGIEANTVLNRT

SEQ ID NO: 947417 - protein, 91 aa, Homo sapiens
VLLLVVAADVVGLADRAFGHHLEQGPGVILDIQPVAHLQAVAVHRQRLACQGVEDYQRNQLFGEVERAVVVGAVGDQHRQPIGTLPGADQV

SEQ ID NO: 947418 - protein, 88 aa, Homo sapiens
MQQPVMAWRHDVASHAMYNIIELLAVALADGVMQSPGHRQGVGPTPQVVLAHMDAILEASLAAPLIGGAMGWYFKRLSPYRFSQLLGI

SEQ ID NO: 947419 - protein, 91 aa, Homo sapiens
GGGIADFFIEYTNYADPSIPYGSMFSVLVGVIYPYLDSDNFFFGYSEGASESRLSEIVMRSGFTYTGLFETKEDGTTIYYYGRRDGHALGY

SEQ ID NO: 947420 - protein, 38 aa, Homo sapiens
MVDELACSQQSLLLSRIGLAFCLHGRQLGVLRIILGRA

SEQ ID NO: 947421 - protein, 71 aa, Homo sapiens
ETGEYPLWAYPLDVAGRRAVGITQQRTDDVGVQQMNRSQDVLRLERRVGDVRKLVFRPKRFVLSPLDQQFH

SEQ ID NO: 947422 - protein, 50 aa, Homo sapiens
VLDGQNDAKAQPDPDRREDLAMAWQIGGLFAGVVSGVVSWLIGQIYDNIC

SEQ ID NO: 947423 - protein, 49 aa, Homo sapiens
ELNTPLTAILNAITMLEERFTAEKEYIPMLRRNAERLRKTVENLLEISR

SEQ ID NO: 947424 - protein, 45 aa, Homo sapiens
HVLGAARDAGQHGIEECGVHDLDAGLLQPHGHRERVTVHPVRDGG

SEQ ID NO: 947425 - protein, 62 aa, Homo sapiens
RHRFELTAERAHRFPALDHDSQHLQGGDQAVAGGREVRQDQVARLFAADIEAALAHALHDVA

SEQ ID NO: 947426 - protein, 31 aa, Homo sapiens
FEERIRHLMYLRELQDETGGFMVFIPNSAQP

SEQ ID NO: 947427 - protein, 74 aa, Homo sapiens
PDRPSEHQLPLLKGHEKNELGIWINTANQLLASIERNTHLRHEAENSLLRMAQYDFLTGLPNRQQLQQQLDKIL

SEQ ID NO: 947428 - protein, 57 aa, Homo sapiens
LSKLTTAGINGQFRTPRHIIRLMVELMDPQPTDRICDPSCGTAGFLIETYDHLLRQY

SEQ ID NO: 947429 - protein, 58 aa, Homo sapiens
NTNFIGGEIEADDVQIKGGQLNLSNLHTDLTGNLSIASGAALQVRLSDSTNVNTPVVG

SEQ ID NO: 947430 - protein, 66 aa, Homo sapiens
PQRHFVAPQRPVVDQGRAGQVQEQLAGGRVLVEALGAGAEAGQLQLRMQALAAGFGEQGVGKVQGG

SEQ ID NO: 947431 - protein, 82 aa, Homo sapiens
MLVAGGVGDDELALLGREETVGDVDGDAKLALGGQAVDQQGEVDRPALGADLLAVGFERRQQILEDHLAVVQQAADQGGLAV

SEQ ID NO: 947432 - protein, 32 aa, Homo sapiens
PCAIAAQLDAAHQFALVLIAAIGARELDARRF

SEQ ID NO: 947433 - protein, 96 aa, Homo sapiens
MSEETEILTKNELFLAVTRPALWAGIPIEAAEILLISSASVLIWSNSPVYDALVVAFGYSISRLIVRHNVNAFRLLFLWGRTKLGNRNRTFWGGSS

SEQ ID NO: 947434 - protein, 84 aa, Homo sapiens
RTAPYDLGNGYGHIAFAVDDLEAARAKIVEAGYQPKDIKNMTHDGKPFGTFFFIDDPDGYKIEVLQRGGRFQKRFEDKMADDDF

SEQ ID NO: 947435 - protein, 64 aa, Homo sapiens
MIQDPTCADLLRDCGAVVLRQALSNDGAEDRVEARFQFLRYRADLLRHVVDADIFGLEHHAQDE

SEQ ID NO: 947436 - protein, 60 aa, Homo sapiens
MHRPALRIVVAQERLVQAALLLALDDGHAVALVGDLAQRVLARVVHGRGGGHRRRVERLR

SEQ ID NO: 947437 - protein, 69 aa, Homo sapiens
IRGRVDLALGGGALHDVGRRRQYRAHRIRGVADPPLARREAQVAQAGRLDGIVQRSLDRLDLVVVPVGL

SEQ ID NO: 947438 - protein, 55 aa, Homo sapiens
EKWKQDVGNVFHDTGADTAEEARSEAQERLTKHLMDKGWSREQPERWVEARWKDA

SEQ ID NO: 947439 - protein, 73 aa, Homo sapiens
IEPAIEQHVGQRGALAANIVSAILHLAVQPLQAVGGDHLKPGRCVRGARDSLLEEFQAFTEAKAVAHMLADVE

SEQ ID NO: 947440 - protein, 79 aa, Homo sapiens
VHLQQVVEGAGLGAEQMHQRRMRRRGRQLRHLGAAALSSVEDAPRPQQFQALAQGRARNPELGRQAPFRGQQLVGLEYP

SEQ ID NO: 947441 - protein, 62 aa, Homo sapiens
EATAVSDDPFEYECSIPGSTMMILLRNNKDPRTGEEIGGVTDLNPYNQRFFRCNRKQVALSR

SEQ ID NO: 947442 - protein, 30 aa, Homo sapiens
LDRVEQRPVAIREHIALRKWRAQLEPERAQ

SEQ ID NO: 947443 - protein, 125 aa, Homo sapiens
APYASIDAHEKYSTACFTTFREAVHLVRQVVKVEARPARGDRAQLTHQRLRAVVTGAHGDSLGVEESGEVMRVHLVGGEAQHAAVKLGFRGSEHFDRGHGEELFLRVLHERAFVGVDFVHADLGE

SEQ ID NO: 947444 - protein, 43 aa, Homo sapiens
ALYGRRIHITGSIVEDANIATAAEVTRAREFVKALVLDLLAKG

SEQ ID NO: 947445 - protein, 45 aa, Homo sapiens
MSLLSPAIEPLRFREALGHYASGITVVTTHINGEPIGFTCQSFHS

SEQ ID NO: 947446 - protein, 60 aa, Homo sapiens
ALDIATSFKRVELTTLTPYSGKFAGFRIRKGRLNLDLHYVITKGQLKAENKVVVEQLQLG

SEQ ID NO: 947447 - protein, 72 aa, Homo sapiens
TLRRSKSADDVFGDQGDLVVAAVLKLVHDVHEGEVLHFRIGADEDDLFLRVGAADHGRQVVGEVVERLGVRV

SEQ ID NO: 947448 - protein, 123 aa, Homo sapiens
DAWLDALTRIVEKGRKLHKEVVLHTHFNHPKEITAITQRALARLMERGIFTRNQSVLQRRVNDTPEIMGLLVKRLGHVNVHPYYVYVHDLVKGVEDLRTTLDTALYLEKHVRGSTAGFNTPVF

SEQ ID NO: 947449 - protein, 71 aa, Homo sapiens
TDGGADAILESEADQAGGRKDDGVIFAGVQLGQTGIEVAPQKTDLQVGATGQYLSLTAQAGSAHHAAFRRL

SEQ ID NO: 947450 - protein, 74 aa, Homo sapiens
EQSHRAARLPIPSSGEVVLQNRVDAVERNRVAENQPENRRAVALGRCCARHVAQPDLTAQIRIGDRRTVRLGKV

SEQ ID NO: 947451 - protein, 83 aa, Homo sapiens
HIEPARQDALVLEPLFHAVLHGTPERHQAAADFFFRTPDLLVGQHQFGDPQVVLLAQAQQFHRTGKIVRQLAAVQVRHTAVGL

SEQ ID NO: 947452 - protein, 81 aa, Homo sapiens
YKLTDTLSATAQVMTKYRATGEYKPDFDWAFAKWQAAPAVAVRVGRIGAPFFMVSDFRDVGYANTTVRPPLDVYGQVPVSS

SEQ ID NO: 947453 - protein, 58 aa, Homo sapiens
MPILFDIADRLSNAGADLLASRVLESAIPLAQLRAHAPVQPRQIFQAGANYHKHVVDL

SEQ ID NO: 947454 - protein, 75 aa, Homo sapiens
IKLSGPRAPWELNNKCTKLRSAVERIAAQHAGAPDAVGALVRLLNVSGTSIEWGYLNSGVHDAQRDHEFDRATVR

SEQ ID NO: 947455 - protein, 113 aa, Homo sapiens
TAQCVIGGARVINEIQDPAANDRMDDAEWYNIVTPILDGISLVGVGGSALTTLRLLKASKAANTGKSWMQLLKGLNRQERAKLTKELLTLRDPSLTSKLLKLQQRAGASPRRC

SEQ ID NO: 947456 - protein, 89 aa, Homo sapiens
MPIRHCVDLSELNLIDDGLPDRHHVGYGHRDLAEPHCVRSTPRSPNQADQAETPNVVTVLSRRSVNDCSRVPPDANVRPPDPGGSIADE

SEQ ID NO: 947457 - protein, 142 aa, Homo sapiens
LTVDVVDRGTVSQLEQLRAVLLEVGIAVDEQLVVDGVSGRPLVDALVLALVGLGHRPEGELVDTVGGGEVDHLLHLVDAVEIALDQHRCQTHGEVELLQLGNQSRQVLVLAVRRVNRLVLAALAVHHRNGDGGEAEVIPLLQ

SEQ ID NO: 947458 - protein, 113 aa, Homo sapiens
EEVGADGALLEHRAVVIARPAGVGDQRGRAAQVGEDSLARLEAGGEHEQHRVGEHDAGQHHQRDMQQPTGHPRPFGGSAHDPNLSTTFFLTEGEQQHEQEEEQSHRGAVGNVL

SEQ ID NO: 947459 - protein, 95 aa, Homo sapiens
GSGYLFCSFRRTEQAADVDSQAFTDPHQLVVAQGKLVVFDLGQRGRRQAGFLADLCQRPTALDPNRPQDAAWVSGVDLPRLFASFGNVPFAIEQY

SEQ ID NO: 947460 - protein, 129 aa, Homo sapiens
ELHVRRQETEVHIVVDFNGPGRTIAHVSVGVTGHAGNARTEQAALRERVVIQELPVHQRGDVDVALVGAGEGELQTADDVALCGREEVVLGIRIHTDFERDVVQRAHGEGLGVEQLVPAEGGAEQAVDL

SEQ ID NO: 947461 - protein, 123 aa, Homo sapiens
SGRGLEHRRRAAQGARLWVEMQARGKCRLRLAAGHVGAGNRSDGRDGHADVEAHGDRGRGLNRLHRRRRVAARTAREQSGGEENKGKRFINGRANHPRGNATPVPSRKQRNIGGQRARRRQLS

SEQ ID NO: 947462 - protein, 43 aa, Homo sapiens
FLVEALHRIRNRIGHVAHRDEERTLVFENAAEVFAGAVLRVGF

SEQ ID NO: 947463 - protein, 131 aa, Homo sapiens
MAAIGDAGERHLDGHLKIKRTVGAHRKAIKISHPLPVHTPGHVAGKRRKAITVGEHHKTGFEGGDDDVFEPIGKVSGMQQAKSIGNEELERLACLIVLLIRRELFHSVKITLWPREMSQLRNRSSWVDLPG

SEQ ID NO: 947464 - protein, 72 aa, Homo sapiens
MDITFAPMVDISRDPRWGRTSEGFGEDTYLVSRIAKVMVKAYQGQSPALPDSIMASVKHFALYGAVEGGRDY

SEQ ID NO: 947465 - protein, 74 aa, Homo sapiens
FPGSLFTDPWVPDFRMFLEKEFRQFRRLDALAAHARQVLVEQVDRQVDLFQHRHQLRGLVVEDSGQTDLDAHAL

SEQ ID NO: 947466 - protein, 124 aa, Homo sapiens
HSNQVTIHTLNVLQVVQTDGTAILHLNAVGCGSTACRTTNVERTHGQLGTRLTDGLGSDNADRLTNVHLVATSQVTAVALGTDAIAGFAADRRTHDHFVDAVELDEFNPLFVYQGAGRNDDVLG

SEQ ID NO: 947467 - protein, 122 aa, Homo sapiens
TIASQLVPIGIDSAFLLREQRIELLLEAVVIDALVQFHAGLHGVDHVLLGAVATDRGVDVFCGLVHGTEGRQRVQHQGNIHGFQLFGGVQRGGAELSDVGQDRSFHPIGEDLVHFELGDGFR

SEQ ID NO: 947468 - protein, 112 aa, Homo sapiens
GYTYSAHPVACAAGLAALDLLQKENLVQSVAEVAPHFENALHGIKGTKNVIDIRNFGLAGAIQIAPRDGDAIVRPFEAGMALWKAGFYVRFGGDTLQFGPTFNSKPQDLDRL

SEQ ID NO: 947469 - protein, 115 aa, Homo sapiens
KRNARAPLVACRDLTGVPDGRHDHCSVSKLDYLARAIPCVLGVQSAPWNGCAVDFASEAAVARVRCQRELGPVSGWDVVCHGRNGAETIGWAADCRGAEPVKFSDGWRLDVIPVN

SEQ ID NO: 947470 - protein, 72 aa, Homo sapiens
EGFNEFLLLFGEHNISRWHRRSRCSTLMAQYARRGLLLQSRSADLTKAIRPIRHRYPSADATCFRIASIACA

SEQ ID NO: 947471 - protein, 70 aa, Homo sapiens
NQDGARGLAEVKRQGGLTIVQDPSEAHVSTMPAAALALHQPDYILPLRGISRLLAELEEPMLSNIQAKLL

SEQ ID NO: 947472 - protein, 91 aa, Homo sapiens
EGTSTLFMRGALTKGSNKTDVPRDKVAYDEADNNPQAYKTYGGSVKARNDFGAIDFTSITAYETTSGYSRGDTDGGAAVNFPVNGVPNGYG

SEQ ID NO: 947473 - protein, 105 aa, Homo sapiens
SYANNINTHEGGARVSGFRTALTRVVNGFGKENDMFKGMAEQLTGDDIREGLTVVISAKIPDPQFEGQTKTKLGNSEVEGLVSSIVSEKLRIYFEQRPQIAKKII

SEQ ID NO: 947474 - protein, 43 aa, Homo sapiens
VLGQLFGADVNPHRHTLHDLDPVPGGVLRRPQSTRTPGAGASS

SEQ ID NO: 947475 - protein, 116 aa, Homo sapiens
FVPFLRFAFGHRQFNRRILSLALPSLRFLVRRVDRDQLKAQLISTFLTGVEAAWLQQRAEAFCQQAWNRLMRPAGLQAVAQELRSGALVTLCSASPALVLQPFATRLGISLIGTEL

SEQ ID NO: 947476 - protein, 87 aa, Homo sapiens
DVAQHRGVALDARALRHAEQAVLEVDDIGGDGGFVKLAVVRQPASKLVEVSGRSEPLMESKPDWVVAKGVEPVAAPWEARMFFDTLV

SEQ ID NO: 947477 - protein, 125 aa, Homo sapiens
LLDDEASPARLLAYVTGPEDMDARAIRQGLRADLPEFMLLASVTMLSALPLTPNGKLNRARLPAVHGAPRHDAGAPQGPMETALAAIWADLLHTPHVRRHDNFFDLGGHSFLVVQMMDRLRAMQL

SEQ ID NO: 947478 - protein, 90 aa, Homo sapiens
HQQRAQALAPANRGVTHRPIQIGARVFRNRQKLVQPPVDIGTDVRQGRSKRRGAAVMPSTRGKGLRADGAPLAIGADRFDPRLCGIEPII

SEQ ID NO: 947479 - protein, 49 aa, Homo sapiens
MRQQRALSDLAVGEMSGLSICTNERTRRGDPPIISRTLRSALIVVSTVA

SEQ ID NO: 947480 - protein, 41 aa, Homo sapiens
DETLLPVVEILQRDGLRVRHLEDLARDRFAEAGGVLEPGLA

SEQ ID NO: 947481 - protein, 53 aa, Homo sapiens
LPVFQGLDVVQPVHALHMHVAHIADREVAVQRLADAHAFSVQVVAGEADVQLL

SEQ ID NO: 947482 - protein, 114 aa, Homo sapiens
YYTREAGVRALEREVGKICRKVIKQLLTQSDRAKAEGKTFELKPVNVTGDNLSDYLGVRRYTFGMAEKENQIGQVTGLAWTEVGGDLLTIEVADMPGKGVIQRTGSLGDVMKGS

SEQ ID NO: 947483 - protein, 70 aa, Homo sapiens
KPSRRVDRVETTARGAASAISLASFSAAAQQLILRHQLIDQAPGERLFASDAASCVHHQRRFCSQIRRGR

SEQ ID NO: 947484 - protein, 112 aa, Homo sapiens
  misc_feature (10)..(10): Xaa can be any naturally occurring amino acid
MRLVGACMSXASPTPGTQHGAFWMTSSRRCIQAKRRTDQPLGQPYIGIHVEVLRNPKQSLVLGRLCEALKLIQLTPLIGGEGANILRHVETHRLWVIAIDPVSAGAPILWRG

SEQ ID NO: 947485 - protein, 103 aa, Homo sapiens
LQDGVQQDRPGDAVFGLQRGQELVHVEDVPRPLDLGDHDHVDLVAGLLDDGGDLVEMPGRIEAVDPRPKAHAQGLEVDLARHGHQARQRRALGVGGDGVLQIG

SEQ ID NO: 947486 - protein, 132 aa, Homo sapiens
SGKFVVLILLVLQLVASGGTFPWQTTPEPLHALHQIQPMGHVVDGMRILIYGADLSRIVPIILGLVGYTLFGLLLSYLAARKHKFWTLKTLQPEIAVMSGEANTMKRPERTMITRQKLFEASMQLIGERGPA

SEQ ID NO: 947487 - protein, 100 aa, Homo sapiens
LSINQSDRILADDAAESGRVEFALEFLAGQQQVEKIVVSQLEEMRQCRHVIVGKLGFVGVEIPGDDQVVFEQAPARPPTQTRPFQFSKPAHHYTLNTPKY

SEQ ID NO: 947488 - protein, 76 aa, Homo sapiens
ASGEFGQQRRILVHAVEALRRLGDAVEIRPDPHVIDPRHLAHVIEVVGDIGQGHHRLGVSVVPGLHPHLGLVWLAH

SEQ ID NO: 947489 - protein, 134 aa, Homo sapiens
GASQVVGQGDILLAIVALGRGEAQQAGDLLLVGDVFGRAFLHHLAEVLPEALVLLGLVLRQFLQHVEDTLGQCRLHRVNDRVFLQDFPRDVQRQVVGIHHALDEAQVQRQERLGLVHDEHALHVELEALGRFTL

SEQ ID NO: 947490 - protein, 87 aa, Homo sapiens
GVAISQIICTGLSKEPKPSLVVVRVALPSFETTSGNTNVSDSVSSRPSWYEIVNRLAAVAARVEVADTSTPRRSTVEVPVTALPSTL

SEQ ID NO: 947491 - protein, 104 aa, Homo sapiens
GVGLVDLVDRHDQRHTRRTGVLDRFLGLRHDAVIGGHDQHHDVGQLGAAGTHRGEGSMARSIQEADHALRRIHVVGTDVLGDAAGFAGGDLGAADVIPAARSCR

SEQ ID NO: 947492 - protein, 109 aa, Homo sapiens
LLEDLGIDHFGGTLGLFLALGRNLHVHAVDQDSAGVLVLDARQQLAQQAEAGRDHAGGIAGMHAFVEHLHGEVAAGQAAQRGGAPQLVVVGAARIQADHQRRLADAVGR

SEQ ID NO: 947493 - protein, 51 aa, Homo sapiens
MERLFEVRSHTNPAKRLDKLFSDLCKLGLRHWDPLLRKTKNPKARASGSFL

SEQ ID NO: 947494 - protein, 89 aa, Homo sapiens
REFLMLKYILVAALACTASLLAARDTAQASWHYQPQGKRITIQQAAANIAAGTQPSEITFAENQMFVEFTDYKTPANSTYGLTTTVAAF

SEQ ID NO: 947495 - protein, 118 aa, Homo sapiens
AAGRCGIHQCVGMRLRRRLERRKPWIDALPGIIVLALIRQELLNALRFHAHLEFRDVSSFAVRARLGAERGERIEIGAVESQRPVHQLPVSCPLLTCKAPVTCGSELRGPVPPKDVVS

SEQ ID NO: 947496 - protein, 91 aa, Homo sapiens
SDVIFGWLHNDVVSAKRQYERDTAINAMSVGQRHPSPCGETETPLSERLRTTNKAIAEDEGFRDDALDKNHIDTLTRPRIEINQSDHIARE

SEQ ID NO: 947497 - protein, 84 aa, Homo sapiens
FSFWPRKVAQGEPYYHLWYLYMIVGLYMFAPLVRLLYVRSTPRSRSLWVVGILGLAILDALYRRALGAQPGFFLTWFLPYLGCF

SEQ ID NO: 947498 - protein, 107 aa, Homo sapiens
AGIGVNDVLGQHAAVQEVFRHGDALDAAGSQVAQMLGVDTLVFFDDDLAGAVRDVKRAISPFQRSGTNSIMPPSLFSSKLSKSKKLARIDSGVMPIALHRIVTGILR

SEQ ID NO: 947499 - protein, 82 aa, Homo sapiens
MMLLGQAFHDRGLAHARLADQHRVVLGPALQHLDGATDFLVTADHRIELAALGTSGQVDGVLLQRLPLFLGILRLHVLAATQ

SEQ ID NO: 947500 - protein, 130 aa, Homo sapiens
LKSLHRGATTVTQLTGVRLYRPPAQRPMPGMPFMPPMRFIIFMRPPPRIFFIMVCICSNWLSMRLTSWICTPAPAAMRRLRLALLLPSISSAGWRRSLAVIAQMMPSMRRMSRSALPMSALTGLGGQFGG

SEQ ID NO: 947501 - protein, 38 aa, Homo sapiens
PLVMVPQPFHFGFALSASSVLGFVKTGFVSSIGSIKDV

SEQ ID NO: 947502 - protein, 76 aa, Homo sapiens
NFLGKFSVRPDADTLVDLTLKYSDRSEALTSNTARDTQYANNHGAYGLAARLEHRLPAARLTLQAGWDHAMSNRRS

SEQ ID NO: 947503 - protein, 37 aa, Homo sapiens
GFRGEAAEHHRVDRANAGTGQHGHHRLRDHWHIDSLC

SEQ ID NO: 947504 - protein, 56 aa, Homo sapiens
MAAALPSISIMVGQMPIELARRDEEDVEAARQKASYFQQDARITALAHGEGQPIAL

SEQ ID NO: 947505 - protein, 127 aa, Homo sapiens
RQLLDLALEVALTALQLTDLAHQRLVGRVVASELAIHLRLLKTQLLDAGFHRHFLIQKALGLQSQIHRVGTRLVGTRRLLGRVHLISDIRQLLLHEGQLRRCFGRVALDVQADVGLGHLLQEALCEG

SEQ ID NO: 947506 - protein, 91 aa, Homo sapiens
YWVAVEAFDESGVSRRTRPVRIRYICSSLEERGVIGLPSQPPVNPASFSPLRIGAQPCMRFQTKSFRIIRRLEQDRALVDADMVGVVPALG

SEQ ID NO: 947507 - protein, 69 aa, Homo sapiens
AELAAFYLRVFPAAEYSVSAPGRTVKTAETIAGDDFAVDGQIERQICRLQPDRRRRLQPDGLRDLGAAG

SEQ ID NO: 947508 - protein, 30 aa, Homo sapiens
AVIRGNLERLASEPDLHSFLGHMLLETTPQ

SEQ ID NO: 947509 - protein, 92 aa, Homo sapiens
APGAGASGEDDLIARYFRPLATDPGAFGLVDDAALLNHSGDDIVVTTDAIVEGVHFLPDDPPDTIARKALRVNLSDLAAKGASPAGFVLTLA

SEQ ID NO: 947510 - protein, 73 aa, Homo sapiens
VRNGLCVIGRVAVLEAVGHCHVDERVAPLERGPFDPEHQSERLGRATFAVLGSDEERVFAVGEAGQIDVDRLG

SEQ ID NO: 947511 - protein, 60 aa, Homo sapiens
GQGFLRRWNRGVNQGGNRSCYGLCPERLGEPQVVSNDKPNDTIWAIEARGLVKRFDGFVA

SEQ ID NO: 947512 - protein, 95 aa, Homo sapiens
YSIACKTLMSTVPGGRFAVMRACITEDVLQSFLQALPSLETNKPATPLLAALSLAMEDLQAGDALYTEARAEAVRRAPDHPWITRLAAVHDAEHG

SEQ ID NO: 947513 - protein, 70 aa, Homo sapiens
PFGCRVIHNRYGCLESCLGAKPAVVVDLVRPQHNIYRTLEADECDITGVVVVVQQRSSPQCQVCPERRLV

SEQ ID NO: 947514 - protein, 104 aa, Homo sapiens
  misc_feature (22)..(22): Xaa can be any naturally occurring amino acid
EDAELGLRVFEKGLSAANHHEXYGKGLMPDTFIDFKKQRFRWAYGAIQIIKRHTASLLRGKNTELTRGQRYHFLAGWLPWVADGMNIFFTVGALLWSAAMIIVP

SEQ ID NO: 947515 - protein, 69 aa, Homo sapiens
FFFYSASSRDSWITPSVPIKRLVERRARTRRLGALLGLDVVDYVAYGFHFLGVFIRNVDFELFFHRHHE

SEQ ID NO: 947516 - protein, 69 aa, Homo sapiens
RHARAQGRITMAGPNTSPMTLFNVAGRAMSAQLVRMNAAASNLANAGTVSSSESTASRPLRPVFSEELA

SEQ ID NO: 947517 - protein, 70 aa, Homo sapiens
MRTPSRWSPLESSYTAERVPPVTVSDFKVSRFGNVKDQFEGRRAPAHDQTGHTWSHSGEELFHKVQNGRF

SEQ ID NO: 947518 - protein, 69 aa, Homo sapiens
QRHDARVSFESSAASWESEERTHPCVFRCGVNYYMLYNGNGYGRTGFGIARLLNPDSLLRLRNRPPPRG

SEQ ID NO: 947519 - protein, 99 aa, Homo sapiens
RLAAHLGASRAIGRGLAAEFPCSGFFHPREAIENRDELIFGDSLSRVGNLNARPPRESGKAYRVLPPFGVNLAAFAQEVPDDLLNSHGIRADKRARRAE

SEQ ID NO: 947520 - protein, 49 aa, Homo sapiens
MREFAQRRRTCAWENALFDPGVHVGGEVAADGVDQAATYIAQTLRDDAT

SEQ ID NO: 947521 - protein, 70 aa, Homo sapiens
INSVQALLLYNIGDKELTAGELRTRGYYLGSNVSYNLKKLVELGFLDHQRSRVDRRSVRIRLTPQGQEVR

SEQ ID NO: 947522 - protein, 70 aa, Homo sapiens
PLVDPTWRFMTLDTDGKIRMDCSSPDAMASLIGIRDRYDIATGNDADSDRHGIVTPDGGLMNPNHYLAVA

SEQ ID NO: 947523 - protein, 39 aa, Homo sapiens
MRHLTRINSGAKNNHAFAYQADTDSNPFMTYRVFAVVRR

SEQ ID NO: 947524 - protein, 30 aa, Homo sapiens
IAPAMPMDTNHQIGLKYWGAVGIFKKFYTR

SEQ ID NO: 947525 - protein, 50 aa, Homo sapiens
SRELQQRLGDLGELVVLGREQLDLSHPEQIRQQVRAIRPDLIINAAAHTA

SEQ ID NO: 947526 - protein, 115 aa, Homo sapiens
KKDNSEHFASPATVLPPPVEAAPVVDSSSGHSDPSSGHSESLSGHKSVVQDTTLGLKERLQELLGPGPLPARMPPDRMEELIVSLCDEQFVTLRDLAQALSRSDASLRKRYLNPL

SEQ ID NO: 947527 - protein, 112 aa, Homo sapiens
RDDWPYDSNRDAGLEQVASGGGYPSCRQWWADGSNGLRARLLGQVDPSLLNRLAGWAGFLSRAEVDDSVIRTIASPRQQKLNQGNVYTDYGGQIDKTLPNIVTRATGGVGMA

SEQ ID NO: 947528 - protein, 63 aa, Homo sapiens
IRGRVDELVGSGANRMQAELVACFLHGLRRDHHAGAVGQLGDQRRVGRLEHQLDGQGIDDVGL

SEQ ID NO: 947529 - protein, 88 aa, Homo sapiens
TNTFGATSVAQDDYHMAHLVYEMNVESAKLAKAACVKYSTPDKPRFVAGALGPTPKTASISPDVSDPAARNVSFDQLVTSYMEQIRGL

SEQ ID NO: 947530 - protein, 109 aa, Homo sapiens
MSIGALASGPTRAISAVFFSGRVSFWFFSSTRLRRAMSRASLRCRRLSALVSAGSSSALPMRTYRVLEQAHVVLGGQHFTHGVVDVLLFDLAGLEQPRQLLAVQRIVHA

SEQ ID NO: 947531 - protein, 127 aa, Homo sapiens
YVAQQAAELARKDGEARLEALKKSGSADGFGPMETVSRAKADGVSPKAVDTIMRADASKLPSLVGVDLGADGYAIYRIAKVGTPPQANANQREADAQQLGLMAGQTELAAFYDVLKAGAKVKILHPA

SEQ ID NO: 947532 - protein, 79 aa, Homo sapiens
SRYWGFVPESNIVGKAFFIWMNFSDLSRIGLVQLIMSLATLENRLDHHFGDLALLEQALTHRSHGARHNERLEFLGDSV

SEQ ID NO: 947533 - protein, 94 aa, Homo sapiens
QIDEPWIKATIYTPDEYLGSILKLCQDRRGIQTGLTYVGGRAQVNYELPLNEVVFDFYDRLKSISRGYASFDYEQIGLREGDLVKMSILVNNEP

SEQ ID NO: 947534 - protein, 81 aa, Homo sapiens
LADRMLQITGVLDERSARAQYLDRMDIERERGITIKSQAVRMPWEVDGVTHLLNMIDTPGHVDFSYEVSRSLQACEGAILL

SEQ ID NO: 947535 - protein, 78 aa, Homo sapiens
TVCAGYLPDAVSAESITASAPSKIALATSDASARVGRGGSIIDSSICVATITGKPATLHLWMIIFCALGTCCGEISTA

SEQ ID NO: 947536 - protein, 51 aa, Homo sapiens
AVLDRLVQVHQEDRHALGLARDLVQRRGARQQDHQVGVLHPRDPDLLAIDD

SEQ ID NO: 947537 - protein, 43 aa, Homo sapiens
HTRFPERSAGLRMSESRAARMRCLAEKYSAEKFTSLRRSQVML

SEQ ID NO: 947538 - protein, 80 aa, Homo sapiens
QARTFSCILVCKRQRCLVSRTSIFREPEITEYWIDQVGRVQQVAAVVALVAPRLLEAAMRTGPLDVAIRQEALVVDRVDL

SEQ ID NO: 947539 - protein, 95 aa, Homo sapiens
TVPKRVSLASRIGIAPKTLDRVLNGDILAPLERTIPNPCAVPPAAIRVGYESARAVSRAQVVELPGKSGDLALARVYGFPPGHTRRIAGAMISVA

SEQ ID NO: 947540 - protein, 92 aa, Homo sapiens
FVLGGEGAHAQEAVFRLQHDFHAVGDVVGHQGRDADAEVDVEAVLQSAGDALSHLFAGKSHVCCPFSRAGEGRSLAHGALFDALLEGAADGP

SEQ ID NO: 947541 - protein, 69 aa, Homo sapiens
DADDDVHRDQRGFEEHVEQHASSAQNTPTIRPDRIRKAAMYWDTRLVMTSQPASTTMMVMNAVRSTNHS

SEQ ID NO: 947542 - protein, 100 aa, Homo sapiens
FRVEDAQLGDFAVGGEVKADIFEVGQIVDVQGVTKGKGFQGTIKRHNFRMGDATHGNSLSHRAPGSLGQRQTPGRVFPGKKMSGQMGAVQQSTQNLEVVK

SEQ ID NO: 947543 - protein, 76 aa, Homo sapiens
DGRRKPYCTRVSLRERSPRHMALELADGDVALVDEHQRVARQVVDQRGRRLAGRCARQMARVVLDALAEAQFLQHF

SEQ ID NO: 947544 - protein, 99 aa, Homo sapiens
  misc_feature (44)..(44): Xaa can be any naturally occurring amino acid
GRVDQHGLAAKEGRGVGDRDVDLTISGPLFLADQKRRIGAGRHXRHPLLALQVGPDDHRPGDVLLDPGRHERRGMNKLGGDAVDLRQGVIAVQVGIDGH

SEQ ID NO: 947545 - protein, 107 aa, Homo sapiens
MPARVKVTGMALKIAKRSQGIEDEGEVGDEAGQAVDQDHKDHDGSDADTTGDDRFFDGVLTEGRSDRALFEDADGHWQRASIEFLHQIEGLILSKAAGDLTAPASDR

SEQ ID NO: 947546 - protein, 80 aa, Homo sapiens
SSALARRDKVFVQFDVVEQHRAADRILLAEGMPVVHQGQARGVAVEQHPGAAYSLAAVQGNPFGQVGTGGVELAAVKDQL

SEQ ID NO: 947547 - protein, 43 aa, Homo sapiens
MSMKHASGLASRITRRASYSILCEVNLDISFLQKAGPHLPHSG

SEQ ID NO: 947548 - protein, 72 aa, Homo sapiens
FAAASTNTLLSSTDCITAFFSSRVSTRFLAVCSSSMRVSIAERNSPILALSPSLVENGSKRCDFTASVLKSS

SEQ ID NO: 947549 - protein, 49 aa, Homo sapiens
VSKIGMPSKAVPPLPGVTPATICVPYSLHVFVWNGPVAPVMPCVTTLVF

SEQ ID NO: 947550 - protein, 65 aa, Homo sapiens
TREVPARLDDLAQAGIDALDGIGRINHLTDRGGKRKEGITRSQARRQAAATVGNFWPHAPASKAS

SEQ ID NO: 947551 - protein, 45 aa, Homo sapiens
RPQPQDEALLDDLFARYTMEREREVHRDFLQALGLSSSAAARRVE

SEQ ID NO: 947552 - protein, 39 aa, Homo sapiens
VAVGGHWIPVYPRLYIWTDPDATIVRTAREANMTMPQYR

SEQ ID NO: 947553 - protein, 66 aa, Homo sapiens
YFLHVLAEVHRTHPALPWRFLAAGSGVLESELKRITGALGLTDRVHWLGYRDDASKLMPGINLLAF

SEQ ID NO: 947554 - protein, 79 aa, Homo sapiens
SASNEEGSLGAIIDMQASRPFDFSGPALSMSAKVGWNDLSRENDPRFTFLASNRWDTGIGEIGALISVAWAKRKTLEEG

SEQ ID NO: 947555 - protein, 54 aa, Homo sapiens
PFSHSPELTTEIARAIGLAVEVVVVLAHDVLDAGGVAQAAVRKGGGGVEPHLAR

SEQ ID NO: 947556 - protein, 39 aa, Homo sapiens
SDAQVYRLVTGEPQRIPSRTFAALCDIFDCTPNDLFEPY

SEQ ID NO: 947557 - protein, 36 aa, Homo sapiens
MEITTDGTRMRSELRKPTLMPWQVSPVQAEVQALTH

SEQ ID NO: 947558 - protein, 50 aa, Homo sapiens
GTGNKVSIGLTRSEYQSRYNFGYVDPYWTADGVSLGYNAFYRTTDYKDLD

SEQ ID NO: 947559 - protein, 75 aa, Homo sapiens
GRPTLGLELPIAQAGGVFHLEGNDDALLVDGQLDALVHRRLAILRLPCPDIREQHVAQLEHVVVADHAEIADQRL

SEQ ID NO: 947560 - protein, 108 aa, Homo sapiens
MAVLQATGSPEHLNGAVHQGCIRIIDVWSLEQDHARSTYRHVRPAEPSDTLGRDGSGTPVGHTGMTWSGFRPSDDACRYGYNIPAQFMAMRALRQIREFCRVWDDEAL

SEQ ID NO: 947561 - protein, 72 aa, Homo sapiens
IVNQRIAEAFMTEGADAWYMDGARERFLRERASEDWKKVDDICDVWFDSGSTHAFVLEDRQNFPQLGNIVRK

SEQ ID NO: 947562 - protein, 116 aa, Homo sapiens
WYGVTCGGRRSSSPGLPLNWYSRQVAASLGTGASVPSIMSSSRSRVTDPKAPYVFTRWRGSKLAFIICEPLRRLSVGLMLSIATTAARPKKITEGQAKLAAAAGRIAPAVPRNMAR

SEQ ID NO: 947563 - protein, 68 aa, Homo sapiens
IHALELGQLPGHQRDIGGRVEFAAVRCRGQIGAVSFDQAALDGHHAGHVAQVARVLEGEDAREGNVKA

SEQ ID NO: 947564 - protein, 54 aa, Homo sapiens
HHRHMEIAGLRQTQHLLQVQLARRGVEQVGAAHDVGDVLRAIVDHHGQLVGPVS

SEQ ID NO: 947565 - protein, 70 aa, Homo sapiens
GRVDIARQRLLERRDAQRLGVDTEQAVAALGGLHPAHQEIAEVRDRIAQRRELPVYQRDDPGLVMREDPV

SEQ ID NO: 947566 - protein, 67 aa, Homo sapiens
METRCPRPDRLYGPGNLRCATSITECSYLSHFSTEQMLEVGLQAASGEKIGCFIGRKCVHDRGEALR

SEQ ID NO: 947567 - protein, 88 aa, Homo sapiens
EARLVQQAAVREAFVLAHDSENGQQLVAYIVPSDAAIAVAGEAQAALRESLKTALKEHVPDYMVPAYLLFLEALPLTPNGKLDRKALP

SEQ ID NO: 947568 - protein, 83 aa, Homo sapiens
DFTFVCPTEMGDLSDHYQELQAMGVEVFSVSTDSHFVHKAWHTDSDTVGKVNYTMIGDPNLQLTRNFDVEREGAGQADRATLL

SEQ ID NO: 947569 - protein, 99 aa, Homo sapiens
IALVLEAHLVAHQRAQGRGQLFGDPAGHAAGGNPPGLGMADQAMLATTDFQADLRQLGGLARAGLAGNDQHLMLEQRLLDLVALGGNGQAVVIADLRHA

SEQ ID NO: 947570 - protein, 56 aa, Homo sapiens
QRRQQRVQLVVVLHVEDADVGVAADDAPQALPLAVALQLLRQGLFVGLELVGLSRR

SEQ ID NO: 947571 - protein, 107 aa, Homo sapiens
GLQELTGDVDAVFGEDLVDLAHHARNVLVDVQQTVLARVGWQRHFREVDRGHRGAVVAVLDQFFCHFQADVGLGFSGGTADVRGQDHVVQAAQLAFELFVVGARLHR

SEQ ID NO: 947572 - protein, 49 aa, Homo sapiens
MIVDKTGTLTEGKLTFERAIAVPGRSDDEILLLAASLDQGSEHPLAHAV

SEQ ID NO: 947573 - protein, 81 aa, Homo sapiens
DKVRKITFGTYVVCCQERIAERFCFVDGQHQIRLARQIGQLDTILAQKRMMAHVHKRRGERSNSRERMESLVMQIRDEYDC

SEQ ID NO: 947574 - protein, 73 aa, Homo sapiens
VEPERLHSEEIGYQGRFPGSQANLDVRAYRERMSTIIRNTAYDSPSDPDGLKDFTNAPGFELVGIEAQLRWRP

SEQ ID NO: 947575 - protein, 60 aa, Homo sapiens
PDKRIAMVVYTADTNRATGQISPVDRTILAKALAQIDRIGVKGVGIYILLDSPQDDDPLL

SEQ ID NO: 947576 - protein, 45 aa, Homo sapiens
VGDQRSEGGLAEELLDRRADFAVVGDLDVGQALGAVLGGMRGVFV

SEQ ID NO: 947577 - protein, 92 aa, Homo sapiens
TVRAEPEKGLLILYVLDPARAGARIGADWERPKNLAGAPPVLAFAVSFPGSSSDIKVPYKVNNVGWESEYSDIPEYVINGIGWEDMNAQLQQ

SEQ ID NO: 947578 - protein, 96 aa, Homo sapiens
VIEFDLNGQRRIPVERHFSDSLRVNGFNIKLPTGEWVLLANQAIKLPQASGMAYFLGKVEGKRLIGGMRLFALRSNDSASAELTPLKGCQPDDPGL

SEQ ID NO: 947579 - protein, 59 aa, Homo sapiens
PFRQLRHCVRIVRHIDEDKLVTPQPPCERRAGGERLQPLSQADQQGVATAATVQIIDRP

SEQ ID NO: 947580 - protein, 93 aa, Homo sapiens
LSDLLCNLPRAPVGEVGYVPVSRFQRSPNANQSMGGAGVPVRNCSSRESKYACQLGFVVVAGKTGPVLVAIVMQARLLTRMAIPPGGEQRAGI

SEQ ID NO: 947581 - protein, 101 aa, Homo sapiens
MYCDCRVEEYAFTEIDNSVSAGLSVKGSLWGRPDDTVGAAFSSNGLSHDHRDYLAAGGLGGFLGDGRLNYGREQDWEAYYSALAYRGIHLSLDYQLIVNPG

SEQ ID NO: 947582 - protein, 48 aa, Homo sapiens
MSKAPNPVDKYVGSRVRMRRIMLGMSQEKLGEALGLTFQQIQKYEKGT

SEQ ID NO: 947583 - protein, 94 aa, Homo sapiens
RVAAGRYGLNIADVQAVIAGAVGGENVSETVEGLARFPINMRYAREWRDSPQRLAELPIFTPMGQQITLGTVARIAITDGPPMLKSENARPSGW

SEQ ID NO: 947584 - protein, 47 aa, Homo sapiens
VHRHDITHQLLAARPWLGDHRHFQYRVLLQQTRFDLEQLDTEAPHLH

SEQ ID NO: 947585 - protein, 50 aa, Homo sapiens
AQEIIAVAGHQIAFQHLVPFRDRAGEAVEILLLLPRQLDRDEDTDMQPQR

SEQ ID NO: 947586 - protein, 63 aa, Homo sapiens
HIHRPAAAVPRVFIVAREALIAFGSLEIGQHVFLTPSRRSLTRPSRRSRTAHHGYEIMPLIDG

SEQ ID NO: 947587 - protein, 57 aa, Homo sapiens
PSDVLRVSGKTGEGVRELLDEVVRLIPAPVGDADAPARAKILDSVYDIYRGVVTCVR

SEQ ID NO: 947588 - protein, 124 aa, Homo sapiens
CLRSRLNGPCVPPPITEMPTVLPLRSAIVLIVESSITAQYDRKTAGLLEDVLSHDVGLEITANHAVGERERRLRRAIERTGSQSLRHRRRALKLGPFDVVGLADIGKFSRGTIIQYLDSSAGMV

SEQ ID NO: 947589 - protein, 89 aa, Homo sapiens
CSAFVACRDFAAMVELLGMLDARLGGQLSCFEALWPEFYELTTTPPARSSPILPYGQGIYALVEALGADPESDRERFERVLSDVMESGL

SEQ ID NO: 947590 - protein, 72 aa, Homo sapiens
AGLRSHGFNLRDAQQRIIHWPRKGSGVEQRLRLELEQWRQAEALVLEHVSAPWRSVSQKRMDRSLKSLWELN

SEQ ID NO: 947591 - protein, 102 aa, Homo sapiens
MCGYNPGFCNTYCYVKCRASYRQITKFHDSESQAIANKVVFSPDLAKLLILQRVAPGRIGGIAEECRKCFGALESGMRIMLDSSVHDLPNKRQLPKPKPEVG

SEQ ID NO: 947592 - protein, 49 aa, Homo sapiens
ASLERDLDLGQRQLVAQRDQVTGALGGHDAGHASGRDVVILGEAAAGDE

SEQ ID NO: 947593 - protein, 99 aa, Homo sapiens
MRDALDRRVQSVDGDQADRRVFRTVAVGRDIALAVVDRELHAHRSAVVQRAEHVVGVQDFDVGRRLNLTRRHRPGARGAQGHALGAFGVHAHGQLLDVQ

SEQ ID NO: 947594 - protein, 38 aa, Homo sapiens
NCMSVVAVDTEYGRKRQIDQSSCNKDFTCLNGFCPSFV

SEQ ID NO: 947595 - protein, 45 aa, Homo sapiens
LVGMLAHAFGISAGDRYLSPAPVYHAAPLKWCGGVHALGGTVVLM

SEQ ID NO: 947596 - protein, 59 aa, Homo sapiens
ISYGPHIKNPTHRQEKPPVISPYPHKEPPYAATPIRSRHAATTDEIASLKHGRDGILIV

SEQ ID NO: 947597 - protein, 61 aa, Homo sapiens
  misc_feature (22)..(22): Xaa can be any naturally occurring amino acid
  misc_feature (27)..(27): Xaa can be any naturally occurring amino acid
  misc_feature (54)..(54): Xaa can be any naturally occurring amino acid
EDLVADRLRRLESRQGDHALRXDLVDXIDARLDVVRGVLAGRAGDAAEIRLRRXARDFRVD

SEQ ID NO: 947598 - protein, 132 aa, Homo sapiens
  misc_feature (56)..(56): Xaa can be any naturally occurring amino acid
ARPRHTVIDIDSPGPVAPSCPVDAGVVPTVGSVAVSGGQAHAHKTPGQGQAAGQTXFGLHPILALPTAIGHGALQQGDVTQHAVCKQLFLQSRPQTRLGRGRILPIPPELRPKRSPACQRSDDEALKPKPIS

SEQ ID NO: 947599 - protein, 82 aa, Homo sapiens
  misc_feature (1)..(1): Xaa can be any naturally occurring amino acid
XGHFRLSVNGDSNTLTSSSAYTITMAAGMTTGGRYRRVGASTAPEDSSRVPVMTSASKALAHASDAGPDSSALVAVSESVSE

SEQ ID NO: 947600 - protein, 86 aa, Homo sapiens
DGVLFYDVAHCRPVMTIEERYDDDTAVRAVLNVVVFHPVVAGSGQRDTVPRHGLGRVEPGCFIFQATIRDDIARHDRVVARRIALD

SEQ ID NO: 947601 - protein, 72 aa, Homo sapiens
DVHETQLHAHRGLGGGRAKEAHVVVLAAESDLRDAAHDHEAHAPFLSVLAHARHVELVGVEVEILGAKRNFL

SEQ ID NO: 947602 - protein, 102 aa, Homo sapiens
GRRLINKPSTKDELHASPSSSFGESVTAVAKHTGNDMTLAIIWTSIFLAGALACATATWSASEAWPDSLDASFSGARFPSAVKAFLAALVLCFLAFKSSSDY

SEQ ID NO: 947603 - protein, 80 aa, Homo sapiens
SSGPFSSSSQAGFSYIRSDLKPEMTNTFEAGYRFHNRDLQLSLTGYYVKFNNRLLASSISATVVGNQNVLQNVGSVSSRG

SEQ ID NO: 947604 - protein, 82 aa, Homo sapiens
APSTTKDHVPAQVCFVNRESPEGYVFPACADCNAKDRKSEQVVAFHIHAISGHANEFSRTYSGLKNNSPSALPNPYMSLGEK

SEQ ID NO: 947605 - protein, 39 aa, Homo sapiens
MRVSSGGTAFMLDVELGVVFGLAGDDQRRARLVDQDRVR

SEQ ID NO: 947606 - protein, 94 aa, Homo sapiens
SPGHVRLEHGLDQVLDHAAQLLFAAAQGVDRALSVERKRGVRGDVAHELHLGPAELVPLGAIDHEFSDRAAAGDERNHGQRTDAFVAKHGQKVA

SEQ ID NO: 947607 - protein, 79 aa, Homo sapiens
MRRLERALHEVLAVCPASYCFLSVTSSTVETSLIAHAIASALPMAYTELEAAAMLPFASFTVAAHDEVASARGHERARR

SEQ ID NO: 947608 - protein, 50 aa, Homo sapiens
  misc_feature (23)..(23): Xaa can be any naturally occurring amino acid
ADMAVSNYTKAPAMAAVASWTGXYAGLNVGYGFNDPVATFTANDVVSNSI

SEQ ID NO: 947609 - protein, 61 aa, Homo sapiens
LIEQEMAMQNIPGYAIAVIRDGRVVYSRGYGYADLATRRPVNSRTVFGLASLTKTFTALVL

SEQ ID NO: 947610 - protein, 71 aa, Homo sapiens
CENVKISGIADPGGPAPFLIGPGNGKAGSGRARKRITRFPGTAFFKRLRIPVPEKAMNTAHRKKLPGTSFD

SEQ ID NO: 947611 - protein, 64 aa, Homo sapiens
MCEVMMPDGKTPHVSNKRATVLDDEGAWFGFEQEYFFYKDGRPLGFPTDGYPAPQGPYYTGVGY

SEQ ID NO: 947612 - protein, 72 aa, Homo sapiens
MSQIEDLKDLAAIVMDQIELQLSARRAVSEAKLMAKEIDHRVMNSLQFVSGLLRCKVDRLRMLTLSPTFSLP

SEQ ID NO: 947613 - protein, 76 aa, Homo sapiens
VRDQRDHQHQGIDAQPGASAVAQDREGADTDQQHQREGPGDARLQDQPERDDMQAHAQHQPRDLQQADHLNHVLPV

SEQ ID NO: 947614 - protein, 60 aa, Homo sapiens
MLHAENQDRLYLIAPSEEQQALVGALAFNVQDRHWLVYCALGGHQHADLPETDLLTGVSM

SEQ ID NO: 947615 - protein, 67 aa, Homo sapiens
MVFFAVPNVFRTSRSENVLLGLILGKFHDEGLLLARGQGIDELSEVPLVLASFGFELASIEKEGVFL

SEQ ID NO: 947616 - protein, 112 aa, Homo sapiens
EASGFRKAAFGVTVVAQEFREKGYAIDLAVVRRHAIVHHAAWIHELAADRGVLALLVQEIVIEPSQSRDLARYTLKVMPMILRHAGERGYCRAPLPGSRGFRERSFRSLPPR

SEQ ID NO: 947617 - protein, 104 aa, Homo sapiens
DIGTAVADRIERRQIDVQTDSGSQDHSRSRLAALTIRIRRVRTHFDGVQHHSGLRQLRAQVLFQNPVITLRIQAARDAGLIGHDHQQKSRLLQSLQGGDGTGNK

SEQ ID NO: 947618 - protein, 106 aa, Homo sapiens
RQALIFWPLSDARRGPLLVQRRPPAAIRHARGDDMVRTPVARGDAVVAPTPGTARPMSDPMGLSMFEPDLKAALATAICLGTAFVLGCLIGLERQIRQRNAGLRTM

SEQ ID NO: 947619 - protein, 111 aa, Homo sapiens
GERQSQLFRHDTIERSDDHRATLCSFGQAKRRLGSARLTLCDRYLRLRALERSRGDDFAFEQPALLICLYTSIHQAGFGGRQGCLRLCHAKPVRLRIKFCQDLAAGEPFTP

SEQ ID NO: 947620 - protein, 115 aa, Homo sapiens
ATDRRARFVGLEAYTAAGGTVLRDLFTEDRGGYLEDVALLDLLVTARLGREADRLRATECKKWTEPHLDFPHAHGMRRTYPHPVELSAEDQAALEAVQSEFDRLTEQHQTAEELP

SEQ ID NO: 947621 - protein, 94 aa, Homo sapiens
TVVVHPQSIVHSMVEFWDGATIAQASPPDMRLPIALGLSWPDRLPDAAAGCDWSTATQWTFEPLDNDTFGAVELARRAGHAAGTAPAVFNAANE

SEQ ID NO: 947622 - protein, 81 aa, Homo sapiens
VEQRQARDHGDRLLVQMARQRRRQRIGVAFDHSSAREALAQQRAEIRAVLDQDQTVFADPTLNQGLGHRACARADLDHRTR

SEQ ID NO: 947623 - protein, 113 aa, Homo sapiens
RSGVVGADAARRCLAVRRQPRSWGGPVVAPLRRQTVSPGDPGDAQVGEAVARRIQFVALLGGKMVMSELTTTGHDFLIILAKLAAAFLFGGLIGFERQIRQRNAGLRTMVLVA

SEQ ID NO: 947624 - protein, 89 aa, Homo sapiens
MGRREALAQAKLSNSPRKSRFDYFDTEVRFGEETILEYVPKPNFLTFVPWGEIFGKPKFSIARRKNKSAGSVQRSSFFPFGKFFNSSRS

SEQ ID NO: 947625 - protein, 103 aa, Homo sapiens
MSVSITPGATALDRIPRLPPSIAITRMSCASAPFDEAYAACVAKATTEEIEATETIEPPSAMTLIASRACRKFPRTLTARIESKSSVVVSCKGLLSVRPALLT

SEQ ID NO: 947626 - protein, 73 aa, Homo sapiens
LQALGETIRAVLIPIRKVLTPEWDISIAHVLAARAVLSCLVPASSVAVRTGTWCAITKALMGHVPDRGGRTNQ

SEQ ID NO: 947627 - protein, 104 aa, Homo sapiens
HGQPGGEKGRATFSRQNDPCKGSGAWRSSTLDETGRWYCPHFTRKEAKAAEDGQHLNASGLIVLHPSTRSKSIHFLLPKATVPFRWDQLPDAGFNLLHQNNHWP

SEQ ID NO: 947628 - protein, 89 aa, Homo sapiens
  misc_feature (50)..(50): Xaa can be any naturally occurring amino acid
PGGPPGGAPGSPPPPPVPQSEGPLPADPLLSFHLDLGPSMLNAVLGVMKXGGPKGVSPKPNGEPRPGRKPPQARCRPNGDLKLKEVMGL

SEQ ID NO: 947629 - protein, 112 aa, Homo sapiens
  misc_feature (32)..(32): Xaa can be any naturally occurring amino acid
VPGREAQSRHLIDICYLDVERREVGFHSLHSXQVGFPPRSPAELRAGAGLDSDLPLSTHTSTCSSQVGAPPSRSSPACCLSSHLEHIGEGGVLHKHSSQPPEKDTSERRPER

SEQ ID NO: 947630 - protein, 40 aa, Homo sapiens
ATRTMAGAPTVSLPERADLVNWATPYSVVHTKASNKEHLI

SEQ ID NO: 947631 - protein, 145 aa, Homo sapiens
FLYQPEGVQVFMQQSGLQALERHQEEAQFQDCVYAFQQTALQGCSCFSMSLIPFYGDMRVGLSSRASSDLGPNKVACSLLSNITEGRWVPGHPFGMDELCREEHEERPSVGTWPTCGRGYLDRLGPVMSPLVPHPPRQAIKVVSS

SEQ ID NO: 947632 - protein, 117 aa, Homo sapiens
PARVFFFPPRVVPQMGGGGGPPPFFKKTPFPWPWAPKFFPLNQDPGFSPPPFFGGPLINFPPPPPGPRFGKGGGGRGKGGAPPPPKGPPFWGPPLKGGGGGGGPQVFFFWGKKGVLP

SEQ ID NO: 947633 - protein, 164 aa, Homo sapiens
LLPTLRAFYAQHPRAFLGGPAPIPFPWEAPGAPPGRGPDFVPTQGGVEFFKPPPFSKDIVGGLFGARGPPPSSPGTLFFGEKPGAPPKSPNFFPREEGGPLCQYFVGQIPKQQAPLLSLGRGGGAPFPPPPFVFPVSFEGESFFPRLPRPLWENFPEVAGKIGS

SEQ ID NO: 947634 - protein, 50 aa, Homo sapiens
GQHIFIKHLKLLVGGHDAGHTVKVNVLHNVPGFNALFLDTDEDVPPSVVF

SEQ ID NO: 947635 - protein, 45 aa, Homo sapiens
VRCIFIGAGAVPEGAGHGTLIGTVAVSYFRVRGILCPKGTPSVVF

SEQ ID NO: 947636 - protein, 87 aa, Homo sapiens
GKAARSLPLGARCFGVRVSPTGEKVTHPGQVYDDKDYRRIRFVGRQKKVNENFAIDLIADQPVSEVETRVIACNGGGGVLGPPQRGK

SEQ ID NO: 947637 - protein, 102 aa, Homo sapiens
VPPITCTWDRPGWRVPLAVYVPAKKFWPASRCALKGDEGRCLARGFGLLHCMVGLFLLFVPPLPQLWSGFGRVVNVRCPNSERSRVGPVYSLIPLNKKGVCP

SEQ ID NO: 947638 - protein, 118 aa, Homo sapiens
MERIMKAQALRDSGMAGYMSSKKTMEITQENPIMEELRKRADADKNDKSVKDLVLLLHETALLTSGFSLDDPNTFGNRIHRMLKLGLSIDDDAAGEVDVDMPALEEADAEESKMEEVD

SEQ ID NO: 947639 - protein, 115 aa, Homo sapiens
FVGGCFIVPPPPHFSGVPQQKGLGNPLCLLSWGRGGPPPPTPVFPSMGPPSLGACSPGGPPPGTFGDPPPPQRGSGLSRGGKGKDQVWAPGPGGGGGEPPGPGPPMGVGEKTLCF

SEQ ID NO: 947640 - protein, 107 aa, Homo sapiens
CKARERCLWGIEMQDFFNPLLGDSRGLGHFFLQGPLNGFGFRLAKCEGVERRPPPGSPVTPVPTLTWVPSPIFFPVPKGGGGRFPFLFQIQGALGGPFFTSLKRLRP

SEQ ID NO: 947641 - protein, 182 aa, Homo sapiens
FGVCLGQIEKDPIICPMEIHLFGLKGFPRAPRFGSKNDGPGFLAIKENFMPKYFSLHVRKSNRAALHFYSNTLNFEISEVEPKYYANGEDAYAIKGDFIQMADEFRRHLEFKKKGRHVVLGAIENKVESKGNFPPSSGKAFCEEKGLASQDSGGDSKALSEVRETPKSTNVKDSSKASDSAS

SEQ ID NO: 947642 - protein, 102 aa, Homo sapiens
KKMGGFAPLDPGGLSYPVGKAPRIPPHGPCSKAPESDSWFWGAFCMFRDCFGDVSLLPASRGLQPPKTTNGTMQGWLGFFLGRGPVGGPEESIWGGLFFKMK

SEQ ID NO: 947643 - protein, 105 aa, Homo sapiens
  misc_feature (61)..(61): Xaa can be any naturally occurring amino acid
CGFSPAAPHHTNFLVSARGERVCVIGCPLSPQYIAGVVCGVGPPPPHEAGGALFFGGEFLXGDFFSKRRGVGVFVPGKGGPPQRGFPFFFFPPPKGGGWGAPWGF

SEQ ID NO: 947644 - protein, 67 aa, Homo sapiens
AEDKALLAKYTAHHNAEEQVESLVEKKQLLQMFKEQVEMERERYFSTVQETERDDNGETSDGIFLSF

SEQ ID NO: 947645 - protein, 104 aa, Homo sapiens
GVNQEPLEVLAFHMKKRREDEGLKGKISEADKKKVLDKCQEVISWLDANTLAEKDEFEHKRKELEQVCNPIISGLYQGAGGPGPGGFGSQVPKEGFGPAPPIKK

SEQ ID NO: 947646 - protein, 114 aa, Homo sapiens
GTWYGVDTHNKDIAAPFEAFVWDPAMVGINALPPPFEAGALFGFVNEPLKTPRLTVDAPPPPGRGRGWGPPPLKAPPPSHGWGGVGGPSPPWVGYFFFQGRGGNWPPLFFLGAF

SEQ ID NO: 947647 - protein, 122 aa, Homo sapiens
  misc_feature (85)..(85): Xaa can be any naturally occurring amino acid
  misc_feature (87)..(87): Xaa can be any naturally occurring amino acid
  misc_feature (91)..(91): Xaa can be any naturally occurring amino acid
  misc_feature (96)..(97): Xaa can be any naturally occurring amino acid
  misc_feature (99)..(99): Xaa can be any naturally occurring amino acid
GRAGGWFAPRAPSLAGDGAAGIAPFSGGVRGFAILSKRTRVGYLCVHCGVPYNGVFNYDLPFGQWSRSVVHPLNKGFPHEARGPXRXARAXNPSQXXGXTGVTPACQPFVDILNSREINPEQ

SEQ ID NO: 947648 - protein, 72 aa, Homo sapiens
  misc_feature (8)..(8): Xaa can be any naturally occurring amino acid
GLRDENAXGQWRWVDQTPINPRRVFWHKNEPDNSQGENCVVLVYNQDKWAWNDVPCNFEASRICKIPGTTLN

SEQ ID NO: 947649 - protein, 110 aa, Homo sapiens
  misc_feature (45)..(45): Xaa can be any naturally occurring amino acid
PRGKRGGGFWARGRAQGGRGPGGPAEVFFGEKRPVGPGGGGPVFXTPPLPGGGGVPPPFGGLGPLLDPGGGEAPRPLGPRGGGWVPSGEGGGGFFFFFPFFFFNKRVLNP

SEQ ID NO: 947650 - protein, 66 aa, Homo sapiens
SPGPGSCRLQVGKGGCHHCLGSGLLVAACRDRPDKGTRSWCPVRQTSVNGRQESVDEVCLPSWTVL

SEQ ID NO: 947651 - protein, 38 aa, Homo sapiens
MASSATFVALASTSVSQGPVLVRTAQVVAHTSPFCRLL

SEQ ID NO: 947652 - protein, 101 aa, Homo sapiens
  misc_feature (27)..(27): Xaa can be any naturally occurring amino acid
MPDGVQNQGVSPGDNPPPCSLSFPVPXVCFHPGFKRLTPPRISGRAKKFGGPNPTPWGVLKLCFGPPPVFPPPKNPCFLLKIFCGLKAPRAVKFKKGGMLC

SEQ ID NO: 947653 - protein, 66 aa, Homo sapiens
EAINLLVEALFYASHVLGHWWAWAFKVASCPDQGPSPLFLGLSVEQSSKTKAVLYERLEAGNNRAF

SEQ ID NO: 947654 - protein, 102 aa, Homo sapiens
PCPGPGFQGFYSLSPPPFVGRTKHVFQTPQFPPGIPPLFWGERNQKKHIFGGDWAPLIGFLVFKGPPYPPQKGAQKRGPRSKFILAKGQSPLFPFQKKGFLF

SEQ ID NO: 947655 - protein, 98 aa, Homo sapiens
  misc_feature (44)..(44): Xaa can be any naturally occurring amino acid
  misc_feature (55)..(55): Xaa can be any naturally occurring amino acid
ERGSAAPKDGDQVHMPSPIAVINEGERLGDIVPLGVTNMTSRDXEEKGFRILKGXTLIPTLSWVLKDEAVWEKPFRFPPEHFLNAQGHFVKRKAFLPF

SEQ ID NO: 947656 - protein, 174 aa, Homo sapiens
SPHPPPRGMVAASHDTLHPAGQDVSPPGDTPSPMSTSPPPAPPREVTLRGGAGGWVASSPLPGVLSSPPSPTHQKNGGCAPGPHVGWGRLHIGPLFSLQGGGKPHTTTRRGPFLGPGGGCGFFKKKPPKNLLLLFLSQAGEFTTPSPRENSFFLGFPPPTPPPGGVGPPHCPGL

SEQ ID NO: 947657 - protein, 106 aa, Homo sapiens
  misc_feature (59)..(59): Xaa can be any naturally occurring amino acid
MAVIVMARSRDIVKAIARLIEFYKHESCGQCPPSREGVDWINKVMALFLRGDARPAEIXSLWEISKQIKGHTFCVFGEGAAWPVQGFIPPFWPGFEEGMQGFAQKH

SEQ ID NO: 947658 - protein, 130 aa, Homo sapiens
  misc_feature (50)..(50): Xaa can be any naturally occurring amino acid
  misc_feature (71)..(71): Xaa can be any naturally occurring amino acid
MVFRTRPQGPHNCSGFLHFWVNGNFGFLSGGPPCLEKELVVPTPGAGKRXGPSPSLKPGVFLLWGGLLGPXAFLRAGLGPVKGKTPPLYSGGGGGPRMLGFNQAGPVFRGFFFPNGIEPLGQIRLDFSPP

SEQ ID NO: 947659 - protein, 125 aa, Homo sapiens
  misc_feature (62)..(62): Xaa can be any naturally occurring amino acid
FFPPPPQQGAWGNLSKCFILAGPVGKTQASNALCLWVPHSFSKKGEGPPPAGVFLFPPPCCXCRHFKGQRGGRAREAWDFNCFFPPPPGQKTSPPSSGVFWIFGEGQRNLFPVSNYVPQKKMAFL

SEQ ID NO: 947660 - protein, 90 aa, Homo sapiens
GVQNWPSAGDFFEVEEDPGGDMLSWSLLLEFFRSFLGNPQSRASAEFGNKHDAVLGPTDIMVQYMELFHKIPNQQQVAVVGICILLAAPS

SEQ ID NO: 947661 - protein, 110 aa, Homo sapiens
  misc_feature (55)..(55): Xaa can be any naturally occurring amino acid
  misc_feature (75)..(75): Xaa can be any naturally occurring amino acid
VLPNPPWVSSSEWQCHNGFHGGQRQAHRLVGEPKLDRLLLDLKHQNIGPFPVELXQEIMKHIVPILVLPRVNEKXQKGFPLPTPAKVQLYKVVVQPPQNFLLFGANVVYK

SEQ ID NO: 947662 - protein, 81 aa, Homo sapiens
QWDGYNGFGNDGAILEVVESYNDFGNPTNQSSNFGPMKGGNFGGRSFGPYGGGGQFFANPRNQGGYGGSTTTSSYGSGRRF

SEQ ID NO: 947663 - protein, 122 aa, Homo sapiens
SFRQGAWVVTGSKEMWVHFFYVERAAKAAVNKLQGPSAPVLYVSFNCDESPLASHYPNLEFFFFGGGSKNRVLLALVLSSIPPLLLHPCVVNKVSVVMFRAGSQFCRETDRAKGSGQLQEPG

SEQ ID NO: 947664 - protein, 106 aa, Homo sapiens
  misc_feature (62)..(62): Xaa can be any naturally occurring amino acid
MAFITKVFLAGMDWGIQKRFSPKVLGLCASPALVWVVMEVLALLLGLYLATGGSDLSTFYLXAYSGYKKVGMILRGLTGLLFGNDWVISGAGLDLIGGHGFHCGVF

SEQ ID NO: 947665 - protein, 150 aa, Homo sapiens
SLHGRVSLVLKNPVWRFFTHFTHRGYWSHFGRAPWEKIFPGVEGQDPEWTWSLSPAGSVPMNDHGFCILGKKETSGSCQGVPNAWKRSWGFPPLGPGKGWGFPLPKSQGSSSCGGDNGDTGLFKSRAWGLLKENPHPLTPGGGGGQGCGS

SEQ ID NO: 947666 - protein, 95 aa, Homo sapiens
PGNFGGPFAMPGGPGKVYPRIRSPPGHFFSFFGPRGPGEGGGSPPGPKKGPRFFTWWRKFFFGPGPFGGGWGPFWGGFFPFWGVGGGEGGGIGGF

SEQ ID NO: 947667 - protein, 103 aa, Homo sapiens
  misc_feature (69)..(69): Xaa can be any naturally occurring amino acid
GNNKGPPRPARQVRGDPARSQLEGEGEALSRALPQVLGYSHPVKPASPKPGWDLKPWPSFKVLSLSKGXCTGGGPPWAPSLSPIFYPKESLPWPLPPGGPHHL

SEQ ID NO: 947668 - protein, 129 aa, Homo sapiens
HSFFGKLGRPFRVTDELVFKVPRRADAVRKAYKYLAALPENCSQLIQTIEDTGTFMREVGALEEQIETELGKKTLSNLEKIREGFRALPQENAGLLGRVREALGTPGKGLSPASGRDLGFWRQWARHMP

SEQ ID NO: 947669 - protein, 116 aa, Homo sapiens
ISEEALRADGFGDNPSIPCLVAENLSAPGKLLGPCVVGYGIYYFIYSTWKGRTLYLEDIYVMPEYRGQGIGSQIIKKVAEVALDKGCSQFRLAVLDWNQRAMDLFKALGAQDFTET

SEQ ID NO: 947670 - protein, 34 aa, Homo sapiens
GGPPPPPFFNQGFLGRGNFAGFGIFNPLNKLGKG

SEQ ID NO: 947671 - protein, 84 aa, Homo sapiens
RINQDEEEEEAEDLISFIWKILYEFLNKPWEPKWWFILVSLQCGLNRKLEIIVQGLPLVRPSFIWNLTSFFFGLKISILVVIPE

SEQ ID NO: 947672 - protein, 106 aa, Homo sapiens
  misc_feature (18)..(19): Xaa can be any naturally occurring amino acid
  misc_feature (94)..(94): Xaa can be any naturally occurring amino acid
MRDNGRSTDGPLYLLGRXXRSALAGGAWTCSMQPLTRSMREATGRHWRWAGGRCPPGQRSSLGEGDAPVPYYGGRAGQREREVQPENRGAESEXERRRWAQTHARR

SEQ ID NO: 947673 - protein, 83 aa, Homo sapiens
  misc_feature (25)..(25): Xaa can be any naturally occurring amino acid
ENPCGELASANLSPTLCWGEWRQTXRAAKVLEQLTGQTPVFSQARYPVRSLGIRRNEKISVPCPVRGAQAKKILEKGLKVREY

SEQ ID NO: 947674 - protein, 72 aa, Homo sapiens
GTPPPLFFPPFEAPGPVPPPGFLFGPGGGFPFSPGPAFALWAFLGALFDPFFPKSRVGPGRVFRGFFGPRGP

SEQ ID NO: 947675 - protein, 73 aa, Homo sapiens
  misc_feature (13)..(13): Xaa can be any naturally occurring amino acid
DKGHTILSLGDGXRLACAGFDPPPFGGARGADAPVCPAASGPAGCLLAPPPGLLSWVYPCGMLDNKASAAPPP

SEQ ID NO: 947676 - protein, 36 aa, Homo sapiens
  misc_feature (17)..(17): Xaa can be any naturally occurring amino acid
TLGAPTAGGIGLPPPRXSNTRPPGCDAPINFFMLLR

SEQ ID NO: 947677 - protein, 115 aa, Homo sapiens
  misc_feature (26)..(26): Xaa can be any naturally occurring amino acid
GPPPRPGDFFFLGKKGVPPGGPGGFXIPTPGINPPRPPPGLGFPGGASLPGPGFKNSNLLGGPPYAGYFGKPGPFLLRGGGHFPGANPVGDLVFFSGPLGKGCLINKIFPVFLKG

SEQ ID NO: 947678 - protein, 119 aa, Homo sapiens
PQAEGRPKAGPVSSKLGAGGGHSGPGNHSPYPNPPSPATNPQVWGLKNHGRPAPNLGGNPFPSKPGPGPVWEAHLAKLRELRAKARLARPGRGRGCTGLCQNAQDIPAWVFNAVRKINQ

SEQ ID NO: 947679 - protein, 111 aa, Homo sapiens
LLCSHLEGSGVFRLPATFASLVLAFSCLVFRVLGIKCVPPPRVNFCFFSKEGGSPILARVVLNFLPQVTCLFWPPKWVGFRGRDPVPGPGDIFSWALFPFLNKLGVTFLVC

SEQ ID NO: 947680 - protein, 104 aa, Homo sapiens
PPPPPPPPGGGDFPWEFCCPKEARGGGEKPPFPPGGEFLRGAPPFLRGGGKRKAPFFRGGPGGVWSGPGPPPFFFFPPRPLFNPGGFQGGFLMGNKVFLFFFFG

SEQ ID NO: 947681 - protein, 108 aa, Homo sapiens
  misc_feature (52)..(52): Xaa can be any naturally occurring amino acid
PLLSASGDKGPGPTLKAPSPLPPGDPCCEPKLSLPPPGHVVVLGTNPICVGXGSPKPGAPPKGPFPRTLPGGQAWAPPVPGWSWELPPPSPQNLGSCCCCLQNYIFFF

SEQ ID NO: 947682 - protein, 127 aa, Homo sapiens
SQRFQKGTEPLGPADQFEVGPDSLKPEVERARTRSRWSPGPTGCGAPDCKRYRASEGPFRAGKALQRPRPPRSSRLALGLAGAQKPSRKPSLRWSPRWSQSLRRTPRKIPGDLGLPKNLCLQMKKCS

SEQ ID NO: 947683 - protein, 168 aa, Homo sapiens
  misc_feature (37)..(37): Xaa can be any naturally occurring amino acid
NQPGFKISVPPREGSNGNPKGVFFLKAVGRPFLKTLXIMSWKGQYLRSIRALETSSRQAFLPPLAGQWVRILGAPKFWTLWGLSLSYHSQCFCRFLWLKTISPQILSSLCLLPGTLSKPIHDLNPESWLWAVDCLPKLVVKLEEVKSPACYILTTQTLGQKEIKGLSS

SEQ ID NO: 947684 - protein, 68 aa, Homo sapiens
KEVGDQGAPGHILEKTVVSVKDDFYFLASQWDGKNCPTLTWRHGTVECEEGSEDDESLREMVELAAQR

SEQ ID NO: 947685 - protein, 118 aa, Homo sapiens
  misc_feature (63)..(63): Xaa can be any naturally occurring amino acid
TTRSALNHRGTLHLGLLKGARNVASVGLQIGYPIVASAPHFIINGYKRVLALSVETDYPFPLXEKVKAFLGDPFAFVGGAPVGAAPPAAPVVVAAPAKVEAKEKSEESDEEMGFGFFD

SEQ ID NO: 947686 - protein, 75 aa, Homo sapiens
GQDSLYAPGKRRYDRKQSGYGGPTKPIFQEKGLNSKKDCAKAVSALSPPADLKECWLLKNASLFNWEEIKKERAQ

SEQ ID NO: 947687 - protein, 164 aa, Homo sapiens
RANEYRFKHGQLEELKDETKKKEDRTVCKGTRGIYQQMIKVIEERMRVYEDEYRDYKADLKKTIEIINVAHGKCYNGIIEGIEGDQAKCNKCLKLSEFILDKAREGMKKKTITRMLLARCGADDQQRTCYSAALSLMANFDENIINKTPLEFCVKSNKCVVKDW

SEQ ID NO: 947688 - protein, 76 aa, Homo sapiens
MARVGGASSLENSVGLAIFNSHPFSLTSGQDKAYLQDLVEGMDFQGPGETQPLLLMGGLPPPCSPPPQTNKLVPGM

SEQ ID NO: 947689 - protein, 145 aa, Homo sapiens
MGFRGPVCVCRVCKSLSVFSQTQQVNGARDSQDLVAKLRAFLNGARVTPERKNLKWIGFDLSNGNPRAPNQAGGFDPPIVKVKGLKFAPEAAIPLFGIDVFFKFPPESKDDKHGSYENAVPFGALNVCFDVPFFFTNFKCNFFVP

SEQ ID NO: 947690 - protein, 156 aa, Homo sapiens
KIQPALPVPLPRPEALVKKGRICPFVLPQPQRGFNKKVAGVRNLEAYGLDPYSGGALLQQGSQGSPPVHPAPGAKGSLQGQIPGNPGPPPGGVLVERDPPPPKPPPGLKKAPPPGQKKGPPLLSPGGGPGEIPALGGEFFWAFSAFAKPKNNFFPK

SEQ ID NO: 947691 - protein, 124 aa, Homo sapiens
  misc_feature (14)..(14): Xaa can be any naturally occurring amino acid
NSPAPGFPPRGPGXPPPGVFFPPHQGVFPGGVGGEGVSPPPGGPGLGLKNPPKGALFPGVWGPRGFYGFPFFPFGLGGGGAPPPPPPFGFPCPPGKKGGVFFPLFKGGGGLLSPPGGGPPAPPF

SEQ ID NO: 947692 - protein, 153 aa, Homo sapiens
  misc_feature (59)..(59): Xaa can be any naturally occurring amino acid
IVSRGWAQLVQVWNPANSKLKTNPSGPTGYLNTGAVSPNGSLCAFGGQDGPALLWGFHXGQPPFPLNGGGIINPLWFNPNPYWLCVPPAPTSKFGVLKGRSLVNELKPKVFRSPSKAEPPPGPPPAWFVYGPTLFSGHPDHLGRVWPVALGPP

SEQ ID NO: 947693 - protein, 85 aa, Homo sapiens
  misc_feature (20)..(20): Xaa can be any naturally occurring amino acid
SKKNKSGGITLSDFNITLEXYSYQNSIVLEMKIGMYTNNRQTESQIMSELPFTIASKRIKYLGIQLTRDVKDLFKENYKTLLKEI

SEQ ID NO: 947694 - protein, 123 aa, Homo sapiens
  misc_feature (5)..(5): Xaa can be any naturally occurring amino acid
  misc_feature (8)..(9): Xaa can be any naturally occurring amino acid
  misc_feature (11)..(11): Xaa can be any naturally occurring amino acid
  misc_feature (28)..(28): Xaa can be any naturally occurring amino acid
GGLFXSPXXFXLFFFEPGGLGPLGVAHXGGFPVEAPLGFFFSSPGVLPSWGGPPLGFKTGGISGGFNPPPFPGPGGGVSRGLVFNFGGPPPVFGPWAWVFFPLNFLDWGRVFPFGPPFPPFWA

SEQ ID NO: 947695 - protein, 97 aa, Homo sapiens
ARALAPQTTGAALLVAPGPRSAPTLGGAPKSWATDRVSSSAEFQGPIDKPKNNKPVLDKLQVGREKGIPVKAQTASFFSNWEGKQGCCSRPGVMTTQ

SEQ ID NO: 947696 - protein, 88 aa, Homo sapiens
PGKIPPPPPPGGGFPPQGGGAQKGAPPPPGLWGGAPFPLKKFLAPPGGGGPPPGGAPFGGGGGGPLGGGGPPPPFFFFWGFFFWFFFF

SEQ ID NO: 947697 - protein, 223 aa, Homo sapiens
  misc_feature (148)..(148): Xaa can be any naturally occurring amino acid
FSPTSVVVSGGASQEWVLLPMLGVMGQSHSCHLKGPLLVPQVAAQALVSNGCRGSIINISSLVGKVGHVGQTNYAASKAGVIGLTQTAARELGQHGIRCNSVLPGFIATPMTQKGPQKVVAKITEMIPMGPLGDPEDVANVVAFLASXDSGSSQGPQWKARGVFSWNCPKDPGLCSPPPPFAGPPADGGFKFPGYKRGGRVWFRNAEYGKQGGFGPNKFQVLL

SEQ ID NO: 947698 - protein, 89 aa, Homo sapiens
  misc_feature (46)..(48): Xaa can be any naturally occurring amino acid
RWRAPPPGPGPPRQLVEELQSRYRQMEERFTCPICIDSHIRLVFQXXXPTHAPLAGSALSAWLICPQSIRVRHTDVCVSPHRRPRPICL

SEQ ID NO: 947699 - protein, 81 aa, Homo sapiens
SPQPRAFGKPLGRSSWELVGLGNSGPTADARGFAGLCCPGQFLGLKKERTSSGMVERHLGANAKQSRDCLGCLREWCDAFL

SEQ ID NO: 947700 - protein, 102 aa, Homo sapiens
  misc_feature (25)..(25): Xaa can be any naturally occurring amino acid
LLGTSVPFRAPPSPPPGFGSGSSSXFGPNLGFSSFPGKGRVLGASPASLPQGPPEFPRRQLPQWGTWLGGPSARGPPGPPFRPPRSLGSPRKEGEVCLLPRG

SEQ ID NO: 947701 - protein, 73 aa, Homo sapiens
PGPNFPGIWPPPGPGPLSGINPRARLVFPSPPPPPALWAPGFQKKDFLAGFFTPGSGIGFFRDQKKAGFFRPP

SEQ ID NO: 947702 - protein, 75 aa, Homo sapiens
DAFTYTGCGGNANNFVSREDCQRAWAKALKKKKKMPKLRFASRIRKIRKKPFYTFLIWPPVWLKALFALKGGSEE

SEQ ID NO: 947703 - protein, 126 aa, Homo sapiens
NCLANPFKRIPNPKKKPNARVLIRPCSKVIAGFLPVIMKHGSIGEFEIIDAPKLEKIVVNLTGRLNKCGVISPSFYVQLKDLEKWQNNLLPSRQFGFIVLTTSAGIMAHEKARRKPPGGKILGFFF

SEQ ID NO: 947704 - protein, 237 aa, Homo sapiens
  misc_feature (78)..(78): Xaa can be any naturally occurring amino acid
PEGYFLRVPLSSLSPRGSSILVARPPPGKQYEMFGARLCSPKILPPFPRGGPDWHCISKLSTRHRTTHTVLRCSPLHXCPINRSWICHHRRVHSLISPIFRVHPRPNLRQNPFPYHIHRGKSNFLPPTLSRPIRNAPALLGLPRCIPPMKHPIICRVLPFSNSRKINNFPGFEKPFASKRKVLIVEEPPINLEWLYGCPPPFPPFEEPVFIKFRPKRKESNPPKLVSSPPPGPHGFF

SEQ ID NO: 947705 - protein, 74 aa, Homo sapiens
SWKGRESKSPSGPRKKFPPRVLKKNPLENFRIMLELNPYAKTMGRDPLFCQARNPKLRVDKAASSPAALPAQSN

SEQ ID NO: 947706 - protein, 138 aa, Homo sapiens
FFPPPPTSGGGGEILFRPPPPPNPRRGFPVLFPPPPPWRKRPGGLFFLNSRAGCPPPQMCGDPGNNIPASPRPPKSFLLARAPLPPPAKGFWGIPLKEPGFGQKPRGGAPPLFLGVFFWGPGGGNLTPPPLFSPPPLG

SEQ ID NO: 947707 - protein, 214 aa, Homo sapiens
MAQRQAAKTQMSDDYYYYGHHLMPPHARGRGRRASRGGYSYPPDYSGYEDYYDYYGYDYHNYRGGYDDPYFGYDDFQAPAEAEGAAAVPEVGHPMRVAEGPALHGVGQAFRSAEVPGPGREPAGACAEEPEAVFCREGAGYVVLGVDAVQNVGGKRKADGYTQPDSKRRQTINQNWGSQPIAQQPLQGGDHSGNYGYKSDNQEFYQDSFGQQWK

SEQ ID NO: 947708 - protein, 120 aa, Homo sapiens
  misc_feature (46)..(46): Xaa can be any naturally occurring amino acid
MVSQSVCVYRRWVFPTQHIFVGVSVGKLRGKFQSCSRVIVAHLGQXEGVWHSLPLWGPPRAAWGKADYGVVAPVVFLRKQTKLFLYGGPSQGEGEGRGTPPPSLAGGKARSFSFKLDSEE

SEQ ID NO: 947709 - protein, 83 aa, Homo sapiens
RKRMLPRNRSRPVAGSFNKVSDNFEMLVFNASSKQQLDVSFEHLQMFIRSSRLGFQELVHVCCAVKLYTRFYWTPFLFAFSEA

SEQ ID NO: 947710 - protein, 106 aa, Homo sapiens
ENGEFFFFGAPVSLFPEKKASWKGGGMVSPPGKFFSPGPALLKWVKPARPCGPPPFSPPLWGPRWVVPPRSRVPTPPGPPFLTPPFLKKPKFPPFGGRPPPPPPFL

SEQ ID NO: 947711 - protein, 125 aa, Homo sapiens
  misc_feature (103)..(103): Xaa can be any naturally occurring amino acid
IVSRHPTGVEDLPTPPPLGRFSFFNIHTPSPGGVIKPGDQKGVGVGRVPHFPPKAQKGKRNFSPNPPPPLFNRGGKGGSKRFVSKAPFILKGKKGVIKPRLWXPPQRKGKIFWAPLGFFFGGGPV

SEQ ID NO: 947712 - protein, 75 aa, Homo sapiens
  misc_feature (43)..(43): Xaa can be any naturally occurring amino acid
IRSWTPGGEGCRSGSRQPLQRENQRPYGEGGMRSFGRLHFVLXKGLPQGPAGPHPSGGQRNFVLFGFPPTRLPGF

SEQ ID NO: 947713 - protein, 179 aa, Homo sapiens
PPPVRLQISLASVRPTPPDAPPSGLLAHYTTRRHKQAAPVGIRGFAAPGRTTPGIYNSFPAQCPGSAERTLPRRNVPAYPRLFCGAAYHGHMGGRNKAPAPFRIMVSRREPAPSASRSEYKRRHGQSLSHDIPGDSSGDYRKILLKICGGNARTVTGGSFLPPCRPHPVPGKGQKNVGF

SEQ ID NO: 947714 - protein, 72 aa, Homo sapiens
SDTLEPHHQMIKIVCGIDEYYEVRVEEQSSAAAPEDIPHLEGENYASRMEEVDEIHPSICKSLITLISAIIP

SEQ ID NO: 947715 - protein, 112 aa, Homo sapiens
FFWVGVLVLFLFFTEKGRAKGLGGNRALGAPQIKAETPLLGAKPQQGGRSGPSFFFFFFLIFIIGAPGGVTGAMRTPFTPRRWGPRVGPTLGSLTGLPFIRGICLWAGLVME

SEQ ID NO: 947716 - protein, 72 aa, Homo sapiens
RNNKKLLGRVKAFDRHCNMVLENVKEMWTEVPKSGKGKKKSKPVNKDRYISKMFLRGDSVIVVLRNPLITGK

SEQ ID NO: 947717 - protein, 110 aa, Homo sapiens
  misc_feature (68)..(68): Xaa can be any naturally occurring amino acid
MVWAWIKYFAGLFCNKGDIPSFQTLGREMSFPYLPSGTPELEVPKPGQPFEPEHGPSPGQNTFCQGKXDGLYPNPRERSSFYNCATGGLFQQNCPTGLVFSNSCKLCPWI

SEQ ID NO: 947718 - protein, 79 aa, Homo sapiens
NIDIAFDTTREALQDNQTQLIMEDLIEVCNNSHSKIMYARDVDQRSSTFKKSLQIGTEFQRRATAMILRAHVLRNQIHV

SEQ ID NO: 947719 - protein, 102 aa, Homo sapiens
MQVQLERKEEVTGPVIAPLFPQKREEGWWVVIGDPQSNSLISIKRLTLQQKAKVKLDFVAPVGGRAQPPPDFMSDAYMGCDQEYKFSTEVKEADSEGDSDSD

SEQ ID NO: 947720 - protein, 69 aa, Homo sapiens
APLKENSAVPFRYHSVTDQINSPTLFVIFNDTQAYPKYLITCKKIYVNHMLSDPNAGMHLQQLPIMYSY

SEQ ID NO: 947721 - protein, 70 aa, Homo sapiens
SFLSFQVCANNTDRIIGALKSEEDAGNIATYIVAFTLDDRILLHETKIEDVKYEGLEFFSVWMYFHAKNW

SEQ ID NO: 947722 - protein, 96 aa, Homo sapiens
RFQANISQAQNAQPVSGRYERADEAQAQELANQLQVQAELLKRKLEMTAENLRTSMEVGVDELPSLFAPYSQKICEQLQEVMDKIKEATAALPTQA

SEQ ID NO: 947723 - protein, 136 aa, Homo sapiens
AGFPCATRGTKCLRREAPPWDAPFRDPPFKQLLLGAVFKTFQPSGPPSEGALWSGLPSTSPLPNFPWAPFLAPPSPWEGGPQFKAFPVKRGLWPKPPFQLPSPPRFSGPCGPGLFPTPRGVCGGGRVRFHKVCPLS

SEQ ID NO: 947724 - protein, 72 aa, Homo sapiens
RAGELNQEVNRLMVAMRDMLANIQFHEPQWEDNQERDEEEWDYQINKVVIFQMKLNDKLKKHKRGICMICSP

SEQ ID NO: 947725 - protein, 138 aa, Homo sapiens
VIARPGAKDFNYVPSPDGGGMNRTAELQYRSPVHQSHQSPTSVPRSPFAPHQKVAFISALERADSPHLGTREDIGQGKVNGQLKGQYGTPSGTPSRHTSVKKVTGVGGTTYEISVWLTARGANACEEQHCHGKPNSCS

SEQ ID NO: 947726 - protein, 128 aa, Homo sapiens
MGPPFLMVSDGPTRLRGVFCPTFDFTWGGALFLIIPKEKKTLVKKAKMPPENPFFSEPSRDLFWGGPYRAQKELGWMRGLKRPKIKGFFFFPFLAKKVRFFFFGPFEGWGNPCWPPITRDFFLLGCFP

SEQ ID NO: 947727 - protein, 87 aa, Homo sapiens
KVLHVSVRVLEDTLDTVKESAISAMPHLVPTTPTAYTSDEAVNHSICICLVQFLSIVLQLEHVLYWPSIKCFTFHLIRSSENNRHVD

SEQ ID NO: 947728 - protein, 140 aa, Homo sapiens
PQGAQGSGGGVTPPPGGLPGRVSKAGHQGGPPQPPGAPLVGESGFRETQSFRLGGPPPGAGVPRPKKFSPGGGFKGEGPPPFPRVQAGPPPLFWALALFSRGAPPLWGPPGFFFPPPPPPPGVFFCLWGGGMNKKRGFLP

SEQ ID NO: 947729 - protein, 123 aa, Homo sapiens
SPTCALCRIFCAPSYSARLTGGEDLEPASSHYSCGSGVGIFLRVRECQVLFLAGKTKGCFYSPPYLDDYGETDQGLRRGNPLHLCKERFKKIQKLWPQPSVPKEIGHAQEANQTLVGIGWQHL

SEQ ID NO: 947730 - protein, 80 aa, Homo sapiens
KQLPEADKVRYKNEIKSWEEHMMEIGREDLLRRKTKSALKAKAKTKTIATKNRKKTSKVTVIKAKAPKKKKDASGKAVYF

SEQ ID NO: 947731 - protein, 129 aa, Homo sapiens
ESLSQVAYLSDPCQCYLYKNTSVFTAIINQERVVNKTYKSNLMSLNSLAMMKFQQDSIVDPVDYEWFGFDKAGPAEELQTLQESPIYKEDRLGLAAMDSAGKLVFLASEGDHLQFTREWFNENLLSYLL

SEQ ID NO: 947732 - protein, 175 aa, Homo sapiens
HSPRGECRSSPVSCGLYTLPFPSMRRKHIVDEKQPGFYLNCGHVHGYHNWGNRDAERDGREGRERECPMCRARGPYVPLWLGCEAGFYLDAAPPTHAFSPCGHVCSEKTAAYWSQIPLPHGTHTFHAACPFLCTAAQWRAGIHQTNLPGASGLSTPAFDPISQTLILFPPSVRFL

SEQ ID NO: 947733 - protein, 165 aa, Homo sapiens
EQISQEECISQALRQETADKEQNLLQLRSAMKELSVQNQELMEHNLTLQERLQGEEPSSGCGLLPAGARLTQRLHGEMAACLCDLRSLCNVLTQRAQGPDPKPLLLLGIASAPPPVAEQWDDWLSPEGLQKKLNEAQQLRRDVEELRTTVSDRYAQDMGENCITQ

SEQ ID NO: 947734 - protein, 119 aa, Homo sapiens
  misc_feature (56)..(56): Xaa can be any naturally occurring amino acid
GGKAEYRTSERLKNKMDSHPPRLFACSNKTGQLLIEEVPGEMTQEDLAPDDVMIWXTWDQVFVWIGNEANEDEKSEALTLAAKYIESDPAGRDKRTPIVTVKQGFELPTFTGWFLGLES

SEQ ID NO: 947735 - protein, 124 aa, Homo sapiens
VLELSEFNAVQLHKGPWLVLFVHDEEEGELDPAIELIQPIAEEIMAKYKAKEEETPLLFFVAGEDDMSDSMRDYTNLPEAAPLLTFWNMLARAKYVKDVEEITPAVVEQFVSDFLAEKLKPEPI

SEQ ID NO: 947736 - protein, 103 aa, Homo sapiens
  misc_feature (15)..(15): Xaa can be any naturally occurring amino acid
PPPPLGEMGGGGGGXRVLFNQGWFCVPGGSPRRPLSPFFSSPRRPRARSTLPALAWAGGRFPIFPRDPLFPFGLFLWPFFSSLFAGAGWVRSGISGPSWPPAS

SEQ ID NO: 947737 - protein, 76 aa, Homo sapiens
IITAPEWSRHVNNKSSGPSSSKGKKGSSYTARQHKDRGIDFYFSKNKHFGGGDEVKLHFYSSDTAASAQATVYIAE

SEQ ID NO: 947738 - protein, 77 aa, Homo sapiens
SQVLSQVKDQLDLLSVSGQKQLQALGLERLKKQLMKRGMKCAGTLQERAARLFSVKGLTPDQIDPSLLAKPSKGKKK

SEQ ID NO: 947739 - protein, 103 aa, Homo sapiens
  misc_feature (27)..(27): Xaa can be any naturally occurring amino acid
PNPVCGPECPPPFRVMEEPFVISIKAXCIDSPASAEAVFASEVKKMPQENIKPQEQFTLEPYEKDPSVVVGVYRPPPKVKNLSSALSGLRKMCVDTVARVFFY

SEQ ID NO: 947740 - protein, 104 aa, Homo sapiens
GGRILSPGIQNTTFVAGEGGSNPLGWPFLLEKIVIRSFWERPKWARDKNAPLLGGFFGPLSLNGGGKPPKNLGAPVPPLGKMGGPHFGLGEFFFSRPPLGGVCI

SEQ ID NO: 947741 - protein, 117 aa, Homo sapiens
PRPREDSAAERARQQLKALLNKTMGICMTDGRTLVGCFLCTARDCNVILGSGQEFLKPSDSFFAGDAPCVGPGHGDPAHHHCSPLKVQRKKFDPGLRYFLTTMAAYLYRLSLNLLPQ

SEQ ID NO: 947742 - protein, 94 aa, Homo sapiens
QRPIPDTEPKMEEFKAQFPADECTKLKEEISQMRGLLARKASETGENIRQAASSFQQASLKLFEMASKKMAFERKGFGSSGPGDQKEVPKGGTP

SEQ ID NO: 947743 - protein, 34 aa, Homo sapiens
SSRYFVIRIENGNGRRAFIGIGFGDRGDAFDFNV

SEQ ID NO: 947744 - protein, 177 aa, Homo sapiens
  misc_feature (9)..(9): Xaa can be any naturally occurring amino acid
  misc_feature (11)..(11): Xaa can be any naturally occurring amino acid
PVNSQMKGXQXKGGRIPRGPGLGPIRPIVGCPTVWSHKKVGPGPGFSLKEFRVAGIHKKVARTIGIFVDPRRGNKSPESLQTKVQGVKEYRSKFIFFPRKPWAPKKGNSFVEKLKLAPQLTGPVMPVRKVYKKEKARVFLEEKKNFKAFVSFRMARANARFFGKGAKKAKEPPEQDV

SEQ ID NO: 947745 - protein, 130 aa, Homo sapiens
ARSAANQQGGFGDRAHCGPLGGVPGCQPFAPDELTVKTKDGVVEIPGKHKERQDEHGYISRCFTRKYTLPPGVDPPKFPLPLSPKGTLTGGAPLPKLATQSKEIPIPVPFELRAQLGGPKTAKSDETAPK

SEQ ID NO: 947746 - protein, 106 aa, Homo sapiens
  misc_feature (3)..(3): Xaa can be any naturally occurring amino acid
HPXPPPPINTMAFFGNVPKRRLAPCQRTGQPVGTMLQLNEHGPQCGFHCHCLLTHANEDGSCCHHPTKCFGWDLPSECCDLWSGSTTAPPAQQVPNVKEPENKARA

SEQ ID NO: 947747 - protein, 126 aa, Homo sapiens
RVAGFPKKGAGPMGFFWDPRGGNNSRRSLQAKVKGLKGARPKFFFFPRKPWAPKKGNIFVKKLKLAPQFPGRLIPFGKFFKKEKARFFLGEKKIFKPFVIFRMARPNPRFFGKGAKKPKEPPNRDF

SEQ ID NO: 947748 - protein, 41 aa, Homo sapiens
YRKEKNIYSKRWQKEEIHRESIVWCDSVKMAVPSERDIILT

SEQ ID NO: 947749 - protein, 151 aa, Homo sapiens
  misc_feature (43)..(43): Xaa can be any naturally occurring amino acid
DQLGRALQIMSRFSVQAGSVGVICSASPCSVTSSTSASKVKAXVQNLGEELVVSGLDSAMSLIQAAKNLMNSVVSTVKASYVASTKYQKSQDMQSLNMPAISWKMKAPEKKPLVKREKLDDGQTNKVKRSSQKKHINPVQALSEFKAMDSI

SEQ ID NO: 947750 - protein, 114 aa, Homo sapiens
ITQDGGSQAIENAVTMVHNDGSMITIPPTESLLASAEAHSVTVATEDGTERQMTIMMPELTSRNTQDGLSAHPITLLATSNGTQIAVQLSEQTSLEEALRIASSLQAEEAELAD

SEQ ID NO: 947751 - protein, 76 aa, Homo sapiens
MIARHRYEGFLYFNIIQIQREGGVQLSTQTGKQVGTAGDQTRCGLSESEDHRGKPSVAYRFKLNVVATTSHHIIQA

SEQ ID NO: 947752 - protein, 79 aa, Homo sapiens
  misc_feature (10)..(10): Xaa can be any naturally occurring amino acid
  misc_feature (23)..(23): Xaa can be any naturally occurring amino acid
  misc_feature (31)..(31): Xaa can be any naturally occurring amino acid
  misc_feature (56)..(57): Xaa can be any naturally occurring amino acid
  misc_feature (63)..(63): Xaa can be any naturally occurring amino acid
KLKPLIKAVXNEDFDDQLEMVCXIDPGCFGXIDELIRCETKGKGTLDVLSLKDVEXXDEKLEXTLHLFSPAFFNTLNYC

SEQ ID NO: 947753 - protein, 112 aa, Homo sapiens
LVQEHNVPRVEDPGEPQELVEDEAHVNVLQQTALPNDCVQVSVYTEGAHCSRGWGAGGTTWGEWERGTWQVCPTLNQPTAWPPRSSILCTACGHSGEVCRSFNTLFHVAFVS

SEQ ID NO: 947754 - protein, 163 aa, Homo sapiens
QYQEPIPCEQLVTALCDINQAYTQFGGKRPFGVSLLYMGWDKHYGFQLYQSDPSGNYGGWKATCIGNNSAAAVSMLKQDYKEGEMTLSAALALAVKVLNKTMDVSKLSAEKVEIATLTRENGKAKNQSPQAKKKVEELIKNPEAEEAKAEKAKKEKDQKEKDK

SEQ ID NO: 947755 - protein, 67 aa, Homo sapiens
  misc_feature (21)..(21): Xaa can be any naturally occurring amino acid
GPPLKVGGCQEVEIQEGAAPXALQTQDGLAVNGATQRPQIGPSHPWVLPAPAFKNIAFGCHVAQTFE

SEQ ID NO: 947756 - protein, 125 aa, Homo sapiens
PPGPPRGPPRGRPPPKKGFKVGLPPPKNRVFFPIRPAPPNFPPWEEGGGLPKPVFMARVFRGGPFRGGPPLLGGPPRAGVLKNKIPPPPPPPPVFFFFPKKTLGDLGGPFGAPKGAPGEKKFFGF

SEQ ID NO: 947757 - protein, 123 aa, Homo sapiens
  misc_feature (26)..(26): Xaa can be any naturally occurring amino acid
  misc_feature (69)..(69): Xaa can be any naturally occurring amino acid
  misc_feature (77)..(77): Xaa can be any naturally occurring amino acid
AFWDSTLTQITAGLDPFGRIQMKTRXTLRWHLAKIYAIHYGTYSRLLVSSSQDWKLIIWDSYTTNKVHXIPLLSSLXITFSYSPSENFFAFWGLDNIFSIYSLKTRDATSGSAGSCLATLGTF

SEQ ID NO: 947758 - protein, 224 aa, Homo sapiens
MRTSGRTLPWALGKDLCYALGDRFKAVCVSASQDGKFIIWESYTTKKVHAISLCSSWVMNCVYALSGNFVACGGLDNICSIYSFKTREVNVRVSRELPGHTGYLSCCRFLDDNQIITSSGDTTCALWDIETGQQTVGFAGHSGDVMSLSLAPDGRTFVSGACDASIKLSDVRDSMCRQTFIGHESDINAVAFFPNGYAFTTGSDDATCRFFDLRADQELLMYSM

SEQ ID NO: 947759 - protein, 67 aa, Homo sapiens
AAVHIQEMDDLDKIASRNDKSRPVPLFQRFEDLKRELSSQREEERACGLKLNCLLDIVDNWRCFSLT

SEQ ID NO: 947760 - protein, 112 aa, Homo sapiens
KKKNWGGGPFHPLFFAPGGPPGPKPGIPPPGGGGPHWGGPPPFFRGFSKGFKKIAPFVAGPPLGPPRVLKKRPRGGPPPGPGAFWGFFWFFWGGGGPPLFFSPPPRFLGGGF

SEQ ID NO: 947761 - protein, 96 aa, Homo sapiens
QRAAEAFALVPAKTPECGQLRKLLEESRRQRARRALHTRSRTHTASQNETPLNSGWVNSRTQTLAALLIYSDISKMKLRDPLYFVLCSKEIKGHRN

SEQ ID NO: 947762 - protein, 58 aa, Homo sapiens
MLFWNLGVGVIFGDYGYPPEFECRECGSTLGKWGTRALQVFTRSALCNVLGPIKPNVS

SEQ ID NO: 947763 - protein, 110 aa, Homo sapiens
  misc_feature (42)..(42): Xaa can be any naturally occurring amino acid
LAIRESIENESDGNVIEQYNPSAMKLNEDDTVREIRKDHFEXAMRFAAAPSADNDIRKYEMFAQTLQQSRGLGSFRFPSSTREDSGTSQGSSGGGGGNVFNEDSDDDLYG

SEQ ID NO: 947764 - protein, 218 aa, Homo sapiens
  misc_feature (36)..(36): Xaa can be any naturally occurring amino acid
QGSRRRLPQVHAGPDGGVWNDEQKLLLHDLQQYFCXLKDSERNRKLFDLLDVLKFTKVVIFVKSVKRCVALSQLLVEQNFPAIAIHRGMAQEERLSRYQQFKDFQRRILVATNLFGRGMDIERVNIVFNYDMPENSDTYLHRVARAGRFGTKGLAITFVSDETDAKILNDVQDRFEVNVAELPEEIDLSHLHCTVQMKVLTFSEQQQMDHGGALNLRF

SEQ ID NO: 947765 - protein, 115 aa, Homo sapiens
  misc_feature (6)..(6): Xaa can be any naturally occurring amino acid
  misc_feature (40)..(40): Xaa can be any naturally occurring amino acid
KKGLQXSRDKTPAKEEKKRKRPRKESYAIYVYKVLKQVHXDTGISSKAMGIMNSFVNDIFERIAGEASRLAHYNKRSTISSREIQTAVRLLLPGELAKHAVSEGTKAVTKYTSSK

SEQ ID NO: 947766 - protein, 78 aa, Homo sapiens
PGLLPGAGGGLPFPPGNRFGPLAFFGGPFDPVWSKKAGGARAGIPGILAPPGAPPGAQEFFWPGFWEFGFMDGPFVAF

SEQ ID NO: 947767 - protein, 177 aa, Homo sapiens
  misc_feature (20)..(20): Xaa can be any naturally occurring amino acid
  misc_feature (26)..(26): Xaa can be any naturally occurring amino acid
QGETRFLKVIRTGKRQKKAXKRMVTXVCFVGDGFTRKPPKYERFIRPMGMRFNKAHVTHPELKATFCLPILGVKKNPSSSLYTTLGVITKGTVIEVNVSELGLVTQGGKVIWGKYAQVTNEPKKMMAVLMPCCWFNGDPERFIIELCPRVQLESAFLWKTPIIIVIIQGILKLQKKI

SEQ ID NO: 947768 - protein, 122 aa, Homo sapiens
AYLLGTCRPCISGDGFIFSWDRRGHSGYDLIGAAFRKRVFFPQFPQEFAQNVGRMFKQFNKLTEARAEVQSIMGLQGFFKRGMKEAFGDTKFFVVVVEPPPMSLPGVGLSSQELFGGPGDGP

SEQ ID NO: 947769 - protein, 157 aa, Homo sapiens
  misc_feature (5)..(5): Xaa can be any naturally occurring amino acid
CSTPXVQERMKNLLQGNTQSVGLLLSERFVNVPPQIALPLHKQLQKEMAEAQRTNKPSGKCQFCLMISKTCKPLKKKSISAGDQAKDELLFVNDEEEFFYEQATVKFSYCVQDERDSCATGKWSYDDEPMKPFRTVMVIPMDRMDTIMQKMTDYLTV

SEQ ID NO: 947770 - protein, 117 aa, Homo sapiens
QLATKPARKSALATDGVKKPQRYKARNSVSGEIRRYQQCTELLIRKLPFQRLVREIAQNFKTDLRFQSSAVMALQESSEAYLVGLFEDTNLCAIHAKRVTIMPKDIQLARRIRGERA

SEQ ID NO: 947771 - protein, 117 aa, Homo sapiens
RAKPLFGGTPFFFNRHRGGGRPPQKPRGPPQGGPPGESPAPAPRSAVRRALACRTRCCPSTLDLGPSHAGPGAGRHGPGAPGGGFPQARRGTPPRDAAPQGRFRPNADLELNDVIGL

SEQ ID NO: 947772 - protein, 190 aa, Homo sapiens
  misc_feature (22)..(22): Xaa can be any naturally occurring amino acid
  misc_feature (78)..(78): Xaa can be any naturally occurring amino acid
MMEYLCKAVYWTISGESLASIXGLCDNMKPESCADHELLYLLKGQQGNQFILRARRSLLDTSVPWHLRYLGQPEVGDXSRHALVRNCVYVAASHSLPDFLNEMGFRMDHEFVAKGQVFRKGVMKVVSEQTVRVLVPANTDNTEPLYLSYLVELSVLALAGQDTVSEYMRSFAEQLKPLVHLEKIDPKRLM

SEQ ID NO: 947773 - protein, 149 aa, Homo sapiens
  misc_feature (61)..(61): Xaa can be any naturally occurring amino acid
LCGCMWTAVWQLQYLIRKLCQDIPSLRIMDAWWMPRLQVPAPLLAHNQEDKLRFQLEAFMXQDTPSPLIYITCIVKATVAARHSDHLHKSCSFANGWFANDGHHGACNCCDSTCGVEGQLTGDGFKGIQWEGKALVGPVVVKDTQRNLV

SEQ ID NO: 947774 - protein, 115 aa, Homo sapiens
LIGFSPLRCTNAPSPLLYHKSILAPLITILVIIETVSLLIRPIALAVRLAANITAGHLLMHLIGSATLAISTINLPSAVIIFAILILLTILEIAVALIQAYVFTRLVSLCLLANS

SEQ ID NO: 947775 - protein, 172 aa, Homo sapiens
  misc_feature (28)..(28): Xaa can be any naturally occurring amino acid
  misc_feature (87)..(87): Xaa can be any naturally occurring amino acid
LAGRRTNGWGVLLFVEKAEKACQKLQSXWRINIKMPNISPGALMYTVKPVLGSVRSPPPVLSASEKNIEKELPPLNDQVRPLSNGIXPVDIKKDFPKKQMDAGAFPGPSSLPFNAPQRKCLQGVLKKQGEPLAGLIKQIKGLQNPFRFWPSTVQRALPTALGQVFLKSPKNP

SEQ ID NO: 947776 - protein, 199 aa, Homo sapiens
  misc_feature (33)..(33): Xaa can be any naturally occurring amino acid
ESGPTPWGELMPSDEESSEEQQEEESDEEYPDXTGFFTRADSHSGLITPDGFSSVPAGMETPELIELRKKKIEEAMDGNETPQLFTVLPERRTGPVGAAMMASTHIYDMTTTVTSRKVGVSVLDGDSQGVEVALAPEELELDPMAMTQKYEEHVLEQQVEKEDFSDMVAEHAAKQKQKKRKAQPQDTRGGAKKYKEFKF

SEQ ID NO: 947777 - protein, 67 aa, Homo sapiens
  misc_feature (6)..(6): Xaa can be any naturally occurring amino acid
ISKDSXQDIKQKVQDKYRYCESRRRVLLQHVHEGYDKDLWEYIEDVEIDLRTTDSRREAPATRALMQ

SEQ ID NO: 947778 - protein, 153 aa, Homo sapiens
IPYQTTVHTRHCSRDHASGTIELLGYFMKQFSHNINMDLHIPQGTVVMPNFTAILSNKENWKHPDTFNPENFLDENGHFSKPESFIPFSLGPRSCLGETLAKTELFLFITSLLQRIHFSWPPDAQPIDMDGIMGIVRYPQPFSIICCSRDTKK

SEQ ID NO: 947779 - protein, 171 aa, Homo sapiens
GTLFRPKKGDQASRDFSHHIVLRPFESHLVMLQLETPASFNERVSQICLPPERYIVPDGTICAIAGWEQLKEKGDETVLNVAQMPVLSNKDCNQYFKGRVRENEMCTMAFQAGVGACERDYGGPLACQNSDCWVLEGVIIPMRRCGHAGQPNIFIRVSVYVDWIKKVMEMT

SEQ ID NO: 947780 - protein, 80 aa, Homo sapiens
  misc_feature (38)..(38): Xaa can be any naturally occurring amino acid
FIVFHHSTDHRASLLRTFSLIGFEIVRSGHPLVPTMPXGFLHGLQNRKRLQMVTNKTPQSHLASYNYAVSHPTWSPLKET

SEQ ID NO: 947781 - protein, 154 aa, Homo sapiens
LKNRRAATNLTALLLCKFKHPKEQTDLVRELDASPLSVVRVEVEISNGEKRQSFEAHLFRGFAAHETIIDVVMIIDAAAAHLQDTGLPGGALAVVGAGPFPERGEETGLCLQIETINLQGLSQDHAVVRDPMVGSEVFKPSIVRKSVSVPALTD

SEQ ID NO: 947782 - protein, 107 aa, Homo sapiens
DEVQDECPDLVDLSACNKEFRPFRDQLSLENDHRRRTTSEMSMASVASCSTIPPEVIRQKVKRQLTKQQKAAQRRRLHKGEANLVTKERRENQNNIKSSLETASFWG

SEQ ID NO: 947783 - protein, 113 aa, Homo sapiens
KAEYEGDGEPTIFVAVAGRSNGLGPVMSGNTAYPVINCPPVTPDWGAQDIWSSLRMPSGLGCSTVLSPEAAAQFAAQILGLNNHLIWAKLRAFRLNTWVSLKQGDKKMQDCSL

SEQ ID NO: 947784 - protein, 72 aa, Homo sapiens
ICRSNYAESSGYNYNIGLSMPYDTLSGPVDSMGLLDDWYCYLKDNLGSHRFKVILTVMYVFYGQIIDIACLC

SEQ ID NO: 947785 - protein, 139 aa, Homo sapiens
AAFFGVTELLGVDPLTNKLLFDALLSHVAQERAWMVRHVQYSCLGHIGCMDRPAYWAPGDTAPSARKPHRVIQGVHSGCLESRDGTRAARGFRGKVGDPDLLGESDGETLDVELNMGCCPLAGVESPNPRLRKRNSLVE

SEQ ID NO: 947786 - protein, 124 aa, Homo sapiens
  misc_feature (40)..(40): Xaa can be any naturally occurring amino acid
  misc_feature (46)..(46): Xaa can be any naturally occurring amino acid
  misc_feature (110)..(110): Xaa can be any naturally occurring amino acid
RGWWQGGVPQKEPPVLWAGVNPVPPLVENKKAQWVVIAPXVDPIEXVVFLPALGGKKGVPFCIIKGKARLGGLVPRKPGPPVAFTQGNWENKGALVKWVEAIGPHFHAQXNEIPRSWGGQCLGS

SEQ ID NO: 947787 - protein, 127 aa, Homo sapiens
MVKWDPCHGKNKPCGLLPRGEVVPKDVNGAFATIKTKGTIQFVDWCPPGLKVGINYQPPPGGPGGNLAKVQKAGGMLSNTPAVSKAWGCLAPKFALMYAKGAFVPWNVGEGMEEGEFSKAREEMAAP

SEQ ID NO: 947788 - protein, 100 aa, Homo sapiens
SNIQKLFFERINVFSPVEFNKVWVLPGFIKISLKTLLECVGLGPFGGFGFQQGKMDSPFLQFYLWGFLAHKKFVPFLLEKMVAFFALRCPNPLPMKPQLV

SEQ ID NO: 947789 - protein, 155 aa, Homo sapiens
  misc_feature (54)..(54): Xaa can be any naturally occurring amino acid
  misc_feature (83)..(84): Xaa can be any naturally occurring amino acid
  misc_feature (111)..(111): Xaa can be any naturally occurring amino acid
MGGKCSKEVAPATRGAIILAKLSMVPVRKGYWGNKIGKPPTVPCKGTGRCGFVXVRLIPAPRGTGIVSAPVPKKLLMMAGIDXXYPSARGCNAPLGNFAKATFDALFKTSXSLTPALWKETVFPKFPYQEFPDPLVKTPPKVSVQRTQAPAVGPT

SEQ ID NO: 947790 - protein, 114 aa, Homo sapiens
IGGLIEATPGLYQLPSGPNHAWKANAIGRGAKSGREFLEKNYSAKALCTDDLPLCWVIKALLEVVQSGGKNIELAVMRGDQSLKIFNPEEIEKYVAEIEKEKEETEKKNPKKAS

SEQ ID NO: 947791 - protein, 86 aa, Homo sapiens
GAHVQRVSQKFRGDGGGHQNNPQGSTGFPSGVFLPLRGKRAGVAPGWLPPRSPASQFFGKGKIYPPFGKKGERAPNFLSLGNPPLV

SEQ ID NO: 947792 - protein, 109 aa, Homo sapiens
RVVLVLRERWHFCRDGRVLLGSRALRERPLGLMGFQLLPLPFEENGGPREGLPPLKSFLRQKLPALGLRWGPEGGLGDYVGFRMAPPWGGGDLPFGSLGFGFSLKFLSF

SEQ ID NO: 947793 - protein, 75 aa, Homo sapiens
GFSLLKRNGDKPGPPPGGKRVGFPSPPVDSSSLRGNPGFFWAKCGKPNVVQAKNVVNPRGGLALGCASQKPPFFK

SEQ ID NO: 947794 - protein, 69 aa, Homo sapiens
  misc_feature (24)..(24): Xaa can be any naturally occurring amino acid
  misc_feature (69)..(69): Xaa can be any naturally occurring amino acid
VGPERVPAKTTEAAPAKMIFPKGXLSLNLTELPDPATDSEHTRTEGTKSFSLGRWKVLEMDGGGDRTTX

SEQ ID NO: 947795 - protein, 148 aa, Homo sapiens
  misc_feature (44)..(44): Xaa can be any naturally occurring amino acid
GFRLPPLARGGLFAPNPGVFQIVFPSPPLSQWAGGGAGGGVYTXPFFVPPHLRGDPPPWFLSPLKNPGAAPPPGFFPGAGGGFSFSPGAPLAPWALFGAPFGPVLPKNPGGPGPGFPGFFSPPGPFPPNFGGGRGFLGVPPPKGVSLG

SEQ ID NO: 947796 - protein, 75 aa, Homo sapiens
IDQAGLQREKDFRPKKVAALGSRGSAATEVEKETQRKMTILQTYFRQNRDEVLATLLAFVCDIRPEIHENSRING

SEQ ID NO: 947797 - protein, 100 aa, Homo sapiens
AQGGGGGQDNGLEGLGNHTQNMYMEFKGGDGYLAPEKGYFIEGCPGVKRLSFPFVGFGGVPAQPLGVIPSPNLGHLSLSSKGRCFICFGPLDLKKKLISC

SEQ ID NO: 947798 - protein, 64 aa, Homo sapiens
  misc_feature (7)..(7): Xaa can be any naturally occurring amino acid
  misc_feature (9)..(9): Xaa can be any naturally occurring amino acid
  misc_feature (36)..(36): Xaa can be any naturally occurring amino acid
  misc_feature (41)..(41): Xaa can be any naturally occurring amino acid
ASSATTXDXAQRVVLVLRERCLFSRAGRVLLGSRAXRERHXGLMGYQLLPLPFEELESQRGLPQ

SEQ ID NO: 947799 - protein, 73 aa, Homo sapiens
ASHPFELDGPFGVPKVVGKVLEFDSLTGEGPGKVFRKNPEFMETVAEKGLQEYRQKPPEELNVEVGFAPTGGF

SEQ ID NO: 947800 - protein, 134 aa, Homo sapiens
SPKKAKNQCKKADNYKNQNPSFPSKDHNSLLAREQNWMENEFDKLTEEASEGEYQQTLLRKKERVLTNCKEAKSLEKRLDELLTRITSLGKNIKDLMELKKQQHENFMKHTKVSIAESIKWKKGYQILKVNSKK

SEQ ID NO: 947801 - protein, 115 aa, Homo sapiens
  misc_feature (8)..(8): Xaa can be any naturally occurring amino acid
  misc_feature (18)..(18): Xaa can be any naturally occurring amino acid
  misc_feature (63)..(63): Xaa can be any naturally occurring amino acid
RPKAAPAXWGSSQHPSLXAALFAFWPPVGCGGAEQGGGQTQPLFSDLGLAKGLAPRASFSQGXPSPGPGPGISPRTVGPGTTSLVQIFPRETVVCCPPAWWFSPSPTSPLEKNVK

SEQ ID NO: 947802 - protein, 88 aa, Homo sapiens
EQIFPPFSPEGPQRLLPVLDKISPVPEIQGAHKYMGAHKNIGKFFLELPPVKEDGAGQEAPPPALSRANLEKIPNKQAQKPGASPQPV

SEQ ID NO: 947803 - protein, 163 aa, Homo sapiens
  misc_feature (38)..(38): Xaa can be any naturally occurring amino acid
  misc_feature (45)..(46): Xaa can be any naturally occurring amino acid
RVVKKVVGRRASPPQNSPGEKSLCPGVDQCFMASDPLXRMPGPPXXPKNSRVGGQRLASLTKFPLQKARGAPWWASHPFPERSIRTSLRGFLKTLFPGRERRDSSPPPPPKKNGFGALGENRGAGFKERKLTFFFPLGPRSGFFWGFKSFFVWVFFLKKGEKI

SEQ ID NO: 947804 - protein, 105 aa, Homo sapiens
  misc_feature (8)..(8): Xaa can be any naturally occurring amino acid
  misc_feature (20)..(20): Xaa can be any naturally occurring amino acid
SPRVPAAXGGWASLNVIGQXAPPSIQVFGGPFFTPGKTNDLLTKDCPPPEILTFVSSVLIKGPPPRARSQLCRPPPPPPTLHPFALPPWFHPLYTHIFIKKSMFC

SEQ ID NO: 947805 - protein, 85 aa, Homo sapiens
FQEEETTGHQQRSGVMKLPPEDGWEKKIQELLVSVLVTALIGKAEAIALTKPPAFKLCCGVYVTPPRGDPHLSLHTWGDRHGSGH

SEQ ID NO: 947806 - protein, 101 aa, Homo sapiens
  misc_feature (21)..(21): Xaa can be any naturally occurring amino acid
  misc_feature (32)..(32): Xaa can be any naturally occurring amino acid
  misc_feature (45)..(45): Xaa can be any naturally occurring amino acid
  misc_feature (54)..(54): Xaa can be any naturally occurring amino acid
  misc_feature (58)..(59): Xaa can be any naturally occurring amino acid
  misc_feature (68)..(68): Xaa can be any naturally occurring amino acid
  misc_feature (97)..(97): Xaa can be any naturally occurring amino acid
QKEDSVEKKRNKRERRGSTPXRKNSKREGERXQRKHRSRGSTHRXANKGGLSTXESRXXEAKKSQASXEKKAHREPIAQQKPKPKDSPGGGSTSQNXKRKK

SEQ ID NO: 947807 - protein, 118 aa, Homo sapiens
WLDGHHLVFGQIKKGLIFLGALGPFGSRNGNPPQKFPLSGWGPPQKVLLVFFFSPPIFPFVGGGGPPPPPFGPGFQKIFVVSPAVPFGVPFFLFPPPPPGGFRVFFFFFKLKFNTLFP

SEQ ID NO: 947808 - protein, 70 aa, Homo sapiens
AQQSTATAQGAAVLATLPVIFKKNKSSLIASVPLFSSCSSGLTNGCVSLFASLLGSQRNPGAHIEWPPDM

SEQ ID NO: 947809 - protein, 71 aa, Homo sapiens
FPGVGWAQRFGQGACRRGAPQACIEEQLCYSCRVNMKDLPSLDPLPPYFLVEAQLRPQRAWGLQEIRDFFI

SEQ ID NO: 947810 - protein, 116 aa, Homo sapiens
FSGGWGFFPANPRQWGAPFAQAILGLVGPGPVTPRVGLVLQLGGGALIFMFQLLGSVLPVCWASRVGGLPWFSCIPCPLPPSKERVLPEAPFPCGGLQRGPQCGPPCQKKIKARPA

SEQ ID NO: 947811 - protein, 30 aa, Homo sapiens
SPAITIAYGQSGPLMIDYLVFAVTRRTFNL

SEQ ID NO: 947812 - protein, 118 aa, Homo sapiens
ALQPLVNIRDFILERNPTNVKNVAKLINALQALLDIREFILERNPTNVKNVAKLFTVPHTLLDIREFILERNPTNLKNVAKLITGLQPLLNMRNHAGKKPDKHEECGKAFNQYLTLTK

SEQ ID NO: 947813 - protein, 162 aa, Homo sapiens
GPPVFLPFPGSKPKPRYGKGSSHQDEGSPISSPRPSKQGGFLLSQKSEEKWGWGPFGKSQFPRPPAFIGFARSPPPLFLGPARFFKKSFIFSGPLLIMGGGPGNSGGPGVVFQIAPLLRGPKGNPGGGGCFFPPCFFPPQGERFGGTPLFLFLKKYRFPPAS

SEQ ID NO: 947814 - protein, 142 aa, Homo sapiens
PGPSAGNDRLEPRPSERMHNIRGVRLPPGSYFGASAGTGDLSDHHDIISMKLFQLMVEHTPDEESIDWSKIEPSVNFLKSPKAPPVSSPPDNVDDPTGTFRSGPLTGWRVFLLLLCALLGIVVRALVGALVFQKRQERPKGF

SEQ ID NO: 947815 - protein, 107 aa, Homo sapiens
CPLPPPTPPNWFFRHTSEGPWPRGGPIQSVGGLRMLFLVYMNLVQGHTPLSAEWALSPWSWLPRSLAFRLCSQINRIFFTSTKNVDTHSCKNKHTKTHTDFRTIEPY

SEQ ID NO: 947816 - protein, 155 aa, Homo sapiens
  misc_feature (131)..(131): Xaa can be any naturally occurring amino acid
RFSLGAGVCGPTSSFIVLPPPSACGGRGWWGFINSAFVPCLGGPPPLFFSPINPGAASSVFFCGGGGNFFPGTLFPLAFLGLLRPVVQKRGGRGGFPGIFPPRAWCFSKGPTPFPVGGGGFYPAVGSTPTXIGGGVPTGPPPNFGVFGGKFLLFF

SEQ ID NO: 947817 - protein, 97 aa, Homo sapiens
  misc_feature (26)..(26): Xaa can be any naturally occurring amino acid
HHARLIFYIFSKDGVSPCWPGWSRFXDLVVHPPRPPKVLGLQAQATAPGRSPTLNNTPKRDSDDMHQDTCARIFTGHFCNNPKQETTAMSTSARKDK

SEQ ID NO: 947818 - protein, 86 aa, Homo sapiens
PLRIAPLGPVGVEALPPPEVAGRMLGGKVHGSLARAGKVKGQTPKGAHQEKKKKKPGRVKRGMQSTRGFVNVGPPFGKKKGPKAHF

SEQ ID NO: 947819 - protein, 111 aa, Homo sapiens
GTFFSPLPFSHDLGKGLPLFLTFRAGLRHSKWSFLEREPRSKGTERGVAEVRGNQESKISPCPQANVPGGRQEMLMCFYVRQCKHKKGGRKWRHTPASFTRRSHQSRCKEG

SEQ ID NO: 947820 - protein, 78 aa, Homo sapiens
MTVGTSLHLTECHSSFVDVCMVNAEHIFLTYAISGYREKLVVSKRERKPSPDTETCQSHDLGLSTFQTVRNKSLLLKP

SEQ ID NO: 947821 - protein, 99 aa, Homo sapiens
PLPGPRGPGIVSAPGPKKLFFMGGFDDCTPQPGGALPPWGILPRPPFMPFLRPKGTCPPPFGRGVFSPSFPFRGSLPPLSRPPPEFPVQGIQAPPVGPP

SEQ ID NO: 947822 - protein, 176 aa, Homo sapiens
  misc_feature (43)..(43): Xaa can be any naturally occurring amino acid
VNSHLGPSVVPQSRTKAKVSPSFCFPLFTPKPKAPKLENPSRXVTCPISGKPLGILDLTPVHFTPLNSSLARVGFFPPNERYFFSVTPNSLKNPPPWVFLGPFGVVVPLKWVEKFFWKKHGGPFYWKQIPSPRLFFFSAGGSRFSGFRSKTPNGKFPPGYPALSFWGSPNNPVWVP

SEQ ID NO: 947823 - protein, 108 aa, Homo sapiens
  misc_feature (29)..(29): Xaa can be any naturally occurring amino acid
  misc_feature (48)..(48): Xaa can be any naturally occurring amino acid
WPPGPCRLVNVAGTQKRPRGWGFVGLTLXVTPPPLRPHNKTFWPRWKXLGKLLLGLLAGGLVDGLGPHPCFLVLFILFPFPVLDLDLAPSPFFLGEWVEWSINPHVPV

SEQ ID NO: 947824 - protein, 34 aa, Homo sapiens
APKSRLKPVTMGWALQGPHSPPVGNGPGGWVGVN

SEQ ID NO: 947825 - protein, 72 aa, Homo sapiens
DFKWAQCKAVCVEAGMIAPAQGATEAPPPEDYMEGILEVQAKKKANLQYYAKGTQASPSLPAEVPNKKWFRV

SEQ ID NO: 947826 - protein, 88 aa, Homo sapiens
RGPGAGGRFCPPVPAPFGPPGEPVFPRNLPGGGAPPRGPCPPGGLGGGVSWARGGPTCGGVGSPPCALGLGARVSPLFPKKKKGFCRC

SEQ ID NO: 947827 - protein, 106 aa, Homo sapiens
PPGPPPGPPKKKKKLSPPPGGWGGNGEINRGPPPKGPLGKTPPGVLRDCPLGGPPFFGVWGGRSGSPPPVERAPPFGGFGGFSPFFFFLPRGGGGFRKKNGGPFFF

SEQ ID NO: 947828 - protein, 99 aa, Homo sapiens
LRPTRPVQKRKRLETAERFQKPLDRVIEMIQNCLASWPDDLPHSEAGMRVKTDPMEADDSTNCSGQNEPQRENSGHGRDQIIEKDAALGVLIDEMNESP

SEQ ID NO: 947829 - protein, 134 aa, Homo sapiens
PPLIKRLGRKTPPTLFRGSSLQQGARMGMLFFKKNPELLVRKKSSVLMPPPKRNPGRNKTRIFLTDFRKKIQFVAPSVNTFLSEKTGVSSQNTRKHFFVALAKQFVSYIFPRKPGGQPPGEAIFAPPIGLQGLP

SEQ ID NO: 947830 - protein, 104 aa, Homo sapiens
  misc_feature (7)..(7): Xaa can be any naturally occurring amino acid
  misc_feature (62)..(62): Xaa can be any naturally occurring amino acid
KPLPPQXCDHFPFFPSFHTEVPVFLCLRGPQVEVPCCLCPLKSEQFLAPVGRSRPKANSRPXCDKPRVEACPMKRLSPLKPLPLVGTFQRGRGLGDMKLGKPLF

SEQ ID NO: 947831 - protein, 121 aa, Homo sapiens
AAPVAVEPGATVGSLLSPGLLPHLWPAVGFKTKTVLKKGCKDCYLVKRGGGWDVFCKTHPGAKQRQMEPLSLQSQGQTCHRIPWGNGCILWEELSHQGVRGKGLEANALKVPPPVSGEMGN

SEQ ID NO: 947832 - protein, 111 aa, Homo sapiens
ATDSLFPWPAGGPLGFTCIRARLQKKVSPPKVSPQEFPRIVGRMFNQFHKLIEDKAKGQSIMGLKGFFKRGMKKALGDTKFFFVLGKPPPISLLGVGLSSQKFFGGPGNGP

SEQ ID NO: 947833 - protein, 161 aa, Homo sapiens
  misc_feature (108)..(108): Xaa can be any naturally occurring amino acid
MGFLHFYYDLTLCGLPEDPDLQVSAMQHQTVLELTETGVEAVAASAISVARTLVVFEVQQPFLFVLWDQQHKFPVFMGRVYDPRAWDLQDQVRASATSPASVLSGSHXGACMDIGACHLMLEVSGIHQKGSLRVWARDMLLLALGHGRAMVFQPLFGGLCR

SEQ ID NO: 947834 - protein, 94 aa, Homo sapiens
ILCGATVWCVLPWDQTLFAQTTKGLATGQGASSAILKTLPKRVVLVLRERGHFCRDAGVLLGSRALRERHQALMGYQLLPLPFEELESQRGLPQ

SEQ ID NO: 947835 - protein, 206 aa, Homo sapiens
DTPIPPEEPVFSIPVKPTPSDISVRQGKYNRLQTHTPGQFSLMKSPHALCEVPQIYVTFDITANGIVHVFAKYKGTGRDHQIVIQSSGGLSKDDFENMVKNAEKYAEKARRKKEQVEAVNMAEGIIPAQNPRWKNSRAIPLFMSAPSLKKNFSKMRGLLARKASETGKNISQAASFFHQASLKLFKMAYKKMAFEREGFGSFGPGD

SEQ ID NO: 947836 - protein, 115 aa, Homo sapiens
GGGGGSGGGFKKQSPFFSPPSCRGTPPPLFFPPKKNPGAVPPPGFFLGPGGGNNFPPGNSFPPGPFLGPPKNQFFPKNRGGPAPDSPGIFPPPAPPPQFFFSPLFKIKKKKGPPP

SEQ ID NO: 947837 - protein, 196 aa, Homo sapiens
CCPPVSVPSIPTKKRVEDPWHFPFPKGKGLKNKAANKFVASTSHLLLDLITFLTKYHSGHMTRASDIIERLKWVPLNRESVEERVVLSRNFSNEIRRNLSQVLLATMNILFTQFKRLKGTSPSSSSRPQRVIEDRDSQLGSQARTLITFVGMIPIPNRFGPPNSKVGADGGPHELSAMLCGSLGRHTVSTSGTWAH

SEQ ID NO: 947838 - protein, 78 aa, Homo sapiens
PKVSTPFIGWYPCNFNFRGNRPDIPNPQDGKETKAADPPVENLSAPEVEQGGVEKRRLTISPIIRFSHPTRRNMKFQQ

SEQ ID NO: 947839 - protein, 51 aa, Homo sapiens
SPQIPNYLPPEGRYNDITKVYTQVEFKKIDLPAAILHLLPLRVGINRAQVC

SEQ ID NO: 947840 - protein, 132 aa, Homo sapiens
PHPEFVECLYVNFDFDGAQTKLRECESVLVNDFFLVACLEDFIENARLFIFETFCRIHQCISINMLADKLNMTPEEAERWIVNLIRNARLDAKIDSKLGHVVMGNNAVSPYQQVIEKTKSLSFRTQMLALEF

SEQ ID NO: 947841 - protein, 150 aa, Homo sapiens
LPLPPTRAGVAFRPQPPVAFSAPPSRPSGRILWLAFIVPSPRFYFKPQPTGAGGWSWPFGAPSRVPGVPGAHVKVLFWGPPPLLGLKKIWGGGGPPHGGPGPPRPGWCFGPSVKTPGGGEVAPPKPRGNGGFPGFRKNPLRGGAPPPPLF

SEQ ID NO: 947842 - protein, 100 aa, Homo sapiens
RWDAADDIHRSLMVDHVTEVSQWMVGVKRLIAEKRSLFSKEAANEKKFAAPAEKNHTIPGFQQGLLFLGSPDSPDPISYALETFCHLGPFLPPPRLSPWA

SEQ ID NO: 947843 - protein, 114 aa, Homo sapiens
LPGVSKGPPPRPGCPGNQKEAKVKFAPGFEVRGKLETNLALNMPQQKKEEKARLLIGLSVGAKNPGKKSIFGGGKLFGDSSGSSTGFYFGSGSRDFWGGRGFPLSPRICGGQSP

SEQ ID NO: 947844 - protein, 198 aa, Homo sapiens
  misc_feature (59)..(59): Xaa can be any naturally occurring amino acid
GWKAGIVLPSPLVEGHRGAFPHLVFIPDGNRFFSGARKNVKLLCWDLRQFGYPLWSLGXKVPTNQRIYFDLDPPGQFLVSGSTSGPVFVWDPDGPANNGNPDPVLSFFPQKDCPNGVSLPPSLPFLAIASGQGVFPEPTKSGDKGKKLALPLFSRAQVPLKCRLQLWWCGGGPNSSIPYVPQGKKGQGGPEGGVGELK

SEQ ID NO: 947845 - protein, 92 aa, Homo sapiens
  misc_feature (30)..(30): Xaa can be any naturally occurring amino acid
RKAKLDAQVKKLVLSPPVKARRLVAASSKXTRQFENEKLFSGKRQKLVTKIAHIEMPCSPCPHPPGGPGCLHFFVAAKLGGSGRLGMEASES

SEQ ID NO: 947846 - protein, 106 aa, Homo sapiens
  misc_feature (7)..(7): Xaa can be any naturally occurring amino acid
PSGHPLXEDHDLVSPSPIADGDASRQRHRLYSWIGTGFLRQDQPLGREVLVDIWVRHSREGHRVGQVDPWNRMGQALTRPKPAPKESGKGLVSQGTPRAQELFLDR

SEQ ID NO: 947847 - protein, 97 aa, Homo sapiens
FCGWVPHKFKTTVCDIPPWGLKKAVPFIGKRTTLPGVFKGILGQFPALFPRKALPPWDPGEGMGEMGFPQGESHKNALVFEDHPAPDAPPKKEEVFG

SEQ ID NO: 947848 - protein, 138 aa, Homo sapiens
WNWSCRQLNFLLHRPHQKLILLNPLSLKCNPLFNLYHSKIYGTRPGVVARACGPGTLGGREGRITWGQEFKTRLGRRNEARSLLEMQKIGRAWWCAPVIPATREAEVGEPMEPRRWRLQWAGIVPLHSGLGNGARLHV

SEQ ID NO: 947849 - protein, 107 aa, Homo sapiens
PQVHGCVPPKSLRPHHREGAYLGPGFPHMFFMVHPEYRPKKPPNQFVPRFFGFKIHPMAYQVEFQAASNFKSPVKEILVIPSPPCPAVFDFSFFFCPPFRNPVWFLV

SEQ ID NO: 947850 - protein, 151 aa, Homo sapiens
DHFTYGLSDEIMQAHRQQLLLVSHDKLLSVADRYLGIGKSTHGLAILGPENQKIAKDPSWIIRGAAVALDCTGARVNTPPSWIEKVRNGAAFAQKPKAIGCRPSPPTATLGAQINPKSPQDTVRLDYHAWSAKDAPRRSFTLERQARFPSL

SEQ ID NO: 947851 - protein, 106 aa, Homo sapiens
GGGAFLGPLRGFFYFPFPGVRARGLPLERFAPPPGCGGGGFGPFLAQKLFLAPFWPPNLACGGGAPALPVGPPGGRVGPGPPFPGPPGGFFRGGGGGFFFFLFFFR

SEQ ID NO: 947852 - protein, 77 aa, Homo sapiens
  misc_feature (27)..(27): Xaa can be any naturally occurring amino acid
GRARGGVSPFDTVRAPIIMQSGRKGAXIMYTGPVACWRKIFKDEGGKPFFKGAWSNVLRGMGGPFVLVLYDELKKVI

SEQ ID NO: 947853 - protein, 126 aa, Homo sapiens
  misc_feature (124)..(125): Xaa can be any naturally occurring amino acid
GARAGAGGFGPKGGPPPPFLLHLKGVKTPFFFLDPGGGAAPGGRWILNQSPGLWGGFLWVFFLPAPALKGIFFLKKKRGGGPPPWFSLFGENTGVFFPPPGGGPGVFFKEGNFFSPPPLPPPLXXV

SEQ ID NO: 947854 - protein, 90 aa, Homo sapiens
LGEVGKIVFRFGYKLGTGPNFLQFGEAAIVNWVLGKPMCVEGFSHYPPLGRFAVRDIKQTVAVGVIKPVDKKVVGAGKVPQFAQKGQRGK

SEQ ID NO: 947855 - protein, 81 aa, Homo sapiens
  misc_feature (44)..(44): Xaa can be any naturally occurring amino acid
  misc_feature (51)..(51): Xaa can be any naturally occurring amino acid
SITSGELPGVVLAPPSGPLPKVGSTIMGGILLAFIEGVGILFTXEKAKQFXNGPPFVEDPSKLPLKDGTRAPGYPSYQQYP

SEQ ID NO: 947856 - protein, 191 aa, Homo sapiens
RGGGKPPPCFFLQKPRGPFHLPFFSWPGGGINFPGAHFPPLPLFGASITNLFQKTGGARAGFSGIFLPPGAPPRPLFLGPLKKRGSPWAPPGGFFFPPGGPWFSLWPPGWGGGGPLLPGGFFGGGAPPPQKGGPPLGGFPQTPPGGGGGFPPRGFWAGVFFFWKPRGGCFPPFFWGAPPGGFWGGFFFFAP

SEQ ID NO: 947857 - protein, 166 aa, Homo sapiens
  misc_feature (23)..(23): Xaa can be any naturally occurring amino acid
GNLLGEDQRFEATGTKVKGWLNXPCFKNWDGSPVSSWILLAESNSADDETAIPGRYQKYGYIGTHEYPHFFNRPSTLQAASTPQAEEDWTCTIFECQCILGERAPVLFGPVPSFSGGTFDPERTKLLSELVYNPGQNPGFLTPGLLCPLSYHRNIFPSPHFIPPIF

SEQ ID NO: 947858 - protein, 121 aa, Homo sapiens
  misc_feature (70)..(70): Xaa can be any naturally occurring amino acid
  misc_feature (77)..(77): Xaa can be any naturally occurring amino acid
FSPEPCHGLGRHLSAPSWWGWGPPPPPNKATTGRGPEGFWALRLSSGGPPEVSVAGSGIKGAPWRKRGPXKIVFGFXPLPPPPGGLGGGDPGGGVFPPPPGDQALFPALNNPPINFFFVNQ

SEQ ID NO: 947859 - protein, 169 aa, Homo sapiens
  misc_feature (36)..(36): Xaa can be any naturally occurring amino acid
QKWPLEAVAPQMDDMAMVLAREFFQALKELKVLVAXKALLDPPKSLGCTAFRGKVGVFFEMEANFKNLSRGVVKVAPKLPPNKNVKNLFVALGEKFGEPPRSAPWPLKEGGFFLNQDLGFVPSLEGFRPQALWGRYMGPPRGGLRGLFYDWGASPRPAPAANKVVLGLG

SEQ ID NO: 947860 - protein, 99 aa, Homo sapiens
QKGFFSPGPLFPPGGGGGFFGTPPGVFFLSPPPKKGKGGGRGGGGPPPGFRGGGFPPLFGPKFDFWGGGPPPSIGPPQGAGWFLSPLPRAPPGVFPGGG

SEQ ID NO: 947861 - protein, 112 aa, Homo sapiens
ADHRKHGKTLFVLCGYPGVQALVTGPFFNIGKQLGAGVPFFPPRWEELALKKLVTLMCLAPGLSPKEVLVCWLQGSKELPRKKSFIWVSGEGPSRGPPPFFVTRILGVEPKD

SEQ ID NO: 947862 - protein, 118 aa, Homo sapiens
LKNLENGGPLKGPPSFFLAGKPSPPGAPIIHLIFLTGPLAWPVFFPTRALGGKLGPPCEGGLFLKKLVGPRARALSHWLILFNPFLKKLPRLIFPPRKAQKMARFSICEKKGLGCFSP

SEQ ID NO: 947863 - protein, 135 aa, Homo sapiens
TPSTLPGFFCTKDGLQVQHGPPQQPRRRKATLDGRHPLRHRGCETEKGALACVNEQRPENCRNPPVICPQGSLKEVCKARNIKFWGYFFVYRPKWAQLIFGVFLYNGLKGKEKMLGRCAARVPRKCVLPLKILSC

SEQ ID NO: 947864 - protein, 101 aa, Homo sapiens
  misc_feature (46)..(46): Xaa can be any naturally occurring amino acid
PPPHIAKILWDRGPFCPRPGNRGPMGTFICPPRSFSPRDPQSTPKXGVEWQKAPPSPLLQEVCRELKPLGRGMPSWGCPHNLFYPPQPGPGLYVFCKITRF

SEQ ID NO: 947865 - protein, 116 aa, Homo sapiens
YVYIHVFAFCEYVLALITSSYVCVVDMLGYVFCSQSSLALVSVEDTQGGTAGVIAPGVLWGLLFVLVGFLFFFAGLVVFKTRGYIWVCLRFCVVYPVFLQSLILVCIVYVKGWGEG

SEQ ID NO: 947866 - protein, 94 aa, Homo sapiens
MLVLIAENTPYEISDSLPVIESVTIYFTLRFGVVIDRFSPGTIWNKLYPSKGYHSSSWWQALHVDIAFVSRREQIAPGGRMRMRRERAGEKEAA

SEQ ID NO: 947867 - protein, 96 aa, Homo sapiens
YPTNVRLNRGDSMPPVKRRRMNGIDPPDDVFYMPTEETRRIRKLFSSSETKRVVRRPNMTIALRQSQAFRSDHHHLRSPKMSQLSSKNRNNHRVRP

SEQ ID NO: 947868 - protein, 79 aa, Homo sapiens
ARCGGGGIGGLQVPGKCFLLRNLVSSQEAWGPPEKGDGGGVPSGKWAVCHHWPGTAPVGTVVDDWNFTIDLLLLFVIHK

SEQ ID NO: 947869 - protein, 124 aa, Homo sapiens
PVQKAVEGGDSILTPKSFFFGGIFLALLPLRPGPHPPIRGGGAPKRDPPVNSLGSPLPKHIGFIGIGGFNPLGSPKFKRNPPNPNNSSPGYYNFRGFFFSPPTSLKVFGVSLPHFRGDLGVNIF

SEQ ID NO: 947870 - protein, 163 aa, Homo sapiens
  misc_feature (122)..(122): Xaa can be any naturally occurring amino acid
RPGWGSIGPIVGCPRVGYHKKVGAGPGFSLEKFRVAGIYKKVARTMGIFVDPRRGNKSTESLQTKVQGLKEYRSKFIFFPRKPSAPKKGDSFVEELKLAPQLTGPVMPVRKVYKKEKARVIXEEEKNFKAFVSFRMARANARFLGIGAKKAKEAAEQDVEKKK

SEQ ID NO: 947871 - protein, 70 aa, Homo sapiens
RKHEIEAAIVRIMKSRKKMQPNVLVAEVTQQLKARFLPSPVVIKKRIEGLIEREYLARTPEVRKVYTYVA

SEQ ID NO: 947872 - protein, 111 aa, Homo sapiens
  misc_feature (60)..(60): Xaa can be any naturally occurring amino acid
  misc_feature (88)..(88): Xaa can be any naturally occurring amino acid
  misc_feature (95)..(95): Xaa can be any naturally occurring amino acid
MLCAGNTGRTIPGRFGRAPGVKVNGTWLQGGVVNWGKGCAQPNRLGIYTRVTYYLEWIHXYVPKKPGVRPGVSTWVIGEPAPLVQKTXGSYPGGXCAPTPFLPRPEGPFLS

SEQ ID NO: 947873 - protein, 51 aa, Homo sapiens
TGDKLTDRDIIVLQRGGTGFAGSGVKLQAEKSRPVNAGLSVCGRPNKPVWV

SEQ ID NO: 947874 - protein, 68 aa, Homo sapiens
LPHLPGLKNLGIQATPLELKAIEVLRGHRTYRWLFAEIEDVKPAKPVNISVPPEQLLVLGFFGSAHVV

SEQ ID NO: 947875 - protein, 108 aa, Homo sapiens
  misc_feature (63)..(63): Xaa can be any naturally occurring amino acid
PPPPPSRETRIIIRVLGREGATPPFNFGKFPPPPKGFQTPPGKKPCLVGVVSSLFSPSPWQGXGKQLLEPLWFPPPIPFGGGVFPSQKKTPGRGGSPPPPKKKSFARA

SEQ ID NO: 947876 - protein, 117 aa, Homo sapiens
  misc_feature (16)..(16): Xaa can be any naturally occurring amino acid
PPPPPPGGGKAGGFFXGVFSFPERGGGGKPPPPGAPPKGVSGVSPPPGGPPLFFKIGGGGGGGKGEKKGGDLSPRGGGGGFSPPPKKGGPFFFGGGGVSLSFPPFPGEKKIFFFFFL

SEQ ID NO: 947877 - protein, 90 aa, Homo sapiens
  misc_feature (83)..(83): Xaa can be any naturally occurring amino acid
LWGARGGGPESNKIVFWFFPGGVRGKNSLHEWGPSRGKQKVVPPGWPWGKKGEMEVFTTPSVGARPPVFQKKEKDSVGQPGFXARLIRGI

SEQ ID NO: 947878 - protein, 118 aa, Homo sapiens
  misc_feature (5)..(5): Xaa can be any naturally occurring amino acid
  misc_feature (12)..(12): Xaa can be any naturally occurring amino acid
  misc_feature (32)..(32): Xaa can be any naturally occurring amino acid
  misc_feature (52)..(52): Xaa can be any naturally occurring amino acid
GLNSXISPIFRXHPRPNLGQNPFHYHIHGGKXNFFPTTLFGPIRNAPRLLGXPRGIPHMKHPIIWRVIHFFNSRKINNFHDLRSLWFEGKSPNSRRTLHKLGEDYMEAPPPPTHLKNR

SEQ ID NO: 947879 - protein, 71 aa, Homo sapiens
  misc_feature (24)..(24): Xaa can be any naturally occurring amino acid
GSRWGPMFQLTLAPGTIKFHLGHXAMWGPMNVYGTQLNMFQPLKTVAILGSVTFLAGNRMLAHQPVKKPAH

SEQ ID NO: 947880 - protein, 105 aa, Homo sapiens
FFPPGGPGGVGGWGGLPGLPPPFPPGLGGGFSPTPPGFKGRGFRQGFWPPSSGLFFFQAPPGGPGVFGVKISLVPPQGGLDPGGGGFFPPGVPGGGFFFRAKGPL

SEQ ID NO: 947881 - protein, 155 aa, Homo sapiens
FPIPKARRKNKGKLGQFSGFTLWGEPITPPRNFAKAKKKPPGNHLVPQIMDLLYKNHFPILGGGHPAPFRPPFYGENGPLGDFFFFFLINQKQGPFPQGFFLPAPSVIFNRILGPRFQFRATAGQFLVFHPCLASGVATGFWGNPFVFFNKGQSW

SEQ ID NO: 947882 - protein, 76 aa, Homo sapiens
MRAVLAKVTSLGLKIPTVPGFDLLETPKNVGSLILCPRAEVLILQAFCQEVFGIFQEPTDLLREGDSLHLAKRVGG

SEQ ID NO: 947883 - protein, 46 aa, Homo sapiens
WKLARSAVTTVLWRLCPQVEQPPMSLFLSSLAIVTNPEVHYKNLVV

SEQ ID NO: 947884 - protein, 86 aa, Homo sapiens
LRVACQESYPIAEVQAKFVQDEQVNMRPWDDSVTHEPFKISSVVVIFGDGQKGASGFEKHHQLSVKHNYFLHVETTEGQWSAQYSR

SEQ ID NO: 947885 - protein, 173 aa, Homo sapiens
GIPLPTRILGTPAGPFEIKIGQPPVSFFLKAAGGIKKGARQTGKKVAGLVPLRHGYEIARIKAQDGAFAPQEAPLWFVVRPIMGLARFLGIGGGKAPSSKGVAAFQKERAFFRGGQKGADLGAQKKGAKKGPLPPPSPDFKGGGCKSGAQGGEGGPPKMRGGFMPLKEKFWDI

SEQ ID NO: 947886 - protein, 129 aa, Homo sapiens
INAHRKPHSGADRKRLRMTISTSLSGTRCAPANCTIAWPGSGYQDLPDGVATGQRIERSLISAIGRTPVAASPPAGARPATARYSAECRAPAPLNPIAANHRLGLGHQAHRRDGERIGRIGQANGDDAA

SEQ ID NO: 947887 - protein, 109 aa, Homo sapiens
  misc_feature (45)..(45): Xaa can be any naturally occurring amino acid
PTSFIHIPYPFPTKFSLHGRCLGKGGPPFPLVLIYRPRRAFNTHXDFSRVVRGEPAMGRSPTSPGLGFPVRSTGKQASSWKGQAWSLPFQYLRQFQFFVFFFLITKQFF

SEQ ID NO: 947888 - protein, 150 aa, Homo sapiens
LGKGSPSRWGENLFLPTLGTTFMFGKKFWGAVGSARFQEPIISLWNKSASAQAPPAGIGDTFGGGFTLPPTPIMEYKTPPASIKMPGRLAPQRLLFQTLWNPRLNVPCPSPFLEGPIIKAGVIGVSCFVGGPPGKPFFPGQKELEDLFFF

SEQ ID NO: 947889 - protein, 146 aa, Homo sapiens
RPLFFLSVGRPPKFPSRAPPGFFPPPGFSSCFRFFPTIFPGIFKIFWWAQRVSPYQGTPPVSNPFTLTLSLNPCFFKGSILLGAPLLPRFFANSKTLFSGGFFFKGGFLLTPRGGTPFFSKKSPLKMGGVLFFPLFSPPKGFFPLI

SEQ ID NO: 947890 - protein, 76 aa, Homo sapiens
  misc_feature (1)..(2): Xaa can be any naturally occurring amino acid
  misc_feature (37)..(38): Xaa can be any naturally occurring amino acid
  misc_feature (50)..(50): Xaa can be any naturally occurring amino acid
XXPPPPPVGRPKILFFSPGMVPGNIFPGTASVVNPPXXLGAIFLESHFLXDFAPLGKVAPGPWSSKIVSCEFCDSK

SEQ ID NO: 947891 - protein, 84 aa, Homo sapiens
RAHSRISAGPDQGETNRPGVIPAGGADALGRRLPRSVTELAWNEEFGALKAHPDSRADGDRLLRGNHVAGAMRVFTTPMHTPFV

SEQ ID NO: 947892 - protein, 87 aa, Homo sapiens
  misc_feature (13)..(13): Xaa can be any naturally occurring amino acid
  misc_feature (48)..(48): Xaa can be any naturally occurring amino acid
SAALGRSPRGTKXPEGQVASPGSELGSRGPPHEKGGLDGKAQKASPPXAFRWKAPSTTLVEVSALAWLPPDVAEGGFKPCVLRRGWP

SEQ ID NO: 947893 - protein, 81 aa, Homo sapiens
QRARCRISGNLDLVLTCGAEKGCPEVIVGLTGSEPWRGKRERDMRSEAAAEPAQWLSRGLTPAPPCASRIIWCQHSFSIPD

SEQ ID NO: 947894 - protein, 140 aa, Homo sapiens
  misc_feature (7)..(7): Xaa can be any naturally occurring amino acid
TEDVPGXRDERGVERHHHEVQHDARLGDQRHAADDHSKERDGRELSVSGVDSRFHALAPNMPCGRNSTTPMKMAKMPICPSDSPRYSPPSDSTTPTRKPPMSAPTKLPMPPSTTIVKATSTKPLADLRVDVVRGQQEASG

SEQ ID NO: 947895 - protein, 43 aa, Homo sapiens
LLSLALVPHQPELSSGSSTCRQGGINAYIILFEVNLKLFQDKS

SEQ ID NO: 947896 - protein, 44 aa, Homo sapiens
MTQRRQSAGSTSSEPGQAAAPPPAAWRQQKAAPEQRRRHRPPAA

SEQ ID NO: 947897 - protein, 90 aa, Homo sapiens
VALCADRDNSPLLTSHPPSRPFQPPKHTPSPPPAPRVNSRHPGRSVSLSLPSASQAPPVPLASPEGRPHTVRRPTRKYLEENKRTPAGAA

SEQ ID NO: 947898 - protein, 98 aa, Homo sapiens
GGGFGKGGFGMGGSGKNGMDSPGGFGPFGKMGMGPHSRGGEGPPQGLGGYAPGGGARGGFYGPGGQGGGGGGVLFLKPNPPQPGFAPGVGVEKAFSQI

SEQ ID NO: 947899 - protein, 101 aa, Homo sapiens
HLRRSHKSLLTYVEEDMGLRDSTFAGQVQDMMVNLHMILTDTVKMKEHQEDPEMLIDFMNRTGRGYQASPDPRMTWLQNMPGNQAELGIHAETATVHGARG

SEQ ID NO: 947900 - protein, 87 aa, Homo sapiens
MFRGLSNWLGLQQPVAGGGHPNGDAPPEQPSETVSEYAEEELQQAGDQELLLQAKDFGNYLFNFAFAPTKKITDSVAVTAQTIKKSV

SEQ ID NO: 947901 - protein, 50 aa, Homo sapiens
MSLQTRGVPLRMGRPWVPEIPSPRLAGGVGISRIGCKYDPYLMIKHKQSS

SEQ ID NO: 947902 - protein, 85 aa, Homo sapiens
  misc_feature (4)..(4): Xaa can be any naturally occurring amino acid
AQEXNPFRGAGQERVPQIKVYVPSVGGIAPENQFGFLAGGPLEKKALLGQWGGGALTPLEEAGRMFGGKVHGSLARVGKVKGQIP

SEQ ID NO: 947903 - protein, 53 aa, Homo sapiens
SKQVLNCEGRAVSGQKEEGSTLDRPTPPGRQGQRVRRSARGDLFRGVLSPSNR

SEQ ID NO: 947904 - protein, 85 aa, Homo sapiens
  misc_feature (14)..(14): Xaa can be any naturally occurring amino acid
  misc_feature (64)..(64): Xaa can be any naturally occurring amino acid
  misc_feature (71)..(71): Xaa can be any naturally occurring amino acid
VGVQGPPPPPGAGXSQGGPQPPGWPPPPTPVQRPAPESYQGKAPGKECPPRPLGGRPPPPPGPXAMGPPPXPPHKGKGLIDIFKS

SEQ ID NO: 947905 - protein, 40 aa, Homo sapiens
VNEVRMWGQCVIAPSPSMYHPGGMRLLSEAHGVQGGAGGG

SEQ ID NO: 947906 - protein, 182 aa, Homo sapiens
RPPAQGFGVLKATKASVQGPFILYDKGILRQIPEKTLPVGRSVDETLRLVQALPFPPKPGEGGPAGWKPGSDPLKPDVPKSQKYFSQPKWALGCFRARVRGAPLRTNPFLDFFFSLRKTPDFRFSRIVVSSQAGPFPPGVGKPPPSSFGRNGPSWGWGPATGLYDVLVEPPLYLLWFGLTLA

SEQ ID NO: 947907 - protein, 105 aa, Homo sapiens
PGFFYPRGPPRGGGRGAPPLGPPLGPPGAGGPPLFFLGGGPRFFPLFFPPGRGGVWGPPPLSKTPGFFGPPPLGGPGGPGPFFRGGGGPPFWVFLGEKTLFFFPP

SEQ ID NO: 947908 - protein, 113 aa, Homo sapiens
  misc_feature (104)..(104): Xaa can be any naturally occurring amino acid
GGFMKPGKARWLVLDKTKHQLRYSDHRVDTECKGVIDLAKVEAVAPGTPTMGAPKTVDEKAFFDVKTTRRVYNFCAQDVPSAQQWVDRIQRCLLEALAFQPWPXGLVSVVTHP

SEQ ID NO: 947909 - protein, 133 aa, Homo sapiens
  misc_feature (51)..(51): Xaa can be any naturally occurring amino acid
LSPEIKDVIEQLNLVPTWWQVQNLGIEEGNNFGVAVQKKVFELMTSLHTKXEGFHTQIFKYFFEGGDAVIKAAKQPHVGDYRQLVPKLDKAKSREIRLMVMEIPKAYVVLYDIILKNFEKLKKPRGETKGMFY

SEQ ID NO: 947910 - protein, 83 aa, Homo sapiens
PGLRAPGGSNKPPSESTQARREGPAPPLGFWVSAVLGTQGGRKEDLSFLFFASPPPFPGPGMNPFWGSFSLNAKALGGNEKAS

SEQ ID NO: 947911 - protein, 59 aa, Homo sapiens
  misc_feature (26)..(26): Xaa can be any naturally occurring amino acid
  misc_feature (40)..(40): Xaa can be any naturally occurring amino acid
ASVCLQIGLPKLFDQYPPFYINGVQXEFLALSVETDYTFXTAEKVKAFLADPFCLCGCC

SEQ ID NO: 947912 - protein, 36 aa, Homo sapiens
DEKLSPYGDGGDMGQILSCRLQDTNNFFGAGQNMRP

SEQ ID NO: 947913 - protein, 110 aa, Homo sapiens
  misc_feature (41)..(41): Xaa can be any naturally occurring amino acid
  misc_feature (59)..(59): Xaa can be any naturally occurring amino acid
  misc_feature (76)..(76): Xaa can be any naturally occurring amino acid
KCLKGKRVAFCPPGKGLPEGSWSNGKPSGLEGHPLFSKPEXGSPFSLEKSGDPLLPQLXWEGGNIIQACPQLSKSXTPPCGGGVKGSRFLSTLKLLPNSGLVFEIRSRKR

SEQ ID NO: 947914 - protein, 120 aa, Homo sapiens
PTGGESSFPLFFPPRVLRPPPFPPPFPFPPFPFPPPFFPGAASLGCLPGLGNPFNPPPSLEKIFSRFWAPIFFWFKPPKQRFNFPPKFGVPGGGPMKKFLLGIWVWCWTPPPPLGGTRSP

SEQ ID NO: 947915 - protein, 169 aa, Homo sapiens
  misc_feature (29)..(29): Xaa can be any naturally occurring amino acid
PAPGFGPPVPPSERGEGSCQPTPAFPLIXVGPWGSVPGQGGCVFLAVEGHPCPGSKKTEHPVLPPSLKVPVHFLEGDKWPGNLWLIGPSVKGEPSLGVLGPPPRVGPFSKKKGPKTKGKGGWKNPPQVWGPQGGPKMGFFFGPPRGAPNQFFLESRPGPGNTGERGGFL

SEQ ID NO: 947916 - protein, 90 aa, Homo sapiens
  misc_feature (56)..(56): Xaa can be any naturally occurring amino acid
GKRSDPKTLYLVIRVWWRKMSLLARVHSYPFDTVPRRIMMQSGAKGIYIMSPGPLXWWRKIARYKRGKAFFKGAWSNFLKGMGGAFGLFL

SEQ ID NO: 947917 - protein, 94 aa, Homo sapiens
HRPGGLGPPLPRGGRGGGFGPKGPPLLFLFGGKGAQIPYRVRGRFEVFGGTFPGRIAFSPNFGGGGGPPGGRAAPPGPAGGGFPPPFRGPRLGG

SEQ ID NO: 947918 - protein, 99 aa, Homo sapiens
  misc_feature (54)..(54): Xaa can be any naturally occurring amino acid
PAGELFLSPNYGLPRRFFLAGVVWGPIAPRRVGLPKGNLKGGGPIFFPTKVWFXRGVPGGEFSPEGFLFRVFFPAFFDRGPPGPWFKGVGGGWFFPPGT

SEQ ID NO: 947919 - protein, 167 aa, Homo sapiens
  misc_feature (72)..(72): Xaa can be any naturally occurring amino acid
  misc_feature (89)..(89): Xaa can be any naturally occurring amino acid
  misc_feature (149)..(150): Xaa can be any naturally occurring amino acid
KVTLKGFDFSPPVVGNSKKPSPVFLFYPSYPEKVRGVFAVGNEKNKAHFFTQGSAHSDTTADPACHASSFLXVHEPPLLYDLSKDPGEXYNLLGGVAGATPKVLQALKQLQLLKAQLNAVVTFGPSQVARGEDPPLQIVVILGAPPAQXXAIAQIPMPEGPSVGLGM

SEQ ID NO: 947920 - protein, 112 aa, Homo sapiens
  misc_feature (8)..(8): Xaa can be any naturally occurring amino acid
QSLVRARXIGFNPSPAPLAPPNPRGCGGLLYGLFCGRPGPQGVSLSSPPGGPAPPFFPIKAPLGAGGGMGNTPPPFPPLFFGGPRVPLVLAPPPRGGKVSPRGPGTLNLVPF

SEQ ID NO: 947921 - protein, 101 aa, Homo sapiens
PPPPFFRGPPLVLNPPGGGGGGPPPPPGGGGGGGQKGALGPPIFFFPPRGGGGPPPPPPPPGGGGFWFFPPEKQGGAPLAPPPPRFFFFFLGGGGRGVFFF

SEQ ID NO: 947922 - protein, 32 aa, Homo sapiens
LRNPIDRISQKGLPKKSQKDRGGKREKPSRRK

SEQ ID NO: 947923 - protein, 113 aa, Homo sapiens
  misc_feature (38)..(38): Xaa can be any naturally occurring amino acid
PHWFPRVPPKWAAQSKQPSFLFFGVPPLPFDPPFLGGXGFSPPRGGGFFWKDSLPVALGAPPPRLFGFPPIFFPNFLWGGGVYPWGGVFPPVRVFWGLAPFGGGFFFFPPPLP

SEQ ID NO: 947924 - protein, 154 aa, Homo sapiens
  misc_feature (9)..(10): Xaa can be any naturally occurring amino acid
MPLQMPKFXXGPLLSGPLVLSTKNLSHGPFFNRPPIPGVGFGGPVESHGDIGPPLDGEQGGCGGFPPFICLISPLGAPFGGGMVGRNPPFFIPFPFGEGGEKGGFPFPPFFPGPPPPPPSPPTQGPPFPCPLWAPLVFGICFPPRPRPLTSGEM

SEQ ID NO: 947925 - protein, 130 aa, Homo sapiens
KEKIVFGGPGNRSPVPDVRIPATRSVGKSFCAKVIKWFPAIFHGFKTWWHGVLAWVKERWWPWSIQGRPFGNSSKVFGVFCQRFLCPFSSPRRPPGGARRGFPPKSGLNPHPQNEEIDPPFALPVTGDPP

SEQ ID NO: 947926 - protein, 72 aa, Homo sapiens
ETPPRGPLSTGGGGGPFFFPPGPPKGLFGGSPPPRGGAKNSRIFRGAPPRGGGGPPPPQGNWGLFSPPPFPP

SEQ ID NO: 947927 - protein, 68 aa, Homo sapiens
  misc_feature (13)..(13): Xaa can be any naturally occurring amino acid
QSTVPIVGIVLGXAFLPVWYIETVVASVMCRGKSSGGKGGSYSKAACSDSAQGFYVFFQLEKPEPVVL

SEQ ID NO: 947928 - protein, 105 aa, Homo sapiens
  misc_feature (71)..(71): Xaa can be any naturally occurring amino acid
LVGRGAGFPKMQRRPLPLSKPGAASSLGIGAPLVLRWASPPAPPWGAWGKPGQGTKSWGHVEHPPTHFLGXGSPGPQVFPFVSPGGLCSLVRGGGDGGRRFFKGP

SEQ ID NO: 947929 - protein, 128 aa, Homo sapiens
  misc_feature (24)..(24): Xaa can be any naturally occurring amino acid
  misc_feature (42)..(42): Xaa can be any naturally occurring amino acid
  misc_feature (71)..(71): Xaa can be any naturally occurring amino acid
  misc_feature (76)..(76): Xaa can be any naturally occurring amino acid
  misc_feature (96)..(96): Xaa can be any naturally occurring amino acid
  misc_feature (109)..(109): Xaa can be any naturally occurring amino acid
GGAALNRGVNGKFKKGVFRIRAHXGPWGGFLYYNTFSPGKFXVKTKNGVGGFPRKPKEGGGGDGFIFRGFXGKKKXPPGGGPPQVFFSLFPRGKIXGGGPMPKVTPGFXGIPLPVPFELGGPFGGPKM

SEQ ID NO: 947930 - protein, 107 aa, Homo sapiens
  misc_feature (40)..(40): Xaa can be any naturally occurring amino acid
  misc_feature (54)..(54): Xaa can be any naturally occurring amino acid
GNFLHPPPGPQKAWVVRGFLPLAPSLGNPGPGCHPFVSKXGDPVGFPLFFPPAXGGLRGPPPWSKTPDFFGPSPLGGPEVLGPVFQEGGVSHFWVFLGKKNMIFVSL

SEQ ID NO: 947931 - protein, 129 aa, Homo sapiens
GPPPPPKWLKGATGWVPPPLPPGSSRDGAPFLFPPPKRGGKRGGQFFPPPPLKNWGGGPQGGPPKGFWGLFPPPKRGRKKGLWGPRFPPPPPPLKQGFLGPRAGGGGARENPPGGGVPPLGFFFKGPGG

SEQ ID NO: 947932 - protein, 153 aa, Homo sapiens
  misc_feature (30)..(30): Xaa can be any naturally occurring amino acid
PQRQCFGFSGPPVRAIFGPPCVSPSFPLCXRKGPLPRFGPWTGVSGTRMAQGLSLPATPPVWSPVPGLRFSQKHAELLSPFLRPRSPKSCISPRMSRPLLIKWATFWLDPPPPFAWNLGKKIVIMGLDGAPYALEGPPQSLLDSKSWIKEMPF

SEQ ID NO: 947933 - protein, 168 aa, Homo sapiens
  misc_feature (80)..(80): Xaa can be any naturally occurring amino acid
RNTLFPKIISSGSAPEVVEGAPPHYPALEHFVDNSVFQRPRNLGELCQRLVRNVKNIQSKYVFVFLGLILYCVGTSPMLXVALAVFLGACYIFYLGPLESKLVLFGQKVSPGHQYVLGGGISFPFFWVGGGGSPFFWVLGTPLVVLGPPLPFPQIEVVDGEELQMEPV

SEQ ID NO: 947934 - protein, 108 aa, Homo sapiens
  misc_feature (66)..(66): Xaa can be any naturally occurring amino acid
GPCVFPPKQRGFFFSRPPPPENAFFLYPNRAFPVAKPQVVSKTKDTRSLFWGWGPPPEPLPPPQFXKKKKFNIRGLGPFPLNPLGKKFFFSRVWPPQGGFPPRGAPFF

SEQ ID NO: 947935 - protein, 120 aa, Homo sapiens
  misc_feature (26)..(26): Xaa can be any naturally occurring amino acid
  misc_feature (62)..(62): Xaa can be any naturally occurring amino acid
KEGNDQMLTARQNQQLFVGMVPTNVXDSRFDIPPCGLKMAVPFIGNSPPIQELFKGILEQFXAMFPRKAFLPWYTGEGMDKMEFPEVESNMNALVFENHQYQDAPPKKEEDFGEEAKKEA

SEQ ID NO: 947936 - protein, 69 aa, Homo sapiens
  misc_feature (62)..(62): Xaa can be any naturally occurring amino acid
  misc_feature (69)..(69): Xaa can be any naturally occurring amino acid
GSHSSWLFALLHKIGRLLIEKVLGELKQEDLATDNVMVLDTGTRFLFGLERIFKKKKKQKPXLLLNGTX

SEQ ID NO: 947937 - protein, 124 aa, Homo sapiens
GAPSVTGKIGPDIQDNKCSWLVVQCLQRATPDQSQILKENYGQKEVLKVARVKALYKELDLPPVFFQYEEASSSPIFVFIEQYAAPLPPPVFLGLGGKFSKRRKCPKDCKGGERGFSINNRVPL

SEQ ID NO: 947938 - protein, 112 aa, Homo sapiens
VGVRLPPPKFHTPPLSRMEFFGPNHVVPQSRFWDFVSPLKNMKKFSGEIVYCGQVFKKSPLRVKNFGFWVGYNSRKGPPNMYREIRALPPPGVFTQCYQKMGARPRARAPSI

SEQ ID NO: 947939 - protein, 38 aa, Homo sapiens
VEYSSDRAPRVSPIGAYHCEQRGRRAEEGREKRRVLRP

SEQ ID NO: 947940 - protein, 98 aa, Homo sapiens
GSSKLPAQASCHTTVPVGPVVVFPGAGVFSLGAKEGAVGFLKEEGPQVLGGPGFIPGVGGSGGSKDFYTTRGQSGGSSARGWGGSYKNSFAGFVSPKG

SEQ ID NO: 947941 - protein, 54 aa, Homo sapiens
MRLRLPRRESLVCDVSRPLSPLLGFRESDSAKPGIVSPPTTHPEREKKLQDCRG

SEQ ID NO: 947942 - protein, 122 aa, Homo sapiens
RGFFYPFPPATIFNNMAKISEAPKTVEQLKLEVTLARIKVFQAPAEFLAFLETHAKNYPLVTPVPPGENPFRDKGLFFVLFEPSGQVSLPCPSMDPINLVTLVGPVLLGGFRPAQSLGPPLG

SEQ ID NO: 947943 - protein, 182 aa, Homo sapiens
  misc_feature (47)..(47): Xaa can be any naturally occurring amino acid
TPVPPAHPLGDARFETHSGAVGWPWRLWTQARISRPPLTMVWFAACXSGTGQGLVAHFLAPPNQGKKEEFWTGGPWSQMAKGCQLPFLCGLCPVPLEKMDAQRASPPGLGSRNRQQKLGALGPWGVVPLKPTLALAPNCFFSFLGLSSLALSPPSTQVSCSKHSPLPLPFSPPIAAPPGLLV

SEQ ID NO: 947944 - protein, 61 aa, Homo sapiens
QQHRVSALRTRGLRGSGPETGSPLGSTERAFNELSENFFLNYKNAKLNKAPNLLEIKYELA

SEQ ID NO: 947945 - protein, 97 aa, Homo sapiens
TSQPSQPGVCQCRISDPSTSRKDHRVTKMCASSCDFVKRHFFSDNLMGFINFGILKVHVDSCKKDFCNGAAGAGHSPWALAGGFLFSLGPALLWGGP

SEQ ID NO: 947946 - protein, 108 aa, Homo sapiens
MRPIKLQDQARRSRCVRDLVHSLPATNHDTLRMLFQHFCRVIEHGEQTRMSVQSVANVFGPTLMRPEVEETSMPMTMVYQNQVVELIMQQCAEIFPPHCLLACDWGGG

SEQ ID NO: 947947 - protein, 88 aa, Homo sapiens
GARLVEVPPDRCRFLLAPCADLAEDTNGRNSQGIPIRIGDGGGTTGGRALKLSPEAEAVTGAAQMPSDKTIGGGDDYFKIFFSEKGDG

SEQ ID NO: 947948 - protein, 115 aa, Homo sapiens
  misc_feature (52)..(52): Xaa can be any naturally occurring amino acid
PSYPGTLCPAPEKAPFFFFIYEVEPSRTKPFPRKKLGDRKAQRPMLEFLTQXDGFQPNPQVKVIAPPNRVDFLDPPLLRWGPLARKIKFPMPNEEARAKFMQFPSRKMNVSPDVN

SEQ ID NO: 947949 - protein, 125 aa, Homo sapiens
  misc_feature (87)..(87): Xaa can be any naturally occurring amino acid
  misc_feature (90)..(90): Xaa can be any naturally occurring amino acid
  misc_feature (117)..(117): Xaa can be any naturally occurring amino acid
  misc_feature (121)..(121): Xaa can be any naturally occurring amino acid
MAWTISRPDAVAYPIMQPVPFLSNNKKEGVLAWEETVAREKASRGTYQETSVLVSSRTPKGGAIEGHLTFGQENGPLHLGNVVHSRXRIXSLAVVGPRMKNAEDSLSIRRDLSALHXASTXRFEK

SEQ ID NO: 947950 - protein, 44 aa, Homo sapiens
CGLRGRAGSIQLRPGGPAADQMVGVETRLLTPPCMQRHMEAVRP

SEQ ID NO: 947951 - protein, 70 aa, Homo sapiens
GQDPFLNPSNPPWTPANGGKSPRKFSHSFIATKAQKNLLIGTATCLAGVYVCRDERSDKSVSVEKEIRDG

SEQ ID NO: 947952 - protein, 131 aa, Homo sapiens
  misc_feature (86)..(86): Xaa can be any naturally occurring amino acid
LGTGRRTDGRRGPYPSPRAMAERKQSGKAAEDEEVPAFFKNLGSGSPKPRQKFCGMFCPVEGSSENKTIDFDSLSVGRGSGQVVAXQRDVAHLGPDPQPPYSRQGRRAGGEPSVESGRKVEIRRASGKEAL

SEQ ID NO: 947953 - protein, 60 aa, Homo sapiens
CREVIQKTGKHESLVDAPEAQLLLEERPEHVCGAVQLTGAVVNEHIGEDARVPIEEELAT

SEQ ID NO: 947954 - protein, 140 aa, Homo sapiens
MSKRERGGSFGAKFRISLGFRVGAVINCADNTGAKNLYIISVKGIKGRLNKFPAVGVGKMVMATVKKGKPEFRKKVHPPVVICQRKSSRKKKGVFFFFENKAGVIVTNKGEMKGFAITGPVAKECANLGPRIASNVGSIA

SEQ ID NO: 947955 - protein, 89 aa, Homo sapiens
MTHRNPQKDHVEGVAQQQRESHELSRQERCLQSEQSEEVDPHPRTAAVPHVHQHEREGLPQEEQPAQEAQEDQKDAPDEKHEDEDGRAA

SEQ ID NO: 947956 - protein, 102 aa, Homo sapiens
MLSRVHTERDRGRGIRREREVGPESARPRLHRRLEEELGFAGLGREMPLDPRREQTRVAGGRATGRGPQCAEAWRERSRTAEVHSCAHTVQGHPSLTDFVRP

SEQ ID NO: 947957 - protein, 69 aa, Homo sapiens
KNPGAGPPPGFFPRPGGGIPFSPGNRFAPWAPFGAPKKPGWPKKPGGAGPGFPGIWPPPGPAHLGQKGN

SEQ ID NO: 947958 - protein, 106 aa, Homo sapiens
RGLSLGPMAPGKVLHQQDPFEGLQGFPRSPPLRAPQCPSSLLGLVPSPPQGLGLLGAKGPLVFSSLTIPDQGHPRPLVICKNFYWPQFSSELGGPFGSPSSVITWG

SEQ ID NO: 947959 - protein, 103 aa, Homo sapiens
FFPSRSGDRMLAFWDSGPQRFRPGPSWPFRLFGVLGPGVPVFLPALRELFSLGTPCNFPFRIPGQGKAGCFRPTNFLTCFVFCHPCFFFKNTLPSPPATPLSV

SEQ ID NO: 947960 - protein, 181 aa, Homo sapiens
WLLLGRIGAEWGTKGLFAGFLPGIKRGAPSWAIMISTYGFGKRFFQRLNQARLLGGLKGQGGKDPVFPPDGERAGGNPPKGLFLSLKGGGLFPFPPGDKVQGRGVPLGGPAFPQTKFFPGGPVGGIIIYPPPKFKTKFSRGPLWVSLGLGEGGMFPGTKKPPPGGVSLPLVNSLSLKMMNF

SEQ ID NO: 947961 - protein, 181 aa, Homo sapiens
QTFSICYPKTGLLGAHFVCDRMKIDDMMFVLQGQWMGLCTSAPESEVARGKNILKNALVFYLNGTTPVCEDIGSSLLTYGPRIPLVNGKAGLRRWMPVWYVKFVPSTFMTSAHQWLDMAPFNSSQITTGSVGACFGWVFRGEAYVSKRAGPGFVVPPPPQTQHLGSFNLCPRCPPIKSFVE

SEQ ID NO: 947962 - protein, 133 aa, Homo sapiens
  misc_feature (10)..(10): Xaa can be any naturally occurring amino acid
  misc_feature (101)..(101): Xaa can be any naturally occurring amino acid
MRPPGFQLRXGGRCALARVFGKLAVHGAKHGVEDFSVSQTMLEEVFLYFSKDQGKDEDPQKQKEAGVGVDPGPGLQHPKRVSQFLDDPSTAENVFLASLPXGAAGRPWEWQGQGKVPRSPGLRLAKGVVPWRK

SEQ ID NO: 947963 - protein, 191 aa, Homo sapiens
  misc_feature (53)..(53): Xaa can be any naturally occurring amino acid
MWFSWAFNPVEFWCLLYCGGGVCVSVGVPLGEKEKGFLYGVLGIKVNHRRGEXVWALYQELLCSGRLVFLAFGARRLLVGHHPWDRLLGHCERHLPNGGCGWRTVDPIEPKPRERPQIGGTIKKPPHENPPPGPPAEARKKPSKEEVAAAGGGPPGGPQVNPIPVTEEVVDLAPDLPSRQVHPPAINAGKP

SEQ ID NO: 947964 - protein, 175 aa, Homo sapiens
MPSHNGHKEIIGLNDPGLPLKSTMGSDLSPDMRVFMRCFVLRALITDLYIHAPNEWTFLRIRYKKDDFMDAAKLRLFIECDLESIRICHSVGYLLSFLNVVPAKNVNANHVCGLSHGRRLEPTHTSTVTCVGWRLYSLTNGTAVCSNLIQSCRALYAHYQVLDHELARSPARAMF

SEQ ID NO: 947965 - protein, 37 aa, Homo sapiens
HRGKLETARARAEKVTGELSDLTVQIDELQEQTRDAR

SEQ ID NO: 947966 - protein, 120 aa, Homo sapiens
GLVVVHAEVGTTSKYFVSSGSIAVNADSSVQLLAQKARYLLDMLDLGAAKANLEKAQAELVGTADEATRAEIQIRIEANEALVKALEEASQPPRLTSVWEPPLDELPPAPAPLKTRKHEK

SEQ ID NO: 947967 - protein, 108 aa, Homo sapiens
GGGPPPPPPPFLRGARGPGLGPRGGGGVPPPPPPPPRGGAGFFKGGERDPKFFFFFFPPGNKGGFFFLGPPPLFLGGGGFPKKGGFFFPLFFPPPPGFFFFFWVFLGG

SEQ ID NO: 947968 - protein, 106 aa, Homo sapiens
LRPPRVIFWKLWVCRGGLGEGPSLGGLILDFEPLPRGKRQVVFRQMKKAQFGEWGGVLHAHGGRGVGVLGPVLKPMVWPHGWHGRVGVGVGPPKMFWGGLPMGTLS

SEQ ID NO: 947969 - protein, 103 aa, Homo sapiens
LIFSTQPGLGVQGCCPLQGSSPLHLFCGSQTLGANESCLKRELVARQLGTGQWDRAWPGGHSDPWLFNAGCIRTFVTLAVCFVCSLFVLCGCSFFFPLRNCIS

SEQ ID NO: 947970 - protein, 124 aa, Homo sapiens
FTSSSRTVPTEVCPTSVAEGRHNTPWAATRWAKKIEARERKAEMTDFDRFKVMKAKKMRHRIIKNEVKELQKSALLKASPKKAPGTWVLLLLVLLQRLLIVVKVPAKKVPSASEKAPAHKVPAL

SEQ ID NO: 947971 - protein, 90 aa, Homo sapiens
GPMQLTLGGAPVGAGPVLAASLFWACAVGLYMGQLELDVELVPEDDGTASAEGLDEGGSAATRVSDTAVGLGRRWTGPEDWDIKPALPSS

SEQ ID NO: 947972 - protein, 65 aa, Homo sapiens
YRFLVMFATNREYTALHWGLRISGPPREVGPARSLGVWHVPTGSAGPFYGVIGCFLLYFIKKGSH

SEQ ID NO: 947973 - protein, 45 aa, Homo sapiens
MDSQPYSNRGTKKEELVPFLLKLFQTIEKEGLLSNSFYHISIILI

SEQ ID NO: 947974 - protein, 100 aa, Homo sapiens
APAKVALALSPGVPPGVFGKKGPLWPPPARQARVPPWVSKALGPRPPFVLAWAPHLRGGLAFGVPPLLCEVPCGCHHGFRDLGQRERGGPGCVDIKSALL

SEQ ID NO: 947975 - protein, 68 aa, Homo sapiens
  misc_feature (28)..(28): Xaa can be any naturally occurring amino acid
LLCVPHWRRLLNALFSRAPPLEDTEGHXYLCYVAPAFFQWGGGRPILPSPPTTRTPFFCPLGNNKPNQ

SEQ ID NO: 947976 - protein, 109 aa, Homo sapiens
  misc_feature (56)..(56): Xaa can be any naturally occurring amino acid
GGGGPLGSPPPPPGGFFHPPPPRFFSPGGPGPPPPPLGFFGGGAPPPGERVFPPPXFFFSRGGGVPPPNYRPGGGGVPPPFPPGGGGGGPPGVFFFFGGFFFNYPGGGP

SEQ ID NO: 947977 - protein, 105 aa, Homo sapiens
HALGLFLNIEVTRLPKKAGFFPPSPESPYTPLKQRVFYMEGLPFPEDGRGDFLGTIGMRPNAQEQPGLGFPPSTGLQGPAVGVVLLPRIPDGLRPGFPPLHKPRG

SEQ ID NO: 947978 - protein, 139 aa, Homo sapiens
CAPPAAGQQQPPREPPAAPGAWRQQIQWENNGQVFSLMSLGSQYQRQRRRDPGAAVPGAANASAQQRRTLIVLSRDNRTTEALKVDDRLIWSHRSLPQAHRPCNGSKLATRHLEPEKVAHLRAETLTAPRKVHALSNLR

SEQ ID NO: 947979 - protein, 39 aa, Homo sapiens
TSAVRISSASVLHDRIRDDWDRPILFLSLNPDIITGFPS

SEQ ID NO: 947980 - protein, 31 aa, Homo sapiens
MEGGDTGVHEDMRRPWAAASYCLSTMSVSAA

SEQ ID NO: 947981 - protein, 147 aa, Homo sapiens
LAGLNRSQFSNQQGLEEHAHKIEILMEATEGNRGVFSAIVSDEALTPWVPLCPATDVVDAPRDDHPIVTGLVVRADFSQQKVGSGAPECADPSRGPGSPTPPMLHARVMGIPGGGRGPSKTPREAKSAPGHRLRRRPLHRPRPTAAA

SEQ ID NO: 947982 - protein, 40 aa, Homo sapiens
IHISITTFIPQTPIERLLMRLYPSASVRPRQPCENTISAA

SEQ ID NO: 947983 - protein, 95 aa, Homo sapiens
CVGRSVVAADIRGLVCIGGHHIVVVLVRAETRTQIRLSTLQRLHERITHLTLEQTRRLMGGTVAPAGAGVEFASSSTVCHAEGIILGLRTEVQAA

SEQ ID NO: 947984 - protein, 71 aa, Homo sapiens
CRERTVIPQNPEMEEEEEEQEGHGGAGDSPAEAAPVTTMSEKQPAHASGVTAPHGAVLFWARHEIPSYRCG

SEQ ID NO: 947985 - protein, 34 aa, Homo sapiens
MPALFSRAGPGAGICLGLLRGGSGDVGGMDCHAA

SEQ ID NO: 947986 - protein, 75 aa, Homo sapiens
MSKNVDDMLKPPGRETIPERIVLIMRGLPGSRTTHLAKLFRAKEAEFGRPSPRGLILHAYFTTQVENEEKEPVSG

SEQ ID NO: 947987 - protein, 35 aa, Homo sapiens
LPTYVVLALVVVALEKVVCLVQRIKGPRPSAARVR

SEQ ID NO: 947988 - protein, 46 aa, Homo sapiens
MASLSVLSRPYRTTRCVGRCRTRACTAMLSGGASFPEKENKKFIID

SEQ ID NO: 947989 - protein, 59 aa, Homo sapiens
SDLGWGRTWGVQNNIVTTRYLAFRGGCETDLDPMPEIRWRMHNNQMTVGSTIGWGPTPL

SEQ ID NO: 947990 - protein, 43 aa, Homo sapiens
VEEAPDLGQLKVREVRAPLRSVTWVMVRNVLLHVKRDVVGKAA

SEQ ID NO: 947991 - protein, 80 aa, Homo sapiens
GCPSRDRRDVPCAPKESGTGYPDQSHCGHGAPELCSMMPRDPTSGCCHLKHSTDRSDKWVPRPNRMCSRMVGVGTVTLRI

SEQ ID NO: 947992 - protein, 78 aa, Homo sapiens
ASASHRFLKPQLPGVGPLLGVALQEQGKLTHRELDGCVNGTASRRYLEEGKGNEMNEMNPCTAREHLHPDTLLQGEGR

SEQ ID NO: 947993 - protein, 89 aa, Homo sapiens
MVLEMGFTGMPTDKFIASTVWKNDALCKPQHHPTRDQHDTLFNREPTEALQLPMATVQRVKRTHSQGGDGSQGYKYKWKLDEDRKNVCG

SEQ ID NO: 947994 - protein, 91 aa, Homo sapiens
LQPEEDDDEDEEDDDDSSQAYDSSERDFSLIDDHMILANSDTSEVNDEEAPAWAPFNRRLLYFHVIWPMDYGNVGGAGEMCRSPGLQEVER

SEQ ID NO: 947995 - protein, 123 aa, Homo sapiens
PYPGVCLTGGGGPFFLKTKRGYSVGPCFFQKIPGGPGGPTGRAKPGGPLARGIKVSPPPPGPPGGPGGVGGPLPKNLFGGPIKKLGPKKKPAKKGALRRLRGVFFPLPRGPPLFFVPPPPLCF

SEQ ID NO: 947996 - protein, 98 aa, Homo sapiens
  misc_feature (73)..(73): Xaa can be any naturally occurring amino acid
FAVRWSPVRPLVFAAAFGKGDGQLFDFQKSSQKPPVLIKQTQDESPVYCLEFNSQQTQFLVAGDAQGPVKVGXLAQSFREQGPREVEDLDCLATKVAA

SEQ ID NO: 947997 - protein, 132 aa, Homo sapiens
KFHIHAIGIGKCKRRIVKCGKLHKKGRKLCVYAFKGETIKDALCKDGRFLSFLENDDWKLIGPNDPIEESTQPVYEVEARSFQVEVEKRMVPSAAAWQNPESEKRSTCVLRGQIVAQHPSLKSASETIIGIF

SEQ ID NO: 947998 - protein, 100 aa, Homo sapiens
DARDLCAKETKMLMVSGDKDGDGKIGVDEISTLVGESEEALTAHGVAPACREHPIAARFATLVHLCSVGEGSFVLPHPLWPSNVTICVEIVGEAIRVGPV

SEQ ID NO: 947999 - protein, 48 aa, Homo sapiens
LVSGRELNGQVAQIVLRESVEAEVMVKGDPAAAPRHSGALPKRGALRP

SEQ ID NO: 948000 - protein, 55 aa, Homo sapiens
CCSMRSDRTMEMEFEDGEVSKGAARVSRKRFHTAPIILASIIRHQSSSDLKGWRP

SEQ ID NO: 948001 - protein, 51 aa, Homo sapiens
ASSTDAPTLGQGRQCACERPFARQPVAGPQGEAQARMAPGRAVTGLLWLAA

SEQ ID NO: 948002 - protein, 33 aa, Homo sapiens
PVLMVHRAHCLHGQMTHGLAPSLPGASVGKLGA

SEQ ID NO: 948003 - protein, 68 aa, Homo sapiens
SDCPQCFIIRMHGCVLVPVDPGIFVCPLEQVWSVTVCHHRGVVRNGRVRQPGAVVLNLTIKLFSPRKE

SEQ ID NO: 948004 - protein, 34 aa, Homo sapiens
THIRTLLCYIHVTRTQIGPFNTFRTDICGMKKGV

SEQ ID NO: 948005 - protein, 102 aa, Homo sapiens
WKPPSNFCTAPQNAPTLELELDVKGQAWKLSTSVPGVSKSDLGSAKPPEIAREVGGICDCLEGWGCALPRNLQHPDPQLMEKHGAESRTRNPAQTPVPWLEF

SEQ ID NO: 948006 - protein, 52 aa, Homo sapiens
LWRSNIFRDKPRRSPLVKGRQVLELLQLLRVVSPPLMLPTSLQLLLRRLTRP

SEQ ID NO: 948007 - protein, 106 aa, Homo sapiens
PFGGFGFHQGQVDAPFFRFSLGGFLAPKKFGPFLLGKVGAFFPLGVPNPWAHGAPFGLGFFGGGVGAPPSHARVFPCPPWAPGFGLGGLSPRGGFGAGLLKIWGLP

SEQ ID NO: 948008 - protein, 32 aa, Homo sapiens
EPGSPDGVFPRPGGKFWENSGPPFLEKLPGGP

SEQ ID NO: 948009 - protein, 68 aa, Homo sapiens
KKGGPPGGGGEAPLIKGGEPPGPRPPNFGVFFPPGPPGPKGGGFFLKTGAPQKKKRGGRKWFTFGPQK

SEQ ID NO: 948010 - protein, 82 aa, Homo sapiens
IIGAVGIGIPVVMIFGMIQNDLVLCYPQDPRNGLESAYIPEQESLPMKIGGIFGWFVLFGWLFVVCFFAPNFSIHSALLDKS

SEQ ID NO: 948011 - protein, 153 aa, Homo sapiens
KGEPENHGGSPFPPPGVGLPKTGSPSLCVLRVFFPTHFPWVGGAVGRGGKIPNPPLPGGVPGVFFFFKRSSPGPKAGGRGGVFFFFLFGLGFCPPPPRKRPFPFFGGKGGGGGEPPLPRVFWFGGGGLGGPPFYFFRGARGGIYSPPGSLGPP

SEQ ID NO: 948012 - protein, 117 aa, Homo sapiens
  misc_feature (64)..(64): Xaa can be any naturally occurring amino acid
  misc_feature (71)..(71): Xaa can be any naturally occurring amino acid
AGKWCPQKNKKFVESINFRPHLVIKSGKYVLGPHTPLKMISQGKGKLVIFAHPGPALGKFEKGXYAMWAKXGVPPPRGKNIERGPAWGKNSRGGPRAFIDPGGFALFRGRPDQTGEK

SEQ ID NO: 948013 - protein, 111 aa, Homo sapiens
MKIHSVKGQRCPDHTPKSSKPASRTWSRRAGGSVNIRGTLLILGPSSTSCGSITKDSRTRLISQTWEHCHCHSGAYMDKTKLAWLFGPGVPFPRILRAFCGNLSLKVKNNS

SEQ ID NO: 948014 - protein, 216 aa, Homo sapiens
SSHDNVGFVTQDAGTSAKAAISDSATRSLSPDVDPVLAFQREGFGRQSMSEKRTKQFSDASQLDFVQTRKSKSMDLGIADETKLKTVDDQKAGSPSRYVGPSMGLKKSSSLESEQTSVAKVTLYGDIPFHRPRPRIIKGRGCNDSSSDTSDKRYEIPSVIHNNQRPEGLTITLRVKNAARAVVCMPTAVGNPPALKRILEIQNESQVPTAIVQPLT

SEQ ID NO: 948015 - protein, 78 aa, Homo sapiens
DPARGGRDRKAPGARFKEERQTQRFKPQPGVPPRPRADLIFNRCRKSPKRKLGFPVLRLEGSPQLGFRPLPPRACKNV

SEQ ID NO: 948016 - protein, 149 aa, Homo sapiens
  misc_feature (25)..(25): Xaa can be any naturally occurring amino acid
  misc_feature (77)..(78): Xaa can be any naturally occurring amino acid
QGGGPPFRGGLIRAKLSMAPWAKGXWGNKIGSPTLSPCKVTGRCGCVLVRLIPAPRGNGIVSAPVPKKLLMMGGIDXXYPSARGCTAPLGNFAKAPFDAIFKTYSSLPPPLWKETVFPKFPHQEFLDPLVKTPPKVSGQGTQAPAGGPT

SEQ ID NO: 948017 - protein, 43 aa, Homo sapiens
LPCELSILYSSSPDTAGPTGKVKAPLLSSKFSSREDPPGPLSG

SEQ ID NO: 948018 - protein, 37 aa, Homo sapiens
SLVGLDLLANVLPVGAAQESSVSLPPAGSVQTSPGST

SEQ ID NO: 948019 - protein, 41 aa, Homo sapiens
MKFLSVLALGGAVSAVALPGDDWKTWQSCAKETQYVTVTVT

SEQ ID NO: 948020 - protein, 39 aa, Homo sapiens
TPGPRNFPEGVLTLNSAPYPRNDSGSRSLPPWASRDGGR

SEQ ID NO: 948021 - protein, 47 aa, Homo sapiens
GHRRAAETVRSPSDIMRTALIVYLDASKLTSPHMHALQGSHAGDSMN

SEQ ID NO: 948022 - protein, 104 aa, Homo sapiens
DSNPDHTAKFGLTQEFNTTPRLQPELPGYVDTPTPTNNNTNSSPSGSPTSLPSNGTTNGNGTSPSGTPSSTPAGEGAGSITSVSMVNACAIALSMVFAVATWAV

SEQ ID NO: 948023 - protein, 63 aa, Homo sapiens
LPMEVEKNNTPSEPGSGRRPPQEEEEDEDEEEEGLTKKMLRPQASENMRACSHPMFQEEPPPC

SEQ ID NO: 948024 - protein, 114 aa, Homo sapiens
MGYVELMEMVEVELRELSMAQSHPGWDSCSASRGMSRNLTAEALCDRQDQLTARSVQVPGGILAGCEVSGGSRPSPLSLQITLSGSYGEEALDQAGDDHVPIWLGGCKKVSRKT

SEQ ID NO: 948025 - protein, 83 aa, Homo sapiens
FSIKLYTDLRKAKPFLNYSSQFPNPPVLLTKNILCSCGKIMDFCPGSCNSQLNSTVAIFRQLPSKKHSYQFSFEDAISDELPL

SEQ ID NO: 948026 - protein, 113 aa, Homo sapiens
SSGRLSGMRQGDHLKPGIQSSPGNSETLSLQTKKKKKKKNRGTAGGSSLLYFIRGRAKGGKPKISLNYLGMWRGGLAPGSPGGLAPTVPTQPVGKPKRKKTPCSILTQKPNKN

SEQ ID NO: 948027 - protein, 120 aa, Homo sapiens
EHIHLQFRNTSQFGNQCRPVRTSYSLLNKGSAKDSAILSIYYNAKGNTENLILLSINTLSSVAEFCKLISESSGRSVKPPSGAQVLRVRHKHRPVDGPLVPILMPLACQYLGNKFPFNTI

SEQ ID NO: 948028 - protein, 113 aa, Homo sapiens
KIFRGKGTRPPPFRRSVRLRVFRMKCHCAFSDKKISDKQTMNGCSFLPIPLFSSWRLRDWRIFGIVNVHCVELNPLCVRQDASGPWWPGGQTRGQVGHGPWPAGTCWGKRARK

SEQ ID NO: 948029 - protein, 53 aa, Homo sapiens
MVDTSRLQCDMLYKYTAAYLLAPSWAMFPDLSARQHKQYRHPSPYSAMELLLI

SEQ ID NO: 948030 - protein, 46 aa, Homo sapiens
GILITRKLCHNSREGNTVRQPRSFLATHKSSRFLGFRLVNSGATAS

SEQ ID NO: 948031 - protein, 152 aa, Homo sapiens
NRQVNIMPYELIRVLTAAQPWRGRALTTSMPASWIGYRQQNAYIANTGASGESTEDFWRMLWEAQNHHKRHANQATGNGQGEMPPAQASKALCSLTSTIVVHPMAEYNMPQYILREYKVTDSRDGQSRTIRQFQFTDRPEQGVPNTGEGFID

SEQ ID NO: 948032 - protein, 56 aa, Homo sapiens
MSGWIPPSSPFSTSHPEVMSMLAMAHSESLQDTQDAVERFTNVALDADAKDEALPG

SEQ ID NO: 948033 - protein, 139 aa, Homo sapiens
KYTFRQPLTDDRRPSVLDDLRPAASRPEAAAASIDSNVIWFLSDSASNLNVGEDDQLVRGRGSGSVQLADLGLPGDSHVQRVYDLDRVTVADHGDELPMTPATGGLLLGLRWLRYVTEQVEIFGSHHLTSELISIGHRV

SEQ ID NO: 948034 - protein, 128 aa, Homo sapiens
  misc_feature (35)..(35): Xaa can be any naturally occurring amino acid
  misc_feature (123)..(123): Xaa can be any naturally occurring amino acid
YCQNLICMNLSHSAETVIWFGGAESNLARLANALXERVTHDFRCNALKCDCDGIFFKNFFGRFDGNDGVKLRSGDEPVIGSEGDHRSPRRFPINRFALSTFRPRPVGCQGPSRRTFGAGAGAXLMLIG

SEQ ID NO: 948035 - protein, 40 aa, Homo sapiens
CPSREPLAGLYLEGGLFPIGATQSGTGAWAAIQSQPGVEG

SEQ ID NO: 948036 - protein, 160 aa, Homo sapiens
EGPPGADHRMAMERKLTELIRQAGGVIPEERGGDPTPSPFVPHHDATAQPTPSQPTVINDDTVPIDDIEDPLGSIDVWDEIDQQVAAEGHFMQSVYSLLVRMGVDPHGLVGGYDDEETGGHVSLAIPSSQVGISVEGDRPQPLIDAGWYIVPMQIGQLEA

SEQ ID NO: 948037 - protein, 69 aa, Homo sapiens
MTKCGVRTFDVRAALIGLDVANGCVRLMLRGVTPLVRPDDVLRALATRCPAVDAARVTRLAQGACNEGE

SEQ ID NO: 948038 - protein, 136 aa, Homo sapiens
TTAIHGGDEVVRSIIDGDRDQDENGGGDEGLTMLRWDCGETYAAVESLLIRCEQRPILHWDSFANCLIVVYTQEAGLSTDALSQLETGSCLLLRRWLLFPDDALHLAQSHDPVQIRESVPPATADRVLLRLGVPSS

SEQ ID NO: 948039 - protein, 69 aa, Homo sapiens
MKMCTTYELPRRRLMKFVNKLLANLTDARSGDLDDRIINTLTRIVPSLEFVACGSIFVPPSLKLGNPKY

SEQ ID NO: 948040 - protein, 108 aa, Homo sapiens
SGGNQSGDEIVLDHREPPILRLAQMVRFAFRDRFEIDLPVLRRFRIDRGTRIRMYAENLLLFGGFIVTQEVIVRGQRAATVDPVTDVYQIGATRKRKVFRTVRPSAVE

SEQ ID NO: 948041 - protein, 59 aa, Homo sapiens
LNNQLFAPGWRLSWGKGSSGVLMSQALRRSIRSCSPSNQNFEIASQPFNKQYPQKAQII

SEQ ID NO: 948042 - protein, 35 aa, Homo sapiens
MPDSPPLAVPPDAHGVVHPGLLLLHHLGASLLRRV

SEQ ID NO: 948043 - protein, 37 aa, Homo sapiens
MAMPDRPTLPFRQMHTVVVHPGLLLLHHLGRLPPAEV

SEQ ID NO: 948044 - protein, 69 aa, Homo sapiens
LNVTHSKLTTHQYTKILCSIDSNNQLFAPVSVRLELGAKVQQRDVLSEPMPFSTQAYRKLAAPQLTRYF

SEQ ID NO: 948045 - protein, 61 aa, Homo sapiens
MGIVREAAELLNHLDTLPCESNNLAPMYELNGVTLDGRIQNVKLQTVNAGGNGHWSRTRSK

SEQ ID NO: 948046 - protein, 113 aa, Homo sapiens
FFGPCHLSKGLLGVNAIQLDFLIHGEAAPGGLRLLLPCLLSGRQVLDMVQLRQVVVTPIHISWERKVFARHNTFMSSYTHRGGNCTLANWVNTLVANILRPLPAANALYNRCS

SEQ ID NO: 948047 - protein, 50 aa, Homo sapiens
SLKEEQCAVKLAGSASPGWVLPFTAVWLYLSSNSVCVARAAEGGITIAIT

SEQ ID NO: 948048 - protein, 50 aa, Homo sapiens
GVVALTFRKQTIDFLNDNIRRVIENYYDDLDFTNIMDLVQKKSSAGGGED

SEQ ID NO: 948049 - protein, 40 aa, Homo sapiens
PFHQHLSCPCHMQPQLRHLGSGVSKTGKVLPCGACLLPAD

SEQ ID NO: 948050 - protein, 67 aa, Homo sapiens
TTPPPEAAATAAAAAEHAAFSCPATPSARSMVTKRISCGSTGSSSWELRMLSPSMQSSGLRDPETPI

SEQ ID NO: 948051 - protein, 48 aa, Homo sapiens
SLCKTDVILDREKNPEPWETVDPSVPQKLITINQQWKPIEELAKCPKG

SEQ ID NO: 948052 - protein, 54 aa, Homo sapiens
SYKVSSVLTRKGKCDYWIRTFVPGCQPGEYTLGNIKSNPGLTSYLVRVANTTNT

SEQ ID NO: 948053 - protein, 96 aa, Homo sapiens
VDNWSANYGRWQVRGTLSDHFIRFIRMLRHIRLVRIITDIDIIRVVRVNGVLAVHMVIILFIIHIIHVVIAFAGFKWKGLLFKVIGFFRGHSILWG

SEQ ID NO: 948054 - protein, 160 aa, Homo sapiens
LRGRTPVPTVLTESIVFTPLRMNADDNGHERLGDERDGKGLRRPEVHRSGNQHRTNHASYHSSPHNQRQGPGPAFGRNAIRCGKTKAERDRRIGTAHKCSNAEQQEEPMKTARAAVSPVMTPAPVPTIKAALRPFVRASEPNGKIQAAIPRNNMVMGRVA

SEQ ID NO: 948055 - protein, 72 aa, Homo sapiens
RRGNDSENGQLVGGRKVPRIKQTKKQEGGYQKKKRGTRGQNHGIKNPQAIITLYSCDPASSVPYSSVCFFTF

SEQ ID NO: 948056 - protein, 112 aa, Homo sapiens
LKPALSLSSCTWLTTNFYSTGPVTLAAWIGLVEGEEPLPPSGKERSQENHTECRTLCGHLDHYLLPPWCTKWPVSQYKAHLQRQGIQHPILSQVQHACADDRTQIKDSTVVA

SEQ ID NO: 948057 - protein, 82 aa, Homo sapiens
MPCSLHTTHFPASSTTSGHSEKSTIYKSSPDASGTTPSSAHSTTSGRGESATSRISPGSTEITTLPGSTTTPGLSEVSNHLL

SEQ ID NO: 948058 - protein, 70 aa, Homo sapiens
  misc_feature (2)..(2): Xaa can be any naturally occurring amino acid
  misc_feature (4)..(4): Xaa can be any naturally occurring amino acid
  misc_feature (37)..(37): Xaa can be any naturally occurring amino acid
DXRXPYTPQSPVSGRDVAARCASGADVVVGRGLRRAXGRVFALIPELGVLALKAGRVLAYLGLAAALAAC

SEQ ID NO: 948059 - protein, 46 aa, Homo sapiens
VGTQHTVHEAASRDTIPLRVQRGEVTYKNVKINVWDVGGQDKIRPL

SEQ ID NO: 948060 - protein, 117 aa, Homo sapiens
  misc_feature (13)..(13): Xaa can be any naturally occurring amino acid
GRKKVGRTHQPKXVRGGNLGKQVQPQPQKGWESRADQQKEKLALIAFQAGRVFRPFLPFSEVSPPAGDVPRHSAPLALAQGACDVISKASALSSDTQPCPAGPGAQALFTEPGRGGG

SEQ ID NO: 948061 - protein, 140 aa, Homo sapiens
GFGRGPFVVQRVRHRFGGGVADRAEQWRQTRRRSRRPREVGGRGSLVRSFRRREPGALVPQPVAVCRGGREVGCAVGQDDAVDVERGDRGHLAVADVGGDAFGFAVQRVADSAAALPMGEVDVRFGEVGFQVRREGVRAA

SEQ ID NO: 948062 - protein, 32 aa, Homo sapiens
MGWPGGLLGPSKVGFHPLGRRQLPKKIYFLHG

SEQ ID NO: 948063 - protein, 176 aa, Homo sapiens
  misc_feature (59)..(59): Xaa can be any naturally occurring amino acid
LFKDVKNAGALRRKALEGPLDGSLINPPGIVDPFQKLGAANKAVPLFKVGKMKPRTLFXGIIFPPSPKNKISGGLKKFGISAKAPSILIVSLEGGENPINQETPIFQGEGPRGFLKNLPEKMNIPGGQKKNKLFSQKERIGPFIGGYPLEKGPQKCFMKGPKNYPKFSALKKTLIF

SEQ ID NO: 948064 - protein, 110 aa, Homo sapiens
  misc_feature (63)..(63): Xaa can be any naturally occurring amino acid
YRSLINAKRALCFEFPPTGMLLEGKKPALVFGMQNCSIQQRPTSGYAGGLSSAYGGLTSPGLXYSLGSPFGFGGGSSSFNRPSSSRAVVVKKIKTRDGKLVFESFYVLPK

SEQ ID NO: 948065 - protein, 53 aa, Homo sapiens
APLTLTKLDERLTYMVRAVVCANCHYMLTLTDMGSSVIEVYRLDLVRSRDEGG

SEQ ID NO: 948066 - protein, 33 aa, Homo sapiens
LLLTIVAAKQDDSHLQSSPRFCLLTPWIPVEEG

SEQ ID NO: 948067 - protein, 51 aa, Homo sapiens
DSISSSDVSISSRDVSISSSEVSISSSEVSISSSEVSILSSDVSISSCDIS

SEQ ID NO: 948068 - protein, 37 aa, Homo sapiens
  misc_feature (31)..(31): Xaa can be any naturally occurring amino acid
GDSRDPLETLTELMHPGLGTLQKLFDLIEAXCYCWMG

SEQ ID NO: 948069 - protein, 64 aa, Homo sapiens
LTLAGPQMSKKFEMTTAPKAESNTTRRKKRRKKTRLQLLRNHIEELKCSGTQFLDNAQPTDSFQ

SEQ ID NO: 948070 - protein, 30 aa, Homo sapiens
  misc_feature (30)..(30): Xaa can be any naturally occurring amino acid
MEPLGLTPTNNLNRFVSGCYPAVSGGTRAX

SEQ ID NO: 948071 - protein, 34 aa, Homo sapiens
SEQDPRFLAEYLSYDSSDPCPVQFTCRTGRCIRK

SEQ ID NO: 948072 - protein, 33 aa, Homo sapiens
LTAACVATHSLSQPQPGPQKALKPVGGGFFQRD

SEQ ID NO: 948073 - protein, 46 aa, Homo sapiens
KPVCRKGGGPRRLCDLPGTLQRKSNNGPHSSMGATPEVHPMGRGTE

SEQ ID NO: 948074 - protein, 80 aa, Homo sapiens
TVRCSSSIHRSPQVEKCIHLIINLRNRLKYALTGDEVKKICMQRFIKIDDKVRTDITYPARYMDVISIDKTGEKFRLIYD

SEQ ID NO: 948075 - protein, 68 aa, Homo sapiens
LRCFGGSYLDPALAALGIPGANLNSQSLAADQLLKLMSTRDPKLNHVAAGLDITKSEIGYLKGYRDSK

SEQ ID NO: 948076 - protein, 140 aa, Homo sapiens
TKESNSCLETDYRSCPRGSTLLAASRMRDEGSVLDQKATEDTMWQRSPCGETYANNRLMEKLGKSGCPLTPFPYPFKHPHGDKGLIVKSCYKHSLLKCKEKPRGTTSISFGCFTPERGSRGKSSLLIKIQVMLTLLLTFG

SEQ ID NO: 948077 - protein, 138 aa, Homo sapiens
PKTFTHRDLENRLWIMPQVSKLLAASRRGMKGPVLDQKAQGGDVAKKLLVGRPCIEQASGKAREKWLPAFPLSLPFKHRKNLGFIIKSCYKNSLLNVKRSPGVLQAFLRMLHSRKRESRQVLITNKNQVRLTLLLTLG

SEQ ID NO: 948078 - protein, 122 aa, Homo sapiens
MSRTIYAGMYTGGLVTIANNWNQPKCPSIIHWIKKMWHIYTMEYYAAIKTDRVHVHCRDMDEAGNHHSEKTITRTEHQTPHVLNHRWEFNNENIWTQCREHHTPGPIMKCRGWGRDSIKRNT

SEQ ID NO: 948079 - protein, 86 aa, Homo sapiens
SVTLPRTSVSTLKPYGEGSTLKLFFPKAKPLSSDVIGMGTGWQKLISSQGEPTELSRVPGKKTGGDYTELSFCQITFLKPLERVNR

SEQ ID NO: 948080 - protein, 188 aa, Homo sapiens
SRGFICDGYDPPKVYHLYQLEKKYAIRVLSLFDGIRYRAPGAEKDLGYRWTDTLPRKVCEDSITVGMVRHQGKIIVRTGTSAASTQKHIQEWGPIRSGDWGQSLEMTSPIVNTALQGLYRALARSTKSSTASCMIGVPKEGDCRPFFWLFANLVALGVSDKRDISRILESNPLMIDAKEVSAAHRPRY

SEQ ID NO: 948081 - protein, 85 aa, Homo sapiens
DPDEIAFPGEVTSLRNNSANNGLSLAQVDPKVVEEVWDFAEQHPGEQLTLSLENRTINLPGRTTYPFHIDDVTRQLLLAGQIPFQ

SEQ ID NO: 948082 - protein, 157 aa, Homo sapiens
YFAIDLTSNVTTCPAERGTHPRLSLFDGISTGLVVLKDLGIQVYRIIAWEVCDDSITVGMLRPQGKIVYVGDIRSVTQKPIHEWGPFDLVIEGQSLSDLSFVNPARNGLYWALAVFSKSSTASCMMRDPRREMIAPSSDFFENVMAMNVSYKRDISR

SEQ ID NO: 948083 - protein, 70 aa, Homo sapiens
EKGHLYCQAAKLEYRDGTKITTSSNSQVHAILPPKPPKELGLQVGATVPGLRCRIFPKENSLSSVSVIFE

SEQ ID NO: 948084 - protein, 147 aa, Homo sapiens
MPRRCVEDSITVGIGAAPGEDHVNVGDVRIVTQKHIQDWGPFDLMIEGSPCNDLSIVNPAPKGLYEGTGRLFSEFYRLLLLLGPSEGDARPFFWLFDNFVAMGVIDQRDIYNFSEFNPVMIVAKELSLHTGPLILGYLPGFDGLASL

SEQ ID NO: 948085 - protein, 72 aa, Homo sapiens
YHASVAQIANLEYRGSELWINASTNSQVLAKLPPKPPKVQGKQVRTKRDPALDSKNYHKREYFEYLVTVIFE

SEQ ID NO: 948086 - protein, 226 aa, Homo sapiens
PGLCDELNLKGYTVQLRRKTIRALSLFDGIATGLLVLKELGHQVDRYIASEVCEDSITVGMVRPTRGKIMYVGRRPQRPQNHIHEWGPFDLVIEGSSLLMTSPIVNLACKGLYVGTGRLFLEFYRLLDDARPKEGDDRPFFCLFENVVAMDVSDKRDISRLLESNPVMIDAKEMSAAHRARYFWDNLPGINRALKSIVNESWSYRIYDLEVAIQQVQDLLKAILEG

SEQ ID NO: 948087 - protein, 60 aa, Homo sapiens
KHLGSSAKPPGDKTLRNVGPSVTYKLRDASGQSREFHNYMLPIELDAQRVFLAGVRDSPA

SEQ ID NO: 948088 - protein, 65 aa, Homo sapiens
RGQIKIANPASSPYRNCPNNAPLADLSGCAGDNGFPRTTNTQSGDKKDVCRSDRRQPLMSGRHQS

SEQ ID NO: 948089 - protein, 54 aa, Homo sapiens
LSDTPPEKGTHMRTVGTGHRWNKKGGWRLLVSGRAGPPFTFHKSFPGFIVLAFG

SEQ ID NO: 948090 - protein, 45 aa, Homo sapiens
MEPILSGLGTSQRQSGDVSRNRYADNDSVNLGPGQRNKGSLLESE

SEQ ID NO: 948091 - protein, 35 aa, Homo sapiens
LLQVDQQAQFTTMAIRELKVCLLRGTGTNNDGVEY

SEQ ID NO: 948092 - protein, 66 aa, Homo sapiens
NEDPGYELKEVVRVYCTMPWRLPDARENNKALIILRSRAVQPHLIKISNEGLAPNTPLTGVKHPKE

SEQ ID NO: 948093 - protein, 237 aa, Homo sapiens
TRLALDPVEILHEREYQFAGSHRTPGQELENLPGSLAGDLRTKATIELKALRLLNFQRQLRQEVVVCMRRDTALETALNAKAYKRSTRQSLREARITDKLEKQHKIQQEPKPRQKHHEYLNTILPACQGISRNITHPSPAKSPKLPNPIRKYHANTGPPTTEQEQAGRARRHDKGHNIKKEKDNARQTTRPKHQATGQPKTNKPAKHRDRHPDRHTSKQEHTARRPPDPSAVQNRHN

SEQ ID NO: 948094 - protein, 233 aa, Homo sapiens
SGLEAVEILQERENMLLARIAHRIQHCGNLPGSLAGDLRTKATIELKALRLLNFQRQLRQEVVVCMRRDTALDTALNAKAYKRSKRQTLREARITEKLERQHKIEQERKRRQKHQDYLTSILPHAQDFKEYHRSRPGKIQKLTQGTGQLTMPQRNGSTETKRPLKNEPMRRPWLEMRTRPPAHRPRKRQRVAYIRHHTTPPGLPPPGRSRINNDPQDRQRTNDPTNPPRRRTR

SEQ ID NO: 948095 - protein, 35 aa, Homo sapiens
MPHQLREVSHYSSVCCKMYARRLSFLNMMSSVAVN

SEQ ID NO: 948096 - protein, 99 aa, Homo sapiens
IVREAELRETLVRLVLEEHLIAEGAGALALAAGRRVAGKRKCAVVSGGNIDAAVLAKLLSEVRPRTPRIPRRRSADTPQQLRQFTVPFYLIPPHIHACQ

SEQ ID NO: 948097 - protein, 129 aa, Homo sapiens
LSGSPARVLNYVADVAKAIRLNSPYNGKYKDLAPHEVGLDVMQLANSLHCLGRLGDAIKNADNSKIVDACDALMSYYAMFTEGGRGEGMKGDPKASFDRHCHICNPQQAISVFAGIRDKALAKCLEKRA

SEQ ID NO: 948098 - protein, 119 aa, Homo sapiens
  misc_feature (18)..(18): Xaa can be any naturally occurring amino acid
HVVPTFVWEDFVNYYVAXPVPLKDFQTIYGANKFTIDLLVTQSYCLGVVSGRELSRVRDNKTLGGGRERFTARCHMVVCYQRPARLGGYGEVKTLSSATFSLALFYLFGTPSPLPSHHK

SEQ ID NO: 948099 - protein, 71 aa, Homo sapiens
YPLCVGGPSLTREGESGKQESMVDHAAEHRVRSETHRPFRSSLQKRPPGWTAVTQRDTEPDYPTHLIYALL

SEQ ID NO: 948100 - protein, 63 aa, Homo sapiens
HHRKGIRLRFRNLDMDSSGNVTECGDVGASPGRSYLFFLTAYHPGIGLSGDGVLWLEEASTFA

SEQ ID NO: 948101 - protein, 108 aa, Homo sapiens
  misc_feature (12)..(12): Xaa can be any naturally occurring amino acid
TCGTHVCGGRPXFYYPATSGAALAEGLDYPVQFGLHSGQANRDPSAFETEEVQSSRHVFPAFIVVYLLEELLATGGPHLGYQGISVLLEDTTVNFCVSLTTSKVAGAG

SEQ ID NO: 948102 - protein, 100 aa, Homo sapiens
HVVPTEIVIMANIEGEYKLDDPLREVLDVGEDTCSGQGESWVLLFGLDALEDSLCGDRDKLHLSVDPEAFVVQRGREAGTATNKVHQLVLQTLVLPPQTW

SEQ ID NO: 948103 - protein, 144 aa, Homo sapiens
PDYNLVWRGFRNGHVLQGEPQFPVSSNKRSQFQGVSTHNLSFRPSAELLGYEIRPCVCQIPGRGVGTTLSDRVRPLGKHLAVVPFEPTARAKGLWKSSPRCKLPTTELKSYRGCHPNWARANSFTYTRSIVGTIDQPRRRNSAS

SEQ ID NO: 948104 - protein, 123 aa, Homo sapiens
MWSHVCVGGPLVQQGLHLLYCWLRGSLLFIQGEAEVQMVIDYVQDQVTSAILNDCNYLIFLQVDKGGLDTPELLYFLSAWGSLVVEGCNLQLKQLHCSLEGAPVSGESGGALDDTMSLVLPPQ

SEQ ID NO: 948105 - protein, 65 aa, Homo sapiens
PSGHQPYGTSAHAHDDIAIACVVGNGLWQIRHVVYKKRLHAARHAQRAGERTAIGGHHRSLTGGV

SEQ ID NO: 948106 - protein, 118 aa, Homo sapiens
TCGNTFVWEATFTFIAQYGAQRADALSYTIVDSHAYNIILLIIIEAPNSTPPNTLLLFSTVITSLTSPKAYYSKYTSHAVSFRSPNVQAVGVTVHDTVNFYVIAAGPNAHNNYAVISF

SEQ ID NO: 948107 - protein, 112 aa, Homo sapiens
TFVVGGRVLASSLPGRLWVSETLFWFFVFRNLCLPGSSPRFGQHLVSVKSGNRFHSKRVGTLLTLFSMVLHSEQFETDLSSRKQQLANQQGGRLKGLSIVVGAIESSHHGRT

SEQ ID NO: 948108 - protein, 115 aa, Homo sapiens
GASHQIGWTGDTGCPQVGRGPWSCWGRVLVDIALGGSGVQIPGIGLMGALRGPGLRPTRLCFGSRLGVGQWQLVGWGPEVVAPTRAVSNRTKGPSPCTQPPLPWVIVRPGRSSHH

SEQ ID NO: 948109 - protein, 155 aa, Homo sapiens
ASDQNLIRCRVLTTGIFENKIQVDKVNFHMFDVGGQRDELRKWIQSYNDVTAIIYEVASISYKMVIREDNQTKRLQEALNLFKSIWNNRWLRTISVILFLNKQDLLAEKVLAGKSNEEDYYPEFARYTTPEDATPEPGEDPSVTRAKYFVTQSST

SEQ ID NO: 948110 - protein, 36 aa, Homo sapiens
ATACLIPPGHHRAQRLVQARYARFLLLALAVAQPGI

SEQ ID NO: 948111 - protein, 146 aa, Homo sapiens
LQQKTQESQKKRQQDDTDEYDDDKLQTRLHKSHSLCNLSKVIFLQWHRQDCNQYQEHQECLQEYLNKCQVFLLLMPGMPPVMPGMPPGLHHQRKYTQSFCGENIMMPMGGMMPPGPGIPPTDALNATRYAPTYTTSWNSSNNSSTG

SEQ ID NO: 948112 - protein, 107 aa, Homo sapiens
VVSLIFSKKGYSRRSSCNTRSSRRDSVRQASFMTRYGKILPLSHRMYSRRAAEYVLLHNLYPGHEPCNLDVIMREALGIRNSPGISTSAVCDEKLLKNRQYSSIEEE

SEQ ID NO: 948113 - protein, 99 aa, Homo sapiens
MVWKVIQKKTWMKEDDFLKRKHKKVKKKKQKDDSDEYDDDDSAASTSFQPQTVQPQQGYIPSNGTAMTGTSTRSTRNASRHTSINGKVFPPLMHKNATS

SEQ ID NO: 948114 - protein, 72 aa, Homo sapiens
NILNGRSTKKKTWMKDDDFIEQKTQESQKKKQQDDSDEYDDDDSSSLQLHFKPQPCINLQTRVIFLPTGHRP

SEQ ID NO: 948115 - protein, 66 aa, Homo sapiens
QQLADTGITGQNIGITMIGRGLRGCVPNLSTQRHLAKSAPSFLYCAQRSDRPSNPWVVVSPFVPAM

SEQ ID NO: 948116 - protein, 77 aa, Homo sapiens
RKTEPRAHYAFGEKEKPPAGRFLFAGQGGVRHSIDAYTASPSGNESLRAIGHHLSYSVKPQVFAVSSAPGFRYFSNC

SEQ ID NO: 948117 - protein, 71 aa, Homo sapiens
  misc_feature (8)..(8): Xaa can be any naturally occurring amino acid
MSRSEQKXGGWWKPTAATAATYTRRLGENHECMSSNRTRILRRKRIDQRSQICLLTLKRPRHPLHVYDQPV

SEQ ID NO: 948118 - protein, 146 aa, Homo sapiens
MSRALRRSEFADADGQSHETSWLVKGIYSYKKNVLIEVNPQIRIPRTFDRFCGLVDKKAENKVRMNLLVGKNGGRRKGSTNCGFLSEKMGDQPDEYHDKAVIIFYVCGNSTSVLAVASFLSEKGIEPSKYWIEFCSQGQYLDGALV

SEQ ID NO: 948119 - protein, 91 aa, Homo sapiens
IDQELLLVRYGAQVLIEESAAHRFGHRHGLPVILPTALKIGVQVRHWPRADPQPWTAIEGLYRCLGYFHLQGPSFWATLPPDCSWAHCNCP

SEQ ID NO: 948120 - protein, 116 aa, Homo sapiens
MAPASVGNCSVGNCSPEAVWPKTEPLENGSTPGTYYSPSIALQKLWISSLPMTDLDIKFQDRGKEYGPDLTVSNPQGLADSSMGTLGPMPDQEELFGPVSLEQVNSSQGYRLNRIC

SEQ ID NO: 948121 - protein, 123 aa, Homo sapiens
MAPDSVGNCSVGNCSPEAVWAKTEPLEMEVPQAPFQPFYSFPELWISSLQMTDLDIKFEERGKEYGQTKTVSNPQDAEYFYGDLGPCFDRRSSLGRRLERLNSSQGYRMNRICQRLQKDKKTE

SEQ ID NO: 948122 - protein, 63 aa, Homo sapiens
GLALKDPHKLQDVQTPSNAITINHVKSEVPESPAFLPFLCPPCFVSLRAPGLLLPHSCYRCRS

SEQ ID NO: 948123 - protein, 90 aa, Homo sapiens
HHSNKQQSICVNELFRGVSDLRNVWVVLGLDKPFQCSCPFSKTLIVLYRQAWHSTHGSVESFLCKKQGGIQELLYFWPLVSVTKRGEPAP

SEQ ID NO: 948124 - protein, 117 aa, Homo sapiens
MVNPKDYKSCYYKDICTRMFSAALFTIANTWNQPKCPSMIDWVKKMWHIYTMEYYAAIKTDEFMSFAGKWMKLETIILRKLSQGQKTKHRMFSLIGGNLTMRTFGHSAGNITHQGPS

SEQ ID NO: 948125 - protein, 217 aa, Homo sapiens
MAHPTMERIFFALWMTHVGETTAKALAHSFGDLAIIRATPLALIHSVPDIGGEVARAIGHFMDQPANQQAIDDLVKRGVRITDTHTPTSTLRDQLTLASILEHLDIPKITPLRAVQFSRPRSHIALIGLEPPLIHSFRAGVSQPAAQSLPEWFQSPDNISLARRLKHCCDVLLAQLPSADRAHIPHSGPKRRTDLANSVMTGNRALIEFGANVEVQK

SEQ ID NO: 948126 - protein, 122 aa, Homo sapiens
GQLGPTRVYRRSGGVGGFLAICLRLEMDYISICEKLTQQLLSGPCSMCMGVAVKHLSSMSQYERVGRGTDSGEQLQTCKFSCLTVYTLETLNLSMPTVEAGGNGLSTHHFQVAFLHLFLLME

SEQ ID NO: 948127 - protein, 114 aa, Homo sapiens
SKGYPCPAHKIEAILVLSLFDGIAKGLLVLKDLGIQVHHNIASELCEDSITVGMLRHHGKIMYVGDVRSVTQNPIQEWGPFDLLIGGSPCKDLSIVKPTLQGSLQGTGRLLKEF

SEQ ID NO: 948128 - protein, 60 aa, Homo sapiens
MSAAEAVKEKWLPYEAGQRILEFQYLTGSLVEPEVHGRISTEEAIRKGKIDGRAAQRLED

SEQ ID NO: 948129 - protein, 236 aa, Homo sapiens
VTLDDPQPDIGLDTDVTFASDISDLWALFAHLGDGQAIGLAENQSDWYLGNLWKNHRPWPALGRGFNTGVILLRLDRLRQAGWEQMWRLTARRELLSLPATSLADQDIFNAVIKEHPELVQRLPCVWNVQLSHHTLAQRCYSEASDLKVIHWNSPKKLGVKNKHVEFFRNFYLTLHGSKWYTLLRRELFVCHSQPQPGADHWGKRMHQLAQEKSLLLCTARPTSLTNIDQERIVHP

SEQ ID NO: 948130 - protein, 124 aa, Homo sapiens
  misc_feature (56)..(56): Xaa can be any naturally occurring amino acid
PVPFCPLPLIGRCPACCPATSGVSREAWRVTTPWPFGNFPLCGCPTCRMLPPLLPXGLLKASLSAGGTIAQAGAGPAWWPGIWHTPFPWGEGQSPTLLTSACFFPFAAFTGEFLFSLGSLGQHL

SEQ ID NO: 948131 - protein, 70 aa, Homo sapiens
PPPPGPPGGPGGVGGPLPKNLVGGGYKKRGPKKKRAKKGAPRGGGGVFFPLPRGPPLFGPPPPKFCFKVF

SEQ ID NO: 948132 - protein, 129 aa, Homo sapiens
  misc_feature (14)..(14): Xaa can be any naturally occurring amino acid
LSPQWRIRLLGKKXKGSGLSNGGGTKRNWPPFGLFGVMHHNMIKGVTLGFRYKMGVGDAPFPPHGVIQEKGFFVEIPNFLGEKNTRRGGMRPGVGCSVFQAPKDEFILEGKGIGVVLNSGGLIQPAPPV

SEQ ID NO: 948133 - protein, 109 aa, Homo sapiens
GGGGPPSPGFPNPLLKKVFNQGGGGAISPPFFPGPPPKAPPPLKPGRPPFLGGFFGGGGNKPPFCKGKKAPPGFYFFPSKKAPGGFRDKKGEKKPPPPPPGNLFFEGNP

SEQ ID NO: 948134 - protein, 136 aa, Homo sapiens
RGRNETRSRHCTPAWATERGSISKKKRKRERKKERKRKKERERKRKRERERKKERKRERRKKKEKGKKERKKERKKVRKKERKKGKKEEIKKKKERKRKKKKERKRKEEREKERKKKEERERKERKKERKKERKKE

SEQ ID NO: 948135 - protein, 72 aa, Homo sapiens
KHSFPDDRESKKIDRHMYHSLYLKVKVNVFKNKRILMVHIHKLKADKARMKLLADQAEARSSKTKEAVLPEL

SEQ ID NO: 948136 - protein, 56 aa, Homo sapiens
IVEKAPKARMPDLEQRKYLVASDLTVGQYYFLIRKIIHLRTEDALFFFVNNTPQQT

SEQ ID NO: 948137 - protein, 42 aa, Homo sapiens
RVLQSGCLDHLQSDVPLIRKVTPQCTDFLTSLISSCQHTKEG

SEQ ID NO: 948138 - protein, 58 aa, Homo sapiens
MLVSPRSMVYATDPDPVLPGSSQFSTRHAEGESGVGIKGAPPPGHREWRRGQGAERWR

SEQ ID NO: 948139 - protein, 133 aa, Homo sapiens
RNAFGEIDVLPACVEQFTNATAGGEGNPNCSFGGRKKAGFRSELGQGADLIIAQHAVAFDILATNLGLADAGQSDRAQSDLDPTANRNICRIRLKISLAIRLTPRARKGIGHFGDVPFFYVSHGYFANNGKTS

SEQ ID NO: 948140 - protein, 60 aa, Homo sapiens
TINLIGKGGVGINRRRLGTAQIAPRMSGNKTLPPVSPPSGRRLDLPAISIGQQPPNPGLP

SEQ ID NO: 948141 - protein, 149 aa, Homo sapiens
MCRHGFHQPRLVGLTLLTRHKRGQNNPENSRPQSLTQPTEAKQQARCTARCYVASAGLGRVTDGNHRYPTSTCRSAPRPIQCVRLVFGVGAGVWRYRGFGKATGGQPEQASQKPTAYACWHNIEPVATRPGFHRVPSQQTTSLPVYGTD

SEQ ID NO: 948142 - protein, 116 aa, Homo sapiens
CTLIDYVYFMVYRYGFLSCIIIVMVTIVMVIVMVIDCYGHRYGDSYLLWFTLMLSINLLWLSLLVIYHFMVIVYAILDGRYIYRCICMYYSSFRLGIISCMCWLACIAGLSCILIL

SEQ ID NO: 948143 - protein, 189 aa, Homo sapiens
KYNIDRKMYQCIVEAQESQCAAIADEIQAEKLTCRRDGKCENEKTDRPEPEKLLKGLDRVGSKTVGCPQVKIPNPWREADDVKQPDRGALPVSCASEHDGHQKFFLQVHAGVKAGNVFRIAIEHQGWTPVRTEEAPCPDASLSCLAPSGMIDLRINVGKKTILAWRDDIPGVLWLRIGQRNTNNRFASL

SEQ ID NO: 948144 - protein, 183 aa, Homo sapiens
LNRADDTGCCEPQVADHEQGANVSGLAAASQAATGNVMAAEPHRQSDEYHTEYSPSDRRADHRDERAATTARHKADKARLRAIVSRDSSSLSPQIVRIMYAGQPSDDLGDVCPGCQEGSGPGGAEGSSALDDDGVVVTAPSEGDVYGQQPQLGKSEQSKPGPGGVERHRRQQDDDAKPGHGRD

SEQ ID NO: 948145 - protein, 119 aa, Homo sapiens
SQKTSYNGLKKHKRMGGEVESSFDYTLSDVDKNMLQMMQVDEHLDCHGDELMPILQEMMNQIDYDGIGSASQAECVRSGASTGPLLVLLGLEMTLKDDGQHMGRPKGFPRPVYCNLCES

SEQ ID NO: 948146 - protein, 42 aa, Homo sapiens
IGLAHRMQAGPHEKGQAFDAGISERCTPETLREKSGIPIGND

SEQ ID NO: 948147 - protein, 48 aa, Homo sapiens
MAILHAQGNQCCSERYLFGNTTAHTLTSAFFIQKVISHSDEENSAVRG

SEQ ID NO: 948148 - protein, 122 aa, Homo sapiens
IGNYETLLAGGLGAQESTTHQGELLGTLDAHCFRQLPRFGPPREQAFAEFFYSQLPLFSRLSCQQLFLKLDFGLRSEARVGGKRRIPKFGSSALKARGAVPGMLAGASGQGLGTWPPEVYTT

SEQ ID NO: 948149 - protein, 222 aa, Homo sapiens
MPVKFTSGSRTPHSTHRHLRCILLGDPCTLTITRTMQKPESLRIPHGKRPPSSLLLPPPPAPLLSSSPRRPARPVTGRPCGRAAFCVSRPPVRPSPPRSVPPSSASLFPSGVRASPVRSPFSPVLVCARRHAAVLAPPSSRLAAGCVVRPRGGPAPVPWLSRAFAAVLPLRLGRLALGGWLPGWRACPCRRSAAVRAAFLLRSCALPIGAARFLFFPVGRPG

SEQ ID NO: 948150 - protein, 52 aa, Homo sapiens
YTDKYTSPHDQPQYGYELDPVTDKNLTKEGQRRTINGTETKAKHTSMEFRIP

SEQ ID NO: 948151 - protein, 70 aa, Homo sapiens
DPADPLTERQGEGGGEATNRNSHQFFGSRGPLPSTPWAKIGPHIKNRGNSPTCWNKGRTPPHYTWLILKP

SEQ ID NO: 948152 - protein, 33 aa, Homo sapiens
VAYGLYKLKSREGGFAIFREGGFAISGKEALPS

SEQ ID NO: 948153 - protein, 51 aa, Homo sapiens
SRRRKLAPKPEETWVEEMLCGLKMKLKQPRVSSILPEQPQGPKQSAWYEEH

SEQ ID NO: 948154 - protein, 75 aa, Homo sapiens
CPIIIPLHVFKYIAYIISSGQLEDQGPMVALQHSSVIEQNGQLTSSITQEGVGSPRVIYIMNGGCDECSELINWI

SEQ ID NO: 948155 - protein, 45 aa, Homo sapiens
DIGEAGAEGAHSLEMTPGGLCLPYHSLSPDRIIGLLHNQTPQTLS

SEQ ID NO: 948156 - protein, 146 aa, Homo sapiens
ISDLNGFIKRIGPLGQEFGTRVTPFRPHTQDKDALAGTTQAAPQMALVTVQRSPYPQHHLQPLRLESKTGILGSGSQISSDCKEEFVTVECTALQNSECTLLEIFKQRLENILPGRWYKNFLQWGTSKTISNLRFCDLRILVLQSW

SEQ ID NO: 948157 - protein, 104 aa, Homo sapiens
RLVPTLPRKKGPWGFAWARPTKGVKCFGISSPSHSNPRQVGWTIRFFSHFGFVGFKRIFCLHICTHSPFFKDGFKPRCLQERGRNEYIHRGIQKIQFGGKCNNF

SEQ ID NO: 948158 - protein, 105 aa, Homo sapiens
GFLGGIFKFSTGADVPLSGGACRGVKPLGQKTKGPGPSGLPTVFQFPLPGEFFGIQDRKSGAQKGWGTWGLCWGKHPCPPRPPAGHPLWAGKTVFLCFPRGPPFK

SEQ ID NO: 948159 - protein, 105 aa, Homo sapiens
MYPWADFHFFSFKAEKFSFVLVESSYWKAAIESFLFYFCYEWGMAPFGDFYWVIFYVKEGNLGLNVVGNKNDDNNKVKAAMGARQSNCLGEENLFKSPDKKLIFF

SEQ ID NO: 948160 - protein, 105 aa, Homo sapiens
PPEPSSSHPCFEGQPTARDGQPILTWDVPKAWPHSSKPGTWGRGSTGLSGSAAVRSAPPAPSASVPPTPTTHRSRRQAQGGAVWAAYWGSRLVSCDRRRLLLSVM

SEQ ID NO: 948161 - protein, 102 aa, Homo sapiens
  misc_feature (90)..(90): Xaa can be any naturally occurring amino acid
GLEWVASGQDTKALQDFSSSVKMCQGNRDTYFHLLQTLKRLDRRDEATALWWRLEAQTKGSHEDALWSLPLYLESYLSWIRPSDRDAFLXESCIFSLKFWSM

SEQ ID NO: 948162 - protein, 140 aa, Homo sapiens
  misc_feature (43)..(43): Xaa can be any naturally occurring amino acid
VQSANSRSRRFRGSMQALEIKCKSQLSIKASSQGNCAETDNRXCVHWSQIQRMIGSVKEQMAQLRCEMEQQNQEYKILLDVKTRLKQEIATYRRLMEGEYAHLTQYKKEPVTTRQVRTIVEKVQDGKVISSREQVHQTTR

SEQ ID NO: 948163 - protein, 67 aa, Homo sapiens
TQQVSNRDRMGIQPHLTPELASFHIPSLRATSMTEKPKPTRMARGDFLNLPAFHLLGPAWCRFSSLL

SEQ ID NO: 948164 - protein, 106 aa, Homo sapiens
MKIIYVLCYECVSQNSYGGNFIPQAAVLGGGASEEIFRHKGSALMNELVPFQNGLSVVGSFLPALLLCEDTGPSPPEDTASAFWAAERSPGQMLDPDSGTSQPSRN

SEQ ID NO: 948165 - protein, 62 aa, Homo sapiens
SSKAPVLGTPRGGGVPAFGPWVDPALPRYKSQIGSRGRQQGQPQPRVGSSTGGLFCKKSRGF

SEQ ID NO: 948166 - protein, 110 aa, Homo sapiens
MPPPQGKSYICGFVKHLLSFTPGHRENLLRVLVNPFIKRVPRGDSPRFGGPGILKKKVVVFSPLAGFNQAFWFLGPGVCGGPFRNFKPFFGGVGNGFFNVARGFLIFFPF

SEQ ID NO: 948167 - protein, 98 aa, Homo sapiens
HVLGNRLGNYREKKVDSGSSLVCQMDKTWIQIGVVSWSFSCGQRHFQGIYTSTAHFNQWIRTEVANIRFISRAGPAFLSPVFLTGYILLGSLSSLWLL

SEQ ID NO: 948168 - protein, 125 aa, Homo sapiens
FFHHLLEIQLGTLHFIEVVDGHFQVTFSFPTSLFHLRPDFFFLLPVILQLQRQEQQEKVDEESLRSEGKKEPNWVRSFNCGIKRALTPRGMCWSSFQNKFSDPVPPKGFGLGVVKVATAMGITSW

SEQ ID NO: 948169 - protein, 68 aa, Homo sapiens
  misc_feature (2)..(2): Xaa can be any naturally occurring amino acid
FXTPKILAPRVLGLEPFPTKWKRKNEEVRRFSDFLRAYNPCQVILHRWIPFPKKPLLCSGTLCVSPQK

SEQ ID NO: 948170 - protein, 118 aa, Homo sapiens
RRLGKVAKERVHATWLRRKRRRWSPPERSRARLGAALRRALRRGPALAPERLALTASRQEGPPAAETGRSSSPRAGGQWRGASLVPGRAGRAGPLTGGAEPSAAGPAVLPARHTAKLS

SEQ ID NO: 948171 - protein, 121 aa, Homo sapiens
GFYPKGLGPATKTPSLLVPASSGGPPPFFSRVGPPFCPPFLGGFFGGPPPGGFGPPFFPPRGFPFFFFFSPPAPVGAPPGPFGGPGARLGGGGPPLFFFFFWPGEGGFFSPPPPGGGSGVP

SEQ ID NO: 948172 - protein, 106 aa, Homo sapiens
LGASMDAGPILRGSALLSLCLQHFLGGLVTTVTFIGMMRCSQLAPRALQATHYSLLATLELLGKLLLGTLAGGLADGLGPHPCFLFLFILFAFPVLYLDLAPSPFF

SEQ ID NO: 948173 - protein, 110 aa, Homo sapiens
TSSPVSPMVQFPSSSNIPTQPPSKSFGKPEDAAPKTRGQGQKEVVETACQQGLSARVGPLPFRDLFGVHLGVPPRDHLQLATPQAPVPAALLVPETPGLLGGSNKANPDQ

SEQ ID NO: 948174 - protein, 101 aa, Homo sapiens
GFGRFSPPPAPFLGPAQGIWALGFFSKWGVSKGPPPGEETKGVPLGGGGGPIPFPPFGGGPFWGKGAGGGAQSPPAQGPLSRFVFKKLAPPPFGGGEVLPP

SEQ ID NO: 948175 - protein, 197 aa, Homo sapiens
LWVRWNSPTGGGSAINEPGPVEGSLVPKPVTPLPGGQPRVWKGFNKTQLGIIAPFWLKKPGKPIGPRGAEGALQLGLFFPPAKALQVGIVDQVVPEKQVQSIALSAKAQWMAIPDHAGQLTKAIMGKAPATRLVTQRNGDGQNFVSFISKKPHPKVPANVLKKAQKKKRLTIGLPQAYAHTGPCGSQGGFKQGIFQL

SEQ ID NO: 948176 - protein, 82 aa, Homo sapiens
MLRQIIGQAKKHSSLIPLFVFIGTGATGATLDLLRLALFKPKGFVGPENNPEPWNKLGPNDQNKFYSVNVDYSQLKKERPDF

SEQ ID NO: 948177 - protein, 121 aa, Homo sapiens
LKSSQIGEELFMSLTMAWKSPPRAPHSFSAVSMLWLGRAAAAARRTERGEQRKGGGQAARALAPRPGRASRLQAALSGRPRRAPGSRASGGRRGPCRSGAGGRRGGRGAGSSRRSPSSRSR

SEQ ID NO: 948178 - protein, 110 aa, Homo sapiens
  misc_feature (13)..(13): Xaa can be any naturally occurring amino acid
  misc_feature (76)..(76): Xaa can be any naturally occurring amino acid
LQQLDQFKKATGXTAFGSGTRAPEQKPWRKRKANIRWVKENKEVVLQWFPENSNKSPALEVTRPPSKVPTVSIPTXGAGPPFLEPQAPVSSPQGQSFQPTVSLPVRQSSS

SEQ ID NO: 948179 - protein, 130 aa, Homo sapiens
MLYSQMKENLKGFFPRLLGEGGSIWVWKKPMGLKISLGWGFRGPPRKLKASGVWLCSFYRRKATHPRILKFGILPRKGIFGGAPPKPFPPLKREKTLLGPQNLLFFKVGEILVGFSFWGGEKSFFLKGIR

SEQ ID NO: 948180 - protein, 105 aa, Homo sapiens
VPAADSQALSLLRRAPPPGATRGPRVVRVLPGLCPPPGLPRLLLAMFSRPVSLDFSSPPGPSSGPSPPGPGFPGPPPPPRGGPFFNPKPKNPPALAVPPTPGPGS

SEQ ID NO: 948181 - protein, 96 aa, Homo sapiens
AQGVISGGFQTCRQFKDGGPRLRLFRVNPTDQNKEHLDLLVKAMWYKAVQKKSSMLVPEDFRGEIQMLSSLTGMERPRLHYNYNISLAMWLLRPVP

SEQ ID NO: 948182 - protein, 106 aa, Homo sapiens
  misc_feature (59)..(59): Xaa can be any naturally occurring amino acid
SQTTFSSQVTWVEVLTNPSGHLGRHLGVPKRLGGGPPSPVWWFWNPWPFPGPCRVFPPXPQTRGLFPQGFFLEFRPPPGGAKLGFGLGKPPRNPRGGSNPVSPPLF

SEQ ID NO: 948183 - protein, 194 aa, Homo sapiens
  misc_feature (61)..(61): Xaa can be any naturally occurring amino acid
GLGPFVRGFCLLHAPTEAGWAAPTVYFSRLFFFLLSRGHARPPSFFFFPNPQGKGVSPFFXMGGGGGLPPLFFFTPGGGSPPGVGGGAGGFFLTRVFRGFPPPPPWSAPLLFWVFNFLGRGPPLSPKNPPVFFWPPLLKKIFLGGGGGGAPPGVGFRPLGPPPFSRGGGAPGFAFFPGGFAGFFFGPINAPPRF

SEQ ID NO: 948184 - protein, 115 aa, Homo sapiens
YSHTGMDACVCNKHFDPGNWVYLSPCEPEAQAYVFTLFRSWGLNQRIAIVEYARQSPRHYTVTFTFRPLTSCKGHQITRNSEGKSVVQSWWDQSVCMIIHMILNMKEPVYKLGRP

SEQ ID NO: 948185 - protein, 70 aa, Homo sapiens
MIMGATKMAFGRGNKEFIVFNNDEWTFSLTLQTGLPDGTYCNVIYGDTINGNCTGIKIYVYDGTKSSFFI

SEQ ID NO: 948186 - protein, 41 aa, Homo sapiens
GGGGGGGQVLVEPLPSPVLFASSGLKLFVRIPLGLKRKNKD

SEQ ID NO: 948187 - protein, 140 aa, Homo sapiens
VWYLVHALRLPIPLARHFGVVTARYRWVAGVYLLLGFLLLPLAAFGLSLAGGMVLAAVGGPLVGLVLLVILVMVLQRPRPAWLPVRLRSWAWLPVWLHSLEPWDRLVTRCCPCNVCSPPKATTKEAYCYENPEILASQQL

SEQ ID NO: 948188 - protein, 134 aa, Homo sapiens
  misc_feature (49)..(49): Xaa can be any naturally occurring amino acid
  misc_feature (51)..(52): Xaa can be any naturally occurring amino acid
  misc_feature (60)..(60): Xaa can be any naturally occurring amino acid
GGQNGHPPTVPFKVKGRWGWGGNPPSRPPGGMGFVSAPGLKKLFIRGGXNXXTPSARGCXAPLGNFAKAPFDAIFKTYRYLPPPLWKETVFPKFPYQEFPDPLVKTPPKVSVQRDSGSHAVGPHKGVFIQRKIK

SEQ ID NO: 948189 - protein, 110 aa, Homo sapiens
RGFTPRMVGFLGPGGPGVPPQRVPSWASAQEPSQGPPPFLVTSILGGATEDWKKGDPFFCMVGPEALPLAFPQKTLGRLGGEPPPVNVFVVMAEVGGPCFLAARLSPPLN

SEQ ID NO: 948190 - protein, 152 aa, Homo sapiens
  misc_feature (39)..(39): Xaa can be any naturally occurring amino acid
RKWGARIPPGPFFFSPLGPPRGKGGVFLNPPGGGFLFGXGPWVPNGVPLRRTPPNFVFAPSPQMGFGRGKIPNLFFGGFFQKEKGGGAPPPGGEGFFPPKKRNFGFGGGASLFRKGGAPNFSPKSKVFLGSGGPRGWGLFWGRGFFPPNGGF

SEQ ID NO: 948191 - protein, 145 aa, Homo sapiens
TPPRLRSGGARESLPGRGRLPRKYNELLKSSQGKRLNPPPLWDQLNEQFNWVSRLANLTQGEDQYYLGVPTVASHTFESDVPSGVTEVVVKLFDFDPIPVPVPVEVSRKTPKFMETGAKKSPAGIPQKAPGGVKCGCCFCPHGGI

SEQ ID NO: 948192 - protein, 125 aa, Homo sapiens
PQNKNPPPGGGWFFKPSGNPVWFSPPPLGGAPRGGGEKPPFFFFLPSLKRRGAPHHVGPLLSPGLSCVTIPACYISVFFPMDWGLLTPRTQPVGPGRGQPARKSRAGIKRKINYKIIFNNQSDSL

SEQ ID NO: 948193 - protein, 110 aa, Homo sapiens
RLFMGMVFKGPTKKFLGAGFSHNPPRENPVEVPFKGDVDPPPQHLLGGIPFTGPFLGAVKLKKLGRGTPFIRVPPRAFLGGEARKPPVLENYPKKSNGILGPPPPLLKIF

SEQ ID NO: 948194 - protein, 30 aa, Homo sapiens
GLRVKFNDFRELLGSYVLFTGRTRVCEGMT

SEQ ID NO: 948195 - protein, 73 aa, Homo sapiens
MTVAILLVMEGLSAFLHALRLHWVEFQNKFYSGPGYKLSPFPFAAPDDQGPLQVLPDLLPDLRQERNKDGPPW

SEQ ID NO: 948196 - protein, 188 aa, Homo sapiens
  misc_feature (28)..(28): Xaa can be any naturally occurring amino acid
GAKPIWFSTILEKPPGVPPGLLRVGVVXALSKVRRPVTSLEMSLAPMRNLKARLDNNLREVEAPFALQMEQLNGAFCPFSQSWPTPGPRGSRRPPRFRALLTLKAKLGGEIAPPPPLLENGEGFYFGDALGSSNSLQTLQKTPPPRIVDGKVVFETHSPQVFGPLAPQSRGPFGGPGAHKKFRVPWVA

SEQ ID NO: 948197 - protein, 37 aa, Homo sapiens
RYSGVCLESVQEAEAGGLFELKVFENIVYYDYTCRIA

SEQ ID NO: 948198 - protein, 33 aa, Homo sapiens
GTCKDQILLSKLDLLLNAGCNCLRIVITTGEYC

SEQ ID NO: 948199 - protein, 58 aa, Homo sapiens
  misc_feature (23)..(23): Xaa can be any naturally occurring amino acid
VIAEPKKKRERDLELEMGDDYIXDLQKYWDLMNSSEKYDKIPEIWEGHNVADYIDPAI

SEQ ID NO: 948200 - protein, 114 aa, Homo sapiens
AELVNAPLGTIKSRRNRAKAHLIITAAQEVAEDVSDEIEGRADGIDTATVTLAKSAYVLSAYCLWEYMRRYSRSTKIVRVGCHNAVMNARRYRRIIVAENTPDNTAGRHYRRLL

SEQ ID NO: 948201 - protein, 122 aa, Homo sapiens
  misc_feature (18)..(19): Xaa can be any naturally occurring amino acid
  misc_feature (34)..(34): Xaa can be any naturally occurring amino acid
  misc_feature (74)..(74): Xaa can be any naturally occurring amino acid
  misc_feature (81)..(81): Xaa can be any naturally occurring amino acid
  misc_feature (93)..(93): Xaa can be any naturally occurring amino acid
  misc_feature (95)..(95): Xaa can be any naturally occurring amino acid
  misc_feature (103)..(103): Xaa can be any naturally occurring amino acid
  misc_feature (111)..(112): Xaa can be any naturally occurring amino acid
MATYLIGDVHGCYDELIXXLDKVEFTPGKDTLWXTGDLVARGPGSLDVLRYVKSLGDSVRLVLGNHDLHLLAVXAGISRNXPKDRLTPLLEAXDXDGACLTGXGASLCCKXXRRRKKLVDGP

SEQ ID NO: 948202 - protein, 107 aa, Homo sapiens
  misc_feature (98)..(98): Xaa can be any naturally occurring amino acid
MATRTLCIPSSRLSRGRLGMAAPFGCGSRTSSSSGPRSNYGFFAGDEARLLIIPDIFSVLHPEQGHSKIMNRDGERQYLFHISGGGGCELSSKRYLQXRFQVPQCLL

SEQ ID NO: 948203 - protein, 117 aa, Homo sapiens
  misc_feature (4)..(4): Xaa can be any naturally occurring amino acid
  misc_feature (13)..(13): Xaa can be any naturally occurring amino acid
GENXCGTQTPPKXNQKKTRFGACGVLPTKIPRLFFFTFKNQQARATCEKSLCFLPSSPPGEKKGCGVFTSGGPPSPLITPGKPLCFALENTRNFCTLKGPFPSSLPRRWFLFNPPPF

SEQ ID NO: 948204 - protein, 37 aa, Homo sapiens
PPPLGGLGKGFFWGRLNVEDPEDLKNEEMDLEEQEGY

SEQ ID NO: 948205 - protein, 30 aa, Homo sapiens
SPAFFHFAHFGFFATAKYPFTLFNPDGGPP

SEQ ID NO: 948206 - protein, 112 aa, Homo sapiens
VIKWNIKRGFAGEGKCGKCNAQTKAVELEVCPAASPGEGGPGGQRLPREKDALSGRGMGGPLGGGGGPARDLSGRDPGGARGPVPPERDGGGPRYPRGGKVKGPPGKKDPDF

SEQ ID NO: 948207 - protein, 101 aa, Homo sapiens
  misc_feature (54)..(54): Xaa can be any naturally occurring amino acid
PPSCRFSGLKGESGIEFGPFPPPGGGDPLKEVGVGPPLPIWGEYPRGAPPPRLXPKFFPRGVFSRKGALPKVVLRGGGGFLPPKNSPGPNPWGSLGPPRPP

SEQ ID NO: 948208 - protein, 97 aa, Homo sapiens
SRVGMDYGSCFLRPAGSVDASAMVRCFLGRDPKQGAFLLSRGLRVGGCEPEPQVFGVEHWTAQYGMRCGGGGVFVLGSGWGRIWFVPGFGGVPERLS

SEQ ID NO: 948209 - protein, 147 aa, Homo sapiens
  misc_feature (25)..(25): Xaa can be any naturally occurring amino acid
  misc_feature (30)..(30): Xaa can be any naturally occurring amino acid
MFKRGPPSTPKGGWSWFLVGDIRPXDRPIXEGADKALKPFQEGFKPVETFSEFLDVAGFLSKIPDPKRFLKGLLNSVPWPPPNNWGGEKKGGLPSPLCFPSLGIKFPPGEGGLLPPPPLFHFFWGGWGVLGFLFFFGGGGPPLWGCL

SEQ ID NO: 948210 - protein, 85 aa, Homo sapiens
SLEGDDTCTDLYPPELFTCTDLGRTEGVDSNDEGRRETTVYRGMSKKRGKKPLGSLKMKFKILLRKPKSFSSCKQRRLIKALFRD

SEQ ID NO: 948211 - protein, 131 aa, Homo sapiens
VGQTLVLIENEGLGTQKEQYIRATSVSAVERTFTYNNDQDYKASVVTVEISDALRYDFTGSPATRTFTRATNSTKVRDTVVADAGTYVGVVPLTQAASVGDFTIKGTSIYTQLVPSAQTETPISFVPPYAA

SEQ ID NO: 948212 - protein, 89 aa, Homo sapiens
LALRTLPAPSWVRGSGPPVMTRLQDAPVVRPGFLSTAEEETLSRELEPELLHLRDEYDHWDVTIHGFRETEKSRWSEASRTIMQRVQAA

SEQ ID NO: 948213 - protein, 128 aa, Homo sapiens
  misc_feature (53)..(53): Xaa can be any naturally occurring amino acid
FGLRVHLLPPPLEELALKKLVTFTCLAPGFSPKDVLVRWLQGSQELPREKYLXWASRQEPSQGTPPFVVTSILGVAAKDWKKGDTFSCMVGQEALPLAFTQKTIDRLGGKPTHVNVFVVMGEVGGPCF

SEQ ID NO: 948214 - protein, 55 aa, Homo sapiens
MIMATPAIQAWNRVGSIINFVFLSQPEKLCQLPARESFVPVPSPFRDVGNHNHAA

SEQ ID NO: 948215 - protein, 117 aa, Homo sapiens
  misc_feature (11)..(11): Xaa can be any naturally occurring amino acid
MALNFEEFGNXPLVERVPGKPVGVESFQNNPPLGRFAVRKIKQTVAGGVIKPMDKKAAGAGKVPRFAQEAQKGKGILSLKPAPPLFNQGGRRVSKLFVSIGHLSLVGKDGLNDNNAW

SEQ ID NO: 948216 - protein, 84 aa, Homo sapiens
MPHSHWERIASARWTHVLMGLCLEGDQPGLSPAPTGPSTYPAPQSIAVNEPQPQPRGVNSLLPVFGGCGVNMEAVVQQRQGERP

SEQ ID NO: 948217 - protein, 97 aa, Homo sapiens
  misc_feature (31)..(31): Xaa can be any naturally occurring amino acid
EWVFPGAFADRPLGSPGLQFSLGPLTILARXACLTPVPSGGFPFCFLPVSPMFSVGGPLLGPLFCHHLKTPTPNIECHLCLPPGSPLGPVFDSTQLL

SEQ ID NO: 948218 - protein, 88 aa, Homo sapiens
VSSPPGVENSNLATPRIQHPFGFVPFGYGVRPCLGRRIAELEMQLLLARLIQKYKVVLAPKTGELKSVARIVLVPNKKVGLQFLQKQC

SEQ ID NO: 948219 - protein, 62 aa, Homo sapiens
CTENFTRIVDRLLDGYDNRLRPGFGGPGAEVKSDIYVTSFGPVSDGEMEYTMDVFVRQTWID

SEQ ID NO: 948220 - protein, 73 aa, Homo sapiens
LFLLLFLFFFFLLLLLFFLLLVLLPSARRQTEDSLEISEISSLGFASAKTVGIKDADYCIIVILLISQWKDYR

SEQ ID NO: 948221 - protein, 126 aa, Homo sapiens
MLKPLHCQMKMMICEEHEAGAQRQKSSFIGNCPVMWCSVFATLLYSCAEHVLNLFGMQKEMNGLRSECGSSENNSFIFWTCVFSCLVLQNILPSSFKSSVKTATVSSQNSVVNLVTVIPIPFSFRS

SEQ ID NO: 948222 - protein, 82 aa, Homo sapiens
MYVEPEDRREQYRNPCESDEMSHQQKLPCEQARRTTVRRPLDLDRRDDPYCPEPKRPTLDEPYHYDFNTQHGFHEFEHRDRG

SEQ ID NO: 948223 - protein, 41 aa, Homo sapiens
APPATRPARAGGRVPRTERRVRDPVRIASRPEKRKENGMRP

SEQ ID NO: 948224 - protein, 66 aa, Homo sapiens
RECVLVDAGILRLPLSGKLGSNVDDEGADTAIGPTKAVLFHLAQDPVGQRRLPVDEPRRVLNPEPP

SEQ ID NO: 948225 - protein, 77 aa, Homo sapiens
  misc_feature (13)..(13): Xaa can be any naturally occurring amino acid
AQIPKGVTPKLVXFAFFAPPQLGKGVCARFSQGVRLVRPKAKAKAQAKVQTKAQGAAPGLVPGQGPQGTRAPTKGLK

SEQ ID NO: 948226 - protein, 103 aa, Homo sapiens
  misc_feature (1)..(1): Xaa can be any naturally occurring amino acid
  misc_feature (47)..(47): Xaa can be any naturally occurring amino acid
  misc_feature (85)..(85): Xaa can be any naturally occurring amino acid
XFQNFLKAHVGATCTPIHHTYLQQLLGALHPPLPATVAGRTTSDLFXLFQVTIIISPNICQFPRTIKSPYRTFYAMPTKKHFLPXTVSDPWDNHRQLRAAFSR

SEQ ID NO: 948227 - protein, 34 aa, Homo sapiens
GNKRQWAKADVYGINGRADQRANVEVPVSLKIHM

SEQ ID NO: 948228 - protein, 82 aa, Homo sapiens
RQIKGFRQGFWEEPAYSNPSLLLGPPRSHSKALAQIPAGPTPGYKVGQGKRFFSSVEDFPGFVWGRGPPSCIGLGGFCLSVK

SEQ ID NO: 948229 - protein, 51 aa, Homo sapiens
CGHCMAAHRQLGEEEPTVSGGSGQQPVQAGRVECCVANLCRSVLKGSLLVG

SEQ ID NO: 948230 - protein, 82 aa, Homo sapiens
IEQYCGEEEVHLDGGAMCGSQAKLDCGGQAKSQQFVMMRESSEQVLSRWPVDELEPICVNGPKFIVCQCIPISHGAYFISYF

SEQ ID NO: 948231 - protein, 46 aa, Homo sapiens
WVRKRIGAYFPPVSLEELRPYFRRPVGVAFARAPLDVHQKYKAKTQ

SEQ ID NO: 948232 - protein, 53 aa, Homo sapiens
ALKLDGRKAMADAFQKLLIVVVGKTVLIILDVRQCQKASKFSLKSDLNENVDL

SEQ ID NO: 948233 - protein, 109 aa, Homo sapiens
GAPGSPPPPAVPQSAGPLPADPLLSFHLDLGPSMLDAVLGVMDAGRPEAVAAKPDGEPRPGKQPPQARCRPNGDLELNEVIGLYGSLIPRALPARHPIFVNINGQGVCP

SEQ ID NO: 948234 - protein, 33 aa, Homo sapiens
MRPDERKNLPIWTKGAVAVNDSTAMALGLLWPI

SEQ ID NO: 948235 - protein, 166 aa, Homo sapiens
GVPGLRNLPINKSPALVRCGAFAFNEGSMRLRQDLGKPKLVPADLDEIPPDRCARCVDDQRLGLVLIDPRSDERREQLAVPSPIQTRNGGGELVDVGRSFAELERHVMVEDADDLPARRGQMHVASVIPEWTEGSGERIQKLGDVGTNFRCPLHRQIRTLDRSVAA

SEQ ID NO: 948236 - protein, 104 aa, Homo sapiens
  misc_feature (5)..(5): Xaa can be any naturally occurring amino acid
  misc_feature (50)..(50): Xaa can be any naturally occurring amino acid
NPPRXWFFSPQIGGGGFSPSSPPKAFKKRALSPHKSYVGPPPPPLFNSRXGQQELKFWKFFPPPQECKLHEGPDFFLFFFSIPKVRPHLNLAKRSCLIKTCLSM

SEQ ID NO: 948237 - protein, 56 aa, Homo sapiens
PHQQPQGRHKCQVFQRHITAQAFLSLIQGDSIPPGKISQPRLQKSLCPERGTLARP

SEQ ID NO: 948238 - protein, 43 aa, Homo sapiens
LVRVVFLQVAVTAHFVLGPRDAGLARGHAPAQFCSIRREETAA

SEQ ID NO: 948239 - protein, 54 aa, Homo sapiens
RHEGDRELALQGLDLHLFCSHSCARVGPRRPPRRPRREVIFLPLFLPPPFLTRP

SEQ ID NO: 948240 - protein, 33 aa, Homo sapiens
MLVANSQFDMGSKFGHSRSRMADQSRYVNVPVT

SEQ ID NO: 948241 - protein, 75 aa, Homo sapiens
RIRHEEGIEKIPLVTAVSKDLSSAFFGCGMNKRPIEETGFLLPLNPVAGSTDVGGILLAARGEGDMCEPMIGSLD

SEQ ID NO: 948242 - protein, 70 aa, Homo sapiens
DVGVRSSLAWSDQHRLMWTCDTVVFLSPAPVRARGRCGVQAAQPEGLCMRALGPVMGLTWWIHIKPVSVG

SEQ ID NO: 948243 - protein, 70 aa, Homo sapiens
IVSPGLSVLVCHRAVRLFSKIAVQRALKTAGPQQEAPSRPRQWRRFIFRQKRNGQAGTVARACNPSTLGG

SEQ ID NO: 948244 - protein, 110 aa, Homo sapiens
LYQQEAIAILTLEGQGGKQCYQSPVKTAVMKEGPPCKRHHYYQNWGAKLLGFFFGETNQKHLLESPGGPKKGWKKNLGKEMENKQPSVIHFCKFLCKRLSVRNKVILLVA

SEQ ID NO: 948245 - protein, 126 aa, Homo sapiens
MANPNSLPTNNPFTTAVTVAYDQRHKHADHALNQDHPIHAKNTTDNQTGDHKVQQIGIFHQQVNGSHYVCLEEIKETNTDDTIRHRIAGPPISRNTGILFPNCASAKPSVIITARPPIIFFGKRVD

SEQ ID NO: 948246 - protein, 47 aa, Homo sapiens
NSGLCIFPSTQPALLTGVPDSAEVSSVSPVAQAKVLGLLLTSVSGRR

SEQ ID NO: 948247 - protein, 81 aa, Homo sapiens
AQEGAGSLIDELRLCEKVRKASLAIVPEKGQSHGYFWPSRLPRRWVSGWGSFGRRKRLVWQGPQGCGGLLSKTSSLPWKGR

SEQ ID NO: 948248 - protein, 141 aa, Homo sapiens
  misc_feature (24)..(24): Xaa can be any naturally occurring amino acid
SDQAEELEPASALLDHPDVATHLXHTPEPSPLPPGWEERQDVLGRTYYVNHESRRTQWKRPSPDDDLTDEDNDDMQLQAQRAFTTRRQISEDVDGPDNRESPENWGIVREDENTEYSGQAVQSPPSGHIDVQTHPAEEGVD

SEQ ID NO: 948249 - protein, 109 aa, Homo sapiens
VDGQSGAVETKGEREGEKGVRERRAESKRIRKRGGTNRDTNRERQREREAETQTDTQRQTERDRDRQRETKTNRDTNRERQREREAEEEMERLRERDREEKESQVYSRR

SEQ ID NO: 948250 - protein, 108 aa, Homo sapiens
LPSAFCLSSPLLSLNSAAFFSFLLGLSMHTPLCILQVPWVHMCSCFVCAPLHACGLVCMHAWCFCVQMCVCSLCAHADGPVCMHACIQSCTVPCVHTCMPFPRDRAVD

SEQ ID NO: 948251 - protein, 37 aa, Homo sapiens
GQGYTSSCAPLIEPPNKLSRSIVGERRVVKLPRTPDH

SEQ ID NO: 948252 - protein, 66 aa, Homo sapiens
MAAVRGNKPVILRHLLENHGFSFCLSDSGCLFLFNTHMHMDVHTHVYAQAWARTQIYTHRYTHTST

SEQ ID NO: 948253 - protein, 134 aa, Homo sapiens
CAVLCCLCCAVLSVLCCVVCAVLCCAVYAVMCCPVCPVLWCLCCLCCLCCAVLCCAVCAVLFVLCFAVCAVCAVMCCLCCAVCAVLSLMCCVVCAVCAVCAVCAVLLLLSSCHCEKWVVFSFMSSFIRLLSPTI

SEQ ID NO: 948254 - protein, 108 aa, Homo sapiens
MSNSDFFLSGLKYLHSAGILHRDIKPGNLLVNSNCLLKVTVYTFVLAVSLCVNFLKRHTRKHYASQEKNELSRGQYGLKNFVYTPFDKHTCVLCCNYTGQPTLIIPST

SEQ ID NO: 948255 - protein, 117 aa, Homo sapiens
MLTELENPLNSIIDVYHNVLLDKGEFPCRLSADLTHLLETECLQYISHNGADVWFQELHINTDGAVNFQQFLILVTQLAVAAHQPSHARKPPRVPESLGPEAGPLDMYLQNNKVINT

SEQ ID NO: 948256 - protein, 156 aa, Homo sapiens
RRMKGEWWIIEEWEDDGLWKDDGMDDGLEDDGMDDGLWEDDGMDDGLWEDDEMDDGRMAEWMLVYEKDDGMDDGLWEDDGMDDGLWKDDGMDDGRMAEWMLVYGRMMEWMLVYEEDDGMDDGLWKDDGMDDGLWEDDGMDDGLCLKHRCSCDAGRH

SEQ ID NO: 948257 - protein, 33 aa, Homo sapiens
TPHTHTHSMLCQALTLYTGSPLNPGNKKSDPVD

SEQ ID NO: 948258 - protein, 52 aa, Homo sapiens
MIRSDFTHTAHTHSTLLHRSGQILHTQHTLTQRCCINPVRFYTHSTHSLNVD

SEQ ID NO: 948259 - protein, 34 aa, Homo sapiens
VSIMELPCPKRHTGIILDSSGRCPPDDEEVIVDA

SEQ ID NO: 948260 - protein, 56 aa, Homo sapiens
MSSFLIQVHSRHGELLVDYLVTQVSGLVPISYFFLILSLLLPSTLSQAPGRRGREF

SEQ ID NO: 948261 - protein, 82 aa, Homo sapiens
MVVICTISVDIQLFEAHVCTVFPDIGGHSVSSNFFRSSVVDGMDIPLYQGVFVASVDDRAKGFIQIGQSTLPGMPHQVFGRR

SEQ ID NO: 948262 - protein, 111 aa, Homo sapiens
KAKHSRDSTARTAQTSQHRQHRQHRQHSTDSTAQHRQQSTPQHSTDSTAQTALNAHAHAHSCTPQSRESHKYGSPHIGYRQTKDLISMVRSTWSIQEHGWNGGVYPGKAST

SEQ ID NO: 948263 - protein, 113 aa, Homo sapiens
FFFLRLSLTLSPRLERSGTILAHCNLRILGSSDSLASDSQVAEITEVHHHTPLIFVFLVEKGFHHVGRAGLELPTSSDPPASVSQNVGITGVSHHAQQACPYIIILHNIPRRR

SEQ ID NO: 948264 - protein, 47 aa, Homo sapiens
MTNQYPRALVSSCIYIKRWLQSAITGKRGPLVMQTLYAPVQVDAAAN

SEQ ID NO: 948265 - protein, 125 aa, Homo sapiens
  misc_feature (25)..(25): Xaa can be any naturally occurring amino acid
  misc_feature (56)..(56): Xaa can be any naturally occurring amino acid
STMVCVDNSEYMRNGDFLPTKLQAXQDAVNIVCHSKTHSNPKNNVNLITLTNNYKXLTTLTPDTNHILSKLHTIQPKDKITFYTSIHITHLTLKHQQSKNHKMRIITFIENPVKNNEKNEINTEK

SEQ ID NO: 948266 - protein, 139 aa, Homo sapiens
  misc_feature (16)..(16): Xaa can be any naturally occurring amino acid
  misc_feature (21)..(21): Xaa can be any naturally occurring amino acid
  misc_feature (24)..(24): Xaa can be any naturally occurring amino acid
  misc_feature (70)..(71): Xaa can be any naturally occurring amino acid
  misc_feature (105)..(105): Xaa can be any naturally occurring amino acid
  misc_feature (117)..(117): Xaa can be any naturally occurring amino acid
  misc_feature (137)..(137): Xaa can be any naturally occurring amino acid
MADDLNFETRNTRASXTFPMXCSXLRKNGFIVLKKPPYKIIKISTSKTNKHHHTKVHLININIFTEKKYXXIYPSTHNYNIPNIKKNNFQLITIQDKYLSLLQNXREIRKNLHLPYXNLCKEIKRKYDCREKILITXLS

SEQ ID NO: 948267 - protein, 141 aa, Homo sapiens
  misc_feature (98)..(98): Xaa can be any naturally occurring amino acid
  misc_feature (127)..(127): Xaa can be any naturally occurring amino acid
LGTMASLSLAPVNIFKAGADEERAETARLTSFIGAITIGDLIKSTLGPKGMDKILLSSKQDASLMVTNDSTTILKNININNPATKVLVNISKIQNNKXNNSTTSITILATELLKKTESLITKKIHPXTIMRIKEKPRKLQE

SEQ ID NO: 948268 - protein, 124 aa, Homo sapiens
  misc_feature (13)..(13): Xaa can be any naturally occurring amino acid
  misc_feature (78)..(78): Xaa can be any naturally occurring amino acid
TKWPKTPLLLEAXEFMAEKSNEKFWQFLETVQKLAIYKQTESDYSYYNLILKKARQFLNNLHINLLKFAFSIKAYSPXIQIFQQITANKPPPNNYNTFIIIHKKHTYKINKIKKLLKRATSKTR

SEQ ID NO: 948269 - protein, 74 aa, Homo sapiens
  misc_feature (70)..(70): Xaa can be any naturally occurring amino acid
ELCDVAACGDCKQPRRARPSLFRCRRGNGNICPTCRKPSGGDNCTPLRSLPHRSSTYVLTRQAHQNGHIXSKKL

SEQ ID NO: 948270 - protein, 115 aa, Homo sapiens
  misc_feature (25)..(25): Xaa can be any naturally occurring amino acid
RGRNLVGPLVRGLRMGLGGLVFIKXPLCPAHHIFITSKGRDWVPPSSEFTSHCSPVGEPTLPPAWVGDRGGGTGGGGSPCTYPAIPTPGINSRGFGFYFNFFVLIFLIRIFILSP

SEQ ID NO: 948271 - protein, 108 aa, Homo sapiens
  misc_feature (3)..(3): Xaa can be any naturally occurring amino acid
  misc_feature (33)..(33): Xaa can be any naturally occurring amino acid
  misc_feature (56)..(56): Xaa can be any naturally occurring amino acid
  misc_feature (63)..(63): Xaa can be any naturally occurring amino acid
  misc_feature (96)..(96): Xaa can be any naturally occurring amino acid
MKXSAFFICRKDGFRLWPLPFKSFQGVPSTPSXYEGLIIPFPSCPWASPGPFVPFXGLMPQRXGLAPICILSLRRIGPAVGFESYRLQWCGREPWXVESETTRSTTAS

SEQ ID NO: 948272 - protein, 99 aa, Homo sapiens
ACPPPPGPPAPPLGDKVPPPHPSPHSSGPPAPVPVTDCPKPPGFPPPPGGLGPFHLGFLLSRGSSASPPFGWGSLPGVSPPAPVLGPPAPAVVKPPPKI

SEQ ID NO: 948273 - protein, 146 aa, Homo sapiens
  misc_feature (13)..(13): Xaa can be any naturally occurring amino acid
  misc_feature (27)..(27): Xaa can be any naturally occurring amino acid
HWLPRYPMYTSNXKVTPPPRRQNEKVXISWILTFPSLKEPIPYNLGAKTPPASIEVDDNIELISGQNERMGPLNISTPVEPVVASKSDVSPIIQPVPSIKNVPQIDGTKKPAVKLPEEHTIKFPSTHHTQQSPQSAKVFLIVPPSQ

SEQ ID NO: 948274 - protein, 69 aa, Homo sapiens
  misc_feature (62)..(62): Xaa can be any naturally occurring amino acid
GSRPFAPLHWVPIQTQIIDVDFLTDKEWDWVNNSHLPCRDVIGKELQKQGRQEALEWVIREXQPISQQH

SEQ ID NO: 948275 - protein, 129 aa, Homo sapiens
VGTNSPLDNPLWSISWSLWQKPVGPSQQQPLGLWTKEFPLEGHLLTRNETFTEAPPLKPEIGMLFQMMSKEHFNGDGRAQKSSMTQWKWFIKDHATQGMQRIFFPLGLTLELCEKLLDFTGPNKQLSPA

SEQ ID NO: 948276 - protein, 89 aa, Homo sapiens
MNDGPAPAIPGTPRCLGGHEWCQPTGIPGQVEELKPRQKANPADLITEGNCAAFTVLRLRRAGGRKASRTFEQDPTASGRVWSGLLSEV

SEQ ID NO: 948277 - protein, 73 aa, Homo sapiens
LRFASTLETHQSDALLKWGRSQSGYPGSVKGRLKVCAKRICGMHLLQLVLLSNHSDLASSLIKLQSRVSRAGD

SEQ ID NO: 948278 - protein, 164 aa, Homo sapiens
GTPLRFVAKPGSHPRCLFFPAPRGPLGDPFVASRNHKSPVGPLWEAPPPVGWKAKNPSCLFSQPPPPNWGSSGLVFFRAPSWGAPPKVVLDPPKRGGPLGVFFFSQEKFIWAPLGFRCNDPSPGVFSPLRLGNPRDQGEDPPDDTPPPPGWMGVLPPPPRGGPP

SEQ ID NO: 948279 - protein, 134 aa, Homo sapiens
  misc_feature (126)..(126): Xaa can be any naturally occurring amino acid
  misc_feature (134)..(134): Xaa can be any naturally occurring amino acid
VHTKGLALLCDGVFYELTHQLAEATAKPPSTIAVQVVPDQLMAFGGSKEPVAIASLHSIGKIGGAQNRSYSKLLCGLLAERLRISPDRVYINYYYMNARQCGRGTISTFRLRADRDPRLFALVSTXEPAGTCVX

SEQ ID NO: 948280 - protein, 120 aa, Homo sapiens
NQKGIIEAKTAQDFMKNEEYIKKNQSGYGVCSFWREGLLWLTGITNPDSPGFPSQPGGSEQDVIVSGAEGKLHFPESLHLYYESKQRCVWTLLVPEEMHVLLSFSHLDVESRHHVETAGI

SEQ ID NO: 948281 - protein, 63 aa, Homo sapiens
  misc_feature (1)..(1): Xaa can be any naturally occurring amino acid
XGIYRTFYPKTKGYTLFSVPNGTFSKIDHIISHKVGLNRYKNIEIVPCILSDHHGLRLIFSRR

SEQ ID NO: 948282 - protein, 103 aa, Homo sapiens
SIICNHVCSLTYSHIFQVTVYKLTWAELDQKWEAALVQVLAQRVPQLIVPGAPCPLGVAGLPVALPQKLASEPDSLAFWRHPALQLLHSLSQALAFWPPAPST

SEQ ID NO: 948283 - protein, 94 aa, Homo sapiens
GSAYILFIIAILHFIKRRSWQGASINSRSKSLYFETILFSRLFSNNTSHFFISSMIVLVRKSDSTCTYIKIIWFSSAPECFALCCCSGCRVCDC

SEQ ID NO: 948284 - protein, 41 aa, Homo sapiens
EVRRSRKHGKIGNEEKQDAGETGSEEKQDSTDGFSYILCRR

SEQ ID NO: 948285 - protein, 110 aa, Homo sapiens
YRVDRNRVDHNRVDRYRVDRSRVDHNRVDRYRVDRYRVDHNRVDRYRVDHNRVDHNRVDRYRVDRNRVDRYRVDRNRVDHNRVDHNRVDRYRVDRNRVDRYRVTVTGWVD

SEQ ID NO: 948286 - protein, 117 aa, Homo sapiens
TAQGAHCPPRKGALLQLQTPVCTRSSLLRLVGGRAHTRCESHSPQAYWHGAECSDPGPSLTGPLGQELSVFSCHHLTVGTDLTWQILCLPVCSAQGCPATRVNKSCSFPAKQAPRST

SEQ ID NO: 948287 - protein, 46 aa, Homo sapiens
PVQLKGRKTGIAPTYESQQPGTHQTSKLAEGFAPLEKDLAGVFRRR

SEQ ID NO: 948288 - protein, 69 aa, Homo sapiens
MNLQERDAALMLVENVRVLSRITAKVLSALGGGHNGVVNRDGEIMERAVLPREEEELRLAEVQLEVVST

SEQ ID NO: 948289 - protein, 111 aa, Homo sapiens
MNLSGLSVCRWESWPQFHAKHRASTYYSLNGPCCILLPVFTHFVSCRQYNSRLSEGITVIVLGKLQKSVYFSWSDKHFEVTIHVADKNRFLKTEKIRSRCFAKAALQHRRR

SEQ ID NO: 948290 - protein, 69 aa, Homo sapiens
PQGKKVLTEDKGLQRQNRFNGQGVGFGSNLQKKLGKQKYFLGGAGAIGWELLKNFAMIGLGCGEGGEII

SEQ ID NO: 948291 - protein, 40 aa, Homo sapiens
MPGRVIRHEELTGSPSASEGAEPPAAAVFAYPPRTGVRAK

SEQ ID NO: 948292 - protein, 130 aa, Homo sapiens
ELVLGVPRFPPTCPGFPRCRAEGHAHTRPFSSGPPWGTAPRGWGFQRVPSGGRSFSQTLHFQPGQSGFGGQGPPRQQPQGPWGFEVPPLFPSGLFPSSLLPGLFGFACVFSELFFHFANLNKGRPFSEKK

SEQ ID NO: 948293 - protein, 76 aa, Homo sapiens
PKKPEENPAFKFSFASKYAALSVDGEDENEGEDFFRIDLYILCFSPSFSPPWNIREQIKTFFPARQNKTQHLLKKK

SEQ ID NO: 948294 - protein, 141 aa, Homo sapiens
  misc_feature (129)..(130): Xaa can be any naturally occurring amino acid
GTRPRAGIRMSIKLHQYLGSFYFSDEYDDPTVLYEAIVSHEKNLVIAHEGDPAWRSAVLANSPSLLALRHVMDDGTNEYKIIMLNRRYLSFRVIKVNKECVRGLWAGQQQELVFLRNRNPERGSIQNGXXKGGPPKKKGGP

SEQ ID NO: 948295 - protein, 41 aa, Homo sapiens
VALGPQNSARGCGVPQGAHLPLGAPPPPPLPVFRVNVPPVG

SEQ ID NO: 948296 - protein, 73 aa, Homo sapiens
ASILNSDEEESLSMYEIEEVHMKSPSLMGLGHPSFLLPVYLWIGNVGLAGEQKLFSVADFSTSNTKITWRKKK

SEQ ID NO: 948297 - protein, 45 aa, Homo sapiens
RHEEYPHCEEKMVIITTKSVSRYRGQEHCLHPKLRPSGQHEAPGG

SEQ ID NO: 948298 - protein, 135 aa, Homo sapiens
SKRDIEDRIVARSVDADDSDVEVNSDDDSDEDDDDEDDTEALLAELEQIKKERAEEELRKERQQQEEELKVKQAELLRGNPLLNNPTASFNVKRRWDDDVVFKNQSRGETKTAKRFINDTIRNDFHRKFLHKHMK

SEQ ID NO: 948299 - protein, 35 aa, Homo sapiens
WQVVIPPYGREQSTAVNFGALEILTASNRINVVFS

SEQ ID NO: 948300 - protein, 39 aa, Homo sapiens
VDNLLRTIGPHVSSNINIIRKSIRIEMRVANQGDLFFRS

SEQ ID NO: 948301 - protein, 42 aa, Homo sapiens
PWMFSEVAIERSGWYHRNVALIPFVSVNMSSAGQTHINFIHV

SEQ ID NO: 948302 - protein, 70 aa, Homo sapiens
NHQKNNLYTESTIIHNSRDYQMPKGHGRNLTNRNQDHSPSPEPSTPTSPSPGNPNTPETSGPHTPHDPQF

SEQ ID NO: 948303 - protein, 141 aa, Homo sapiens
WRKCHQYWENNRNSGEFRKTGVLDAEFEAHMMDMMVKASKIDVCRGNGAGPNRDRSGPSIGHRGSSPGPRTSNPRPIMMQPRGVMLCPANHETGGPAGPDTHLRCGRAELLYIPANHVTQGKLLADVSSLRQSMTFGAGPA

SEQ ID NO: 948304 - protein, 121 aa, Homo sapiens
MRWVTLFHPIPGARIQRVFFFGCPRKLKMGPVAEVHFRSCFHPVCVFLPFSAIRSWRFAVLLANFGASAGFQINHYPLPHFQAFNKVCCLLRGFEGETRGPGHHKLLTLGKHLAHKVFGTF

SEQ ID NO: 948305 - protein, 46 aa, Homo sapiens
SGTRGYREPVPYCRRKSSGQVRNRGSSWVMLRGASGDVGGMEYLAA

SEQ ID NO: 948306 - protein, 64 aa, Homo sapiens
MHTTVPSVYVIHTSPGTQTQASCLYSKHHGHCLISYSPPPPDLLLKPLPWEGKIVQKVDAAASL

SEQ ID NO: 948307 - protein, 88 aa, Homo sapiens
RCVVSPGRHRPPCCVRVRAPGVGGAEWRFPFSCGSGVCMRESSFHDADGRRGVGAGGRWGSPRPRLSVGLSSPRRQSVITGKENCFKM

SEQ ID NO: 948308 - protein, 80 aa, Homo sapiens
FGHHMNQQRMVTYGVTSGLEETAPGLPAIAAMSVMTTTTVVIGTQCDSLGFEVQLWLKDCDRQQRLGTLPILARIQTPGL

SEQ ID NO: 948309 - protein, 70 aa, Homo sapiens
  misc_feature (38)..(38): Xaa can be any naturally occurring amino acid
QVSSPGGGMGMVTVVLLMSPMMLSASFSAWCMCSILLXCCACFANSSISVFWFPHEYILASGSEMMNSGV

SEQ ID NO: 948310 - protein, 83 aa, Homo sapiens
VKCARERLPESVRELAPLALGHDPELLVVVLEQLVLLDDLGVASFPDRFNRAFHHLRRHPRRHPSDGVAGAAVPATTAPERMR

SEQ ID NO: 948311 - protein, 98 aa, Homo sapiens
VTGSVGSRNIEDSTLYHLMNIILLQRKIDGDSTNSEGEEPTAHVNCQHLEFRRENQLHLISFYVWLTKPPIGLVLILTVQKPNHLSDRRRRGPRLRRP

SEQ ID NO: 948312 - protein, 91 aa, Homo sapiens
GNELKHSIVEPLGQRTKEFPSVFIIMHCYTQETSGRISGNFGMRCLEKSLVFSMRRLDRLSFEVMYGNENHLYSLEKNFMLMANIFRPPPP

SEQ ID NO: 948313 - protein, 63 aa, Homo sapiens
RHEEEKKKESILKTERGRAGEGASCGAPGFPHAACGGCGKEINFSSLWDRRCVETKKNMRHVN

SEQ ID NO: 948314 - protein, 48 aa, Homo sapiens
MESLTHVYKSYVLEKGYLAVIGKHLGRSQAEAGDRREQGWGKELRGGV

SEQ ID NO: 948315 - protein, 45 aa, Homo sapiens
MDNYSEDQVTEKEWSDVIRSLSLSLAQDVLVRLEEGPPHCQEVAA

SEQ ID NO: 948316 - protein, 70 aa, Homo sapiens
MRFPYVPSLVLNSWDQVILLIQPHKVLGVQVCATAPSPYNFYTYNKKLKIQCKNLFCYKEADYGGSVKDY

SEQ ID NO: 948317 - protein, 74 aa, Homo sapiens
  misc_feature (30)..(30): Xaa can be any naturally occurring amino acid
GREASGIFKGFDPLLTFVVGGPIGKMGAPXAQYRFRGDPRQLGLVGGRGRSGGLICPQEGMGAIPTPFIQKGDP

SEQ ID NO: 948318 - protein, 166 aa, Homo sapiens
CLFSILCLLICLCLSFSLSLSSSSISMCFCLRLSSSSLSISFFFSSSSCLCFGIFSIPFLSTSFRLLCSPSIFSSMSIWFCVHLYLSVSIFSNSIRCSLIFLKTSSNSDVFLSLRRAVSISISLSTLFFISSSLRLQSFSLSLSLSNVLSGSVVDAAANLVVVGGR

SEQ ID NO: 948319 - protein, 42 aa, Homo sapiens
HSHTHTCTHLLSLTQRLNPSSFLIVSFLCYTEGTWYNQWTVP

SEQ ID NO: 948320 - protein, 92 aa, Homo sapiens
MTWSESGVINATQRKGPARSNVVLRSDDADIYKTLIVRKLESVPPRMTLWMPDLHRYLRITIHVLLGKCSRASRHMWEGRLFKIIKCVTISL

SEQ ID NO: 948321 - protein, 60 aa, Homo sapiens
MWEDEMTLEHGDVGTRDDHHEITDVEDLVHTYPHRPCNCCVPMMAESSEVRQITQLDPLC

SEQ ID NO: 948322 - protein, 127 aa, Homo sapiens
AEVEEDGEQRMQRISRMGSRGCRGGGGWGAEDAEVQEDGEQRMLEVEQDGEQEDAEVEEDGEQRMHRCRRMGSTGCRGGGGRGAEDGWVEGLTSFRAAVALLGNIVTDVTTRFVLFNVDAAANLVVV

SEQ ID NO: 948323 - protein, 47 aa, Homo sapiens
EPTTQQGVLKATDGAVTLAPRGDPDDDGHRLSPGGSVISEIRKKAFQ

SEQ ID NO: 948324 - protein, 116 aa, Homo sapiens
PGHAYLATLNTMKDVLNDSENKAQVSVNVLSDHDKVEKSLQEKKSCDEILGNQKPALHKLAEETKALEKNVKPDVEKLCKQEFDDLQGKWTKLKVLVTKDIQMLEENAITIRAFAA

SEQ ID NO: 948325 - protein, 67 aa, Homo sapiens
SLSGSPSVNGLASVEYVMNRGEQAYLEYTITDQTMRPEGTGRWTNYLYKPTNATDPKIIKAGSGLYV

SEQ ID NO: 948326 - protein, 53 aa, Homo sapiens
VRGTQDSDVMRELTYPCRFCRSRLTSKLNQLSAFRYVKASVYQSDLNKVVQTQ

SEQ ID NO: 948327 - protein, 86 aa, Homo sapiens
KAQFSPRSADAVLGVPLFDPEAKWPVAKSCLSVSRLQIRDLSGGGESLDSPRASAPFVTLACPVLPTVYFLSVCLRSPMGPVFLCP

SEQ ID NO: 948328 - protein, 118 aa, Homo sapiens
  misc_feature (82)..(82): Xaa can be any naturally occurring amino acid
AQEIDEMNQKLQRLQLALVNRKGPILLHDNARPHVAQPTLQKLNELGYEVLPHPPYSPDLLPTNYHVFKHLNNFLQGKRFHXQQDAENAFQEFVESQSTDFYVTRLKQLFFRWQKFPE

SEQ ID NO: 948329 - protein, 77 aa, Homo sapiens
GFPHTPEHAQRHAREGVISKVGVQPFTHPQVVCPAHLSHPRHRFVQWFDLVVPQAVKGLPSQGQAPNARKFLGASPG

SEQ ID NO: 948330 - protein, 131 aa, Homo sapiens
RIYAMPCASSGDLRGLDESDRPLSYNATRTLSQRFIDQTDWRPWSTFNRHITFILRSDTYTEVVYEPTQGIADRGLRSFGKTFFQATQHQYDFVLADRHHPDFAIGEHRFVRLDMAEKEESSAREFSSSRR

SEQ ID NO: 948331 - protein, 107 aa, Homo sapiens
MTAGVLRGRYIHGNGHGMVQGLQKLQLIIQGFFSCDPAPDLTAQLHDSDDRNQQHQQCAADDLQDDQFVVAPVLATHSRISAPANGDCIKLVRWDAQQVDAAANLVV

SEQ ID NO: 948332 - protein, 49 aa, Homo sapiens
GHSVCLLYNTHYIDLLTVHHLKMKICSGSLGSFNILCRRGREFSSSRRP

SEQ ID NO: 948333 - protein, 121 aa, Homo sapiens
DVCVCVCVCCAVLCCAVLCCAVLCCDVCAVLCCLCCAELSVLCYAVLCCAVCAVCAVLCCLCCAVLSVLCCAACAVMSVMWCVVCAVLSVLCCAVLSVLCCLCCAVLCCMFWQCWCLLCRP

SEQ ID NO: 948334 - protein, 101 aa, Homo sapiens
  misc_feature (1)..(1): Xaa can be any naturally occurring amino acid
  misc_feature (13)..(13): Xaa can be any naturally occurring amino acid
  misc_feature (87)..(87): Xaa can be any naturally occurring amino acid
XLTHNLMSSYVWXVRSVAFPLRFQATEVRICLVEFNPNFVACMILKVEWSVFLEVADNLCLIQVPKGLVEGYEENEEFLRTMHHLLXEVEVIEGTLQCPES

SEQ ID NO: 948335 - protein, 82 aa, Homo sapiens
STSLHHVLPTVLTTTSRKKKPKKTDLVSPLCQQAKKHATVSGHVGDMTHVKVQDKNVPSPAPFRVTQTDSNLKKLQNMKKGY

SEQ ID NO: 948336 - protein, 123 aa, Homo sapiens
MTSHSIPLHSIPLHSIPFHFIPLVLIPFHLNPLHSKWVDSNPFHSIPFHSILLHSTRVDSIPFHCIPFHSINLGLIPFLSIAFHSIPFHSIPFHSIPFHFIPFHSFPLQLELIPCRRGREFSS

SEQ ID NO: 948337 - protein, 56 aa, Homo sapiens
MVYINTIIPETLDPLQFAYRPNRSTDNAISIALHTSLPHLEKRNTYVRMRRRAREF

SEQ ID NO: 948338 - protein, 111 aa, Homo sapiens
MGTATSHRRFSSATVMSLGFFTPLIANTHASGSATICSDGGATLLRTNKRSSGVIRPEPNALRLVSMVLALCTIKLSACFQDAKAGKALACVFAFSWASAADKGVRLAVPA

SEQ ID NO: 948339 - protein, 104 aa, Homo sapiens
IPSSCPQSPFPPVVTIPSRCHHSLPLSPFPPVVTIPSRCHHSLPLSPFPPVVTIPSRCHHSLPLSPFPPVVTIPSRCPQSPFPPVVTIPSRCPQSPFPPVVRRR

SEQ ID NO: 948340 - protein, 102 aa, Homo sapiens
SVSTSGKDLFMFHTTTKPVVRGHDKCLFQLRRLKIFGMGPQILKRFQSCVFESILTGCITAWYGNCLSTDQKVLQKVVYTAKPLYQAVSGEAPKNLLLPPKS

SEQ ID NO: 948341 - protein, 59 aa, Homo sapiens
MGFLAISMDNHLELRGRATINKVPDSSPQQKQQESPRVHCPLSNSVYSGLKGGCGEGRR

SEQ ID NO: 948342 - protein, 50 aa, Homo sapiens
MEVVVVAAVGGSDGGGGGELLWEEVMEEVVVAAVRGSDGGGGGSGCGRGR

SEQ ID NO: 948343 - protein, 121 aa, Homo sapiens
CVCFCENKHMWVPVCMDAYRGACAVLCCLCCLCCAVLCCAVLCCLCCAVLCCLCCTVCAVQSVLWCAVCAMLCCLCCAVLFCAVLCSAVCTVCAVLCCTVLSVQCCAACAVCAVLCCVGRR

SEQ ID NO: 948344 - protein, 94 aa, Homo sapiens
WGARGGQGPLFPPVPGGPKGGRCPPPLGWSKPFGGGFGAPPPGGGENRGGGPPKPPPPWGPPPPGGGGGFSPPARGGAVCPRKSPPPPFFLGFW

SEQ ID NO: 948345 - protein, 108 aa, Homo sapiens
  misc_feature (7)..(7): Xaa can be any naturally occurring amino acid
GRCGFVXVRLIPAPRGTGMVSAPVPKKLLMMAGIDDCYPSARGCTAPLGNFAKAPFDAIFKTYSSLPPALWKETVFPKFPYQGFIDPLVKTPPRVSVQGTQAPAVAPT

SEQ ID NO: 948346 - protein, 110 aa, Homo sapiens
PIQGFSPPGGGGGSPPPPGAGKKGEQRGKGGRPFPPPPPFSLGGVLKRGFCWGWALTQGAGPPFFWGFFPFGGGGGGGPLIFGAPPPSPPPPPKKNPLGGGGGEKIFPPF

SEQ ID NO: 948347 - protein, 30 aa, Homo sapiens
MWVRGRKEKKEPGKALYVTLMEPSYDRQSI

SEQ ID NO: 948348 - protein, 107 aa, Homo sapiens
VGPKTPPFQGGAASRNPFPLGVTPKNFFETLSSFSKEGGGPPLGGLKIPNFLGGGENSPTKFFGVFPFFPFQKGFKKNSSPPGFPHPFPKPRERGGVYFSGQKNRGL

SEQ ID NO: 948349 - protein, 174 aa, Homo sapiens
  misc_feature (9)..(9): Xaa can be any naturally occurring amino acid
MNASQIGFXCPAPRPTTATLYSSLWGGANLLKVWTLANCKLKTHPIGHTGYMNTVTVSPNGSLCAFGGKDGQPMLWVFNEGNPLYTLDGGDIINALCFSPNRYWLCAAPGPSIKIWVLKGKIIVDELKQKVFSTSSKADPPQGPPLAWFVDGQTLFAGYTDNLGRVGQVPIGPR

SEQ ID NO: 948350 - protein, 108 aa, Homo sapiens
  misc_feature (7)..(7): Xaa can be any naturally occurring amino acid
MELTLIXYDMAHYHPCKVAAAASCLSQRVLGQGKWNLKQQCATGYTENEVFQFLQHMAKNVVKVNEKLTPFFAFKNKKASSKLLKMGMIPQLNSKAVKDLASPLIVRS

SEQ ID NO: 948351 - protein, 122 aa, Homo sapiens
GGKNFGFWWGFYFRGGPPQFFGGNGGFPPPGVFPPFFQKMGGGPGGGAPPFFFFRGGGFPAPKSPRPGFKNFPHPKIIFSFPPRVLGGWANPLFPPQGPPPFFLGGGPFWGGPPKNLGGPRV

SEQ ID NO: 948352 - protein, 145 aa, Homo sapiens
LRSFLELYTTMHVDWLAGFLYLTEQQCRIQLLVFEHKMNSLVWTSGMSALDGEFQSASEVDFYIDKDMIHIAYTKVARRYGDFFIRQILIFEAFTCTAEEDGTETLMIFTHIQEPVLMHYQAGSVFARVKPLRRSAISLSPQLTS

SEQ ID NO: 948353 - protein, 93 aa, Homo sapiens
  misc_feature (5)..(5): Xaa can be any naturally occurring amino acid
PSGLXMRLFLSLPVLVVVLSIVLEGPAPAQGTPDVSSALDKLKEFGNPLEGKGRELISRIKQSELFAKMREWFSKTFQKVKEKLKIYSLGPEG

SEQ ID NO: 948354 - protein, 74 aa, Homo sapiens
GISCEIINIHTIKPLDEEIILKSVEKTGKLVTAEEHNFLGGLGESVAGDFGKKKANTTGICCCCRSGREFSSSR

SEQ ID NO: 948355 - protein, 77 aa, Homo sapiens
RAVWPENKPIMVRISATDWAEGGNTADDGVEIARLFKQAGADLIDVSSGEVVLEQQPIYGRMYQTPFSDRIRNEGKP

SEQ ID NO: 948356 - protein, 102 aa, Homo sapiens
LSISPFFCPPLSVCPSLLPLSLLSISPFFCPPLSVCPSPLPLSLLSFSPFLCPPLSICPSPFTSLSPPHLSFPFSSSLHLSFLLSSSLRLLVSFYVDAAANL

SEQ ID NO: 948357 - protein, 30 aa, Homo sapiens
FPWHHHHLTTSTHLQGARVVDAAANLVVVG

SEQ ID NO: 948358 - protein, 111 aa, Homo sapiens
AAGLELETHIGDVKRFSQVQREVDGVGVLHPDQHGLALPPGGVGLVVVVGQEGCPVMKVGLPGVAQVTGLGDTGHPGLHTVFLGRSPTRVGGPHSHVESGVDEIGHAALRP

SEQ ID NO: 948359 - protein, 146 aa, Homo sapiens
RHEGDLGQHPLTLQAVSEQRAEFGDRSVVEASPDLYANALQASVLPWRLLTLLPHLHPPGYCNLNFDPATAGDELFQLKETRWVLNLGILLEPLTGGGPFPGFKQLTADAVLARPVRGPPLGREVEVSNIVVCLGVTYPRSSPLGG

SEQ ID NO: 948360 - protein, 71 aa, Homo sapiens
HPFAGASKGDGLFAVSIENSISTRIQQKPQEAPQSVVLGAAADQDTIVKAAKKFAHSDNVKALAGGVNPST

SEQ ID NO: 948361 - protein, 151 aa, Homo sapiens
MIAILLATSQGIIIRSQANIRLLLSVGPYQGIDFGHIDVIEFLDSLFDLMLIGLDIHNEHKSVVVLYFLHGCLRGQWEFDDSIVVKLVSPGALFRGYFGCLRSRRVLGRRKVGDVRIFFFLWLWTPFSTAFLAFKAFALASALGGAGASVD

SEQ ID NO: 948362 - protein, 70 aa, Homo sapiens
EALANPRRVDGDHSVRRTVLVVALDGALHGDYTVEDDVDECRNGEDVGDRSEGRVLSERVTGEDAVVLVD

SEQ ID NO: 948363 - protein, 68 aa, Homo sapiens
AEKFHQARKGVGTRHKALIRIMVSRSEIDMNDIKAFYQKMKGISLCQAILDETKGDYEKILVAFCGGN

SEQ ID NO: 948364 - protein, 162 aa, Homo sapiens
  misc_feature (17)..(17): Xaa can be any naturally occurring amino acid
IYDPRGRFAGLGITPEXAKYKLCKVKKIFGGTKGIPHLVTHDARTIRYPDPLIKVNDTIQIDLETGKIPDFIKFDPGNLCMVTGGANLGKIGVIPPKKRPPGFFDVVPVKNANGNSFPPGLSNIFVIGKGPKPWIFFPRGKGIPLPLVEKKNKRLAAQQTSG

SEQ ID NO: 948365 - protein, 77 aa, Homo sapiens
KRGAPGPPPNPLAPKGQGGFLALGGDLATNPSRSGPWMWKTAREVREVLAVFTPGASPGSKKGPVLNKGPGQDEREI

SEQ ID NO: 948366 - protein, 52 aa, Homo sapiens
MKWPRSRAGHLLHPSRLCDVGTGRPGPSSSLRPPSGSRGNRLGGSRASSKDT

SEQ ID NO: 948367 - protein, 127 aa, Homo sapiens
  misc_feature (46)..(46): Xaa can be any naturally occurring amino acid
CPPGVEAPLTANFKNRETIPARGPLVAAPVGGVGLEQVGDVKVLGXWFQPQECVVLLVAGVTGVAPRKVLDLGFRAGAQPGPPPFCCDQHFGGGTRGLEKGGPFFLHGGPRGPAVGFYTKDLGPFGG

SEQ ID NO: 948368 - protein, 50 aa, Homo sapiens
MAAIRKKLVVVGDGGFGKKCLLIVFSKDEIPEVYVPTVFEKYVADIEVDG

SEQ ID NO: 948369 - protein, 71 aa, Homo sapiens
RGAPSTGERLSSSSPHARWGACHPGLCPSGPEGQHVVCERQAPGPPQEQLRGDPLREIRAFGCIRSDLSCF

SEQ ID NO: 948370 - protein, 70 aa, Homo sapiens
ASGGLIEKVLLRPGFPTRAPDLYRIPEAVRPHKPQKLDLEWGMVGVGVIRPEACPGTRVSPGYGKTHVLG

SEQ ID NO: 948371 - protein, 125 aa, Homo sapiens
TLPPPTSPVGRSRLLLSPPPNYTALPLPHRARGILFLPTPSAAPSNFVARPHKTPRSSLAFISPPLPCVRKRCNPHFPCVYRIPRGTKVFQVLEMSPLTRCDVSSKHRLVVTGSGEHAPVYQIPY

SEQ ID NO: 948372 - protein, 145 aa, Homo sapiens
ASAIRGVLYLAKVSFVSVARGPWGNKIGKPHIVPCKVPGPPVFCWAPHPRTQGNGYGLRTCAQKTGHKGWYDVCYTSARGCTAPLGKFAKAPFDAIFKTYRYLTPALWKETVFTKFPYQEFTDPLVKTPPKVSVQGNQAPAVGPT

SEQ ID NO: 948373 - protein, 110 aa, Homo sapiens
CTDQLASAFTDIFNLSMSESVISTCFKQTTIVPVPKITMVTCINDYRPIALTSVVMKCFERLVMAHKHHYPRNPRLEVGRLIEVDYEVDRLIGMANFGRRGREFSSSRRP

SEQ ID NO: 948374 - protein, 67 aa, Homo sapiens
VNREYRRGLSKHPCGVPCVEDKRGGGVSYLHHLGAARQEVQDPVAQGVQTQGPDLNDELGGYYGVEC

SEQ ID NO: 948375 - protein, 106 aa, Homo sapiens
  misc_feature (85)..(85): Xaa can be any naturally occurring amino acid
NLPGILGAFQKKLGIRVGETPPAKLFPLIKVECLGAWVNAPMVQINANSYGVLPAKDIEEIIDGLRAGKIPKPGPRRGRFFCEPXGGFPFLIDPPKGPGFGVQAAL

SEQ ID NO: 948376 - protein, 116 aa, Homo sapiens
VDATSCVNGCLAPRSLQLIAAMMMARDTKYRSARLICATSSASPPVIIRIAAISVSPSKSLFIQLVVLLFVIFPGLERFMKRHVVSRWLIILAKQGIEELVIGQACVASCLLLGSK

SEQ ID NO: 948377 - protein, 42 aa, Homo sapiens
EEDSEIISDDISDIFRFLDDMSVCDSLGVIQSSCYNSIGSLS

SEQ ID NO: 948378 - protein, 48 aa, Homo sapiens
SGAQWGLRTHHISNIKPSFTGENTLRFKHLSPIFLLSLNPDIITGFSF

SEQ ID NO: 948379 - protein, 109 aa, Homo sapiens
  misc_feature (9)..(9): Xaa can be any naturally occurring amino acid
MNRLRSAHXYQTDNGINPEDHLPHKQGKYHVTLTVNLTVAGKSASDGIQLMAPSSTIQKLSGHSYVFGVGGVVVPNQNVFVTYTWLADVNASVGNACASSSDNAVITNK

SEQ ID NO: 948380 - protein, 171 aa, Homo sapiens
TLNGAVARSRGSLIAPFGSDDIMLPERIAIQVAHMDGKPEVGICAGNMELIDSDGNPFPEKRPCRDVPFRRLDFDDMFLDRKPYPPAPTLLIRREALEKVGGFDPTIRLEDLLIELKITHAGYFIDALGVSMALYRKHASNSSKNHRFMIEAILKTYALFSDHAASTRPRI

SEQ ID NO: 948381 - protein, 121 aa, Homo sapiens
KARSGRPSNISDRQRRRMVRTVRYSPQTTSKDIQHHPAADGVTVHRSTIQRTLHKEKLYGRVMRKKPFLHTRHKQSLEVCKRTFGQSSFILEKVLWTDETKIELFGHNKGRYAWRQKNTST

SEQ ID NO: 948382 - protein, 91 aa, Homo sapiens
KEEADFCNISVNDSSSSSENLMAVTSRVVQWSKALHHSASCVTTDHGFNPGLGSCRPETRKPMWRCPASSGFEGLTGRDVLVPLCSSDSVD

SEQ ID NO: 948383 - protein, 125 aa, Homo sapiens
VRVVLDTPPDKSESSSYTTCKVRVVLAVPPDKVRVVLDTPPDKVRVVLATPPGKVRVVLDTPPDKVRVVLDTPPDKVRVVLAVPPDKVRVVLDTPPDKVRVVLAPPPDKVRVVLAVPPDKVRGRR

SEQ ID NO: 948384 - protein, 31 aa, Homo sapiens
  misc_feature (24)..(24): Xaa can be any naturally occurring amino acid
REVGFTSSEGCVGSMAGEASGNLXIMAAGEG

SEQ ID NO: 948385 - protein, 81 aa, Homo sapiens
VVSEGVDLASLLEEEDYYYLVVSEGVDLASLLEEEDYYLVVSEGGDLASLLEEEEDNYLVVSEGGDMASLLEEEEDNYLVD

SEQ ID NO: 948386 - protein, 95 aa, Homo sapiens
VDAAFKTLQLCGFRKKNTSYQQRHIEHASLLSGLVNFFQQNATLVLPLNKMNQENTTELIDNENIRCEQVGLICVIMRLASVLATGVLQPRHRRR

SEQ ID NO: 948387 - protein, 108 aa, Homo sapiens
  misc_feature (61)..(61): Xaa can be any naturally occurring amino acid
SEKNMKALFLAGHWRQGRGAVARSIFPADGSVNAEFSTASLEDVQEAVQAAHRAWQEPSWXNSLPVERARVLYKVADLIEQNVAELAALQTRDNGKPLAETRSTRPRI

SEQ ID NO: 948388 - protein, 125 aa, Homo sapiens
LLNSRPRRPALAGNLLVQSADPTSLIHIVLKGGTLPVTHTAHSNFTTPASAWRLSDQEVADVVGFIRGSWGNQGGAVQATDVAALRKEDMPAKPEAGACQTVLADSPDSITVYKYSNGAFPMFVD

SEQ ID NO: 948389 - protein, 36 aa, Homo sapiens
MAWESKLFRSLLDLDLALWYRLPVDAAANLVVVGGR

SEQ ID NO: 948390 - protein, 156 aa, Homo sapiens
RRWVGSQEQPVDHENARVGGRQQEDRAAHTEDSYQRRTAEGSNRIDQLPHFLSQRVGRLVTTALDDGLRTLIEASDDPQTRHEQLAFVVLNQRVHVAARHQPGDDDIVGHIQPAEETEEFVEHLPGPALEVLAFSLLLDTIDHIGPFALHLLAGRR

SEQ ID NO: 948391 - protein, 90 aa, Homo sapiens
VNGSVGIARPQLTTDAEPADITRSRILLRLPSTAPTRLPLYGINTRYEATRYSLPGDFYAETSFNGYRFFAPAEHYRSADFSRAERDLVD

SEQ ID NO: 948392 - protein, 91 aa, Homo sapiens
IFWVAEESEEVLIKNWVSTSSGVKKVVFRFRSVRSIVIPAANTGSERSSRTAVISTSAATTLQSHQTDQVYSMANALKFAAQITASYPLYL

SEQ ID NO: 948393 - protein, 76 aa, Homo sapiens
PINARHLIGLETIPPGPQSMEKLCSAKPVSGAKKVGARFWKSWKRQVNAFSPLRLKGPSPIVLLSLNPGIITGFSF

SEQ ID NO: 948394 - protein, 126 aa, Homo sapiens
RVVGAPRPPTPPPPRIRAPGVFCPGGVSPGGTPVKKNPPPGFGPPPGGPPPGGQRPPPFGARLDLVNLGEGGPPFWGPPPGGFFGALFPPPGGGPFFFFFFWPFFFFWACFGFFFKKKKFPFSPRG

SEQ ID NO: 948395 - protein, 115 aa, Homo sapiens
MAELGPGVPVAAAKPGILTGGGGCTGARTEKPPLNPTRGDCWGPIPTAPISLRWRTGREAQPGGPQAGRAGDPEADQAMHLQPAWAPKLQPPSVCRQQPPGNSRIRPSLPTSWNE

SEQ ID NO: 948396 - protein, 81 aa, Homo sapiens
HEAGLQILGRKEFRLRRETRIWRIRGSNTRGTMFYYPNVLHRHTGCFATIWLAATRGSRLVKREYLTANVVKTCEEILNYV

SEQ ID NO: 948397 - protein, 97 aa, Homo sapiens
MAIAELCCAVPVTDRFLSSEPSQALMDESALRCTAPPSILTAALSWVGQHVGVSQEDGAQGLPGDCRAGGSREGIVEEVSSCGLPSAPPRTRICTVR

SEQ ID NO: 948398 - protein, 99 aa, Homo sapiens
MARMAVMGPRTLVLLLSGALALTQTWAVSHSMRNLLTSVYRPGRGEPCFIGACYVDDAHVVRLDRDAAEPEDGDRDAADRAGGSGVLRRRDTESEGPVT

SEQ ID NO: 948399 - protein, 44 aa, Homo sapiens
ARGLVPEAVSEHNLMDYPGEENFKLQSYGAYPTQPGQGYSQESS

SEQ ID NO: 948400 - protein, 33 aa, Homo sapiens
EPILHSLSLRYMCLSKLISLTFSLLSSSRNTVY

SEQ ID NO: 948401 - protein, 114 aa, Homo sapiens
GIKHGVMGSWPHGHGVMRKAELWVQGLTDGTHCRAPPLCPHLKQLHPSVLRPSQSFGDGFPVPGFPQETGGQDKYKPRGSIIKDPTGSNIGCGEDPEFYVLVGLGSFSVVSAPC

SEQ ID NO: 948402 - protein, 108 aa, Homo sapiens
  misc_feature (10)..(10): Xaa can be any naturally occurring amino acid
MGYMMAKKHXEINPDHPIVETLRQKAEADKNDKAVKDLVVLLFETALLSSGFSLEDPQTHSNRIYRMIKLGLGIDEDEVAAEEPNAAVPDEIPPLEGDEDASRMEEVD

SEQ ID NO: 948403 - protein, 109 aa, Homo sapiens
  misc_feature (45)..(45): Xaa can be any naturally occurring amino acid
IQRGLFYGKAGGGGSPKVLSGELSEPGEGSSQVNRSVKVGQEQIXNGGMSSVKAGTGPFHFFCDSSLASGHLDVYMQVTGDMMALLGLRGLTHITKLTLWIRLKFFRRR

SEQ ID NO: 948404 - protein, 101 aa, Homo sapiens
  misc_feature (29)..(29): Xaa can be any naturally occurring amino acid
MATSNEANYNNTFFVVSLPVQGAFWGNTXPILAEFAGEEDVQRFFAQGQQLASTTSWQADPGVNQTRMGGSGPRSSHPIGHPHWNSGGSGGGMGGGGAKVD

SEQ ID NO: 948405 - protein, 121 aa, Homo sapiens
CANSPAALRLSRCRSGANINYRVNGTPMSIWLPAFLLLLRPTIKRFLAVDFPLQEYLIPLRKNRSKASDNATIGTQGLAVDPGTVDTGQKRHCRRNILWLAQTLYRCHFCQALYQFRRFVD

SEQ ID NO: 948406 - protein, 92 aa, Homo sapiens
  misc_feature (26)..(27): Xaa can be any naturally occurring amino acid
SIPVKKVASVCLRNWEGFGILLITPXXLMWFGESLSPMKIGGLVLLITGYGLIKSGTKKATVRGSAQKVKQVAEHAVNVAKSGALPRSEAKS

SEQ ID NO: 948407 - protein, 75 aa, Homo sapiens
STSTQNIYVLFHEPLCYHFCLMARCSIMLEKALFVTKLFLDGWEKLLSEDVLVPFFIHGFVLGKIVSEPTPLAST

SEQ ID NO: 948408 - protein, 87 aa, Homo sapiens
RRRSVSSSSGGDISSSSSSSSSSSSGGSSSSGSSSSSSSGSRGSSSISDISSSSGSSSSSSSSSSSSGSSSSGSSSSSSGSIVVVQW

SEQ ID NO: 948409 - protein, 122 aa, Homo sapiens
ALWESFGIQGLQMIFSNVIILGSLPSHWLSTSASFFFLLLLYSCSAAAASTVEQPTALSDLMALLSLLLGSYGSNPTTTILLLLSLLSLCCSSAVLNTKGHQEKATQDNFLSLGYNFLFYFL

SEQ ID NO: 948410 - protein, 88 aa, Homo sapiens
RACLEVLAGERSYSYTLDRRPVLLYRGWSSSSTERAASGGTHMELVREEGDTRLASQISRINPGDQWGDRCRSQIARRRGREFIVVVV

SEQ ID NO: 948411 - protein, 69 aa, Homo sapiens
RVDALSAHMTLAQAFTTRAQTQCPRMAPIILHIAVYYFIQHCEGQPELPEKSLSFSGLGYVHPPYKCIK

SEQ ID NO: 948412 - protein, 142 aa, Homo sapiens
VYSLYTAACLFPIYSSVSIPYIQQRVYSIYTAACLFPIYSSVSIPYIQQHVYSLYTAACLFPIYSSMSIPYIQQHVYSLYTAACLFPIYSSVSIPYIQQHVYSLYTAACLFPIYSSMSIPYIQQRVYSLYTAACLFPIYSVD

SEQ ID NO: 948413 - protein, 67 aa, Homo sapiens
DTALNVNGNTSLVTITFSETVNNLALGALTVADGSLSNLVQVDGTHWTATLTANPGVNHVGDVISRR

SEQ ID NO: 948414 - protein, 54 aa, Homo sapiens
PEGQPPGQKGGQWAQAPGRGYSPPHCQAPQAPGDNHVVACTALTPDYYNGSFWA

SEQ ID NO: 948415 - protein, 224 aa, Homo sapiens
MGEYFRKTKGRNTGLLESIRVDELNAPKQGQVWPSPFQDSSFMDLFFRAPKPPPGVSCEGRYFPWGESLFSYPYHFPRVRLEAVAKPPKWEPNGLSKADVGIPLEPGFWSQVPLRINNKGLRELVVLAEHFRYPNVPFSHPLERVPGSFMWKNEKFGLLTIQRLVPDPRKLLFFGVLVHDIPSMFREFTLAAKIPRGTNRYAHELAHGYTTWKCMRNSGLKVIR

SEQ ID NO: 948416 - protein, 139 aa, Homo sapiens
LIQVAVTELSFLKKVIIQSLNYPDNYSDKANCDWIFQASKHHLIKLSFQSLEIEESGDCTSDYVTVHSDVERKKEIARLCGYDVPTPVLSPSSIMLISFHSDENGTCRGFQAIVSFIPKAVYPDLNISISEDESMFLET

SEQ ID NO: 948417 - protein, 132 aa, Homo sapiens
MGHSSTLSPDVGTSPTGSVGLSLCAAMRECRNKDTRQRDKRKGSWARGTTTTNAQTPVVAPNVWLRCYLLDTRQKGQGKECESPPMIGKVTWVTCPLDRGPFPAWQLRQRGRGSRERDSLHHYFCISGTIVD

SEQ ID NO: 948418 - protein, 33 aa, Homo sapiens
MALVTVQRSPTPSTTSSPCASEADSGEEGIGPR

SEQ ID NO: 948419 - protein, 30 aa, Homo sapiens
GTRQEVEKFTKRLVKVTKQHNDECKHLLLG

SEQ ID NO: 948420 - protein, 157 aa, Homo sapiens
ARGAYIEGAKGTSTQFRPLLWEPDRDRCCQRCLCLIHRVNPQMLRLNADPHFFTHDFQDLKNEGEAAASGGGPPSGGAPAASSAAREQLRGRNQALDYEPGPLGIPRGRAHPPPQPLTHTRTARDHKATVAVTDGHRPGWAEEETPMPLMGKWRPGH

SEQ ID NO: 948421 - protein, 31 aa, Homo sapiens
HEDLAVKHFSVEGQLEFRALLFVPRRAPFDP

SEQ ID NO: 948422 - protein, 98 aa, Homo sapiens
NISATGNFHKGVNDLRDKARRALYAIKRNINFNIPIRIWLKILESVIEPIALYGCEVWGPLTNQDFTKWDKHQIETLHAEFCKNILRVQSNTPDNGRR

SEQ ID NO: 948423 - protein, 171 aa, Homo sapiens
ARGRTAASWLKDFYYQGPIPRPTPAMVFANLRKVLISDSLDPCCRKILQDGGLQVVEKQNLSKEELIAELQDCEGLIVRSATKVTADVINAAEKLQVVGRAGTGVDNVDLEAATRKGILVMNTPNGNSLSAAELTCGMIMCLARQIPQATASMKDGKWERKKFMGTELNGK

SEQ ID NO: 948424 - protein, 102 aa, Homo sapiens
HSHIPLTLSLVPLHRSKGMIQLLLLTLCNFRPRVGHLSPSLSSVGLGTDVGQGAHLACVHALVAVDLVADHEDDDEDEHGGYDDATDNDDHGAAQELAVEST

SEQ ID NO: 948425 - protein, 129 aa, Homo sapiens
SVSNQIIARPSSAPTLPLLPPLSRPERDTASPQEEQAATRANGDSELAMQYAIALNLAGRRTHVEDFDHIAPHSTFGQWWRHLHDAFQLPDVQQWIKALGVDTTSIKIDPKSGQISFYRERFLDPLRST

SEQ ID NO: 948426 - protein, 40 aa, Homo sapiens
ARGIKKIFEFKETLGTGAFSEVVLAEEKATGKLFAVKCIP

SEQ ID NO: 948427 - protein, 107 aa, Homo sapiens
TSHLNVQTSHLNVLTSHVNAPTSHLTAPTRHLNAPTSHLNAPTSHLNVPTSHLNVPTSHLNVRTSHLNAPTSHLNAPTSHLNAPTSHLNAPTSHLNAPTSHLNAPST

SEQ ID NO: 948428 - protein, 146 aa, Homo sapiens
THATSLFALCTRVHLGALSLLCPHVSSPLSLLCPNVSSPLSLLCPHVSSPLSLLCPMSPVPSLLTLFPCLQSSLLTLSHVSSPLSLLCPHVSSPLSLLCPHVSSPLSLLCPHVSSPLSLLCPHVSSPLSPYSVPMSPVLSPYSVVD

SEQ ID NO: 948429 - protein, 112 aa, Homo sapiens
MRISAGVSKLGPVYSGKYPFSQWNTHAFSHLGQLAAQVTIISVRQAKETRTKTLIVVTNQWRFRHKINVVSKRYQAARWYRLAQRTGCVGRQQEFTTKQFESAHGGGHHLVD

SEQ ID NO: 948430 - protein, 78 aa, Homo sapiens
CQVLSWRQRCFQEPDGAGPGTSVRNVLGEGGAPGAASRRSRRVRTAWPLYPAGSGAGDFGKSEKVWIPVDVPPALKSG

SEQ ID NO: 948431 - protein, 100 aa, Homo sapiens
  misc_feature (35)..(35): Xaa can be any naturally occurring amino acid
  misc_feature (42)..(42): Xaa can be any naturally occurring amino acid
GGGGGGGGGVAPGIDVGGELWVLETRCPGSEIIVXLTGLDIXATALYSLYIFTTAQGGSLTHHINNIKPSFTRENTLMFIHLSPILLLSLNPDIITGFSS

SEQ ID NO: 948432 - protein, 177 aa, Homo sapiens
  misc_feature (11)..(11): Xaa can be any naturally occurring amino acid
MRWYRPKELSXWRRSARRSLPLIGQWPECARLLHGAAGSTGSIGAVRAHAVARRGGGRHARTDHRQRHRRVVYAFAGERLPRVDDSHRRRAVEVASHQTDANPRPTIDLHLVTVMAAALRNPMAPIEGGLRSAPRTATTENVCPEPADTVGALQVNCTPPVNAMAFKDVGARGGPAA

SEQ ID NO: 948433 - protein, 88 aa, Homo sapiens
VYTGKRFNGLTVPHGWGRLTITAEGREERVTSYMDGSRQRESLCRKLPFLKPSDLATLIHYHENSTGKTCPHNSITSYPVPPTCGNSK

SEQ ID NO: 948434 - protein, 44 aa, Homo sapiens
QGCASLTAGGLALDPVAVSGELHSGVQRAPDPPRSVSFRIVAAA

SEQ ID NO: 948435 - protein, 102 aa, Homo sapiens
RRPDPMWDTDKGRPPNLTLLLRLWSAHKKGSIMTALCKTKDAAARVTVRYLHATNGQKLLTPLVELGEKLEEAEEEGDPVGDPAVPFNLCPRNLSDTGATKS

SEQ ID NO: 948436 - protein, 165 aa, Homo sapiens
  misc_feature (15)..(15): Xaa can be any naturally occurring amino acid
NPFELYESLIRFFIXTFLFLPPLSNQLSVTVLSHRYNSRTGSGVTFCPSFVCVFLVLVFGQDVSWVGILCCGSGLSISMFGPDMVLNQRQVLVIVSDWEPYLGSLFLCWVFVGGCLLSLCHCTKTELFGFSDLLFCIWLVFTFIVFIKHDEHEPRCVLVLSFVRR

SEQ ID NO: 948437 - protein, 45 aa, Homo sapiens
MSICDRLSLYFTSNNKVVDTGFRATWKAVDPSQGEWSWASGPRRR

SEQ ID NO: 948438 - protein, 119 aa, Homo sapiens
VDKTRGYKRASDSLDLELQMAVAIMWVLNLVLPRQWIHQRIRLVPLLLGSPIRIFPAKIYSQCYESPKLPGKAIYRCVLIDRLDGLLNPQQQQQQQQQQQQQQQQQQQQQHKQSAWQVT

SEQ ID NO: 948439 - protein, 75 aa, Homo sapiens
RRLHSCRHLGGSVGLFLSPIGTLKFSNFLLSPLPPSLSLSLSLLSCCFSFIPVLGSLPVLEFLFVSFVPSLRLGI

SEQ ID NO: 948440 - protein, 66 aa, Homo sapiens
IPGGTGASIIYIPQGLIKVQLVHQGPIPQSQDDHLGMGDRREQGSHRHVGDHADAHSNRGVVPTAA

SEQ ID NO: 948441 - protein, 108 aa, Homo sapiens
QLDYPITFTMVPRQLDYPITLTVVPRQPDYPITFSVVPRQPDYPITFSVVPRQLDYPITLTVVPRQLDYPITFTMVPRQLDYPITFTMVPRQLAFRPAQASHDLHCTS

SEQ ID NO: 948442 - protein, 124 aa, Homo sapiens
RDVFHVGRRSTNGTVSSRRLKSSCRGRARGLWLGILQDPMDQALTLFSVHGVSAMPGTSYPVTGRIGVPPGFSSAREGALLPEVFRKRCQRKPESLPPSIDEAFSPLATDFLFHGKDVSSFSLL

SEQ ID NO: 948443 - protein, 48 aa, Homo sapiens
GGCVLEGDPERKSWLMTHSVYVELGHGGGRVLEEVPQILLLVLGMGGG

SEQ ID NO: 948444 - protein, 66 aa, Homo sapiens
CHRLPGSYDSTSSDSLYPRGIQFKRPCEYKEGPLPWVPGRGSPGVGVSVNLQTSPATLGLPTVPLT

SEQ ID NO: 948445 - protein, 91 aa, Homo sapiens
PTEDGRKGEPDKAPKTLIPQVAHWRDALGDQRGRPATGSSSVAPAGIKLLDPNESAGIPGMSQRSRPAYGMIPVDCHLKEANTKESLALRG

SEQ ID NO: 948446 - protein, 44 aa, Homo sapiens
QCEPGSQLGPTPSEAQEGPTLPAPTLAEVPPVRGRMRKALKGER

SEQ ID NO: 948447 - protein, 44 aa, Homo sapiens
KIQDQEQEPMQISDMENPAIPIPTFDYNKITNNYQNFDIPVKMM

SEQ ID NO: 948448 - protein, 72 aa, Homo sapiens
  misc_feature (49)..(49): Xaa can be any naturally occurring amino acid
MYHVPSYARHTCWSIGCAPFVHAVDQGPAEQVLERPIRPVGYRDADAAXHAVLRPLALKLDVVGGEEEVVAA

SEQ ID NO: 948449 - protein, 104 aa, Homo sapiens
NCCDLIMLPDLLVAPYKICVCQLPRAAPDDPCDTEEFEHLMSLGEEEPMRLSYCSWNRGDIVPMRPDLHRTDVVWRQACHAHLCLCAKVTDVDSNQKHPYPGSK

SEQ ID NO: 948450 - protein, 47 aa, Homo sapiens
SHGGGGGSVGSGGDDSAASSAPDTRAGPAAAAAARLHESVLLLLLRP

SEQ ID NO: 948451 - protein, 67 aa, Homo sapiens
RKGTFKNDTLTVSGIMEKIEVVPVEIEPTEEDLNLDVGPSTEDSPEEVTTHALSHSPVVGEIPPRWC

SEQ ID NO: 948452 - protein, 72 aa, Homo sapiens
YRYVVLGAVSAGCVLVGRLTEDPAERVLLLESGPKDVLAGSKRLSWKIHMPATLVANLCDDRDNWFYHTEVP

SEQ ID NO: 948453 - protein, 64 aa, Homo sapiens
MPLINHSTLLPFQALPTMWHLLKERGLRILGSHTYYNPQVLMNGSQLAPLRRTHVVSGDGGGWS

SEQ ID NO: 948454 - protein, 40 aa, Homo sapiens
GTKRPAMLDIEADGNKTMIELSDYENSGTIFLDKVDPELA

SEQ ID NO: 948455 - protein, 196 aa, Homo sapiens
QVETITVSAEPPKPVQSPGNNSKPVEDKDAVAFTGEPEAQNTTYLWWVNGQSLPVSPRLQLSNGNRTLTLFNVTRNDARAYVCGIQNSVSANRSDPVTLDVLYGPDTPIISPPDSSYLSGAHLSLSCHAASNPPAQYSWLIDGNIQQHTQELFISNITEKNSGLYTCQATNSASGHSKDYSQDNHSLCGVCPSPSS

SEQ ID NO: 948456 - protein, 72 aa, Homo sapiens
NRLMQIGGCTSLVRKGPTMLWLPSGIPNDRREQSFRAYGWCLPRIKEVVGWFRSFISSSHIYLSRVVVKMLH

SEQ ID NO: 948457 - protein, 72 aa, Homo sapiens
GLKRSSRFVGSVNVSCAVYLPSSCCDLGLFCFFDELPLTISAVTINILWHFELALLASSNNISALAMSAAVC

SEQ ID NO: 948458 - protein, 145 aa, Homo sapiens
VLGEPSKWLHLTHTLGGAGAEAAWLATNLCTVNSGFLYKKLGELLAHSFLNLLSQNHPGPPWPLLETLYSEKQGPPVAVTVFGEKRRCQVSKKTNVRWSRPSRVWLVPGDVGGRELQVGGLHTPDLPCIIRDGPVTGDLPEQAMF

SEQ ID NO: 948459 - protein, 122 aa, Homo sapiens
NVLLMTPCYTANFVAREALQRQVLDDGCYIWSLGILLYIMLAGFTPFANGPSDTPEEILTRIGSGTFTLSGGYWHTLSAKAKDLVSKMLHVDPHQRLTAKAVLQHPWVTQKESFPKAAVPPA

SEQ ID NO: 948460 - protein, 56 aa, Homo sapiens
DSHGRWHSTPYKSFLQGAISHVPPETRTICTPQSRTQKHLFPGYNLHVIATTLLQS

SEQ ID NO: 948461 - protein, 155 aa, Homo sapiens
ELQKLQQDIEMVERNEDHHLVVLKESEILLQAKRAELEKLKSQVTSQQQEMAVLDRQLGHKKEELHLLQESMVQAKADLQEALKTGETEVTEKCNHIREVKSLLEELSFQKGELNVQISERKTQLTLIKQEIEKEEENLQVVLRQMFKHKTELKI

SEQ ID NO: 948462 - protein, 106 aa, Homo sapiens
  misc_feature (80)..(80): Xaa can be any naturally occurring amino acid
FGTRLQTPPKKETFIPPSNLWAVFFVATLVEPTETIHSLQQSLQQDPTHVAELGRLLLIIPTWGSPHRSGGRKKAQQSLXQNLLLQDFYPSPQILGTQLDQYLSVQ

SEQ ID NO: 948463 - protein, 81 aa, Homo sapiens
SPLPDRASFQKEDVVSLCQQADVLGDEKPEREYRSSFVQELLHLLLAVCIQGTGGIIQAKYTRFPGSMLGAMRLSGDDTLT

SEQ ID NO: 948464 - protein, 119 aa, Homo sapiens
MVQSVLLRVTEAPASFDHRETRGPLSGTSGRPFLSVKSKQDIQLPPATPKRGDANSIHTETHRQRNGQLGASLNTQTTKTTQCNGTPETRGSRLPHEARESAFSDLWARRSLSCWLNSV

SEQ ID NO: 948465 - protein, 49 aa, Homo sapiens
PPRYFNENIVVDLNSGFNLEELETNNAQRLRSIKGPHLANSILFQPSAL

SEQ ID NO: 948466 - protein, 80 aa, Homo sapiens
NKHSAAMSSNNNFQTWSSNECNMRQHFLCKYHHRGRIKILLTPAAAPSTSFQLAWLNRHIISDGKPSKLRVNRALLHWLF

SEQ ID NO: 948467 - protein, 115 aa, Homo sapiens
NAIIAEGIPEARTRNLIQKADQKGVTLITPATVGGIKPGCFPLGNTGGMLDNILASKLHRPCSVSYVSRSGGMSNELNNIISRTTDGVYQGVAIAGDRYPGSTFMDHVLRYQDTP

SEQ ID NO: 948468 - protein, 52 aa, Homo sapiens
MWRPYVSSVLPRLALHDVGGPLFVLEKSFAIDTQNYLEQQLGKPLLRIFEPI

SEQ ID NO: 948469 - protein, 49 aa, Homo sapiens
GRPYVIISAAKGCAYISRRTAVRAGRKLAIDTQNYLEQQLAKPLLRIFE

SEQ ID NO: 948470 - protein, 84 aa, Homo sapiens
KSSVDSSVKRALKPLGLQELAGNPAWMLLWGFMEFAPACAKASSWFQHPLTCVLPPARSGTQQVLSEWSLIPLSLKWLALSSAC

SEQ ID NO: 948471 - protein, 35 aa, Homo sapiens
GVTLTFWNRPPLPSLTIESTPFKCRRWGMDGASYL

SEQ ID NO: 948472 - protein, 50 aa, Homo sapiens
RKSRCGCCRSWQLPTHYLEQQWLSEGGGPEDVKGAEGSRQVWEGERLPAA

SEQ ID NO: 948473 - protein, 99 aa, Homo sapiens
LFSYLNVVPSLGRQTSLTTSVIPKAEQSVVYKDFIYFTVFEGNVRNVSWKSRYELFNALQPFVFVQLWKPVSFILEFQTVGIPRGTKHKGWERIEKTFF

SEQ ID NO: 948474 - protein, 41 aa, Homo sapiens
MATNITMLMTRNTATAISTEPEQRMGIARLRSNTSFLAMPR

SEQ ID NO: 948475 - protein, 124 aa, Homo sapiens
  misc_feature (107)..(107): Xaa can be any naturally occurring amino acid
TPSHAPPPPGSPTPGSASCPAGLAPAPLPALRVPGSAAVAAASAREGPPPAPPPPGPLKRGASPASPASRAAGLGSPPGGVGGGGGVGAGGPRAGGGGGLRLSQVFXGGTPLAPRVEPENLARP

SEQ ID NO: 948476 - protein, 58 aa, Homo sapiens
EFGTRKTTPEPVIHCRREKGTNFFDISVWFVRRHFVLSAICNRSAMKFLILILGFVAA

SEQ ID NO: 948477 - protein, 68 aa, Homo sapiens
PLLVGNSRRSMPRGSWLKKFPQQDHTTTTDSEMEEPICKNPKRRVLPYKLQVVSSSGLGMTFALISYN

SEQ ID NO: 948478 - protein, 68 aa, Homo sapiens
FGECSRRPGQQRRTYRRRRSHLTTCGEPGERRPQYSNPPVQAEVEGGCLTTRVAGDQGKPSEAEICIR

SEQ ID NO: 948479 - protein, 75 aa, Homo sapiens
VEKRDKNIFMRNEKIVKEVVLMVGTTLLNDLKRDSTVGSRLVTLKDVEDGAFLLRLSGGGCSYPDIGEFPTGTKQ

SEQ ID NO: 948480 - protein, 59 aa, Homo sapiens
DVLPDLTPPSWIVLDPVPQLRIFGSKTSTSLAGPPAPGGRALLRTVFGSQSITMSPCPY

SEQ ID NO: 948481 - protein, 53 aa, Homo sapiens
MSRLMVSITPSMGIRGVGMPCGKKWARPFLILERNAYNHCARSIRGRAIVRYG

SEQ ID NO: 948482 - protein, 42 aa, Homo sapiens
LVEQRDTNIFMRKRRTSRSCASLEDFVEDLKEDSTAASRVGY

SEQ ID NO: 948483 - protein, 48 aa, Homo sapiens
DVPQEAAGSVEPRAVGVSEPVSVKGSACFWLTFSEVTFFGGFWTAIVR

SEQ ID NO: 948484 - protein, 41 aa, Homo sapiens
KARWRVLRKAQRVFSTTATREGALTAPAWGIQAHTAEEVDL

SEQ ID NO: 948485 - protein, 69 aa, Homo sapiens
  misc_feature (1)..(1): Xaa can be any naturally occurring amino acid
  misc_feature (3)..(3): Xaa can be any naturally occurring amino acid
XNXHPDSDFFGQEGFYPDWIPQCSRERIFSERNSSYHCDWQLIFGMNQLYSFLIMWLTFITVNFEDILD

SEQ ID NO: 948486 - protein, 48 aa, Homo sapiens
  misc_feature (11)..(11): Xaa can be any naturally occurring amino acid
EQQNKMLETKXSLFQQQKTARSNMESMFESYINNLRRQLKTLCQEKLK

SEQ ID NO: 948487 - protein, 88 aa, Homo sapiens
  misc_feature (1)..(2): Xaa can be any naturally occurring amino acid
XXKDGNAGNDTGAHFAIQTTLGSRVHACLCLCCQTRVGRNPLWLPCISTVPPPSSPGSPDTASTIATPTPELFSVLELDHPGTPWKKK

SEQ ID NO: 948488 - protein, 59 aa, Homo sapiens
MNGHMHPPLSTKHCDLRLSNSKSCSGIGCKSLDVAGQRQGRRREPHQQQKQEPDRGCGG

SEQ ID NO: 948489 - protein, 129 aa, Homo sapiens
GGFGRPAVDKICLFKLSLLVGMMQVRVCPQRIQKDGSSFTSFVGGIGIACTNGHNFLDAHDVEKVACILATDLDYVVQCVTGRDCSFNEKVSTRDCVRNDGNQIRESFFGNFILQRKIPRQIPQQRDDC

SEQ ID NO: 948490 - protein, 114 aa, Homo sapiens
MYSETVEFIRVCYATKNPLRPQCHLRKTTNWLHYVADDLALLYWRMCRLKRDLAVKYAKAIIDYLKNSFKAAQAPYPWGTSGNSVGSQGSLTNASALSPSTIVSIPQRNHQWAA

SEQ ID NO: 948491 - protein, 126 aa, Homo sapiens
CVQDRLVKVQLSNDFDEYIMAMSDIKSAHEAGCRARITHQVQRSLKLRRRNTHVGSLLRFLGDEKPNLSYIIGKDTWVEHWPEEDECQDEENQKQCQDLGPSPRAWLSLGAPTDHTPIPPLPYQGY

SEQ ID NO: 948492 - protein, 77 aa, Homo sapiens
RGRGEEDVAMSTASQTASRSNPKNGQELLLIPTHGEDGLPMLPKWVQNETALFAMWGSLTMNAIIKTSSDEQMVKKK

SEQ ID NO: 948493 - protein, 71 aa, Homo sapiens
PPGTGVEWLRRYLENGKETLQRTDAPKTHMTHHAVSDHEATREVLGPDASTRAEITRDRGSGAWGRTETQG

SEQ ID NO: 948494 - protein, 36 aa, Homo sapiens
IKVDRIQQCASALQRIQTVVSSWDDVHQDPLAPVLL

SEQ ID NO: 948495 - protein, 78 aa, Homo sapiens
RSRGSLVKRKHGAPKYQELKINAENKAKINMAGAKRVPTAPACNLQARTEAKNSSRGHWKQKSVNNLQAKNAYEEAKQ

SEQ ID NO: 948496 - protein, 58 aa, Homo sapiens
KLSGAGGGKAGNGRPEPPGGIQRLRDTEEMYSKKQEFLEKKIEQELTAAKKHGTYKQA

SEQ ID NO: 948497 - protein, 65 aa, Homo sapiens
AIENHGPGEVTAVSPGWPGVTRIIEAGPGKRPLDTTLQSSAHFLAEQREGEAESRVPTMAGNYPS

SEQ ID NO: 948498 - protein, 53 aa, Homo sapiens
HIVVDLGVDSRSVLPGTAIGPSETTPMEPVRLHDHMGPPRVTLGLTATEPGVT

SEQ ID NO: 948499 - protein, 90 aa, Homo sapiens
RCVMAAQSGLISGGDEPRPLLTAGGAFGQLSSHSRPPAPAARRAGAPEITASTILPFLSPTFMGHSFCSQQVSMASSTLCAFPGSVGLQH

SEQ ID NO: 948500 - protein, 72 aa, Homo sapiens
LEVDPVQTPITPSAGRADTQDSVGLTSPTSSNEAALHAAREGTHFRSTLLNYRRTPLEPRPRQVHCQQKEQR

SEQ ID NO: 948501 - protein, 43 aa, Homo sapiens
MLRYEKVSSAIQQSLLVMSYSVGHEKAPAFRDYVAVARGSKDL

SEQ ID NO: 948502 - protein, 66 aa, Homo sapiens
DLIDPLIQHLPGPGLCQAPSYGARPVSSAASVYAWRWGLWFPGSPCPGSTIFRVRHGGPGGLATVD

SEQ ID NO: 948503 - protein, 36 aa, Homo sapiens
LKRCRPSTWSSPLSRWTVKVNNNGRNRAVHSKSSTA

SEQ ID NO: 948504 - protein, 39 aa, Homo sapiens
  misc_feature (13)..(13): Xaa can be any naturally occurring amino acid
MRELPSIPTGTRXSRIHFSTWNLDHIIEKKRTIIPTLME

SEQ ID NO: 948505 - protein, 96 aa, Homo sapiens
GVLPSCFSVPGRTLLNISLSWLDYLASMASFSWWFSVRRSFICCSQLLRGQTCPGWGGAGGGVHFLCFQWGLSSFSVRPDEQVDGSVAHGSRARTR

SEQ ID NO: 948506 - protein, 40 aa, Homo sapiens
MSDQTPMYSGNHPRAVLQAAVRSFKSSTNSSAPGLRSSSA

SEQ ID NO: 948507 - protein, 35 aa, Homo sapiens
MVTMKYLCPECWTWGISPVGSDVLYSVTTQRCYLD

SEQ ID NO: 948508 - protein, 161 aa, Homo sapiens
SWVTPVSPQTLAGALKRVGCDPAELEESFLQNKAFLTGPHISLADLVAITELLHPVGAWLAKVFERPTKLATWRQRVQVASWVEDLFQEEPNEVILPAKDFPPAESHHKAKADALGAGHDPVELGNLTLAPSSAVHKHFHFYWPMDASAQQSRNGLPKTCP

SEQ ID NO: 948509 - protein, 92 aa, Homo sapiens
TQEQPTQASLRKEQMRVDAHGTETLEQTNQEIEELTKMYVTNLIARNGEQANSDTECIGLEPVECNMTVVHTACSSQFHGTGSSFHFIRMRL

SEQ ID NO: 948510 - protein, 120 aa, Homo sapiens
GQGTNDAGVNAVVQGDVLRILVVLAFTHNSQYSIRWQVRVFVVVALVMVIRSGGWYRHRHFIRQTWRYDVHAREPGSGYITCPTFSRIILEMVFGVYSDTQLTTPKARSSGSACSSFTRS

SEQ ID NO: 948511 - protein, 103 aa, Homo sapiens
ELGTRQTLNYVRTPDRHSALQPRTPGLKRSSHLSLPSSWDCRHAPPCPANFVFLVETGFRHAGQAGLKLPTLGDPPDSASQSAGITGVSHRAWPTHWILKCKC

SEQ ID NO: 948512 - protein, 49 aa, Homo sapiens
DYPGWSAWIDTAHCIPERGNTDRGAGPESLSQHLPPLPPPVAAGPGTRG

SEQ ID NO: 948513 - protein, 128 aa, Homo sapiens
LADPSLPPNVCTSLRAVSNLLSTQLTFQAIHKPRVNPVTSLSENYTCSDSEESSEKDKLAIPKRLRRSLPPGLLRRVSSTWTTTTSATGLPTLEPAPVRRDRSTSIKLQEAPSSSPDSWNNPVMMTLT

SEQ ID NO: 948514 - protein, 41 aa, Homo sapiens
KITVDACTIPVSTQGLKLCVPPSGCGCDSDSDTHSKEAIEC

SEQ ID NO: 948515 - protein, 80 aa, Homo sapiens
MIALTKVDAKLWDRAHNPHRTPRQLRVTPPAPLAERTRHPNLSRRENARVRAAIPSALAHRMSPGIAHTSPGPPYPSGGG

SEQ ID NO: 948516 - protein, 38 aa, Homo sapiens
  misc_feature (31)..(31): Xaa can be any naturally occurring amino acid
CTVPSIAVPEPNVVLMMQIVSDAMRPIVSSXKKLAQIC

SEQ ID NO: 948517 - protein, 39 aa, Homo sapiens
GTRAAPAELLIIGWYIFRVLLQVFLECCIYWVGFQEHLQ

SEQ ID NO: 948518 - protein, 78 aa, Homo sapiens
NSARGGSAEENIRSGSWAWPPPGPSGRNLEQGMGSEFCLNCTFSEVCEQGTHLVWVSEKRLGHIMKRVSSFYQELNVS

SEQ ID NO: 948519 - protein, 72 aa, Homo sapiens
VLPSLSLVYITPARAYNPSSISLESENLILRTSECLHPVIISYDNFFNPIHAEVSGMITSWSVSVKIQTLPL

SEQ ID NO: 948520 - protein, 66 aa, Homo sapiens
HRDRPIGTQAIPEESVIQTEESLRTPHALQDEKNLPPLANIDLRDMRGRSGKFPSHYPQERLSLQC

SEQ ID NO: 948521 - protein, 136 aa, Homo sapiens
  misc_feature (48)..(48): Xaa can be any naturally occurring amino acid
  misc_feature (63)..(63): Xaa can be any naturally occurring amino acid
  misc_feature (99)..(99): Xaa can be any naturally occurring amino acid
PFDVAAEIPALTAELGGRAGAVVSFTGLSRDEDGRVPALELEHYPGMXEPEIGLVLDEPARRXPLQGAVAIHRHGLVRPGEGIVLVLAASAHRTAAFEXASFLMDYLKTRAPFWKREHRADGTLGGWVEAMEHDAA

SEQ ID NO: 948522 - protein, 69 aa, Homo sapiens
GTQPVCGTEPDPVSPQILKPIRVCEHPHLCPDTCEVVTTGFDDRTSLRPPCLMLTPLQSMIGRRLRCFY

SEQ ID NO: 948523 - protein, 57 aa, Homo sapiens
RHRTVGWGVGASMGDQSGTAGKGDCDGGAVLGLGLSHSWPALWPIPDAVCCQYEVST

SEQ ID NO: 948524 - protein, 51 aa, Homo sapiens
AELDSWVLCGKADHAPIHGFVPWIPIFLILTLVAIAFLFLSIMSKNPFPLE

SEQ ID NO: 948525 - protein, 70 aa, Homo sapiens
RYFPTSFLQNVDSGVVKEYFQRGSVVDDVGKYYKKQDSECSAQHHMTLHVVIHPWSPRCVVLLSILQSAW

SEQ ID NO: 948526 - protein, 101 aa, Homo sapiens
FCMALPGGPFLGPGFDPFLSLLCRAGPPAELPTFRCTLSMPSFHVFAPCLGGPRNPLVGVGAFFMACPSLMGHPQPLPLGALFQGPHLVCPTPHLSPFKDK

SEQ ID NO: 948527 - protein, 39 aa, Homo sapiens
RHEADPPPVHTRRQLTMDDDIGGRGALRAAPAGRDGRAA

SEQ ID NO: 948528 - protein, 36 aa, Homo sapiens
RPPPPDRSPPPADALRDETWGGGGRTGDPPGSPGAA

SEQ ID NO: 948529 - protein, 44 aa, Homo sapiens
SPATPKTQPEPAPYADKTSPWGRWRETPHNAAPKLCRPPDSMGG

SEQ ID NO: 948530 - protein, 109 aa, Homo sapiens
TDHPYMPQLPTPRAPGHEVVTFHPRLFPTLRQWLCNVLSSQVHAPPHTEFGCSSPTNLCLGTGPCVPGFSEDSLYIRFQVVLWLSLGKWLFYMICHGICYNKSFFYPLA

SEQ ID NO: 948531 - protein, 52 aa, Homo sapiens
AAHSLTVMSSTEPPPRHPITTPRRLPRLQPERRVPAPTHVRPAYEDDEVGGG

SEQ ID NO: 948532 - protein, 182 aa, Homo sapiens
LRSVLYTTLRPIHRGHKSPCWQCRFHPIRKLDSIFICLSSHEEAGYNRLQTMAQLVIIRSRYVTIPYLLLFQKDIAKLRVILDSNRVNCGSNFKTSLFEHHHRCIIDAGSFWEDEDRQLAFILHMFSQSLSHQVAILHFRALKPDVWAGLHHGSLNHTHESPVHLNHHWIIAIAGQDDHIDR

SEQ ID NO: 948533 - protein, 100 aa, Homo sapiens
ELGGREPIIRLLIWCLMEEDDTPNTEVHAVVSCQQQQAVEAPVLLGVLGVNGLKTLGNAPSGLICSQDTLARCHDAVSDFRELLLLLRGHGWIWVGMMND

SEQ ID NO: 948534 - protein, 110 aa, Homo sapiens
IHYLPPAGLGVNTGSVVHNQRKQVVIVVRREVVWAQVGQSLIRVGQFREQVQSWFCGLPGSRHADGPHHACGRTEGQFTHSFYSSLGPSTARTLMEGLNVAAGDLEPPQG

SEQ ID NO: 948535 - protein, 85 aa, Homo sapiens
MEEDDTPNAGAHAVVSCQQQLATEARILLGVLGSNGLQPIGNAPRGLICSQYALARSHDAVSDVRQLMFLLRGQCWILRGMMKDG

SEQ ID NO: 948536 - protein, 36 aa, Homo sapiens
MDSNRQQQRFAETVIVDSMVDKHTGTTSVYSNIDYN

SEQ ID NO: 948537 - protein, 33 aa, Homo sapiens
TRTKLPVLSYTKKEDRLLKTVIARHMKTTYCGM

SEQ ID NO: 948538 - protein, 52 aa, Homo sapiens
PTLTCPAVNAHILLPLLEPLAVNKIPLRPALECGLIKGPSSDFLSHCNTVSQ

SEQ ID NO: 948539 - protein, 122 aa, Homo sapiens
YRFMHIIRSCSKVTSWSWSEISTATDVESPKAESGLRLPLLETLNFRHFWSRQSLSYFCIMTIDGMVFLQYDFIHRIMVIKSNKAKASFLSRLPISNYLNGIDFSIFLKVISKVMFLSIFFN

SEQ ID NO: 948540 - protein, 38 aa, Homo sapiens
SDPSGRSSDRDFGSFEHILSKASSISFSDLVVVNRACV

SEQ ID NO: 948541 - protein, 55 aa, Homo sapiens
GKGVSATEGRSRKGWSEGPHNPGRNTAIKTQSAFQMHNSSAFAITHDLYACTHIA

SEQ ID NO: 948542 - protein, 72 aa, Homo sapiens
SRKLLTPNYSDGHLAPAFPAQKASAAFRDYGYLQWDRWLLAGPSKRAEVSKTCPLGVVVQVRCSIPVYAGST

SEQ ID NO: 948543 - protein, 64 aa, Homo sapiens
RSISGGNGDMPKLYSVSFLWGEGSITSLYNGYFLKSRVISVWCQLLHKYLKDMDCCLHASWRPV

SEQ ID NO: 948544 - protein, 35 aa, Homo sapiens
KQYRGNEGQMRELQDQLEAEQYFSTLYKTGRLKDA

SEQ ID NO: 948545 - protein, 49 aa, Homo sapiens
PRCSLPISTVNFGHDFGNDNLCFNGIFEFLIRWGSCRSPGEPLEMVANP

SEQ ID NO: 948546 - protein, 61 aa, Homo sapiens
  misc_feature (10)..(10): Xaa can be any naturally occurring amino acid
SISSSVVLIXQLTLSHHSPTLLRLHPTAARCERQIADLSPLIRARSITRPGCFSSPSLWMA

SEQ ID NO: 948547 - protein, 81 aa, Homo sapiens
MQLKAGAKIIEVGDTPKDRALLQRSPKVIWHDHYYRPVYRVCNDRECMGTLLTWVLKFACYSPFSSMYAGLIVLLKDELLH

SEQ ID NO: 948548 - protein, 96 aa, Homo sapiens
QKDKNTFKTQEKTPKTPEGPSSVEDIQAKMQARLEKGGSLPKVEAKFITYVKNCFRHTDQEAIQDSLAVDENVSLRQLRFNTMYKKFSVLFHFLYN

SEQ ID NO: 948549 - protein, 50 aa, Homo sapiens
GFQYPESAMYPDRPCTRGSTQPLYPRLTKKKKETVLATVTKSVGGDMNGG

SEQ ID NO: 948550 - protein, 80 aa, Homo sapiens
TTTLDAVWRKRCTHSEKTNRNHSYRTGLKITSLTGIECGEDLCNQGNSGRAVTYTQKPLPRMRSSSSSDISCERGRHQRL

SEQ ID NO: 948551 - protein, 35 aa, Homo sapiens
SNGTKEDVDVLKTRMEEMKAESEREKKTNETQGMQ

SEQ ID NO: 948552 - protein, 97 aa, Homo sapiens
QRASYTCDLVLIRVLAGDVVARTGCWMPGSTWGRQVNVLRAWVNFYNWTDNAELMICPEVIYPCSCEVEGEEDNSASVRKGVLRGPLVIKTQSGNYP

SEQ ID NO: 948553 - protein, 69 aa, Homo sapiens
MLVFLQEMDKPCGCPPGVCDHGTGDRRDPWYSTVGLLPPVRAMSQRNLNAKTEQGPTGVTMTSNPITWG

SEQ ID NO: 948554 - protein, 73 aa, Homo sapiens
YLYRQYVALGGAHRLLQDYKSLQVYHCHPGDMRCTLLSEDKLTVSRARHNIQRFCVSSPFPGLLAGSSTASNH

SEQ ID NO: 948555 - protein, 70 aa, Homo sapiens
LVPACSCLRCYHQYVQSLQHVPGFTSIVASLSLDLNTCDFYGSAIIAQLIFPISSPCEAPYRENDIIFSE

SEQ ID NO: 948556 - protein, 136 aa, Homo sapiens
FSWWTEILQIRFVTRLSCVVPIWQNILEFRCGMKPYKCSECSTPFSNRSSLVCHRRIHSGEKPYKCSECSKTFSQKATLLCHRRLHSGEKPYKCNDCGNTFRHWSSLVYHRRLHTGEKSYKCTVCDKAFVRNSYLA

SEQ ID NO: 948557 - protein, 125 aa, Homo sapiens
LRSQSIHTAPKILDLALVVSGDGSSGTPRLHDDVLELEMDELNLAECMAPRDGPDQAHAQNPGPASMEKRIHVAIEDLPSGDEIPPMANLGNSNKYHLNYPVSFFAQAFVIYYKKTVLPPPPAHS

SEQ ID NO: 948558 - protein, 39 aa, Homo sapiens
YLQVGYAAGTCVTGQAVLSILVMLEVMFWYTGGVRFAEF

SEQ ID NO: 948559 - protein, 52 aa, Homo sapiens
TIHSYGESEQEITGRNAGSKPRPRRLLGDSFASFRDAAPDEEQIQTSILHYD

SEQ ID NO: 948560 - protein, 117 aa, Homo sapiens
MKSLFSSAPVPEGEERGSALALSATGTRSVLASFAVSVSSVPDNSSPSVPSAGHAVFGLPATFVLKAVQTQLSHVPLRRKRKKKNLCGVIWLPHSSLYTYLSWLWTAYALLRDDLGK

SEQ ID NO: 948561 - protein, 97 aa, Homo sapiens
MSAHFWVGVGLPVAGFDTTTWPLPADDGLTTSKTIPVPVLKMVPSLRNTQRSQADPAQSQYFTLTLPAGISGQALPLKEQPRGRADGAVGVDRPLHA

SEQ ID NO: 948562 - protein, 87 aa, Homo sapiens
QAHLGEHDSYVVFQMSLQSKSLEEKLKSSGIPYEVHIYPGCSHAFMNTSPEALKRKKGMGLTDENQEAVDLAWSRFSSWMGRFLGSA

SEQ ID NO: 948563 - protein, 174 aa, Homo sapiens
VVKPHYGSGSIRITLTGGLRQSCIACKLMPVPFGVLVTKCFPVVMSASININGKVRIFTCCIKRRIIYGFSIRNLIPSKRVHSSLLSRRIQPFDISDIIIIGRIRIIHINGNELRVGCRFVNHSSNMPRTFTPIISPLADTLRPSFTHINWVIVTTTASMFIIVPWVFPSLRDG

SEQ ID NO: 948564 - protein, 147 aa, Homo sapiens
DYRTSSGSQDCVAKLKSTILDSPKQTCIFSALESVQQMFPVATFQQDWHFIMFPPVSIIHSITLIASKFCIPWFRCQPKSFSHSLQFPGIASTFPGPLRVFSAVRFYTAEPIQGTQSRRFIIICPIQPGTLQLTVHQSSIWLSAFFD

SEQ ID NO: 948565 - protein, 65 aa, Homo sapiens
DPAGCCDTTAIVHSTDTNLGLSICARCLGRPNKRSANFREHIQRRHRFSYDTFVDYDVDEEDMMN

SEQ ID NO: 948566 - protein, 134 aa, Homo sapiens
MGTRLLEKLRYLSLLYLLGVRNILLVSDGHLQDESLDITAREEEPPAHQVIRLRYRVSLRELVTYPDPRGGRLVALQGTLASLEVDTRIQKPYSIEGWGSGLPARLPESQNLGWPLISLAVTLSKFLNLSSGKP

SEQ ID NO: 948567 - protein, 127 aa, Homo sapiens
MLLCNLKRPKKLFLFLKKKAKRHTTHIYRSTLAGTHLFFYLAQGFRMEAYIHHGGWPAQLNRARGKERKGLRFRNVNIGPLGYVAVHPLRKWPHEVKKNKPALHFKIKLGKSPGPRSGILYFVKLGL

SEQ ID NO: 948568 - protein, 70 aa, Homo sapiens
MITKTFGLDDHGGSLGLNVIAVRAYALPTELTCYAAESLTVKLKGKGFSGLGDWVEATPVVEGFTEPAER

SEQ ID NO: 948569 - protein, 76 aa, Homo sapiens
SHKERGYEQFTDAVVSWLHQQLDYGLDFLLCGLFMLRTDGSAIRVGRGTMYSQTAHPYPFVRCIDGFLEMIDTLYK

SEQ ID NO: 948570 - protein, 58 aa, Homo sapiens
MPMATALPLDFPSIFCYMATGNKSMVVSLPRRKWISRLTICVTERRQIDLAVQSLRYR

SEQ ID NO: 948571 - protein, 62 aa, Homo sapiens
MLEAKMHATGYSIQASTPTRGCATESRAHPPRIGNIHTHLVHYRVSLAVAGTKNSFQTLQSR

SEQ ID NO: 948572 - protein, 42 aa, Homo sapiens
MPFKCMQLTDFILKFTRTVPTISMCSMPGSRQPSILLFRPGY

SEQ ID NO: 948573 - protein, 58 aa, Homo sapiens
DRTGFGQWTCRTVRRQAMPYKCMQLTDYILKYRTDAHQKYVRQAWQKADINTHVQPGS

SEQ ID NO: 948574 - protein, 196 aa, Homo sapiens
WRLMKTDDKANSVQDIINDLSEAIESHSGRHEQLMPPVELAKPENHYRVDYILSVMNVPDFDFLSRIYEHAKALWEDEGVRACYERSNEYQLIDCAQYFLDKIDVIKQADYVPSDQDLLRCRVLTSGIFETKFQVDKVNFHMFDVGGQRDERRKWIQCFNDVTAIIFVVASSSYNMVIREDNQTNRLQEALNLFKS

SEQ ID NO: 948575 - protein, 63 aa, Homo sapiens
MHIFERTRVLAAFLWVARGVLFAVFLILLRLYRMKKKDEGSSALGKKPIYKKAPTNEFYGFVG

SEQ ID NO: 948576 - protein, 48 aa, Homo sapiens
PFIYSAGVMAFLVSGSFLTRLCSPVVVVLLHTGTGASVAYPVVLSHVQ

SEQ ID NO: 948577 - protein, 59 aa, Homo sapiens
LTLQVVEDGYEFFAMLQLVTLFSAPNCCGEFDNAGALMSVDETLMCSFQILKPADKNKG

SEQ ID NO: 948578 - protein, 35 aa, Homo sapiens
EVALLYTQDMENMSDDDGWEFVNLGHQQSFGIKTA

SEQ ID NO: 948579 - protein, 90 aa, Homo sapiens
  misc_feature (46)..(46): Xaa can be any naturally occurring amino acid
LDQTCCPQGCSSRVVRRVSGYLVSVHGVLGEKPLLCQRPVSGCRWXPCRGVANMLRAIWHLLSFHNEAPICIPFFSWLDPVIPRLTCGRA

SEQ ID NO: 948580 - protein, 39 aa, Homo sapiens
FGSPEGNVFFICFDDIFQEGKGTFLQFHYDTVQDTHHGG

SEQ ID NO: 948581 - protein, 71 aa, Homo sapiens
EVMGKVKEVLGIGVNLEAIQATANGQIKELSGTKWVVGDIFFLGFPRAIYNGVLEHGTVAHAGINVQSYVP

SEQ ID NO: 948582 - protein, 55 aa, Homo sapiens
LYYNKYINVRKGNILGITMVLACYMLLSYSFSYMHLKHSGSANSPEEDTLWTPPP

SEQ ID NO: 948583 - protein, 47 aa, Homo sapiens
VVRQTAGGWRALSDYNIQIESPCTWCCACEGGIIEPSLRQLAQKYKC

SEQ ID NO: 948584 - protein, 47 aa, Homo sapiens
MLPEQQVNTGQRELEPEGQEAAFQNTPNEGVRSAFSFPRMDSSRLRL

SEQ ID NO: 948585 - protein, 47 aa, Homo sapiens
AYVSIQQREYSIILYYFLTKSKPLCICSQAFLRPLTTPPNTNYLTPT

SEQ ID NO: 948586 - protein, 54 aa, Homo sapiens
MSAVRFIKKAINDLTVVMPAAVCSQEGSGCGRNHALPSRYTRRSRPQRFSRNFV

SEQ ID NO: 948587 - protein, 86 aa, Homo sapiens
LLALPGSSAFPSGGIQHVPLLPESSSLLFLTSGCLLHVAGSALVTFDGLLPSADLLHAFQLLPSSFFLLAGSLLDGVLLQPDSAPS

SEQ ID NO: 948588 - protein, 45 aa, Homo sapiens
PVLVAWNSPSTCRARSHAPLQTAGPEFPSSWPRWTANGPISSRAL

SEQ ID NO: 948589 - protein, 32 aa, Homo sapiens
MFEILLLHYSPCIQCALLLKIIRRRCGYHGPA

SEQ ID NO: 948590 - protein, 70 aa, Homo sapiens
VVDERVWFVCSPPQKKPLKQLQRMNGRIVATKPLYVAFSLSAKKSARLTLTNHVYADEWQCVQSVFPHPC

SEQ ID NO: 948591 - protein, 113 aa, Homo sapiens
RSSVIAVLVYHSIEMQGNQAGVCIVSPHLPIQLSTWCAGQDLLSLLTPSLCCPFWDPNFLDFEKCAAPVDASKSPLEGSGGADLSVFFGSSPCQIVLPLDSEKMVLLPHEEAQ

SEQ ID NO: 948592 - protein, 45 aa, Homo sapiens
  misc_feature (28)..(28): Xaa can be any naturally occurring amino acid
IPRKRSGLGAAGRIAPGIILEWSEVLAXLMQYQRWTWSIVRAIVA

SEQ ID NO: 948593 - protein, 66 aa, Homo sapiens
VLRTQRLQTTVLGQAQVGLDGHNQRTEGTACPGTILEKCLLCLGEKGCIAQVKAEGGTLVPWSLFP

SEQ ID NO: 948594 - protein, 93 aa, Homo sapiens
  misc_feature (80)..(80): Xaa can be any naturally occurring amino acid
ATLDSKRWTTVERPKPAFGQQHQQQPKSQAEPPSGNKEPLADTSSNQQRNFETCNSAAFFHVLADCNRMSQAGSVQIENXKLTPQQRAYLKAE

SEQ ID NO: 948595 - protein, 41 aa, Homo sapiens
MIEWFPPHSGPPFPRVMANGCVTPRALKGAARSMKTGWAAR

SEQ ID NO: 948596 - protein, 76 aa, Homo sapiens
KILQTRVQAAGRSHTEFRNLKSFPGPGRDLRTKATIELMALRLLNFQRQLRQEVVVCHGRDTALETALNAQAYKAQ

SEQ ID NO: 948597 - protein, 116 aa, Homo sapiens
MVCQCQCLPSGFQHLQPVHGQLGHKGDIVRPGGWRFMGQESDMHTVHSELLLAELKAGVFLVQLCQGLLQLLSTRWGLAGVHKELSPQQVPIVLLESQVEIAEEFHMLVLHPKLLW

SEQ ID NO: 948598 - protein, 43 aa, Homo sapiens
LRGEYRLQVIDTEFMELENLPGSLAGICEPKLTIELKALRLLN

SEQ ID NO: 948599 - protein, 77 aa, Homo sapiens
PAAICRGGRLLHPGLPHGLSFLPSALRSAEAAFGSVGRDLVLSDSRISPPSLPVLPCAARCETLLSPPPSRKLSLEP

SEQ ID NO: 948600 - protein, 36 aa, Homo sapiens
  misc_feature (34)..(34): Xaa can be any naturally occurring amino acid
AICDSCYAKQNLVMKLSLENGLILYATNSISLGXVP

SEQ ID NO: 948601 - protein, 41 aa, Homo sapiens
VCNSQFYDYGHQPLVFHLFEMPLLCLLSDRNGVLCCSLHTS

SEQ ID NO: 948602 - protein, 121 aa, Homo sapiens
TGIESILSPFPRARLAQSPPRLGQVGPRLRQGSLSTTPPCSVECLDWDVARGTMGGCCASPHSTSRWPWSVRDSLHILNIPVAGAVPYRRRVWGPGIPHIFLGRASETFHRGKGAGVIIPH

SEQ ID NO: 948603 - protein, 42 aa, Homo sapiens
SREEGPPEQPASLAKQGLQTLRLCLPPPPVTLQVKIPRGTEA

SEQ ID NO: 948604 - protein, 103 aa, Homo sapiens
RQEAKCTESKWGHADGCKSRAPTKLCWREPLTASRTWSNDECGITDDQLLALLTSLSHCSQLTSLSFYGNSISIICPGKVSCEYSYGLSNLTQVLYPVPLEEL

SEQ ID NO: 948605 - protein, 120 aa, Homo sapiens
RCRKSDREKTPVHGGDALLNRANRFSKRPQSWLLQSSQGRLDLHSQLYVFCTGVASPLPSWLRGWSRKLLLCPSASGPPECWHQSADTLPSGCTLASGAALPHWGSHCEQSWPRISSASC

SEQ ID NO: 948606 - protein, 96 aa, Homo sapiens
PFRNRPSLCPRGSQGRLVFIPSSMCSVWGRFSTAFLAKRLAKKATSMYFSFWAAWVLAPICRHPIYWLYPGQCANPSPLGFPLRAQLGQNFITILL

SEQ ID NO: 948607 - protein, 122 aa, Homo sapiens
MRYPRLRRTTGTEDSHVTPVESPIPLFCIAKGDCIPEATEKYLGGTDDTFKKKDLFLDLIADVMFGVPSVIVARSHRDAGEPTYMYEFQYRPSFSSDMKPKTVIGDHGDKLFSDFGGPIFNR

SEQ ID NO: 948608 - protein, 187 aa, Homo sapiens
VIRTIMLSDVSPTAAREYPRPTVYDACLKLQSRFAEKPQSQLLQAPKAGWIFIHSSMCAVWGGFSTAFLAKKVGPESYFFVLQLLGRLSVGTNLQIPFLLVVLWPVWQPFPIGVPLRAKLAQNFITILLSLISSSEAPSFKNGAPKTEKSSSPWSPITVLGFMSDEKLGGTETHTCRWVLRISVVRA

SEQ ID NO: 948609 - protein, 62 aa, Homo sapiens
SQEEILRSSVASKYWKVVLNLRFPSKNFLSEQIYACERNRITEMVRNIRVVPDALEEVLSLL

SEQ ID NO: 948610 - protein, 33 aa, Homo sapiens
NGRLTVYGHFQATITIVEGLLEVNIIQMTDVLM

SEQ ID NO: 948611 - protein, 61 aa, Homo sapiens
EISFGPSAAWASGTWGGCLLLHHLLHDALVCGLGEPALLVQQGQNCRAACWLLNEVDAGPS

SEQ ID NO: 948612 - protein, 36 aa, Homo sapiens
IATLTSCQHLYGIAENITGPSYLTMNTTYQQTSSST

SEQ ID NO: 948613 - protein, 42 aa, Homo sapiens
EVWYIISDPNCEIAQSTVCRPVDVDEMCLLTVRRTFNGSGTY

SEQ ID NO: 948614 - protein, 39 aa, Homo sapiens
  misc_feature (3)..(3): Xaa can be any naturally occurring amino acid
VRXADSPFLTCYLLNLEEEKLSQKKESEKRNGDSTALMT

SEQ ID NO: 948615 - protein, 143 aa, Homo sapiens
CEMSEEECREGLDSDINNRVVKHDSCRDPLNWSKPKNAFPEGPLGALRAMCKRTDPVPVTIALDSLRWLLLRLPCTTLCQVLHAVSHQDPSPGDSSSVRKVSVLGLLHEELHGPGPVKSSQPALLLTEVTLGRTMGQASAHIL

SEQ ID NO: 948616 - protein, 71 aa, Homo sapiens
PDQVHRSGGKEINTTEIKEEKCKSRLQESCPFHPKGHSPEIKLILGITSAALSRREDDFVSLLARRAYVQK

SEQ ID NO: 948617 - protein, 96 aa, Homo sapiens
MGVFKSTSSNSKAKKTKEGPVTQAYWRCRLSEDDHQSYFPDTVRTGEPDEPEGKGRLTGARCNRLYKNTPGQLIIDSEETHYCSSWLMHGCLSAPQ

SEQ ID NO: 948618 - protein, 54 aa, Homo sapiens
AAPEDNHSVIAGSQKHQYQQRRQARRICSARAEENPRHPEEDLSKNFIQPHTHI

SEQ ID NO: 948619 - protein, 66 aa, Homo sapiens
KGRTSCKIIPRRYLVSATVINGGVRGFRLLPFQIRGVDKDDVFGKLVIGDEDVVELVIHSPSWGSA

SEQ ID NO: 948620 - protein, 50 aa, Homo sapiens
PDGETRVFEQELRAATAWGENKKAQLVVSAHDVDRIETGSLSWPGLCRKM

SEQ ID NO: 948621 - protein, 38 aa, Homo sapiens
VRCAVCGVASVSPLVRRNLEMNDTGGGDLAYRSLAARS

SEQ ID NO: 948622 - protein, 37 aa, Homo sapiens
MAAWALSLRCSRESSSLRFLSELFLLQPHRSDDSSSE

SEQ ID NO: 948623 - protein, 55 aa, Homo sapiens
CDHIAEVDSEAGWSRRSTRSTCAQEEQDLDLHVLGPGRISFCILSAMPGTWWCRQ

SEQ ID NO: 948624 - protein, 48 aa, Homo sapiens
LPSHRVSPREASSEALGVGEVLHVKTESWHPARVSWEMTQASSFETVQ

SEQ ID NO: 948625 - protein, 44 aa, Homo sapiens
MRRGPVSEPCSDKGQRRGGAVRRGNSEQNIECGGGYVKVVPNSL

SEQ ID NO: 948626 - protein, 35 aa, Homo sapiens
SRGADRRLPEQGYTKVPVPGYTKVPEPCPSTVTPG

SEQ ID NO: 948627 - protein, 60 aa, Homo sapiens
MTHGVHREGKGQQRMHLLIAACYSSYTWCVGPLEHALGPLDVEEDVGGRPGMASVVTTHR

SEQ ID NO: 948628 - protein, 51 aa, Homo sapiens
KGIISASLLIPMFVMGVNHENDDNRLDDHQQCAPVTSILLAPLAKVIRCTT

SEQ ID NO: 948629 - protein, 51 aa, Homo sapiens
MARSPLLEFSIYPGPQVATGVVEPDNSFVSTHTTLGSTLICAVMVDNEAIY

SEQ ID NO: 948630 - protein, 38 aa, Homo sapiens
PSAFHQSPTSLETYIMAESSATFTPMALIIFIFLFFLT

SEQ ID NO: 948631 - protein, 45 aa, Homo sapiens
KNRTFPARLGPFPYPDLGPPCPAPFLFPSSVSSKDNCHWLSLIPD

SEQ ID NO: 948632 - protein, 58 aa, Homo sapiens
LPSKAAVSHFSKAVRDTSEPWARHWLEPESSSLLFYRELFLLHLTAASTAPANTAPKR

SEQ ID NO: 948633 - protein, 45 aa, Homo sapiens
ARYRPPSPNLQGKSRSKWSAHGLKGLKRVQWLTDEDTRNLNAISS

SEQ ID NO: 948634 - protein, 49 aa, Homo sapiens
QEIACNSHPGAKEDELSPSNYSRDAKASQMSGPSRVNLEHGSTTRSGPG

SEQ ID NO: 948635 - protein, 43 aa, Homo sapiens
RGPGRDALRAHQSREPQVSSDQKHDLTADRNSLMITSLSLGPC

SEQ ID NO: 948636 - protein, 45 aa, Homo sapiens
DREEKRADPLYQIDLQAYLTDFLCLFCSCKKIPAFQKWSDTNAIS

SEQ ID NO: 948637 - protein, 53 aa, Homo sapiens
MISSAPDCPSIVRAMNEANRFSLILALRVCYNFLFLWALVREVGGLGMCYLSH

SEQ ID NO: 948638 - protein, 48 aa, Homo sapiens
DVRDTAGQDEATAKAVLEPIQSTSLIGTLTRTSDSEVPDVESREDLIK

SEQ ID NO: 948639 - protein, 73 aa, Homo sapiens
LVGYRRYYTVFSDLIDTVYLNDQHVTFYYEPRVLRASGDMAQDTGIPADIWRFYLLYIRPEGQDSAFYWTFSR

SEQ ID NO: 948640 - protein, 55 aa, Homo sapiens
ITGIELAVADKIASITDVTPIRWGSSGLVEANDAESPAFQWTWAQASILCWIIGT

SEQ ID NO: 948641 - protein, 34 aa, Homo sapiens
VEINSKGDQLMRHRKEQMTHQKHMQGKGSYWASG

SEQ ID NO: 948642 - protein, 108 aa, Homo sapiens
  misc_feature (91)..(91): Xaa can be any naturally occurring amino acid
  misc_feature (94)..(94): Xaa can be any naturally occurring amino acid
SYLLELRRTCRLEIELQSQLSMKASLEGNLAETENRYCVQLSQIQCADEAAVDGARWPMLRYAEMEQQNQWIQISCVDVEDACWSSEIATXTAXLRGGEKDAHTSLKY

SEQ ID NO: 948643 - protein, 37 aa, Homo sapiens
TRLPIVTESKQTAGEEIAVEAIEGSREDIVVPVYLRE

SEQ ID NO: 948644 - protein, 47 aa, Homo sapiens
MKNRVCHESIIRVCTDDDCKVKAPGQLAMPVLLISLFSRAHSLFNTP

SEQ ID NO: 948645 - protein, 52 aa, Homo sapiens
PGSHEEQRPWSNLAWGRPHPRPRRFWERLSARQCRIYELRNKQRYLFQRYLS

SEQ ID NO: 948646 - protein, 42 aa, Homo sapiens
MGIVPVLLPALSAASTVRRAAAGVGHYVIYTGHLTYLQLHCH

SEQ ID NO: 948647 - protein, 32 aa, Homo sapiens
SWYLLMLAGPRLLQEGRCGHCADRMAPNCPVL

SEQ ID NO: 948648 - protein, 89 aa, Homo sapiens
LILIIQFSKPLTIPIPPALEVTGGGGTVLIFTFPLPKGKSATKGACHKRKKGGLHWKDYLAELTRSELKQRFFVFGEIEECHHPLPCPR

SEQ ID NO: 948649 - protein, 72 aa, Homo sapiens
RELTLEDPINLEIAVVPCHRRECVRKGLDPDSYLCDLARVGSSPKDKRVPYFTRNQILEHRRKLTLVLCAGK

SEQ ID NO: 948650 - protein, 57 aa, Homo sapiens
RVIESFVETLMRGGGPAQSRGNGSVRPLGLLRQIIKGPPLEQRGELMALIRREGRMD

SEQ ID NO: 948651 - protein, 30 aa, Homo sapiens
MQTLVSDSSVVLSMDKTGAWTWIASSLRYK

SEQ ID NO: 948652 - protein, 64 aa, Homo sapiens
INLEIESSVIECVELEECGWWAILFGESFSCECRASRAIQKNDDAPVADHCLTQVANEAFRAET

SEQ ID NO: 948653 - protein, 46 aa, Homo sapiens
CSRGSSSSKGLVLSFLSRNSDSIHFQVLSNLQVSNIALSLSIHGVP

SEQ ID NO: 948654 - protein, 101 aa, Homo sapiens
DPPCGYETLPMYTAQAEVLPPPPLELEPRPEPPCSRRESKNFFILRIGSSKAKYRWFLDFFFFLFLLERTGFSPCCFLLSSFAPLPFPSFFFENFSPLQFA

SEQ ID NO: 948655 - protein, 85 aa, Homo sapiens
ACRALQITTGLFLAMPYSPARLNLPFPSNLPHITRDVNIHGLQSILLTFHAHMAASNHSSILPSSFTTICGCRPLSFTGIHFLSL

SEQ ID NO: 948656 - protein, 52 aa, Homo sapiens
LACTSWTLASRLRDISYKCICVRSACISLLYSSEKKIFIGLIPHNLGKFVNG

SEQ ID NO: 948657 - protein, 64 aa, Homo sapiens
TIRVLIATLEWRRNFQRKMSEWEGCKRVEYDNSMEKTRYAQKENGKNKSHHPQQMTAAKENTNP

SEQ ID NO: 948658 - protein, 38 aa, Homo sapiens
WCDALGFIFLFTVVGCWHCISNFITRHRYYSDMYYVCR

SEQ ID NO: 948659 - protein, 42 aa, Homo sapiens
DPPFVMGVNHDKYDNSLKIISNASCKGAPAFSMVVKAPRGLH

SEQ ID NO: 948660 - protein, 42 aa, Homo sapiens
ALDGSHQLLTIKCCGVRCGRMNGTVSSPLGDALGWALVVGGA

SEQ ID NO: 948661 - protein, 89 aa, Homo sapiens
RITVRAVPDVTSRYPERSYSWSLPPWINVLMISSFLAWRRSSRRFGYFWLRPAASAWSARSFLRALSASQFVDVSHENPALLMNTFPFT

SEQ ID NO: 948662 - protein, 56 aa, Homo sapiens
LKHLKTSTGNGLEHGPGETLELQISDAVCAANIYGAEARKESRGAHDRKDYKVRID

SEQ ID NO: 948663 - protein, 69 aa, Homo sapiens
SNLVIQLSPVQTSVNEPYRIEFCICRLSGCVIVAKYSGSQQETEIILARNKYFLNILGLFNKKKTEDCP

SEQ ID NO: 948664 - protein, 94 aa, Homo sapiens
MSSLYVMAFEVLPYREIAHNFKTTLLDRTKTWRGQICRLGNLQFVICNQERSAEAQGNKGSQKGCRGWCCAGLWEEGPAHERLISVVEQLPSGK

SEQ ID NO: 948665 - protein, 98 aa, Homo sapiens
IVSEWWTSLHRALPSPTRQPGAPERTRAALSNAKRRCTPSIYSLVPDGTCKDTAIVGNKDPPSICATVPVKTFLNITPAEVAVLVWAKDWSSFCHELC

SEQ ID NO: 948666 - protein, 164 aa, Homo sapiens
MRRGPLSPLLSPYFFSSGAYSVIPGAKGPMSHVTGVFLGHYIHHVVQGLAGVGDTAHGSGPECLLDRSCKELDAGKRWLEGPPTWRRGLVAPGSLHIGGEALNVLDPQGRYRCACSCWAFVPEHGWAPGTRPVLGLGGSFSGGLLSLFWFQLRHILVQLLLGFN

SEQ ID NO: 948667 - protein, 70 aa, Homo sapiens
ERWRAFLRLLLRAGCIGERASSREFLGGRSPLSFTVSTELAPRPIYLTAPVFRRLLVLPGLGLIPGPVSS

SEQ ID NO: 948668 - protein, 57 aa, Homo sapiens
VYLRIPEHVEARYVVVDVTLDMVTPAQTALVWRGGWTDVAEDPWPSPPAKRDTLDYC

SEQ ID NO: 948669 - protein, 88 aa, Homo sapiens
FLVFLKALTSWVRRSWSRKAPMAPPLCLLEDTGGTQALDGQLDLRVSVLTHLVVPLDILLNGLARGASRGSFSGLDCSHRHVRGTEAR

SEQ ID NO: 948670 - protein, 70 aa, Homo sapiens
MSRLAAGCSISSASLYCQAYRDGRPRLPQDRNSAKVYSWTIQSNSLPVENDIPMSVFDKNGSRKNPDAQF

SEQ ID NO: 948671 - protein, 164 aa, Homo sapiens
SRGSRNVVAICGTCVSVFLATTGDNSEDDVELSVPPMPCQHGGSCIDRRGPAIFCSVSRQEALGLLSRRLSEDDVLAQAHRVDSGPRCLHNGTCVDLVGGYRCTCPPGYTGLRCEANINECRSGALQAGKTRDCLRDPGGGSRCLCHAGYSGPRCQTVLSPWES

SEQ ID NO: 948672 - protein, 90 aa, Homo sapiens
MSRLSISSFIAYQKQKLIVFKENAEQGEVDMESHLECQRRASCSAYSFRDIEDCLAETCQALAAGLEQLPEVPPLRITCAEKPTIGGLSC

SEQ ID NO: 948673 - protein, 199 aa, Homo sapiens
  misc_feature (199)..(199): Xaa can be any naturally occurring amino acid
GRRCSVEYIPYEAGTYSLNVSYGGHQEPGSPFQGSLCIDVDKMRPRVNVLCGPALSPVHVFVPTSSQSFQVDTSKAGVAPLQVKVQGPKGLVEPVDVVDNADGTQTVNYVPSREGPYSISVLYGDEEVPRSPFKVKVLPTHDASKVKASGPGLNTTGVPASLPVEFTIDAKDAGEGLLGVQITDPEGSRRRPHSETMTX

SEQ ID NO: 948674 - protein, 62 aa, Homo sapiens
MYCTPPALIVPLTIMNRKLMNTNDLEESGSSRRKIQGIWMPGNLIEKVMCVRIGLACLAAVR

SEQ ID NO: 948675 - protein, 114 aa, Homo sapiens
MASLVFQIPCLGRRCAWICQILYFRFVEGYFFAVLERCYLRCASDDAAVWRRNLNVNLRMMHELIACRFPFPHWTPDHVTGEGIDTVWAYDASTFRGREKRPCTSMHFQLPIQA

SEQ ID NO: 948676 - protein, 83 aa, Homo sapiens
AISELQPFSKSGTVIVERLVEVYLLPVEGWKLRLTGHRVYKLVEDTKHRPKENLELILTQSVESTARAEGLPLRLVRFGISFF

SEQ ID NO: 948677 - protein, 49 aa, Homo sapiens
SASVLQVHAARAHQSRTRSGQGKLALSMPVSNGGTNVLQYTSAVSDLTF

SEQ ID NO: 948678 - protein, 81 aa, Homo sapiens
CHILHYCKGLRALLHVFCYGARTNGRSEAGPAVGGDESLPPAGTTSEEAPGPVSPGGDPAVQPDVCLNATDFKQLTKETHC

SEQ ID NO: 948679 - protein, 149 aa, Homo sapiens
MESGRRVESHIVIQQMYAALYLHYYHNGSDHALTHRYDYLGAPVIGDVETTGAYGAPWSQGGTANSLPPGTVCALHTSAHLASSLGCEVSSESEFTNRIFSGLRSVCSQLVIMEELDSLAQLEGHVAHLVDGVGQVVVVFEELEGARAQ

SEQ ID NO: 948680 - protein, 40 aa, Homo sapiens
MLTLANEYAGFLMALGLNGHLTKLATLNIHDYLTKGHEMT

SEQ ID NO: 948681 - protein, 42 aa, Homo sapiens
  misc_feature (4)..(4): Xaa can be any naturally occurring amino acid
  misc_feature (33)..(33): Xaa can be any naturally occurring amino acid
NREXVELEEFTLVIAIICIVVFRASLLDDYQLXEIFGNSFGR

SEQ ID NO: 948682 - protein, 141 aa, Homo sapiens
EVQAVSLTELLFAHEELNMEIGQGYGQVSPPLVNGRRPTFHDLPCGASVILGNNGFIWIYPTPEHKEEEAGGFICKPESLSLLLVREVIYRLRNCIISLVTQRMMLYDTSILYCYEDIPFHIRSTTSYSQEIMEEIVMDTS

SEQ ID NO: 948683 - protein, 33 aa, Homo sapiens
QLIVPFCFKYSSNLVLVYVNTLMGQALPSNFCT

SEQ ID NO: 948684 - protein, 35 aa, Homo sapiens
MVNSSFTPSNSSSKTTSEDHNSQVEQCKLQFLCFV

SEQ ID NO: 948685 - protein, 74 aa, Homo sapiens
DPYVYHRLFPGAIRCQLKKRVSSFEESRVDLQDRDYSTETCENKSIAKIRKRKVTQKINHHDKINGKRKTARKQ

SEQ ID NO: 948686 - protein, 112 aa, Homo sapiens
HIRRVNVENLLHNRNFWILRLTPGSKGEIPYSAYNIRCYGCVVLYSKFGASWRNWQKELCKPRHEGQLKDAGPLLDYAISKIRKDAFSQIEQGKGALKISASHGPKDSRNVS

SEQ ID NO: 948687 - protein, 66 aa, Homo sapiens
EARVNRQLSPHKLFTEDRIRSASPDDCSTRVGVDNSPTLRLAQDEHGFGIAKLQAVSILNRIMAVI

SEQ ID NO: 948688 - protein, 195 aa, Homo sapiens
KYNPKLSRWELWSRWTTCGRLCMNGDMEISHGICRIAVALGKNHSRSLLDQVEHWQSFLALVNIIMSCTGIPSHYPVNETTSSLTITFWYTLQDDILSFEAEKQAVYQQVYRPVYFQLMDMLLHKAQFPSDEEYGFWSSDEKEQFRIYRVYISDTLMYVLEMLGAELLSNLYDKLGRWLTSSELSPTPGSTQKAL

SEQ ID NO: 948689 - protein, 149 aa, Homo sapiens
RNRTLDIGDTYLLRSRELQHRELLPLIPLEIPVLDFLPPDRCLSFFITIYWKSSNYINAALMDSYYTAFSFYSLPASFAKHSERLWETGPGLSLHIREILLNDVDPAQIVSTGIGQKTEYTDTGPSRLNLISADLEQAIISRNIPHLQC

SEQ ID NO: 948690 - protein, 136 aa, Homo sapiens
MPELFAITFSINSSLVTVLVILPLLLLPFFPFGHFCMYVLSFYNPICQTGRRKKDAMGQMRALDGSYALCMVLSQFFQIEAAFHVYHNTLIKIWRRSPKCRGMAIVKLMRPLSTPTTEVWQPLQNVGSTFVVHPLL

SEQ ID NO: 948691 - protein, 70 aa, Homo sapiens
SLLWMCEAYGRGSHQRRASSRGGLHHRRGLRLAGVGPELLRRTGSLFAPLVLSPACPVHLNLDNRILDTS

SEQ ID NO: 948692 - protein, 55 aa, Homo sapiens
MIVFKNSAPYIGFGEGDVGQHPKSINRGGGVRSLQGFTRSIPDYFAVNCTTHTVM

SEQ ID NO: 948693 - protein, 51 aa, Homo sapiens
YTEIAKALKFFSSSVMTLSFLLLMYVSDGHDRSGQLGGQFHVLQQNCLPSW

SEQ ID NO: 948694 - protein, 121 aa, Homo sapiens
WRMRQLLSKTQGNIDDSLIGGNAYAEGREGEGTESTVTTGVDIVMNHHLQETRCTKEAYKKYIREYMKAIKGILVEQRPERVKPFMTGAAEQIKHILANIKNYQFFIVENMNTDGMLALLD

SEQ ID NO: 948695 - protein, 54 aa, Homo sapiens
MSGSALFSPHSPGRAAEAALLQVYVSSQTPQQSPDALHDCSSQMGFMLLRTHRA

SEQ ID NO: 948696 - protein, 48 aa, Homo sapiens
INCVSRKEPLVRACRHARLLANEVIAWYSCCTCSVTLFRTQYSPQIHD

SEQ ID NO: 948697 - protein, 51 aa, Homo sapiens
NGTYDDGATKLNDEARRLIADLGSTSITNLGFRSTTGLLLWSGQGITDTKA

SEQ ID NO: 948698 - protein, 110 aa, Homo sapiens
TRAERGRTKGSKATERLKKKLSEQESLLLLMSPSMAFSGAHAATAMSYTVPASPLDYDACSSGRENILGAAARSVSRSFSLYIRVSCRMLDQLCVVKLSDCPHAFLLSIQ

SEQ ID NO: 948699 - protein, 66 aa, Homo sapiens
STCVLGSCHVLTPVCVCKNVNLCPVTVVPLFCSLRGSSVGLVACVVVLLGASCSGTSRHQGFRKPL

SEQ ID NO: 948700 - protein, 40 aa, Homo sapiens
QIPTYPVTTCPSIGFSYSLGEAACVYVGVTQPCPNLTSYW

SEQ ID NO: 948701 - protein, 54 aa, Homo sapiens
PKQGAGALALKNLSGVEWHWLGHYSYAGDVAPNKYGSKWLATELGYCSTDEASE

SEQ ID NO: 948702 - protein, 40 aa, Homo sapiens
RIHRILRHISISNLADELPELIKVALSLRCYSKFSDGSKM

SEQ ID NO: 948703 - protein, 33 aa, Homo sapiens
  misc_feature (16)..(16): Xaa can be any naturally occurring amino acid
MMNGCVLFLLRASPRXMTITVAMTTAGHHESND

SEQ ID NO: 948704 - protein, 39 aa, Homo sapiens
PEQKCSMLHTNSRVTSSNKMDRMELPYMSTTFWHSFDRD

SEQ ID NO: 948705 - protein, 153 aa, Homo sapiens
MEINLEKQCLTYVRETRIYLDLPQNFKIFVSGNSNECLQNSGFEYTICFLPPLVLNFELPPDYPSSSPPSFTLSGKWLSPTQLSALCKHLDNLWEEHRGSVVLFAWMQFLKEETLAYLNIVSPFELKIGSQKKVQRRTAQASPNTELRLLRRG

SEQ ID NO: 948706 - protein, 85 aa, Homo sapiens
TSIMYSSKSLELLSLNQSGLVHYVLSCFRGLVEPFFQGDLVIRLVYEEFSSAQFITAELVRAYHPPFPDVRTGYSFPPGGNRRRP

SEQ ID NO: 948707 - protein, 76 aa, Homo sapiens
ALNVEQASQTIARNALNQETEVELYNEYPEPIKLHKNERANGLLQKAAVAEGAVRVEHRVLHKPRTHLGLQHTNER

SEQ ID NO: 948708 - protein, 33 aa, Homo sapiens
TRYGYLEHNFFARQQNQKPDLAILTSKLGFPAA

SEQ ID NO: 948709 - protein, 120 aa, Homo sapiens
AVLTFLVCWNREIHSEVRSLDDLVSSSCTCSELTVIMLLLLETISTVHQESQNTILPEPSLPVSTEQVIASNLQDRKRSSHFTYCHVPLNTRPYKIGTSLNVMYMSPSKVRPLVFTSFEI

SEQ ID NO: 948710 - protein, 56 aa, Homo sapiens
ARYRSVAVHLATAILKNPEYWQAGSQDSLRLEAGLCLYGNDIDEHTTPVDGQPHVG

SEQ ID NO: 948711 - protein, 100 aa, Homo sapiens
LDRTSCVCWYVAPVLSAECTTLYGLGKAIAMLPVFEYDTMLYFAVHHYRAGIAALFTALPDKKSAISLPSQQVFSFVSVAASNIPCLLIMMGQIFIIFHQ

SEQ ID NO: 948712 - protein, 43 aa, Homo sapiens
KAPSLKMERYEARGHCRRPHQCCGGANSDPLANGSGVPHLLTI

SEQ ID NO: 948713 - protein, 105 aa, Homo sapiens
MNSPSLGLAETDDLFTLYATELTRACMEASAITSSAVNSFAKVVWVASGSGVVFAPGQDCYSCDFDRAAKMMSVADIANGGGVLPLAALWLLCNHWEQLDSPDLP

SEQ ID NO: 948714 - protein, 33 aa, Homo sapiens
MGIVSGFEKLDDEDEEDEEEDDDEEEGEHLRER

SEQ ID NO: 948715 - protein, 40 aa, Homo sapiens
TEMYGSSFDLAYDFQRDYYDRLYSYPARVPPPPPIARAVV

SEQ ID NO: 948716 - protein, 77 aa, Homo sapiens
SIIGHFHRYPPELLEKFRVEKDKYGAREEDPHPTLTSPSKAPSRPTSDLAPKFTYLPSCPLFFQGRLPGIGPSLSLP

SEQ ID NO: 948717 - protein, 90 aa, Homo sapiens
YHQIDVPGSQNQSFQYLRSCFFLTLTPAPLDPSPRISSSLEPLATVHVDSNSFHILRDAKRIVTVYHSFVKTHGVCSCELLQHLVVLRFW

SEQ ID NO: 948718 - protein, 119 aa, Homo sapiens
HTMVGKLSSSGCGRGVRVKYHHREVMPLTQPHDLGSSSWSHRCREMRSVSSCIIFLPMLQHVVLLEELVRQLRHAQGGVDLHSIEVVIAFPEVGTFENFWSKASEMLCAGSVEMIRTLS

SEQ ID NO: 948719 - protein, 157 aa, Homo sapiens
ADLYEDPPPRTERAHGFVDVEIRSRAKLRKFEQVYLKVSDLMVVKFGGEDESMEMSTEEILTVSVVNQSLFDTQGSPGLEDYFNDKSIKGEKLVPGAREVLTEIFKSLPIQSRRLSLTPAKHIRVSDIYLSKEPINSQTPGKTPPPLFHQCPAAKKG

SEQ ID NO: 948720 - protein, 42 aa, Homo sapiens
MARPLHGGLTRFTEVQKAGGPEITIDRPGPCRSMNLSEQTVS

SEQ ID NO: 948721 - protein, 102 aa, Homo sapiens
IIPLNSLLLGRVTLNSNESDFTMWPLLGSNSLLGNCKGREISRFCLALRSGFKGTCFLPPGNLPLLDNITSFLLFVANVSQARTSRANQHILFHFLAVWCMA

SEQ ID NO: 948722 - protein, 139 aa, Homo sapiens
MACPHSSDTSQITIPKLHRSLAVVKNPMGNGFYGMLQRIGIFSPCVSVCAIRVIQEASQATVRHLAAQVSIHQDVSGRQVPVNIIVITEVVHAMCYACSMATSCPGTSWSSRSLRKASRAPFSINSVMIMIGFRFVTTP

SEQ ID NO: 948723 - protein, 86 aa, Homo sapiens
MSLSSFLQSISFNCWTKPKLCHFTRKNLLRSPQKPPTLCTLSTGPGAFADHDWAKPFFLLAIFLIIQLWNMGNRFEILAIEEDNIL

SEQ ID NO: 948724 - protein, 77 aa, Homo sapiens
GSSVAVLFLPEPQFLLQLFVVYKKTNHLFGFKVSGLKYPPEITILLNLTLLLGSLQNAYSNAAFTDEPVHSNLLCLA

SEQ ID NO: 948725 - protein, 145 aa, Homo sapiens
YDILYNTLGLYRFERVVILYDICTERRARIFFVFLSVAVSNIISPTGFFEVRESSLHPGALSSYMSQFHLWVENKHKSHINCVLGQGYVTIFPESMHQAEESHHRVLNQRCYNPLLKAGHRKKSKITCMLGSDICHKNHCGAGIL

SEQ ID NO: 948726 - protein, 42 aa, Homo sapiens
IQCHRFLIIVFLHVWLLCFFQVLEIVITPVPSGPRSQEFLNH

SEQ ID NO: 948727 - protein, 228 aa, Homo sapiens
ASRSRLLLRKIRDADAEDGLTGSSLAGIEPQHVCRDGPLGGIGVLALLHLHRLLAGLAVVGHRGLYELFPVLLIPVIVTLITGGAGRGVAVKLLCHICPPLHRGWNDSSVSSPESSLLSVAFSSRILPSSFILSKYGIMLVLIRVSIFIVAWVHALFQSSVLDVELFRVDKIKQFPVLLPLNAAEGILSALLGLNFKVKGRVVVVHEQSGQGDSSKRVHGQGSLSGRG

SEQ ID NO: 948728 - protein, 68 aa, Homo sapiens
SKSQELLLFRKKDTSMVVYHLMAMAHMYVSIVLLMRSTPDLNIDHMSFHGNGGGSESRLRSNQITAIP

SEQ ID NO: 948729 - protein, 136 aa, Homo sapiens
APGLRHQESKLIILAMVGHGLVQIMRNYMFMKMLLWTTVCVLIGAILCVPRNNACHLWRLGGMHVPGVKHRDQTTAPCLMQNCTCGPLRTISDVATKQEGLESVLKDSGESAELWMSVHEFNCATGKLSKLTCRHS

SEQ ID NO: 948730 - protein, 42 aa, Homo sapiens
MTTCSGTSSCSVMSMSAPAEETAPVMYWGPCRPGTVGGGVRP

SEQ ID NO: 948731 - protein, 40 aa, Homo sapiens
  misc_feature (1)..(1): Xaa can be any naturally occurring amino acid
XRAVQVGGAVAVKGEQMANGVPGWSVNMNTSCCLDVGTEV

SEQ ID NO: 948732 - protein, 136 aa, Homo sapiens
  misc_feature (1)..(1): Xaa can be any naturally occurring amino acid
XHAERVKLINELRTPVTGESAGGEYKEMDKPCGCPPGVCDHGTGDRRDPWYSTVGLLPPVRAMSQRNLNAKTEQWPTGVTMTSNPITWGQIKKTTQEAEKLLERQAQAKTPDSMFLAMLAVVSCASIGSGEAPTGN

SEQ ID NO: 948733 - protein, 184 aa, Homo sapiens
LLYNIHPYLGFPVLCWTPYPGILRMYVHYPSCITFQWCKENKPSYIHYQPAQDRLQSHLVEMLIQLPRHISVTKVSIQFERALLKWTEYHQIPNHGFYFSPSVLSALVPSTVAVKPVDGNRVPSSISLFPVSDGSNYFVRLYIESRCCVNLPTPDFSMPYNVICLTCTVLAVCYGSFYNLHSLT

SEQ ID NO: 948734 - protein, 185 aa, Homo sapiens
CDGDSSMWKVRVSEIVEGCRSTRAPQVHVRQITVVGHAEVRCRQVHQQRLRVEPHKVVRAIRDWEQAVEEGTLFQSTGLAATMLGTRALRTDGADIESMVGSGVYSVHFSSCPLKLDGNLGDCVGRQLNQHLQEVGLQPVLGRLVVDVTWYEFSLPLEVMVRVCTYGRRYQGTVSSSSTGKARYG

SEQ ID NO: 948735 - protein, 42 aa, Homo sapiens
THPSRAYPVLASWTLYPGICGCICTPIIITSYGAKVEQTNVT

SEQ ID NO: 948736 - protein, 72 aa, Homo sapiens
MASRGIAQCFPSLYHPLQTAEWHSLLVGRTSSSKALKRGFQSLYTLPCLASGSQGLVHLAGPLRYPEQPSKG

SEQ ID NO: 948737 - protein, 74 aa, Homo sapiens
MAAHTTCYAVSDTRGTEVERQEKQAAMIWRYRRKNGTQQSWAGQPLLSARLLYLQSLLDNRWYRIYQSSSFSGK

SEQ ID NO: 948738 - protein, 104 aa, Homo sapiens
MHFLEVRRLASDPRRVDNVDLIPTVATCLPVTLPKYRGPVAKELNDTKLGGVGILIAVQWSLCNCSRRTCLHPANSPLIGRAVRLKGASIDWVVSFKWVCEEPR

SEQ ID NO: 948739 - protein, 46 aa, Homo sapiens
RSFDVVQFAQCRQVLMWMQQISRKITPLMSAFRKGHVKVVQYLVKA

SEQ ID NO: 948740 - protein, 37 aa, Homo sapiens
VDLNRYWAIRVAAQQVEVTPQLYQGNHGGEQSCMRRR

SEQ ID NO: 948741 - protein, 43 aa, Homo sapiens
GRFELSGIPPAPRSVPQIEATFDIDANWITERHGHGQEHRQAQ

SEQ ID NO: 948742 - protein, 69 aa, Homo sapiens
LKAALDLLVMVILLALPVLLSRGRDVQDAVGFDVEGHLDLGHAPGARRVAAQVRSAPTDCCLSVMAPLA

SEQ ID NO: 948743 - protein, 57 aa, Homo sapiens
SGVAEQCHILGSEMVHNNHQMQYYITFEVLELVLGMSYRNKVQQAQDKDHIIATRSL

SEQ ID NO: 948744 - protein, 34 aa, Homo sapiens
KLQQQQRELKQLQEDRTKLIDIQEKIQALQHGLS

SEQ ID NO: 948745 - protein, 37 aa, Homo sapiens
MAWSARTRLLPSCWRRLKRLAKSDPMVAVLHRGSRES

SEQ ID NO: 948746 - protein, 58 aa, Homo sapiens
HKAFEAIRESPVKRGPRGLPVLERDTTGLQGLAWYRWSRMVITGAPWLQWVLAGPQEP

SEQ ID NO: 948747 - protein, 178 aa, Homo sapiens
GGKDRLPAKLVEGLKRLAKSDPMVQCIIEESAESTSSQGAGEAAPGKSALKDLRGGPRLASPFKKICPGRLRTRDDGHVKYVERAQPLQVPPYKHNRVVHDRRWPFPRRPWPRDNRIKARMSSPIRKLKPAARDYLDRKDDEWDVAEARKDLVLWARRHPGPKSSPTSPRLLQYLNEM

SEQ ID NO: 948748 - protein, 39 aa, Homo sapiens
MVRQNLAALPKLVEGLKLAGQSPDPMVQCIIEESGEHII

SEQ ID NO: 948749 - protein, 154 aa, Homo sapiens
ALSRSLCWLVDTAALCEWIVKSLTRSSVAKLILVWLRAICAVLLVLVCTCSEWHARSTTSTLALADSMVRCADHAPWKETNMARNQISEDTWSCHRVTWTGRFKYVRVTDIDKSAEYAINMLPFFIGDWMRCLYGEGYPAVQPLEHLHGRGGAL

SEQ ID NO: 948750 - protein, 42 aa, Homo sapiens
RADSNMQIFVNDPHWSKPSPLRSSPDETIEASKRGTEARNSV

SEQ ID NO: 948751 - protein, 68 aa, Homo sapiens
NLLQKIVLHLCYGHPGTAQIGEGVEHSWGDLEDSETDDDEGSGDQAIILDGIKMDTGVEVSDIGNQGR

SEQ ID NO: 948752 - protein, 34 aa, Homo sapiens
QLSLSYGGNENQKQSSYSLHPYDKRGQQLNMESS

SEQ ID NO: 948753 - protein, 110 aa, Homo sapiens
NPMVDYENQKQSSYSQQPYHNQEQQQNMESSGSQGGQSTFSYNQPALWSTKIHIYQAVMAMTHTSMAHIDETVKFIDSACFDSYKSQTMQSISFTTGKTTATTHKMTVVM

SEQ ID NO: 948754 - protein, 109 aa, Homo sapiens
ITSRAHIAGNHIITQEQQQNMDSSVKPSWNSTFLITSHVNGQQDSYDQQLQAIINIKAHIMSSQIMISFFDSYSRNQQSYHSQREDYSHHTQDDRRDVSRSGVNHSEPA

SEQ ID NO: 948755 - protein, 87 aa, Homo sapiens
SANVALLPQCIQEAAAPSATDRGICLRPESYLGSPQHRPSIRSSPNRSLPSPGVLCGSDHPKTEDPPGEKMVAAKVKGEKKDTTLKK

SEQ ID NO: 948756 - protein, 55 aa, Homo sapiens
MSGNLHATRLYRSMNSQYLKLLSSQKYQILLYHGDVTWPCNFMVDEWLVDSLNQK

SEQ ID NO: 948757 - protein, 43 aa, Homo sapiens
MGYKQQLCKMISTSAQRQLCHSRLTTCPAFDGHLKLEYYSLIM

SEQ ID NO: 948758 - protein, 49 aa, Homo sapiens
MGASAPEGRKMVAAKKRISRWSRSTLGSNSIMNKWEVRFLGYNADLCKM

SEQ ID NO: 948759 - protein, 115 aa, Homo sapiens
GKNGVGRQNEGKCKQHDNTCSTFSIKVEGTGEIAKARIYRLVFFTHRCKKHCHSQVKEPRASWKCGAHTAVEHTCCGDSSVSAVRVVVEDLRYVAQVENGLRLHGGINDEIACSI

SEQ ID NO: 948760 - protein, 64 aa, Homo sapiens
SGVVLLQCTSGRFQVQLAGARDDVLSRLLDDALAPWGRTWPACFSPSTSLGRSAWVLGLHGHSD

SEQ ID NO: 948761 - protein, 86 aa, Homo sapiens
SCAELYALRSMLKKASNKTLASLQRFQDLQCDLPFSPRLDQVQHLAEADLVGQGLDGHAVQPLALLLVEVLELEHGQGAVPVEVNA

SEQ ID NO: 948762 - protein, 110 aa, Homo sapiens
NVTSRMIANKLEPDKEIVHDGDHMIIRTLSTFRNYIMDLQVGKEFEEDLTRIDDRTCMTTVSWHGDKLQCVQKGHKEAHGFTQCILDDELHLEIIVQGEARMEALKGQRS

SEQ ID NO: 948763 - protein, 72 aa, Homo sapiens
MLCTMCAKLLHEEAYSLRLRLSLTVWGQLCPVALGVGQHVGGRADEQEEAVLGLVWPLLGLQLGAHFKGHAG

SEQ ID NO: 948764 - protein, 50 aa, Homo sapiens
SGDAVRLMLPADGISLKANSARLGGDLVEALGDPDHGGMYLSSGQHLRFG

SEQ ID NO: 948765 - protein, 52 aa, Homo sapiens
EPDLSKRNAAQKTDTSQHDQDHPSFNKITPTMAEVRLQRYTGMLATLSRKQH

SEQ ID NO: 948766 - protein, 37 aa, Homo sapiens
YRLKRELSQVGVILSEGRVILIMVGCICLLGQHLRFG

SEQ ID NO: 948767 - protein, 35 aa, Homo sapiens
SAGTCCGDWLGHGRRLGFPPFCSEMGVVGSISALE

SEQ ID NO: 948768 - protein, 54 aa, Homo sapiens
GAERALTQADAKNEGGPLHAPGPEQVFLRFDMLLEHPLYSHDVLSAYLSCLRLS

SEQ ID NO: 948769 - protein, 69 aa, Homo sapiens
ACDSMRIPNMRTDSSGPFAVVNSQVAFDGSRVSTVNDDLYNMIIRRYSDKSGNMDFDNFISCYISPFAC

SEQ ID NO: 948770 - protein, 59 aa, Homo sapiens
VSRIPNLDSGAARNYMMKDCKHPNIVAYLGSYLRRDKLGIGMEFGGGGFFTGIFITVTG

SEQ ID NO: 948771 - protein, 65 aa, Homo sapiens
MRYAAKSVRALRRRLRGLVPGSLWPSPEQVRELEAEERDWYPEPGRPCSESLRGEAAWPEEQNAF

SEQ ID NO: 948772 - protein, 81 aa, Homo sapiens
LCCGRSRRFPMDNALRAQLIMPRLRGEASQALIEGFSVTIDGQTGQLAWGQWFLHSPSTRLDVTYIPRCRIVSIRDTRRFE

SEQ ID NO: 948773 - protein, 36 aa, Homo sapiens
RIYMDLRSRCAAPSPTLLLFGQLLHPAADSCMVCQA

SEQ ID NO: 948774 - protein, 61 aa, Homo sapiens
ARLSLWRVRYGVCTIHTITMSTSKKKKKHKPDNTQTSSHNGMTSKRKGQGMPCHVLRPDSC

SEQ ID NO: 948775 - protein, 94 aa, Homo sapiens
IAKTAARTPVVWCIYINSGLNSSADINLLRTGIGGEASGVVPYAHIGRSTSSCLSFSFTICLGNSIENLQDQKLFQPAGLLDVTRLHHLVRRKH

SEQ ID NO: 948776 - protein, 78 aa, Homo sapiens
SLAFLQWNPSVHDEAREKMLTQKKKPEEQHNKSVHVAGTVMEYSRGSDTDLSCKRRRKRVADIKEMVESRCTIARFRA

SEQ ID NO: 948777 - protein, 167 aa, Homo sapiens
KDNTNQATIGIDYQYKNYVLRRIEQNDGNNGTQQVKSGTGARSLATYRDSTVAVVVHRYHKCKLIPANYKVDADVRPERGRDVIIMLVGHTPDLADKRQVSIEEGERKAKELNVMLMETSAKAGYNVKPDRSLPTVAQAEVQRHHLGYTATYAPGYQAVLLPQVSHI

SEQ ID NO: 948778 - protein, 173 aa, Homo sapiens
SLVRTQFYRWLENAIGLLVTDIAARVGAEMLQCTALAEIMPALGDNWVWEALATDKTLEWYSLIIATHFIVVILIDTISDPNQAHVRSATHACNLNGHEGICSYLRSRRSQSLGSPYRCRAVNPSARWHVDPRALGWGPFLTIPEEALPHDVSYGSMSLCYMLIPDTCIGPEL

SEQ ID NO: 948779 - protein, 45 aa, Homo sapiens
  misc_feature (8)..(8): Xaa can be any naturally occurring amino acid
MSLGAVLXFSRVHVLAVQGLLWTCSRLLRIRRQCRMVAGLYYGYR

SEQ ID NO: 948780 - protein, 89 aa, Homo sapiens
EDTSIEATDYDSCATLKSRTTTRLRPFLFLKVSRKNPARTCRWLRDSATQSGAAGYYWIDPNQGCTRDAIKAIAVISLLGESCFRGLYE

SEQ ID NO: 948781 - protein, 137 aa, Homo sapiens
EATDHYIFVERSFTAECRTGLLRGTFRNRSSSLLGFLKVNPEVLILCYAGDISVEHGYVKAPRFLQVHQVKEDACISEITGFGPGPADYGTVIAMGVVFIGEQHDPLMTHLELDINKEVGTEPQNFTELSSQIRGLY

SEQ ID NO: 948782 - protein, 68 aa, Homo sapiens
RPAFSLRVLWLPHPLLTPIGLNILSSASSYTSGAASIHGSFLYSAHLHHRHYPPACTFSNSLHRLCPP

SEQ ID NO: 948783 - protein, 63 aa, Homo sapiens
RKLHPDEIDTDSEYILFYEQQAIDYAPFLPKPDGKKMADTSSMDKDYESDYKKYCVYSKGYTP

SEQ ID NO: 948784 - protein, 121 aa, Homo sapiens
LRGHGITSLRWGGALLHCALGYSVVTLWVLEATQRSLCYQHSDSGEWVMSHDDLEHRPGSYDPAGMMGAVHKEMGRGSTCLFFHRKDCEVYEFTVTLGLLTSFMPRVTSCISVMHIPYPAE

SEQ ID NO: 948785 - protein, 83 aa, Homo sapiens
FVLACCRFVSACQFVSATGLRHSSPGTSPCSGPCPGRGWLQPISVGWQLGILADAQAMELASGLVQHAVIGPQCEIGSPSGRM

SEQ ID NO: 948786 - protein, 50 aa, Homo sapiens
APADFSSGVYLTLRTTGCCTNQRQLHVLRVGIIPSATQQKLAATIPYQDP

SEQ ID NO: 948787 - protein, 44 aa, Homo sapiens
IHGISSQSLHAGIYTALRARTCRLVPVQHPLLATGAVWASIAFA

SEQ ID NO: 948788 - protein, 48 aa, Homo sapiens
LSPFFQSSAATRSMLVTAKVVVPCLGSCRDAQVRYFSQASSCDPCSQR

SEQ ID NO: 948789 - protein, 111 aa, Homo sapiens
YTFVALLPGRGTTWKLSKGRFRLPTEDTDGQGMCRLKRDRPSNGQSVFHVSHQCLEGPPAKEQNWSVPASSLSFNALRGSVKGGHLMSFSTEADVNIAEEDVHEVMSCLLC

SEQ ID NO: 948790 - protein, 49 aa, Homo sapiens
  misc_feature (16)..(16): Xaa can be any naturally occurring amino acid
MASFKGLYRKSTRTPXYKKLKDAMEEKITMAEVVNKINRAKWEEYISGF

SEQ ID NO: 948791 - protein, 91 aa, Homo sapiens
IVDLLGPIIDMSSSVLQKNPTAMEGTLRDVIRHAGCWQWKLSSWDEAAISGLHGWLRVVRVQVDKLLNNVADEVVGAVRLPSDDAQGLGDH

SEQ ID NO: 948792 - protein, 80 aa, Homo sapiens
VSPLPRNGLGPTKTKTAGPDHTEITLEGFSTTVEYVDRVYYSESKRRESASSFRLQLPYIESPLRTAFTDVDIDTIQIAW

SEQ ID NO: 948793 - protein, 48 aa, Homo sapiens
DPSWKTNNRIYKTLAEPPETLSIANTRVFTNVWKGLAHIAFRTVNSKR

SEQ ID NO: 948794 - protein, 69 aa, Homo sapiens
ADSEDSFGSICLGSKIYRGGINWVSTRERHYRYLGMQYIVLPFTRVDIDWYIQSYDMIPWLPQLGDRSI

SEQ ID NO: 948795 - protein, 82 aa, Homo sapiens
MVSLRILVVGLAGIANGTGFTPRSAAVVTAPAPLASKACAGANGTEIFLLPLFSYVVCLPIIITRCLMRVTLEFSFSVPKTC

SEQ ID NO: 948796 - protein, 102 aa, Homo sapiens
MHLDITARPRSVLLDLRGAAPFPLVAGGRPHEKPPSREVHTAAEMGSAILCITAGPWRAKRPKAPRGEEAHLPPVSDLTVEFDKLNLQNIGRSVSETPDQHT

SEQ ID NO: 948797 - protein, 91 aa, Homo sapiens
HILGTEKENSSVTPHEGNVLLMMENDTTTVSRTVAEGISRCLLLLRYALDASVAVCCDNGLQTWWVKPGLRRRYWPSLHTVFSEIPSENKH

SEQ ID NO: 948798 - protein, 181 aa, Homo sapiens
MPSSVSCGILLSGRLVLPWSLSPWLMSPQGDAAQNDWYSPTMIRITHSSSRSPPSWMSSASDLYRQLAHQSNSTNIFFSPVSIATAFAMLSLGTKADTHDEILEGLNFNLTEIPEAQIHEGFQELLRTLNQPDSQLQLTTGNGLFLSEGLKLVDKFLEDVKKLYHSEAFTVNFGDTEEAKK

SEQ ID NO: 948799 - protein, 45 aa, Homo sapiens
LFFTDSGLMQPVRRNDSSSCRVMLLVAQQMGCKMANLVLEHMWQN

SEQ ID NO: 948800 - protein, 118 aa, Homo sapiens
WPVKRFEASRLTAGRRSRERQKRRDVWTPRDVWLGAVRAESSPWAAQLQGKITFPLHPSPPFQLPIHPAESHFHHSIKPRIHPSSPCVTRFFLDSGKELGIQKAVPWSFALVKKQKVH

SEQ ID NO: 948801 - protein, 122 aa, Homo sapiens
DIPMAGEEIRGKPSDGKNDVAEEDRRGGTSRHREMFGSGQSELESSPWAAQLQGKITFPLHPSPPFQLPIHPAESHFHHSIKPRIHPSSPCVTRFFLDSGKELGIQKAVPWSFALVKKQKVH

SEQ ID NO: 948802 - protein, 33 aa, Homo sapiens
MWQVMVGFDGALQGHAVPADGHDGIANVLFTGH

SEQ ID NO: 948803 - protein, 51 aa, Homo sapiens
MDERLSWILRAGHSLLALKESSFLTPGLLWLQLLSSKHQASTTTLYFHATF

SEQ ID NO: 948804 - protein, 85 aa, Homo sapiens
ADLEDPITWYCDLFNEDCDSELKEIRESYDADDIQESISQSLKLWCCCAPQADMIYDPSCHHPPPLIPYYSKMVFETGQFDDAED

SEQ ID NO: 948805 - protein, 208 aa, Homo sapiens
  misc_feature (39)..(39): Xaa can be any naturally occurring amino acid
  misc_feature (57)..(57): Xaa can be any naturally occurring amino acid
ITSVLGCWRRRWKNADLPEWRSSRWWSAALQVGVRKTHXLSFRTVSPAGRLSTSLVXPHAPRSSSVLGEAVLAFSPALAEVTRGIGRGRMVILRSYHEEEADSTAKALLTEMCLGEEDSLQLEPRKGLASLPASRNPGGSLSFAESANLNLSIHFGCSRPAIFTIKDSWLDGHFGLGTLSETDSHSQDRGSPEGHQPGPQLQVTGTPP

SEQ ID NO: 948806 - protein, 69 aa, Homo sapiens
MPSVEEQRYTCHVQHEGLMYLVSLRWEPSSEPTIPIVSIVGGLDVLSVLSVLGAVMAVVMCRRKSSAKS

SEQ ID NO: 948807 - protein, 51 aa, Homo sapiens
TIITITIITTIIAIIITITIITITLLNLYFYLTPNLLHLIITITIITIITI

SEQ ID NO: 948808 - protein, 71 aa, Homo sapiens
LEDFKYSREEKRKEKKEKKRKEKIVSMPANTTSILQPMSQGVILTFKSYYLKNIFLKTIAAINNDFSAGYL

SEQ ID NO: 948809 - protein, 87 aa, Homo sapiens
MSSQVSAETEKIREEKRREEKRREEKRREKKRKEKKRKEKIVSMPANTTSILQPMSQGVILTFKSYYLKNIFLKTIAAINNDFSAGY

SEQ ID NO: 948810 - protein, 93 aa, Homo sapiens
MAEDVLQILNSSKRAIDNQLKNAPDSPQEEQNQHENAVSSSSPIHVFFNHVIPHLGHSNSLKTTSDLNGIRQADERFPPVSLFGSLMIKLPTL

SEQ ID NO: 948811 - protein, 60 aa, Homo sapiens
HLLLIFNASKMIEVYYIEDAEAKVFPVSFLNLGSSAFSAGYLGYRSSHIRHIHGPSAVSQ

SEQ ID NO: 948812 - protein, 51 aa, Homo sapiens
SDSIVFVMMLETNCWLSWDAPSFEEATTTMNFCHSLDMKLRTLGFNTEGYR

SEQ ID NO: 948813 - protein, 47 aa, Homo sapiens
MFFHFETVRFKHESNGTYPSGEMLCCCLICQIILRSRLSTGYDWFML

SEQ ID NO: 948814 - protein, 43 aa, Homo sapiens
SLGYYCLCPVERSFWVLYAPSDSYLNAPSTNVSISTPRLLSSS

SEQ ID NO: 948815 - protein, 69 aa, Homo sapiens
LDVSRHVSLSHESRETLHCSRPQTIGAASRIPGVTAAAIINLLRLVKTTQRRLSAINESSKTDQYSCTA

SEQ ID NO: 948816 - protein, 165 aa, Homo sapiens
MQLPLSFMLSVPCAGTPSPRFSQISPPEPLSSLTLVITCALPNYCLFLIPNHSSFLVMILGVVANLLIIGIPFENIRSVNQPESYAQHTVGAHDTFTELMCLPRTFRVPRSVAVYPSPLLSVGCRNLVYPQLTPAIRPFLQTISMGLMSFGATTNAHETGLSESK

SEQ ID NO: 948817 - protein, 33 aa, Homo sapiens
MYCCFSLYGLIQVPLLFRWLQTCYQSDAHASLV

SEQ ID NO: 948818 - protein, 73 aa, Homo sapiens
SFPQYDIKVVTLCCTQLDCHLLRMQTCRPHIFDDPFSINSGKKMTTSADHLKRGTILDCNTCKFATITCNLTS

SEQ ID NO: 948819 - protein, 35 aa, Homo sapiens
GWAQIKMSINGDNFQKHQVCDRTQRRHNHQYHDIG

SEQ ID NO: 948820 - protein, 74 aa, Homo sapiens
TAYGAAAAVRPTVESDYGNGFGGFGSFSQSQSSYGPIKSGGGGGGGGSSWGGRSNSGPYRGGYGGGGGYGGSSF

SEQ ID NO: 948821 - protein, 40 aa, Homo sapiens
YSVLAVYLISQSTLVRGIPGHYQHYARISLIISASSPRAP

SEQ ID NO: 948822 - protein, 46 aa, Homo sapiens
QLTVLQTKYVEAKVLSERAEQEQRGERITRPTDEFYVCPWEAMDEW

SEQ ID NO: 948823 - protein, 177 aa, Homo sapiens
GVQLCESVANKLAGKVMAAVSTVTFHMSSTALQESLVQILQPQRRVDMLRDIMDAQRRQRPYVVTFCGVNGSGDIISLNLATDFLLVVQQHMASVSSLLPVIPFRAGAVEQLRTHNRRWQCPTPSREAWWPHHGAVCLNRAMATAAAGIAMEAIDLCRTPGFDVCWWTRRPNADNAP

SEQ ID NO: 948824 - protein, 37 aa, Homo sapiens
RGTLLSVMMLIHLGTSVPFLFIRSVISSIPAAILVQS

SEQ ID NO: 948825 - protein, 211 aa, Homo sapiens
LHYVLLMHRLLDPHKYRCDNVQHICEEWYRRVTSTYRSGSISEYLSQDTVSVPCQSAVVSLCPGRCISGEAGLWGGTKQPGIAFIAAKYDGILGMDYPRISVNNVLPVFENLMQQKLEDQNIFSFYQSRDPDAQPGGELMLGGTDSKYYKGSLSYLNVTRKAYWQVHLDQCGGGPAGLTCARRAVGHCGPQAFLMVGRCMRCASDRPRAVR

SEQ ID NO: 948826 - protein, 92 aa, Homo sapiens
LIETSEDVVIKYSRSISTRCEMHDGGRHTAEIWPLQCQLLMQTRLENKAVPSPWVCGSEVSALYPRDVSALHRLRAPEWGDTGRLGQGSRLQ

SEQ ID NO: 948827 - protein, 47 aa, Homo sapiens
LYGLGQFQYCSKSALLQFSDTDIYLNSFGLRLTVSTNPLRSLSISSV

SEQ ID NO: 948828 - protein, 87 aa, Homo sapiens
DCVASEILALGGRPRHYFLDRCDLTLCDADRAHVLSLQDTCVAVAEQKAMKSFSTWVLSTASSSRFSDDCAEATSNGLLDDTHLGCA

SEQ ID NO: 948829 - protein, 126 aa, Homo sapiens
SHGRMCCTLKFDVELAQIARQTIVMENMYFPVCRGLTLRITVTFKDMRPLSLAPKTGRAERPRHRESWNVSWPAYHVEGRDIKAKAPKVKMPDVDISVPKIEGDLKGPKVQANLGAPDILIWGPSL

SEQ ID NO: 948830 - protein, 52 aa, Homo sapiens
SWSSRLGPDKMKIARSADRSLARELSGALNEILGYCQSVCCNVDGRHPHDII

SEQ ID NO: 948831 - protein, 75 aa, Homo sapiens
SPRGHSYDSYLYYLFIFFFDLPYFFNLIIAYFFITFLLHHKSNEISNKLENVSSQSPLFFVPPSTQIWSTVRHNR

SEQ ID NO: 948832 - protein, 90 aa, Homo sapiens
LRTGNERAARERENMDTDMKGNTKISRKILKKMMQFEQMSTFTDDSVHPCWKVTPIMKEHLELVWLICFKTFIFPKMPLVNKVHQCLRPE

SEQ ID NO: 948833 - protein, 105 aa, Homo sapiens
CYDSNVNTHNVLSPEKEKQMSEPLDQKIIRSDHNEHDEKACVLQVVCNGLQESNNAINIPYNVEFLHLGKVWIPDYLRKRLYIDLHAVVRITPVEVTPKIPRSLR

SEQ ID NO: 948834 - protein, 40 aa, Homo sapiens
EGCLTLLLRLSHRGSSLEFWHLAFSTSAVSLWLMRFSSLI

SEQ ID NO: 948835 - protein, 68 aa, Homo sapiens
LLNTAAEGVLRRGLLWYSSLGVGSCGSSAGNVRHSNSSPKPQASFLPCLACAIQSRRLEQVLNRPHPK

SEQ ID NO: 948836 - protein, 95 aa, Homo sapiens
MYRNIPTLLDPHESTHWLSRQVQTTSFPVCPSRALTAPLFLYQNKRMVVPDALKVVLSDAYKKGESQLTLQTSTWEITGLLTDLGTWSLAADVLI

SEQ ID NO: 948837 - protein, 87 aa, Homo sapiens
TDYLPYYLLFYNMLLQVGQSKRHTKVSLYYLQAVQHNNSRTRTWESAYRAVHQIQSSDSCTAPLCPGCYDSIAMRKVSAYVCIDGGN

SEQ ID NO: 948838 - protein, 71 aa, Homo sapiens
CALVRCSQTKGSTIHPVVPDWSPSTADLFPSHGSDSVPQSTENALDQVDDGEVPLRETEKNVRSVLNCMMQ

SEQ ID NO: 948839 - protein, 76 aa, Homo sapiens
MHARMFGTGGKICESFTFLTFLMSMLCWVDSEGNNDLVVIGDIGLVIVQFRGLILTPAYAEENGFHVTYTNISSSI

SEQ ID NO: 948840 - protein, 63 aa, Homo sapiens
MSEGALPFDKETGFHRGLGRFSFFRRRTRNALQQENHIIDGVKVQVHTRRAKLPQTSDDEKKD

SEQ ID NO: 948841 - protein, 54 aa, Homo sapiens
MHAGYVPKAMSKPMLGHSTCCSTLKTRRLCIIRLNSFSTPDKDINERGNGYELE

SEQ ID NO: 948842 - protein, 43 aa, Homo sapiens
HLRTRTLGPKDVLSGGEQRICEVVAVYVQSVVRPGIGAKSRCV

SEQ ID NO: 948843 - protein, 81 aa, Homo sapiens
VFKSYPRGYVTVSAALGIFNGTLHADLLRTTLLNERVSVPLLNTLDHVLTHGCFDLFITEEDEALLYMTSFPIHAYSAHVL

SEQ ID NO: 948844 - protein, 50 aa, Homo sapiens
PGSRNNGVQYVGVEDESAGVVVYSQVQYQLVANSILMVSGEDRLHLWSVI

SEQ ID NO: 948845 - protein, 59 aa, Homo sapiens
VRGSEVSSTKADSSNTLTCRMLSPLSQSLKENISGRDPDTETDKCFHSISFANSSVLIQ

SEQ ID NO: 948846 - protein, 86 aa, Homo sapiens
  misc_feature (12)..(12): Xaa can be any naturally occurring amino acid
EQRQNTEKGSYXGFYVDQFYSSWKKNHSNKQRVLGHCSFVKLERLCFPHHSQPPIFGRWLRIQEIITTNFQVTNSLQYIDERMMES

SEQ ID NO: 948847 - protein, 32 aa, Homo sapiens
MQAASVTSASKSWHPARLTAWVPSVTEYRLRT

SEQ ID NO: 948848 - protein, 43 aa, Homo sapiens
FPCYAALRLQDWFFPQPTELWLVWWLEVSDIDTSILEAGRPPR

SEQ ID NO: 948849 - protein, 119 aa, Homo sapiens
DVSCITTAAYIRGPAYRAVPVSPAGQSIEVVQLKSVWPPYIAARSQSGPGIIADWESCAPGVAVIEVVADAKRYSQSTGTRKSTPYADIGAVGLRALPLLSWHISLDLICIAEFLLTVS

SEQ ID NO: 948850 - protein, 53 aa, Homo sapiens
LRLFLMDPSLVGRPLGTVQPSERQIEGVRALDHMHLGALGFTVARRSVAEVKA

SEQ ID NO: 948851 - protein, 64 aa, Homo sapiens
QLAALPLPAQEFRLTASSLDVGMDVSPSETPYGNSSPIFRRIFRVKSEPSSPVLFRPRLIFFVF

SEQ ID NO: 948852 - protein, 48 aa, Homo sapiens
FHRQPDTANTEKKGKRFQRRSSIRAYARAVLALVGSVLPDLLTLRLLQ

SEQ ID NO: 948853 - protein, 192 aa, Homo sapiens
MKSSRNDEPIKDKNGESKNLASFEFMTSDISAKEELVWHPVKSSTSLDFLELNYSLDKNADTTMKWQTKAFPIVGEPLQKHHSWDWGSLLLEGCTNSQPVNAAGRYFNSKVPITRTKSTPFELIQQRETKEVDSKENFSYWESQPHDSCFVEMPAQQVMHVSSTELNYSLAYDSNTRIRTASTVTPHDSSAL

SEQ ID NO: 948854 - protein, 98 aa, Homo sapiens
  misc_feature (1)..(1): Xaa can be any naturally occurring amino acid
XWLAEGCPHAFSTRSWQTRMCPTFHVMKAMQSLKFPRLRELNSLPGGHFYSDAYQIMGIQVSPVITIHLPPVDCACHPYAVIRPDDWTGLEPNRSWRV

SEQ ID NO: 948855 - protein, 159 aa, Homo sapiens
TSFVGLTRLSTSESAKVLPVEDASTPSSLLEQLTEQFNWVSRLANLMHSEDQYYLRVTRWIPTLLIRTFLPVSLDVVVNFKDPCSPFTVTVPVEVSRKNPKFMETVAEKALQEYRKKHREERDVDVAFAPTGASESSSPQDELQPSRESSARHQVTKPE

SEQ ID NO: 948856 - protein, 55 aa, Homo sapiens
YGKHLNVQSPPPQIPKDTLVALELSLRASDDCPGGGSQPQSWQLVEAVWWSQSTT

SEQ ID NO: 948857 - protein, 39 aa, Homo sapiens
AKQDKFLSLCRYELPTDDDTYEEHRRDKARKQQQQPRAG

SEQ ID NO: 948858 - protein, 47 aa, Homo sapiens
SAGLLMSENGEQDADNEVHDRRGRMWGRKSGGGQKKVIVRKRMAIKI

SEQ ID NO: 948859 - protein, 94 aa, Homo sapiens
CDDPDETEMRTTKNAHLPYSPETDTQPHAPWNASCFLVLPTEEFCQPDFWRNWLYEKILVTKFSLLPRISPAEVCGLQVFVMLLAPIPLIGLTS

SEQ ID NO: 948860 - protein, 92 aa, Homo sapiens
TIISLQRCMSAKILQDIIIVSDSLDADEGVPIFCALWYISSVAKVAARYSKPSFCCFSFQKLVPEVGDIIILSTFRSTVLRLEHDSTLRKKC

SEQ ID NO: 948861 - protein, 82 aa, Homo sapiens
SSPKRHASILAVVEYSTSKLICSWERRRLSLPWMVSPLASGVKEDDGFEVGILIVIDLQRLEGQHPALQPKDLTLQLEDFSL

SEQ ID NO: 948862 - protein, 113 aa, Homo sapiens
SPVIQLQREQASNDAHDGDGGLGILAPISGLSGLAANPHAAHGSVYLLLRVQQGSHHSLPHFLEVFLSLCMACVSYDAPVSVWSGRSPIPARYVLVIGGDPTQSLTLHGIAML

SEQ ID NO: 948863 - protein, 63 aa, Homo sapiens
GLNRVTARLPDSGHNFPILVCVLEGLDQTQSLIHGSVHRQIITVSEKDTFHDDKEALQHAYCF

SEQ ID NO: 948864 - protein, 43 aa, Homo sapiens
TSCKSWSSENPMHKRQTFKPHWRLISQEMNFGQKLSISHSLKI

SEQ ID NO: 948865 - protein, 78 aa, Homo sapiens
MSLSVQETSSASYKLILCVSLSRFQCDSAHRCSVSDLCSLYRLSSAVTRIIPFTSISKVTINLRRPHEEQEEFQSDQM

SEQ ID NO: 948866 - protein, 39 aa, Homo sapiens
PPDYDVTSPSFLLPHQNQHLQFQVMSIRLFLFFFFYYFL

SEQ ID NO: 948867 - protein, 39 aa, Homo sapiens
MFLLLWPPRCNKLAVYLDLCLIFLLLRFSLRIRFFLHFA

SEQ ID NO: 948868 - protein, 55 aa, Homo sapiens
MRRRTYRAHGRINPYISSPCHIEMILTEKEQIVPKPEEEVAQNKIISHKKLKIQK

SEQ ID NO: 948869 - protein, 108 aa, Homo sapiens
AQLKRKKKDRQGPSKPLACCIVEATGAETWNARRWGCWYKLCHCMLLSKACLNASRTSSPPDRRSPLIPTLLIHKMPMLVLYPGPVTFCTISVFIHGTMYYHHVTTYN

SEQ ID NO: 948870 - protein, 50 aa, Homo sapiens
  misc_feature (3)..(3): Xaa can be any naturally occurring amino acid
PQXQIGVRKYVSCHFVNKTSRGESVSTACNHPLQLHVTAHFLPHRTMYNH

SEQ ID NO: 948871 - protein, 69 aa, Homo sapiens
FREQCDVSALPYIDHGVDEHSNSKSLVNIIPYIQLGYYIDHQALCHIKTTKPLVINSRHHLKTPHFIAC

SEQ ID NO: 948872 - protein, 41 aa, Homo sapiens
RGPPGLDVTFEIDVNGILRVTAEDRVHVTNNKITITNDQNR

SEQ ID NO: 948873 - protein, 55 aa, Homo sapiens
DTITCIAVQNVPRMTWSVDADIFFHEIDTESDPQRYGRLAVSIAQKDDKSSRAIS

SEQ ID NO: 948874 - protein, 50 aa, Homo sapiens
DRRITKKSIASSSATIIASITLLNLYFYLRLIYSSLQSHILSRYHNKRKR

SEQ ID NO: 948875 - protein, 32 aa, Homo sapiens
VISEELNSSMGTINTTLGNMAYRKHEKGVKFL

SEQ ID NO: 948876 - protein, 76 aa, Homo sapiens
GIYKACYLGIPLLGQDLLLLNRDAGYSVYSLTLSTIRLPFTSVLPFIIADLQQSNSYCLHETGSNNPLGITSHSDK

SEQ ID NO: 948877 - protein, 72 aa, Homo sapiens
  misc_feature (14)..(14): Xaa can be any naturally occurring amino acid
IRLQRQGDQVKKLXFLSNDLVMNRLISSFATCPLVSEEDKHAIIVEPEKRGKYVVCFDPLDGSSNIDRLGVV

SEQ ID NO: 948878 - protein, 30 aa, Homo sapiens
MLRRNTDKKGKPEIACENPHSTVVPMKQPT

SEQ ID NO: 948879 - protein, 34 aa, Homo sapiens
  misc_feature (2)..(2): Xaa can be any naturally occurring amino acid
YXLLDEILDFGYPQNSETGALKTFIEAVGDAVVG

SEQ ID NO: 948880 - protein, 75 aa, Homo sapiens
SHGRQHTNEIHDDVQVSPERIYIDGRPFLWIRKDDVNLWYTVLVSLDETDTSALLDKKASRTLKASCSNGVVSTH

SEQ ID NO: 948881 - protein, 55 aa, Homo sapiens
DWRDVGLEEENGQMMSCTCLGNGTGDFKCDPHEATCHDDGKTYHVGEQWTKDYLG

SEQ ID NO: 948882 - protein, 79 aa, Homo sapiens
GDLRTPSVSGWGCQVVRIRLLYEIPSELEDDERVNDYYARNAWVIQIKINTKHPKYRDDSSVVTKQRYHLSDCLCRNRG

SEQ ID NO: 948883 - protein, 79 aa, Homo sapiens
  misc_feature (48)..(48): Xaa can be any naturally occurring amino acid
  misc_feature (66)..(66): Xaa can be any naturally occurring amino acid
TKGNGMKARAPESSVRHDAVHSAARVEAGSGDELDTANDDLGKGVDQXALEGFRWGPHVLMDPAPXGRGSAHTASCTQT

SEQ ID NO: 948884 - protein, 33 aa, Homo sapiens
TASQRAYDTLIHRDHVLKATLGNWVDPIDSTYQ

SEQ ID NO: 948885 - protein, 32 aa, Homo sapiens
  misc_feature (5)..(5): Xaa can be any naturally occurring amino acid
MSKYXYVKRGFGYSPFLSITDGNMPGQAASAM

SEQ ID NO: 948886 - protein, 85 aa, Homo sapiens
  misc_feature (59)..(59): Xaa can be any naturally occurring amino acid
PLDVAEAEMEVGMDKPCLSLALHGSVLRLFLQFDMRPGPSVNHVGPHLLPVCCSECGAXLRVQSMLWSPFSSVGHQMLSGPRALT

SEQ ID NO: 948887 - protein, 45 aa, Homo sapiens
SHDSPYAPGNDGRQLDGQDPAQPPGQGWLIQCGAHRPEEGGCRAL

SEQ ID NO: 948888 - protein, 50 aa, Homo sapiens
AVVMSAPRIRRQKEIPSTVLREMDPLRAQQLAAELEVEMMAVFSNRLTSA

SEQ ID NO: 948889 - protein, 54 aa, Homo sapiens
YGGADGDVCSRDEEAEGDPSAVLREMDPLSAQQLAADVGVGDDGRYVQQIDHCL

SEQ ID NO: 948890 - protein, 43 aa, Homo sapiens
MYIRCASTLSGYNLKTPSERQFTTLPPYSSTLSMMIISMTPAE

SEQ ID NO: 948891 - protein, 67 aa, Homo sapiens
PARCPVYLDPRRCRALCEWLRALMLASLGAGGPRFLRGDWRRDSLDPCVHFLIVFGLEEVLIAIIES

SEQ ID NO: 948892 - protein, 315 aa, Homo sapiens
ELRAYQVFRDSVGSAAYTACQAPRAFQDPQVLHIHGDPGFPGPPAAKTVTHSTQRHHPSTALAARPPTTPNPAPPRPPGKRGPPGTPGLQGVPRHHPPFPPPPAPTLTDRPPPPSFALPPSPPPPPPPPYTPSASPANPAPPAPTHLPPPPAAALLLPLAAGAPGAGLGVFWSPRQKKGPGGEPRLHGGTLDPPGRWATEAPRDPRETQDSLVPPGLWEPRDCRNPQNIAVQPGTVGPRGGEAPWGTGGDGAQGPPENQVFVGLHGKLPPPPPPRRSCPQLPGEMKDHRHQGQIGQEGAQAVQGSPACRVSRPHV

SEQ ID NO: 948893 - protein, 35 aa, Homo sapiens
RVAAWSSIGQPTNEDFETPRQYHEQEETPDMMAAR

SEQ ID NO: 948894 - protein, 35 aa, Homo sapiens
DDLDTIDVSNLNRQFCFTKKHVGRSKAQVATGTVY

SEQ ID NO: 948895 - protein, 114 aa, Homo sapiens
VTRCSAREPWDVTQVDVTSRVAAWSAWAADQGGLIEKPRQYHEQEETPEMMAARIDRDVQILNHILDDIEFIITKLQKAAEAFSELSNRKRNTKGTRNGPGAGVFNAAGTTSTS

SEQ ID NO: 948896 - protein, 67 aa, Homo sapiens
LNKAVIGSFSSGRVSTTRSYKRPKALRIDTRFDQGKETFALKVELQIHVVDLTQLQTTELNLGARVD

SEQ ID NO: 948897 - protein, 51 aa, Homo sapiens
RSAGDNSGIPRSAPVIDQVERLAKALPRPAVHVIALIKMQVTAVHRQPLST

SEQ ID NO: 948898 - protein, 41 aa, Homo sapiens
HLGEMTELTPLLSDEELEKDFDVEFMCKETYDMVCKENRRR

SEQ ID NO: 948899 - protein, 86 aa, Homo sapiens
IRDRVDRCTSGSATPSSLTRLRTVVKFCLMEYSRISASLAGVIAKTQYRLLAEVGRYNVEIVEVLANQRTGLFTGIRVSKAQLDVD

SEQ ID NO: 948900 - protein, 124 aa, Homo sapiens
IPGVYNDICLVRLTLLSQALLSMVLIGLPLSQALLPMVMNNLPLSQALLPMVLNDLPLSQALLSMVLIGLPLSQALSPMVLDNLPLSQALLPRLLMDLLIISISGLFTVSSLFNKMLNFNFWVD

SEQ ID NO: 948901 - protein, 85 aa, Homo sapiens
MTTAVAKPRAIEASPGLFQNLKQTTKNAHRWGGERLEDGAPPEVRQPAAPAAGADKIYVTWGRKQKPEKPTPPLTATRHLRPLGT

SEQ ID NO: 948902 - protein, 43 aa, Homo sapiens
PLDQRMRGLLSPVMHAAHCSCWLLILLGVISIHMGFSSFSLQD

SEQ ID NO: 948903 - protein, 61 aa, Homo sapiens
YRGSRQPDPPDTMSLLWPRCTPVNNLKFARIVSPGNAGIREKLAWAKEKYSIGEPTVPSTL

SEQ ID NO: 948904 - protein, 71 aa, Homo sapiens
LQRTPMTAAVSWRNLYKRSNEFDYPSVVQLAHKLAENNIQPIFAETSRMVKTYEKLTEIIPKSAVGVSGCL

SEQ ID NO: 948905 - protein, 54 aa, Homo sapiens
  misc_feature (29)..(29): Xaa can be any naturally occurring amino acid
HLRQLVHRGATNSTTHRWAAAHNVCENNXQPIFAVTSSMVKTYEKLTDIIPKSA

SEQ ID NO: 948906 - protein, 72 aa, Homo sapiens
PQPDPNEGAVPEDNLYHDGALNSTIASGGQSAAQCVVENNHQPIFAEISRMVKTYEKPPEIIPKSAVGFRLS

SEQ ID NO: 948907 - protein, 48 aa, Homo sapiens
PLLSCLAFCLQLLDHPWDPGVHRIPAFQGVPLCQLHHPYQVRLGLRLS

SEQ ID NO: 948908 - protein, 60 aa, Homo sapiens
RSGPPDSGSERRLMVLLTSVVRERGLERRTALILHRLRLADGEVDRHAAQRGRNRVFLGF

SEQ ID NO: 948909 - protein, 58 aa, Homo sapiens
  misc_feature (44)..(44): Xaa can be any naturally occurring amino acid
PQTAGPPIQTRVFSGWERCSLTRRAALGRTQLRNSYSTSGGPEXKRPRGRCQWGVGLS

SEQ ID NO: 948910 - protein, 35 aa, Homo sapiens
GTCYQSPSLSRWLLAAVAHAQSLVEAQPNVDKLVE

SEQ ID NO: 948911 - protein, 49 aa, Homo sapiens
MTHQEEDQMLKLDKENAIDRAEQAERDKKQAEDLLQQLEEEQQALQKKL

SEQ ID NO: 948912 - protein, 52 aa, Homo sapiens
DSEDPSDSGPPRTVGDRTACDLKREALKKKFTRLHDAELPPMKTAMTGAGCL

SEQ ID NO: 948913 - protein, 52 aa, Homo sapiens
VKTVVRANAAHRHPLDATAMHMRLPPSCSVGLLNASSESQGCLGPSLVGGPA

SEQ ID NO: 948914 - protein, 57 aa, Homo sapiens
MENGNMECVPGPSQKPHWQLPGKFQAKGSSSLGDGLLSCTDLASREKERLEQKQREA

SEQ ID NO: 948915 - protein, 30 aa, Homo sapiens
MTQPGPVRAQTVRSHKKVLKVGVRLSKGYP

SEQ ID NO: 948916 - protein, 81 aa, Homo sapiens
MPFLSNPTVSQVISRFEIRNVSTHIVVCKVVSVVIKAALGGVLPSASIAIGERLFAYLVSAGVLGTSRYGSRGSPPVLRVP

SEQ ID NO: 948917 - protein, 40 aa, Homo sapiens
MLMMTEGAGACRSCGSAAVSRTPCTESGLVLCTRQLIHRP

SEQ ID NO: 948918 - protein, 39 aa, Homo sapiens
TDCGGRVVADGCTLAGVRLLSRLDTLFTGQAWGGGGPAV

SEQ ID NO: 948919 - protein, 49 aa, Homo sapiens
MRSHGSSGPAAPLPLPPSLGSPPIRRLPAGLRTRRNCWVLWPSSLTLST

SEQ ID NO: 948920 - protein, 82 aa, Homo sapiens
DHSVAPCDMVHDGCGPRCEYISLIYTKLIQAGMDDYVKALRLPLKPFETLLSLNQGGQTFIVGDQISFADYHLLDFLATPVI

SEQ ID NO: 948921 - protein, 106 aa, Homo sapiens
MDLSDRPSSSSFFLHGIGDTRSPCSIDELICQATQQVVLNVPEDSLRSACARQPDGLYTLAQGGQIHSLSSHSPLGRPNGVWSPSRGPLVDVCRSPRNPAEGSIAC

SEQ ID NO: 948922 - protein, 105 aa, Homo sapiens
QVHRLRSGESNFQEMVMPPISESLKRNKKVPSLLVDEQVVVLLLIHKTKDGPIIPCGGLWCFFNTSITPFKLCQKVSVPARKVLPVEPGTGHGQATVVLQVGLIL

SEQ ID NO: 948923 - protein, 69 aa, Homo sapiens
YLSHSKLNSTKGDGCLYSKVKGSPEGEHQGCMVGTAKGIKVKEAAGLLVGFGPGFISRAGIRSSDRPAL

SEQ ID NO: 948924 - protein, 70 aa, Homo sapiens
STGSPMPVCLLADPGLSSDNYRPPFRITDVVVVVAKHGTCFGDEKQHTARVRPLSAGLRRACLHCQLPMR

SEQ ID NO: 948925 - protein, 33 aa, Homo sapiens
  misc_feature (9)..(9): Xaa can be any naturally occurring amino acid
MSPSCLELXNGATRWPSQRRPGLGVSVDQLPAL

SEQ ID NO: 948926 - protein, 86 aa, Homo sapiens
  misc_feature (64)..(64): Xaa can be any naturally occurring amino acid
MHNGCPPGDDGTAPQLLCQGAGVLDLLVAVCLNFMLDPSVSFFLDGSLEGGITSFVLYKGAQTXGAPEDKHHDPPILLSLGLHSVA

SEQ ID NO: 948927 - protein, 61 aa, Homo sapiens
  misc_feature (10)..(10): Xaa can be any naturally occurring amino acid
MTLIGGLPFXVFGLHTRQAELGPIRYSLRPGKALMDHTISLSSGTHLTLPTVVLNLGESAS

SEQ ID NO: 948928 - protein, 33 aa, Homo sapiens
MERHPPLLEAWGQRDLGGRLDTSAHSLRCPEIP

SEQ ID NO: 948929 - protein, 48 aa, Homo sapiens
WLPNEVVSPRGPTPGCLIVIVPDTAGVGPVAGHARASSRGDTGFVERG

SEQ ID NO: 948930 - protein, 31 aa, Homo sapiens
MYQEPRPSRARCYTMSEVIEHITQSSGHHRG

SEQ ID NO: 948931 - protein, 144 aa, Homo sapiens
  misc_feature (69)..(69): Xaa can be any naturally occurring amino acid
RPEEVDVPNVCLKVQKDQTNILIYICCPDSLYLGGQGWPSPGGRSPPGLLTPFYLPLTQPGALEGPKLXPSQPSCLPRVARLPVPSCTGQLGPTLSVEAPGVSSTGPARWPLLGDGGAKSASLPVYQEKPLSPMGRTEAFGPQP

SEQ ID NO: 948932 - protein, 44 aa, Homo sapiens
QPDRKRQKNVVLTNPQISLLNTGVQEYETSKVPHTDAALICCIC

SEQ ID NO: 948933 - protein, 74 aa, Homo sapiens
VILISNRGGWCFCMEVAEDLDVIAVTGLSGSVPVYAFTALDALADGGVKIGTSNGRHGMSWPRWPMAHPGWLAN

SEQ ID NO: 948934 - protein, 114 aa, Homo sapiens
AHSNDNLRDSQQEPARSEVSEGPVEPSNWDLNVQSMETQIDKAQAFTQPVPLANKPVPAPSTFPSKTGGMEGGTAVATSSLTADNDFNPVGIGLPHSENNQDKGLPRPDNRDNR

SEQ ID NO: 948935 - protein, 88 aa, Homo sapiens
MVTSSFRSTFSPVMANRCVKPLLESAAALEDGVKREVEQGPELGKLVLERCCRQQQVTGCHIMRFEHLRKLALVVLHAVTFVHNHVIP

SEQ ID NO: 948936 - protein, 65 aa, Homo sapiens
MSSAGPQKPPDKSFVEKVMQEQVNHPKFQKPKQLKDNADFWIIHYAGKVTSTHGEVLARSSQERW

SEQ ID NO: 948937 - protein, 34 aa, Homo sapiens
CITFATKLLSVALGNHHSSSSMARMPGGAAGFSI

SEQ ID NO: 948938 - protein, 125 aa, Homo sapiens
NAKEAPERLRGLISAAVITSQNESHRFSLTGAETESSRIGVQIRIAPLAELPSWPNAEIIGLLFCLPQLVASLNGCKCLLSIATSDEPVVVPLDSEVDGALLISPKVENLCVSSDRVMRPGIFPM

SEQ ID NO: 948939 - protein, 75 aa, Homo sapiens
  misc_feature (66)..(66): Xaa can be any naturally occurring amino acid
MLSPSRAETVISENLAEWEQTAPPQQEHAHGEAFPEHEQGPPKAVGNVREAAVDEEASASGARWGXGRKVQGMTR

SEQ ID NO: 948940 - protein, 57 aa, Homo sapiens
APMYVMGVNHEKYDDRLKINQQMPPAPPTAEHPWNKVIHDNFGIVEGLMTTRTPSSF

SEQ ID NO: 948941 - protein, 63 aa, Homo sapiens
MRFPGRLNQSTFHLLHDRGVYYVSSALKSCGANQSFMAIVLELIPLKIFEKGPYLAYRTLLFW

SEQ ID NO: 948942 - protein, 46 aa, Homo sapiens
MRFCPWLVEMRYNVGCHKGVGLFHSDRSKLQKGGHVIQNRRRAGTS

SEQ ID NO: 948943 - protein, 92 aa, Homo sapiens
VSSLIQESAAKCFFGDRCRFCTTGRYLETKPADLGPRCVLFETFCRCPYAVTCRFVWAHLRPEEQNLVQEELAARGTQAPPSIRNCLGQRPL

SEQ ID NO: 948944 - protein, 42 aa, Homo sapiens
DIEILCDAIDQSNAHFAELGYTACPDTPAAPVNHSQWIANVV

SEQ ID NO: 948945 - protein, 40 aa, Homo sapiens
WADDQRKIRLSGTSLTRVSYSSAAQNPTRESQNFTIELRA

SEQ ID NO: 948946 - protein, 34 aa, Homo sapiens
HDNQSQDKAKRHVAHPYSRTPRDPAPTRVEPELH

SEQ ID NO: 948947 - protein, 92 aa, Homo sapiens
SIFIYQSSSSSSSIISFIHPHRFIVFLIFSFFVLLLLHPHHSTSASESGASWSSRSQLLSVVKLGQELEDTLSVVIQVGNLTVKEVQAFQTF

SEQ ID NO: 948948 - protein, 31 aa, Homo sapiens
MHLPFQDGIHNGPLVSGSTNCTQALDDEDCA

SEQ ID NO: 948949 - protein, 40 aa, Homo sapiens
RSDSEAMMEPPITPSTCALWVLMILIFMCAGRQVGDLLLH

SEQ ID NO: 948950 - protein, 48 aa, Homo sapiens
THPTMSAYTPLHVSLHSLHTPPCQPTLPSMSAYTPLHVSLHTPKCRRR

SEQ ID NO: 948951 - protein, 83 aa, Homo sapiens
MASVRAVPNPEINHYQTAPPSGYFMAANRQTQNRAAYYPPSPIGQVWPSPRWTAQGARPHPFHCVPGAFRPAAPRSPSAFEGI

SEQ ID NO: 948952 - protein, 175 aa, Homo sapiens
CNLGRAGQRGCDMLWEEEKGLVESGRWEIGLLAWREQRQRYYPRLSAGNDLEAGSIADELVQGIDNLGEFGPEVPVPHPAVQHELVQCCGTVHGWWQPVILLHGIDELGRRQGNPEGATAMIPSQHPPSQPLWRSLTHILVAHVPVGSLSIAHELPHDNSVAPDITSRSGLPIGY

SEQ ID NO: 948953 - protein, 70 aa, Homo sapiens
DEEEKEAQLGMKSVDKKVESAKESIKFGRTDVAESEKEGLLTKSAHETVKPSGFIFFIIKQAKNSFGSRL

SEQ ID NO: 948954 - protein, 66 aa, Homo sapiens
YRCLTDSDSGKSTPSNNGKKGLKHWTSVRTWEKDFDLDMTEEEVQMALSKVDASGELEDVEWEDWE

SEQ ID NO: 948955 - protein, 54 aa, Homo sapiens
GPPHSLPGIQAGITHIVREVDRPGSKANKNEVVEAVTIVETPPNVVMGIVGYVE

SEQ ID NO: 948956 - protein, 94 aa, Homo sapiens
VAPLIPYPLITKEGINAIEMEEDQRDLISREISKFKTIIVRYTLGEMKEKMLRAAREKGRVTYKGKTIRLTAELSAETLQARREWVPIFNILKE

SEQ ID NO: 948957 - protein, 74 aa, Homo sapiens
SIIPVSSVSVTQDTTPSSIWGPGTSPCYRVVGGPAQTEVSRVGKKCTIVHPTIQLELAYMRRYKRVLVDKVERW

SEQ ID NO: 948958 - protein, 138 aa, Homo sapiens
MSAGPGVLESQLCLFQQLLLFAQSHQCVHCREKPHTTFLAAHPTSRSSVDPECPLCTSSGTLEAGDALPDGLGHRTVSAAGALTITRNGLPAALPSGSSTRRMLSHLPTASAPKAEMKQGPLLGVLSPTPKHENKGKS

SEQ ID NO: 948959 - protein, 45 aa, Homo sapiens
MDISGNKLCLSEFVVTHCTAPPESMWFYICKVIGLRNSYTVCSKH

SEQ ID NO: 948960 - protein, 95 aa, Homo sapiens
ILDLGNNIHQWCGSNSNRYERLKATTVSKGIRDNERSGRARVHVSDEGTEPEAMLQALGPNPDLPVGTEDTAKEDAANCMLDKLYKVYQMVQRPY

SEQ ID NO: 948961 - protein, 46 aa, Homo sapiens
MALKQPVLESLEEYQDVEQVRAYLVAFQASEVVFLVQRASFHPLAS

SEQ ID NO: 948962 - protein, 81 aa, Homo sapiens
VKLVQMLLGQHQPVSLSKPAAQEKVTLPMYTVSSCCSSLDLRKADEWKVAKSVGTVSPGLLKYCLLEDLILELLDGVTQGL

SEQ ID NO: 948963 - protein, 40 aa, Homo sapiens
SSQNWKWKQGFKHSSHAVFEITDSPVCIIDGGGFSMWVCV

SEQ ID NO: 948964 - protein, 121 aa, Homo sapiens
  misc_feature (77)..(77): Xaa can be any naturally occurring amino acid
HEGEQKQTLQGYWDLESPLPAPHGNTGQPHTPSPPGLLWIRKRARLPGPETGTRNRGYFVTQKTNLCRRSVSGSRLXRMRGPPYPGGGVVRPRHVTGSALRSHVTLVRNLCCLRGAPFRLT

SEQ ID NO: 948965 - protein, 85 aa, Homo sapiens
IWKPTSCPTRGYRGSTTLPSRPAYCGIRKRARLPGPETRTRNPGYFVYHTKNHVVGQCHAPRGHAGRPSGGWLAASRDGLSVPVT

SEQ ID NO: 948966 - protein, 85 aa, Homo sapiens
ASPTAGAGAPRGTPGNVRNPESTLGHCVLPAGRAVIYKDSGGLAGVGAVRSRRPGALEFLQKNFAYQATYFSSHQFDQRQDEKYA

SEQ ID NO: 948967 - protein, 32 aa, Homo sapiens
ISSTHASDFLVRNKSNTRTVQAAASTSWVPCK

SEQ ID NO: 948968 - protein, 124 aa, Homo sapiens
LTSTLLFPPTLAGTCARPKTHTQTQAHKQMHSLVHPAGASMTAGHCWENPFHLRDLPRARAGWSLLDHATAGGVLAGFTFPWDGHGSQNLALTIFSFNSQEDEGYEDEGAKEENSQNDGGDEEH

SEQ ID NO: 948969 - protein, 192 aa, Homo sapiens
RDPLESKDYKLILCKLATEEPVHEEHEDDDCQVSNPSTGDLLDLSSLSGMGVIQAAYSEKELVYMSICGENENCPPGVGACLDRPGFSVGKANKRLRYVDQVLQLVYKDGSPCPSKSGLSYKSVISFVCRPEAGPTNRPMLISLDKQTCTLFFSWHTPLACEQATECSVRNGSSIVDLSPLIHRTGGYEAYD

SEQ ID NO: 948970 - protein, 147 aa, Homo sapiens
DPIGAGLCMIMGVDYSSYWLNIVCRCTELKFEWRGWQEKVGNFYVPAEPKLAFVIRIRGINGVSPKVRKVLQLLRLRQIFNGTFVKLNKASINMLRIVEPYIAWGYPNLKSVNELIYKRGYGKINKKRIALTDNALIARSLGKDGKR

SEQ ID NO: 948971 - protein, 38 aa, Homo sapiens
  misc_feature (1)..(1): Xaa can be any naturally occurring amino acid
XLEIHRGLLKPKIFMKFLIPLLKSMKMKDNESMQDGKR

SEQ ID NO: 948972 - protein, 183 aa, Homo sapiens
YRQALVHVLDNSQTSISRWNALVYVYQRKMEDVQLRATSPESTSRSSSKTGRDDSSKMEKLSIGAENSEKIDENSDKEMEVEESPEKIKVQTTPKVEEEQDLKFQIGELANTLTSKFEFLGINRQSISNFHVLLLQTETRIADWREGALNGNYLKRKLQDAAEQLKQYDINATPKGWSCHWDR

SEQ ID NO: 948973 - protein, 67 aa, Homo sapiens
KSDRKLYDAGLQLSPSEHTRSLGAGVDRGGELSNQKHPFHVEYVKNKSVVLHQLTYGSHFITEVGFP

SEQ ID NO: 948974 - protein, 96 aa, Homo sapiens
DTLALEEENQMECFCVDDDENHIKKENILSSSDTLPMMVATQQESNIECAAYNPEPYLNNESQPDSFSTAHAFLWVRCVYLVLVQSFTENQRSLSV

SEQ ID NO: 948975 - protein, 41 aa, Homo sapiens
RLPTDDGGCTGIKGVRSCQLVQVRDSSRVVVLEFKLSSRNA

SEQ ID NO: 948976 - protein, 68 aa, Homo sapiens
SESGALYNEHKSCAAKSVQNTSIRVAGFGNATFDHEHHATIVGDPVTITRLRCSLSCGWAQPIAVWSI

SEQ ID NO: 948977 - protein, 35 aa, Homo sapiens
MQKEITASGAQHHEDQGSSHPQKRKYSVVDRFAPL

SEQ ID NO: 948978 - protein, 110 aa, Homo sapiens
MEDTGAILSWHSWPGHHTCFSGIRQERYARSIIIGGKHINTLIFALKLIIYIEYFLLILDCLTTKLCYIEYFKSMFHHLSIIFVSFSKLFKWMSLCKRHTVKTYRHTFLS

SEQ ID NO: 948979 - protein, 116 aa, Homo sapiens
MWGSTWKPIMRAGPRHVCSHRATHWAMYLTPIAIWDELLFSHHVFKFISIELGEAPLLGGVDLLAARKLELGPAQGLNHMLLVLQLGADGHDNLANVNPGHSALGLSKGTSHACLE

SEQ ID NO: 948980 - protein, 46 aa, Homo sapiens
MRTASITCSLFCSLVRTGHDNLGQIVNPGPHVALGLSIGTSHACME

SEQ ID NO: 948981 - protein, 47 aa, Homo sapiens
SLFRIRINVTIMTRQPPDRQHGGNGPWNNNNENLCFIFMPGEDQGVA

SEQ ID NO: 948982 - protein, 40 aa, Homo sapiens
VLTRTPLLQLGAYGHDNLANVNPGHKCPGAFQRHLACLYG

SEQ ID NO: 948983 - protein, 54 aa, Homo sapiens
PTGNRGAFVISPMLLCQCHIEQVIMSLPRSSCRTRSMSLMPMRLAEFKFPGRQK

SEQ ID NO: 948984 - protein, 47 aa, Homo sapiens
YAAADLFSARHFRPHPSWPQFSICKADGSLVDSKGFDEYVKELGEAP

SEQ ID NO: 948985 - protein, 42 aa, Homo sapiens
KRADSEARIAPPIHIRDTCALWVLCIFIFIVLGARSVISFCI

SEQ ID NO: 948986 - protein, 41 aa, Homo sapiens
MLKEEHRWMSVLAWRPTTLLPDVHRDPHPQRDLRAPPCRQV

SEQ ID NO: 948987 - protein, 43 aa, Homo sapiens
SQRSHHLMSSHLPSDTSATHSSLKSLGEAGAVSQRMSAANCVF

SEQ ID NO: 948988 - protein, 51 aa, Homo sapiens
VENVLARTQRQMDLLFPEDQAHQNPPSSEWRKTDQNERGLSVTDNLKVIIG

SEQ ID NO: 948989 - protein, 121 aa, Homo sapiens
VEYCLLPLCISRILSNISLHSMTPSDMLSIVARDSEIPNTSIAHVLQVIQRKDVRATTENTWSRSHPMLPIVGAWLRTHCTDPVAVLVCAALPAERVRGLRTRTDPGVGKQGVAHLIGQVG

SEQ ID NO: 948990 - protein, 41 aa, Homo sapiens
LRWPDVWWFQDGGIKNKSPATPQATPDGFIATAADKEERLI

SEQ ID NO: 948991 - protein, 76 aa, Homo sapiens
AEDKVGSRTENAPKAGLVVRDSLKMADPDNMDKSSEMKSKRVQTNFLFKVLLRKKAGPGKLGFFFPPLLQILMVWV

SEQ ID NO: 948992 - protein, 55 aa, Homo sapiens
APGSARMETAGSASERLPSVEEAEVPKPLPQPPKIGDEDIQSILRTRQERRQRRQ

SEQ ID NO: 948993 - protein, 42 aa, Homo sapiens
EACLTVETESSSLGYLSELFFLHITAATTGSSDHSSKDNKAA

SEQ ID NO: 948994 - protein, 175 aa, Homo sapiens
HRHPGPKLGRVLRPQSSVQGTVSGSVVQSSGERTRIRPSSPVPGCVLGQQSQVQSYSLTGDSSAATYSLFRYLPKARRQSQGQGTGVQLKVFHQDNFKSSDCFIPIASSATNTAATAPSQGCASAGTTSPGSLSDPVTGCGSDTGSAKWCAPANQTPVTYPNSAKQCCADSPDSE

SEQ ID NO: 948995 - protein, 106 aa, Homo sapiens
MPSDQNSLKVPYGTPEFVAPEVIQYEPIGYATDMWSIGVQCYILISGLSPFMGPNDNETLANGTSATCDFDDEAFDAISEDAQDFISNLLKTDMKTRLHCSSDFSI

SEQ ID NO: 948996 - protein, 48 aa, Homo sapiens
ESLNTHGLAMNHIMNGIITRLQQFRVIFQLFTQNGDQSSPSAHHTCMR

SEQ ID NO: 948997 - protein, 105 aa, Homo sapiens
TRYSTLSILSVSGPGEVSRGWRMCKTGSKRFFTRTRLSYFYKSCCGLHTYLTLCTTWLLYGHCLLGTCRYTLVANGYTTPQRLLKHIYGCLDTQHNPPPKRTSTH

SEQ ID NO: 948998 - protein, 43 aa, Homo sapiens
MAYPWPESTDTPKPVALGQIYIFHLRGDFLCQSCMKEVVMVDR

SEQ ID NO: 948999 - protein, 84 aa, Homo sapiens
MVSRRKKSEVGRERSEGWLGHARSLKMADPNNMYKKYKMWIKRYKQMSFLSTFKKKSRAVEVWVLFSSPVANSHGLGWVVEMCE

SEQ ID NO: 949000 - protein, 115 aa, Homo sapiens
EEENMERKLNCCVTIVTEDENALSELAEENRLLRWKRDWMSWNERLAEAKEENVGFIRTLDQTLQELKLYMSKDQKSLVPTETLELRGSFSSLVRSSFRYCHLRFAGNVKQIMNT

SEQ ID NO: 949001 - protein, 36 aa, Homo sapiens
  misc_feature (27)..(27): Xaa can be any naturally occurring amino acid
  misc_feature (34)..(34): Xaa can be any naturally occurring amino acid
GDYNKCRELVRRPLKWGENTEKTIDRXPKHMLEXAT

SEQ ID NO: 949002 - protein, 64 aa, Homo sapiens
LDCCASSTLTALTNSVLKNNLCPSGSHLISNLFKEDCQQKIDDLFSGKLYHIGIAAIVIAVIMI

SEQ ID NO: 949003 - protein, 72 aa, Homo sapiens
NGKTPVIHKSREHHTNLTKAQEPYRSLKQVPCTFIIKLYRIKLYMSSLQKSQLYKILYTHLKNSQHSHQYIT

SEQ ID NO: 949004 - protein, 52 aa, Homo sapiens
NLESSGQPVPRDTGILYMSAASYKYMPDVSEKLRDPRIYYINSAASFFAFIR

SEQ ID NO: 949005 - protein, 33 aa, Homo sapiens
PVQRPLHTKEDLEAVRRSCGGVDEPVTDLKSYR

SEQ ID NO: 949006 - protein, 42 aa, Homo sapiens
RDSVDRVVGSLSAQARQGKKLSEIMEKGQLVPLETVLDMLRD

SEQ ID NO: 949007 - protein, 69 aa, Homo sapiens
GGDQVRLTPEYQSWVSPPTTTTHTTTTIHQSALQCETSVAVRVTAGVLSSRLILTHGLRRSKLDLLLVR

SEQ ID NO: 949008 - protein, 37 aa, Homo sapiens
TAAAVAPNLRGLEIVALHVWVGLGNGCLNPGSWPEPG

SEQ ID NO: 949009 - protein, 83 aa, Homo sapiens
MAPLVLDLLLAPALDNHVTLLQVEHEVPHHVHNLVFSSFVHQIRLRQDSDGPVSLGVQLLGHAESLCGGDVHITGDHHQADLS

SEQ ID NO: 949010 - protein, 64 aa, Homo sapiens
VTERHSQDAEGCAEVMYPRDSAHLQVFLDAQWPDGSGSSSFLMCTVSPFQEAQRGVVGAVGAQG

SEQ ID NO: 949011 - protein, 64 aa, Homo sapiens
MTDAPSCLRQTDLKSLIAYAAIGHMALVVTGMLIQSPVRLHRRRQFSVIRPGAYILITMLPQVE

SEQ ID NO: 949012 - protein, 77 aa, Homo sapiens
CYPFFVVSLCGIIMSVLICLRQTDLKSLIAYAAIGHMALASNRHADPEPLEASPAQALSVYRPGVYILIHYCASEES

SEQ ID NO: 949013 - protein, 71 aa, Homo sapiens
IPVRDHYEQAPSAYDKQDLKSLIAYAAIGHIALVVTGILIRRPPWSFTGAVNSLYIGQGLTSSFTIVPQVE

SEQ ID NO: 949014 - protein, 70 aa, Homo sapiens
IPMRDNYDVLPSAYDKQDLKSLIAYSASGHMALVVTGILIQEPREASPAQSFSSFGQGSYILITILPQVE

SEQ ID NO: 949015 - protein, 96 aa, Homo sapiens
EEDVRQSLVAVIGGISCKERNDDLNEAGVGEGHDRAKWAYAVGQVNSFHSHVSKLTIVEIIHARISMSASKEEASMSDSCVRHGQHRGEGALPVVI

SEQ ID NO: 949016 - protein, 45 aa, Homo sapiens
MAVCGTLLSGWAGSSPTMTGLFSGESNLVPYRNPRRILGSFVGSP

SEQ ID NO: 949017 - protein, 39 aa, Homo sapiens
MEMSLPEDEGHTEDTDTAKEMEITEVEPPRRLDSSTQDR

SEQ ID NO: 949018 - protein, 49 aa, Homo sapiens
SLIWDKNLKFVMLHKLEQFNGEVHSYDLGMNHLGDMTREEVMSLMSSLR

SEQ ID NO: 949019 - protein, 76 aa, Homo sapiens
MVSSDYQVLTLRALQIVSLPPRPLPQEIASLFINIFFLPFPESSQYNVSEAPFAQVFSNSDMLYFFFFEKGLRYTP

SEQ ID NO: 949020 - protein, 98 aa, Homo sapiens
RNTKLGWYLFVKHLKVPQIGFKVPGAAASHEDPTEGEQPSPDCCAHQTKTHYIFFSDYLRDCICFSYKEHQGPSCFDLFKPHNIPVRQTKFRNTSMPH

SEQ ID NO: 949021 - protein, 42 aa, Homo sapiens
PHALLYDVTLPPQHHFLLLEVAPLLLVYHHQFEVIAHRELLV

SEQ ID NO: 949022 - protein, 45 aa, Homo sapiens
MRNTVGRSKIMLCCNYLKIAQDLEMDGINYFETKNKKGTDLWLGV

SEQ ID NO: 949023 - protein, 77 aa, Homo sapiens
LPTCRGFNMEVGQYIFDNCPFISLLEWHTFTLTSAPDEDCFSIHIRAAGDWTDNLKGLSNNNINQFPGLKWMVPLAQ

SEQ ID NO: 949024 - protein, 88 aa, Homo sapiens
DEIEKEEQAAAEKAVTKMELHGEWTAPAPEFTDTQPEVADWSEGVQVPSVPIQQIPTEDKSSQHATEDWSTAPTAQATEWVGATTEWS

SEQ ID NO: 949025 - protein, 86 aa, Homo sapiens
RATSPSDFTPTTLAVLHDDVVHRFGQHICPPIDGTQSCKTLGRSPKPERRYKIWGFCHTWARDSLYNLEAVDGLQGRPVQVVLNAG

SEQ ID NO: 949026 - protein, 36 aa, Homo sapiens
QSVQHEASSTTLQISPVSSYAESENELMVCPADSRR

SEQ ID NO: 949027 - protein, 84 aa, Homo sapiens
NIFYELKGECSGNVLFGRSGREMSEAADSSSADRQTRMEGAEINKSLLALRECIRSLGQNKAHTPFRDSKLTQVLRDSLHWGEL

SEQ ID NO: 949028 - protein, 93 aa, Homo sapiens
SFVRVLPSSRKITRICLERQSCKSEACDRRNSYRFCSVRLWNGRFEGRNSRNRAGWDGMGWDGMGSEERLGNGATRGCRVCCDIEQDHKKAYL

SEQ ID NO: 949029 - protein, 81 aa, Homo sapiens
MESSSLSNKLELEVTIQRGEQSGSLTTAPVPLFRISPFLFSMYPACSSSRADRKTLGQRQSMKTSAYHPGPRLELLEPLTL

SEQ ID NO: 949030 - protein, 182 aa, Homo sapiens
ATFAEEWHGMAELWDKHVTSEQEWNMYCHYVAGLIGIGLSRLYSASELEDPLVGEDTERATSMGLFLAENKTSSVTIWKTSKEEEMSRASEVGSRYVKKLGDWAKPENIDLAGRALNDLITNALQHIPDVITYLSRLRNQSVSNFCAMPQVMAIAIWAACSNTQQVCKGAVKIRKGQAVTLM

SEQ ID NO: 949031 - protein, 96 aa, Homo sapiens
AAIQFWCRYFQVWTFGAKMVDRVCRAGGLYISSLSYPLTPQNIQHCVVAHEMTISRGDRKAFVRELLHKGLHPLPYYSHSACRSAPGVGSCQSPEQ

SEQ ID NO: 949032 - protein, 77 aa, Homo sapiens
GQNFSEVHLYYGTHPGSSRTSTMLEKPKNAIHTFVQSGSHLAGKVRMANLVMAEGPDTSAVEAIEFIQCNPAHLLDR

SEQ ID NO: 949033 - protein, 84 aa, Homo sapiens
  misc_feature (3)..(3): Xaa can be any naturally occurring amino acid
  misc_feature (31)..(31): Xaa can be any naturally occurring amino acid
  misc_feature (55)..(55): Xaa can be any naturally occurring amino acid
  misc_feature (60)..(60): Xaa can be any naturally occurring amino acid
PLXAGSTPTGPSWPSPAIPVRDLRCSIQLLXPFPLLLSPLADGLRLLGQPVSLGXGCVAXSRTVGLLSISVGRSVMARRVGNQE

SEQ ID NO: 949034 - protein, 34 aa, Homo sapiens
KRDSRTYWWNFTSSSSTDLLYAAARVCQTRTLSV

SEQ ID NO: 949035 - protein, 153 aa, Homo sapiens
RGPIPEESGDEDADDPYKRISICSSDRTIACEDEFSEPEEEGEGGRRTLPTSNKARESQQGMNKRKDQRRRKNPRRGENQGGEARRQRGQGGGQVGLNGPLQLWIPAESLTYLPQTRQILYFLFLCVFILKFIKYKYPPGQKPRPRDQGSCAG

SEQ ID NO: 949036 - protein, 35 aa, Homo sapiens
RCTRYEREEWRGMVAPGKAHPGRGALSSGPWFSCP

SEQ ID NO: 949037 - protein, 104 aa, Homo sapiens
LRTPSLLESGDEDRYTTLTKRISICSSVQTQLRCEARVLRVLNEEGEGGRQELFQRSKKAKTVKDRRMKTERDPEREEQKSPNEEKTKEEKPEAKGVKEEVKLA

SEQ ID NO: 949038 - protein, 75 aa, Homo sapiens
CCFLMYPHAAAIAELACYTVRTPVPVESGDADAYEPDKAQSRVRPRSRALCLPFNRQLTLPPPFLAAHSLQAPQL

SEQ ID NO: 949039 - protein, 46 aa, Homo sapiens
AAQLLLVACSICLASLVGDTNNSHPTQAASKGRLVPLPFSILSMTI

SEQ ID NO: 949040 - protein, 116 aa, Homo sapiens
ILEYETIQCFLDGVLFAHCALKARRNNFEILQIMSLGGRHFLSYEVRLISWESLPPALILIDRPGAGLGHSAARLIKGEACYGVGGPSWETRSRWQGANPPCGVPQSRLERVGLAS

SEQ ID NO: 949041 - protein, 100 aa, Homo sapiens
RFCGRIPEESADDGRTTTLTRRISICSSDKRLACEAESPILEEEGEGGRKNSSNFKKAKRVKTEDEKEKDPEEKKEVTEEEKTKEEKPEAKGVKEEVKLA

SEQ ID NO: 949042 - protein, 72 aa, Homo sapiens
WRIDYSAAVIYELLGVDDINGDRIQDVLFLYKNTKQQQQFQPILCGRRLFLSLHLCSCCVGGQREDALEETC

SEQ ID NO: 949043 - protein, 66 aa, Homo sapiens
RWAESVGLTAAVDSDVPSTTGMTGIPCTRVHDPWYVRTEAPLDAPTGAWGSEGVLVASSPPEGLTG

SEQ ID NO: 949044 - protein, 36 aa, Homo sapiens
MAEREVLVVLYSFHLLPQAPVYSAAIDSDAVPTVTG

SEQ ID NO: 949045 - protein, 40 aa, Homo sapiens
LQNRAMAWNETADLDYDIGAQENPLDIARMILAAVHLMPL

SEQ ID NO: 949046 - protein, 178 aa, Homo sapiens
LLAKMLIVRQSPSLDVSRCQSSSMPKYARAMRPDGPRPPFSTMRPASSQVPRVMSTQHVANTSTQTMGPRPAAASLSNYSCCPHRSTVEICGRSARILSNICNAASHRLQCNRLRSMYKVRKLRLIPCGHLPLLKSKSECWVNGWFLFIQAMHPTLAGKITGMLLEIDNSELLHMLES

SEQ ID NO: 949047 - protein, 95 aa, Homo sapiens
RRPLVSGKGPLSRLLWEISLFGAPHEKNYMGTAPFQKIYEKLRLYGRNTRFTPPTGPQTAIAGATCLHSPLATRGVLPPVEARPLTASRSQSRAR

SEQ ID NO: 949048 - protein, 45 aa, Homo sapiens
MARLVLLDERALTGTSGMWPPCDPSAYGVVPVTWGSPRSSDEDLS

SEQ ID NO: 949049 - protein, 103 aa, Homo sapiens
MTKSIEGRGGNEAGKGKKMLICLLLLSFFKCGQGFYSIFSLIFLVIDKDRTVHCPAEAASTLLLAGLILQWICVSGCCRTTLRAGRPLTQRCSIGLLCGGESR

SEQ ID NO: 949050 - protein, 88 aa, Homo sapiens
  misc_feature (3)..(3): Xaa can be any naturally occurring amino acid
DQXLYSIRNSPFLPWLQAESLTLSTGFQVIKKKLYSIVNSLLIEELLNFKLRGPTVRSKTETIELLGWRLEAGAEGLIPVVGKPEAAT

SEQ ID NO: 949051 - protein, 216 aa, Homo sapiens
CAGNHLLDERKGAASVAMSSLKTAYESEISSSCLLPVWQPPGPQLCQAPVLRGIYRLVLMWDPKPRHSSIPAILSCLLGDRALQLLPARRADTGACVGQKTHRLLSSGSPRSSLGSDIHGLWHLCVGPLLLRLPILQAACQLPGQEGRPHLPQLPLLPALLHLLDVASKQGFQWGNQLGHCWKVSKADLHVVTGNSHFLAEVGAEEGDLGIALAEV

SEQ ID NO: 949052 - protein, 47 aa, Homo sapiens
GALPNMAVGHGDPQWSRWCPYGNAPGTKCQWQVGVQVASMENRCALD

SEQ ID NO: 949053 - protein, 44 aa, Homo sapiens
ALLIIVLLMSGVLCFFQVLEIVIIPCPILGTASPGILLRASSVC

SEQ ID NO: 949054 - protein, 78 aa, Homo sapiens
LNVAKCKERWRTFSRKPGNAEEKAKKAITDAAYCLAEELKKEQDTSAQLERMKKNMEQTVKDSGSSVLDEAEQLALKG

SEQ ID NO: 949055 - protein, 40 aa, Homo sapiens
KLSSLPFQKIQHSINAQDHQPTPDSCIISMDVGQLKADED

SEQ ID NO: 949056 - protein, 109 aa, Homo sapiens
MVAITPISSWQAVKGTKQKFKVHFCMASSKQPGTAIDHHNMSARPYSNNHPVHTQASAGHLATRESHTTSITQGRQHLAATPCQPCFTLILAQGHSLFTAPITQVTGTI

SEQ ID NO: 949057 - protein, 150 aa, Homo sapiens
AVLYVLIFYDSNTVKQKHLSFTPPEKDGFPSGTPAQNAKGTKAPVVVTEEEDDDKETAPLVIAPRTVHTKSIYTRSVIDPVPAPVGDSHVDGAAKSLDKQKKKTKMTDEEIMEKLRTIVSIGDPKKKYTRYETIGPGASGTVVTATDVAL

SEQ ID NO: 949058 - protein, 71 aa, Homo sapiens
MGKPRPPFKIVILYEAHSMTSPAHATFKTYHVPSDRKPPDSVLSVTISLPLIDPLTSPCSKFRFQPLSAPL

SEQ ID NO: 949059 - protein, 147 aa, Homo sapiens
MRPRTLALIVAAPGLSYEKPDYRLPSGKLLYTDLLSTAVGYVVSTNRVTTRAREALAGPPIGTVHTDLALPSLQLRDKTQPHSKNQALNYHQRGARIADDPTARPIPTPRSQRLAEVGGRPMKPNAASTFKRRKRKSLAATQVTLGA

SEQ ID NO: 949060 - protein, 134 aa, Homo sapiens
MGGPRGRGISRLRVGHTPGVLAEGRDSMQGVEMSRMPSVSSRGQLSLLLFTLLCARVHTGVGGAGLRLRCCCVRGWLVSRWVRVSLTWDRLGSTSRRIFPILIGPLYRLYLRSTVVSCELHHLFNLVECIDKGK

SEQ ID NO: 949061 - protein, 68 aa, Homo sapiens
TRDPTEVELDDQIVYCDLEQISGDEDRATETCLDSVIETSVYTVVVPLVYSGYDQNGGNSLNPGCRLS

SEQ ID NO: 949062 - protein, 126 aa, Homo sapiens
SALKSSRTECLPACLALWCCGRGSGKVFAGISSSSSSSSSCDSCSSSLASIHFLLPCAHGAHCVPHVPGHSAVPESRPTPHGDSDTGAEGHKAPTVRITRAVTVRALGSVKNRSPPWKSSLRMVRT

SEQ ID NO: 949063 - protein, 45 aa, Homo sapiens
MSLFPVTTFRTNVYVVIITFLGLSGYMRSSYTIQFHLTLTGRLNF

SEQ ID NO: 949064 - protein, 35 aa, Homo sapiens
LIFCVRSSVTILLFFFLIRTNIFNLQVCLPTSFSI

SEQ ID NO: 949065 - protein, 203 aa, Homo sapiens
GILNCSESSFLSCCVTLEAQHRASVHFQLHLQVHEPWPPGFWICFFPPFSASCSASSRRCCRSFTVCSRFFFIRSRWALVSCSFFSSSAIMAASVMAFLAFSSALRASWMMSSTSPWIWEMSVSSFFLVLIRLVFWVCRSLNTLTGIQELLFCDFPAPLRLFQSGPQLLDLSLQQVGSALHHSQLFLQVLLGPESIIQVELVP

SEQ ID NO: 949066 - protein, 69 aa, Homo sapiens
MGDEIESEAKKNPFSRKIGTNFLRTGGTKTRKPKKPAEEEARKRLEEEKGAFEEARGAMVNAVEDGPAR

SEQ ID NO: 949067 - protein, 67 aa, Homo sapiens
LSDRWILQKGFLKEEDLKEKEALVGGTSCVHGAGPVMPLVGLCSLTDHAVGTPNRRSFLGARGFRTK

SEQ ID NO: 949068 - protein, 58 aa, Homo sapiens
MRTVGVATVGPQLQQHGGLVVLESRRPRILPILVCPRSIGPIPSWLAGRCQLAYQHCS

SEQ ID NO: 949069 - protein, 34 aa, Homo sapiens
RGLNGLDANGRYTADGQEEQEYLGNPTNNPVSIR

SEQ ID NO: 949070 - protein, 52 aa, Homo sapiens
TGMDVNGRYTAERAQRCWSIQGNPANYPVSIRFGRPRLTSNEELTLGLQHMP

SEQ ID NO: 949071 - protein, 96 aa, Homo sapiens
THHYCVCCTEPRRAHRVSQSGSIHIWELKTEHNEQMIPEPEVSITYAHIDPEASYMAAVNSTVNCYVWNLSGGIGDEVNQLIPKTKIPAHTRWPTH

SEQ ID NO: 949072 - protein, 62 aa, Homo sapiens
RVQELGLSAPMTLLPNITSVHTIEILREKGFDHAPVVYEAGVILRMVTRGKMVSSLDSGKVQ

SEQ ID NO: 949073 - protein, 76 aa, Homo sapiens
IKTEKLEEPAEDSPPVEEVRTVIRFVNNKTDKHVNRPVVSLPSTSEAASAFAFLGLVRLGQDLLFNVAKRLPTAHA

SEQ ID NO: 949074 - protein, 50 aa, Homo sapiens
KQLIHDYTVKCYAKPNEGAIVEVALGRVLQVTMLFDTAGTSVFENWRGER

SEQ ID NO: 949075 - protein, 43 aa, Homo sapiens
LEVPKQKHWVQLLRVPPHPDYSNLIDTYHSVLQLTCWLADHTR

SEQ ID NO: 949076 - protein, 48 aa, Homo sapiens
YSEESLAVVDIWYSRSPCVGGTPVGVSGGFLERVLAPAGLILLLISTL

SEQ ID NO: 949077 - protein, 47 aa, Homo sapiens
LCAAVVEWWGACGYMLGSAMSRPIIHFGSTKDRYYRENMHRYPKQEC

SEQ ID NO: 949078 - protein, 68 aa, Homo sapiens
EIFEHHCSIDLGLGGILNDEQMGLPVYVLQLAVQEHWVSDTRISFGRLRLGRNIRINTRGATWDLTQE

SEQ ID NO: 949079 - protein, 137 aa, Homo sapiens
RFLSEGGEVSNISSDGHKCVGVYNFCPTPFQVCEQLSQQLLQVLDPVRGWHRTLPGGPGACTISFRMRQRNLLLPTDCSSLKAYGDAQSIQASQQLREGTMPDRGNLTVEQDRDMLMKCWASCIEQRLYLTGFSEQK

SEQ ID NO: 949080 - protein, 41 aa, Homo sapiens
MLQCDGYIKIYDVQHAILAGTLSGHASWVLNVAFCPDFHLA

SEQ ID NO: 949081 - protein, 44 aa, Homo sapiens
NWLDQLKCTSRAEIAKRLNTIYSTDHAFPCHNEHQTAGWRMACE

SEQ ID NO: 949082 - protein, 56 aa, Homo sapiens
KSGHALRHTYVQTVDPPPVLEYCRLPREVPLHSRWKLDQPVQPHQYSLDDRRQWVH

SEQ ID NO: 949083 - protein, 71 aa, Homo sapiens
MDWLVLPTTALSSSWGLCLSLARYAWHSRGNGGAEGCGAIPACQSHAPNSSASKSGVSGQRMLLLLISTLQ

SEQ ID NO: 949084 - protein, 80 aa, Homo sapiens
RLLPLGELCLLVPRFPDGYDCQVSEHESRSPYTVDPFTTGERAQQTRSPPSLLPELKLLTIWPWMYRVFPHLPRVPKLDI

SEQ ID NO: 949085 - protein, 68 aa, Homo sapiens
MAGHGSRPVHGALLVLDRSSGKHGVVERYTDAVKLSPELDTAYYRCLCILISTLPGSTAHSFQSSWIT

SEQ ID NO: 949086 - protein, 91 aa, Homo sapiens
RNRPYKMTLVSNRKDLPVVIGSRGLKLLYGGITSISAAIEDIRMNDSIMGVNRKEREVNQRWTDGSTDTDRHEQSSRNSQESRTRQSQREK

SEQ ID NO: 949087 - protein, 106 aa, Homo sapiens
WTRRMFSAAGAQPLRAVHGSLPFHPPTVSWAVPEPAAHWWEGQAWPGGVAMGPGGARSYFMRILRAMARSSSSRSCSRQGYEDVASASTHPSPQPSLSHFTCRSCS

SEQ ID NO: 949088 - protein, 85 aa, Homo sapiens
  misc_feature (64)..(64): Xaa can be any naturally occurring amino acid
SIRCSSIVFFIWLLIKLPTKDGTLENNSKIIFWQGFLIGVILGNSFFPRLCFIHGTHTVMGRLXSISWTLRLVFQKLGTMTKRDF

SEQ ID NO: 949089 - protein, 157 aa, Homo sapiens
  misc_feature (64)..(64): Xaa can be any naturally occurring amino acid
  misc_feature (91)..(91): Xaa can be any naturally occurring amino acid
MSLDPLIQHVSPMRSGAPAKKPATPAEDGRGLIDIGPCLAVTIEEEDKEAAQLAGVSGYGSYRXKKANEALHVVCQVLLSVLDVQALGDDXERTIGPAWMALVVRSIRAWTWAGPGGASKAGCPVGLRVSEKLQYSVCGDRTTSVGTCLAWIQRIAV

SEQ ID NO: 949090 - protein, 35 aa, Homo sapiens
LKDIARIHCCVPDIIERAGYSLEKVFGIQLMEASR

SEQ ID NO: 949091 - protein, 97 aa, Homo sapiens
GRRINRIWSVPKASGVPVVRAHESAVTGLSLPATAEYLLRSSDAQYCAISDIQIRPVLTTVTHEPSGCSLTCAQFHPDGLIFGTGPMDSPITIWDLL

SEQ ID NO: 949092 - protein, 82 aa, Homo sapiens
EKPCLYKKIQNYTGVVARAGNPEWLGLQVHEIGTFKFAVDGSVAHMRDASINRVHDPCGVVRYRYFFPELEAKVDALMEASR

SEQ ID NO: 949093 - protein, 44 aa, Homo sapiens
PPPITAERYFLFAYTILRSVPNKLGGVLARLLSILILAIIAGHE

SEQ ID NO: 949094 - protein, 52 aa, Homo sapiens
SLLFTDTYLRYRLGLPPGDVPPQSLTSRPPHARTNFHSTMTSPLLGFSLDLW

SEQ ID NO: 949095 - protein, 32 aa, Homo sapiens
LLFYSSQGQESAAFFTGQNQGVSRAASLLSSS

SEQ ID NO: 949096 - protein, 129 aa, Homo sapiens
MPAIVHLLADRLGSLQLRDLRTGPLPGLPCRSASEVRGMPSLSGRCLSCVVYHIQAAVLRPHPWNQYSDREGRKSRLRYWDPRDKGMWVLEGKGILGRVLGPNGMLEQEVVLGSSPEATGVRMLKSGSH

SEQ ID NO: 949097 - protein, 111 aa, Homo sapiens
ETESHSIVQAGVQWRDLGSLQPLPPGFKQFSCLSLPSSWNYRHTLPRPANFLYFLVETGFHCVAQAGLKLLSSGNLPALASQSARITGMSHHARLAVVFFKALLSYSRRRI

SEQ ID NO: 949098 - protein, 111 aa, Homo sapiens
MVPSSLHFTFASCKICETWRFSDLVIFAKFALDESNMSVMPSTFSGSFKSVGAPAVNLGRITCSLLGTRMLIQLSMDLVQMVEMMADSVSGALSRKCKQHADAIPVIGEYN

SEQ ID NO: 949099 - protein, 84 aa, Homo sapiens
CTDKYIALDEWAVLRLEAEKDIDKDLVIYIHSFHTYRILSLTLPFVFPPVFKIVWTGLYVLPWSSKVANHTIYSDITLKRMLTN

SEQ ID NO: 949100 - protein, 163 aa, Homo sapiens
MSSSVISRMAIGGSTGLWQGRYIRLKQDVFSALVGQGQIYVHLNDGIWSLIKSGGSALYASRLYLSRYQDTQPERLAKHTPGGPWIRGNVYIHPNAKVAPSAVLEPNVSIGKGVNVGEGVRLRESIVLQGATLQEHTCVLHSIVGWGSTVGRWARVEGTPVTL

SEQ ID NO: 949101 - protein, 72 aa, Homo sapiens
ENTCPSTDSSTLMFEIAAGTTTSLRGFPDSNAIHPGILALRQAAVSSDLLLQPCLYVTQHLVPHSSASDGDS

SEQ ID NO: 949102 - protein, 58 aa, Homo sapiens
IGDTINLPGRPGLRGSGAPLEIPGLKGFFGEKGTEGDFGFPGITGVTGVHGPPGIGLS

SEQ ID NO: 949103 - protein, 86 aa, Homo sapiens
QKEVQQELPVFQSGFQCSLCLGEGASQPQGLLIDQARAMLGLLGLGYQLIAQPRDEWRQLPPDDNTSNGHSMLDNYRHLVSLAYDY

SEQ ID NO: 949104 - protein, 61 aa, Homo sapiens
EERWRVLALQQAAEGGDLLLQARLHIQQDLVLLVLLLHLAAKLGQLLLQAANHLLGLGYQG

SEQ ID NO: 949105 - protein, 43 aa, Homo sapiens
TDFLDPVVPGDKGKDGLPGTTTAFPDLRESPCPVLLPGTWAIK

SEQ ID NO: 949106 - protein, 73 aa, Homo sapiens
ANYSEERAVRASSESTVHRNKRGAASALTGGPYFRGKGHVVLAPQPIPSHLGAPPPHSLHLLGLGYQGDSVLE

SEQ ID NO: 949107 - protein, 47 aa, Homo sapiens
ACRDASQHLFPCTEWVVPLPAHAQKWWPLRHTLPGLTQAVPQGGGVP

SEQ ID NO: 949108 - protein, 52 aa, Homo sapiens
GPPEMCYRTFLDARGLLDDYTERTGLTRDNNGLPGSKGITLPCIIPGTWAIT

SEQ ID NO: 949109 - protein, 61 aa, Homo sapiens
MSAFCQVLSDILQVGNARRLDDDISELDALERHGLSPHLGARSIDQSPVLINNIYNRRSRD

SEQ ID NO: 949110 - protein, 56 aa, Homo sapiens
GTPQSIPLHAIEEEEVVVRRVPLRQALHNFLCQISLQPPAHTRGHSRENAVPAHKS

SEQ ID NO: 949111 - protein, 102 aa, Homo sapiens
MTFAELLALRSDRLFIIHSSEMLGTGSTVETLPQVLCSALRVERLFEGGRVFLKIIDPENESVGRARWLTSVILALWEAEAGGSRGQEIETILANTVKPRLS

SEQ ID NO: 949112 - protein, 95 aa, Homo sapiens
ETRQCTLDIPASLSLRVSPHRFAGDSGADNTQHYRLCMLKTVDDFIASWAFHIHDSTTWGSAPGLFFSCFLFSSSGEGLRRSFVERSCSRALRTL

SEQ ID NO: 949113 - protein, 59 aa, Homo sapiens
MALSNCLEEAISIRLRCCTLASSDSQQVLISCTRSSREEEVVHTNLTLELLPPPATLSG

SEQ ID NO: 949114 - protein, 86 aa, Homo sapiens
RKALPGQWTLCSSHRSQELPRPQTQPSHTAVIAKHMLPLQQHGLLKSTRCRRQHACHGIRAFSPVLCRAEGYKLSCKRNSVFPLGL

SEQ ID NO: 949115 - protein, 82 aa, Homo sapiens
LLRSSLLYPLTICRHGENPGPLALHAVGGMPPFHKPILLQREPVFATPIVLGCRLLSEQSPGSSGNCTPVHWPGLAFPYSRF

SEQ ID NO: 949116 - protein, 75 aa, Homo sapiens
CAAMPHKPTALRMLCGSIFSCMENRHSQFSDMLLVGMAHSPATFSVTTLTGAGPTMPFVGLHIDAWTGLPSVELP

SEQ ID NO: 949117 - protein, 48 aa, Homo sapiens
SGTSVLDCRRELTDVIFMSVPELDPRSVQCVDPALSDISIDGLQSSLE

SEQ ID NO: 949118 - protein, 39 aa, Homo sapiens
PVMLYMPLGCSSPETEAHRLVGPEMPYPKASPCPPLRTY

SEQ ID NO: 949119 - protein, 91 aa, Homo sapiens
MMEISDPRKHFEHGASSEIGTEDAEDVGVEQLLRNIPYTTVGTLAHLASTNACPWFERELEMPSVCISRSSPGIPVAMCELSIFPHILSQL

SEQ ID NO: 949120 - protein, 122 aa, Homo sapiens
YSYLSLGFYIDRDDVRLWNCVSHFFRELAEEESLRANSVSCRFKSSVASALSSSDIKKPAADEWVYNPNAMKCCHGPVAKAEAGPFGSSMPWVLSARTPISVTSWRLTFLDAEVKLIRKDEA

SEQ ID NO: 949121 - protein, 35 aa, Homo sapiens
QIRIQYKALKPEVDKLNIMAAKRQHGSGSSSFALC

SEQ ID NO: 949122 - protein, 58 aa, Homo sapiens
MGRRKAKPFHSVMHAGNDQPAVQFLKMWIHQNCFANCVTVHSIWMARVLPTIVQRSDG

SEQ ID NO: 949123 - protein, 123 aa, Homo sapiens
MPVFPHLLLQGWLLVTRSCHPVIQDSNFQLKVSLLFENLVVAAPPGFQSGYKRQRHTYPCQRVGRVAAQLTPRSSRIAPSGHGVAFYKLSVASVLLLLPLLQLLHECLHFCLKLGGMMKGPSS

SEQ ID NO: 949124 - protein, 209 aa, Homo sapiens
ITTYPDRYNRQEDGGIVCGNHTVTDRCDHHWASDGYYAMVGRVHGGLTVAVIQRAMVKACPHVWFERSEVKDRHLVATRLTEACARYSKRSILIFPEGTCINEYIGDDVQIGKLRIGATVYPDAIKYDPQLGDAVWNSSKYGMVTYLLRMMTRLGHCLQRVVPASHDREADEDAVQFANRVKSAIARQGGLVDLLWDGGPEEVGMMKDG

SEQ ID NO: 949125 - protein, 73 aa, Homo sapiens
LHHTYLVVSAFPYSLLIFVYDERKEKLITQATPWRAGWRRKPSISPPSCTLLKHQATHSASDTHPLLVYFSLG

SEQ ID NO: 949126 - protein, 80 aa, Homo sapiens
EHEDRVTLPSGSQKVLSSANSAVRWCGGRQVADIDEPILKAGRAYHNYKAERKCWPQVRGVAIKSGARILFGGGQATRHI

SEQ ID NO: 949127 - protein, 46 aa, Homo sapiens
SRWFNGTLLNSPDRARAAAQPMGEQRCNRLLTPTQFFLARSKSTAA

SEQ ID NO: 949128 - protein, 47 aa, Homo sapiens
HSSGGQLMHAYYLNKLECRDEEFKSDQDVDVGEENSLLTTSKLPANR

SEQ ID NO: 949129 - protein, 41 aa, Homo sapiens
MHAYHILTSFECRDEESNLTKMLMLDKRILCSPPSKLPAYS

SEQ ID NO: 949130 - protein, 53 aa, Homo sapiens
TSTDPYRLAGTYARLYILTSFDVREIEDSNLSQDVDVGYENSLLPTSKLPANR

SEQ ID NO: 949131 - protein, 48 aa, Homo sapiens
LTVPSIGGPLCTLTILTGLSAEIEESNLTKMLVLAKRILCSPPLSCPP

SEQ ID NO: 949132 - protein, 52 aa, Homo sapiens
DSTDPFDWRALMHAYHLNKLRVQEMKSSNLSKMLMLDKRILCSPHSKLPANR

SEQ ID NO: 949133 - protein, 50 aa, Homo sapiens
RIFSIGGHLCTLNYLNKLEVPEIEEFKSDKDVDVDKRIRLLPTTKLPANR

SEQ ID NO: 949134 - protein, 41 aa, Homo sapiens
RIRRAFMPLTILTSFECKRLKTFNLTKMLMLDKRILCVPTS

SEQ ID NO: 949135 - protein, 44 aa, Homo sapiens
HAYYLQEACSASSIDSSPTSAPSMLMWDKRILCSPPLSARQSKG

SEQ ID NO: 949136 - protein, 51 aa, Homo sapiens
DISTSHHGSTFRGGSDGYGSASWKMSTWTFPQVTGSTFMNSVCHDSMGYRS

SEQ ID NO: 949137 - protein, 61 aa, Homo sapiens
MDVVREDGRRWLSPKHSKYSFWAWMAFSLFSGYLAWRFSFIFSILFIELLRTVFLLNADIG

SEQ ID NO: 949138 - protein, 52 aa, Homo sapiens
GGNQDMNEDQICGKQKLSSAAARDDCKDAGRKCRIADPGAGIGDRRGLLGQP

SEQ ID NO: 949139 - protein, 82 aa, Homo sapiens
TAKYGTEKDGNRGEQSHLAQEHAGACGCPESMEATLLKWTQCRPLMSVGRCGGGRCTGPREVLTLEDEVISRSPVNTHHLPK

SEQ ID NO: 949140 - protein, 172 aa, Homo sapiens
SGLLITTYPDAHLWVKNCRDLLQLQLQQTALGSTFRGFNLAEEFHNLQIARFLEPGHNTVEERHKMQLGTCARKELNEAKFYRVCFTYLVTVDGINALWGRNHSKKRRSKPDCPPMKFSTCSQLEENDAQMIRHGGAIMSALSQTGSLFKPRKAYLPQEFAGKGGIICPGSL

SEQ ID NO: 949141 - protein, 62 aa, Homo sapiens
IESLKEELAQLKKNHEEEINALRGQVGGDVNVEMDAAPGVYLSRILNEMRDSWKCPPAYGIK

SEQ ID NO: 949142 - protein, 90 aa, Homo sapiens
RSSRFSRWGVVDGVATRRRCRTPLPSLSPPRPASRLSSSLSVSFHLPGPPAQCLVATCPRGHSARQFDPFCAICVPMCPTPGHPLTSHCR

SEQ ID NO: 949143 - protein, 36 aa, Homo sapiens
MSAASSQQTSGNEGMNLQTLLLEIFKQASAVFHWLP

SEQ ID NO: 949144 - protein, 40 aa, Homo sapiens
FTWLAAHHSIFLSSQWSGVGRSYCSVFTFRISTEKQRHHV

SEQ ID NO: 949145 - protein, 112 aa, Homo sapiens
FPCAHFHVTLHFFLPKKVGPTMSFNSLGWQSIIGMETGVSAYILTRSALNNPEMVEGLVVINVNPFWKGWMDWAASKISGWTQALADIGWCPTFLGKEELQSSVKLIHTYRQ

SEQ ID NO: 949146 - protein, 47 aa, Homo sapiens
TSSVLRAAIHHAPHHPSYLAEGSLRLCRATHLILPLDGLVLLILNFS

SEQ ID NO: 949147 - protein, 82 aa, Homo sapiens
HSAGCTFDCIVPMMEAVPEGDWSCTVCLAQQVEGEFTQKPWFPKAWPESGTSGYYAELLSRVIGLPNADLLVRDGLRNVPAS

SEQ ID NO: 949148 - protein, 53 aa, Homo sapiens
MLLLGHNIDVNIFLRFLLVALSQWSGAEGPRSARWRECGPSMPTGRPIVAAIP

SEQ ID NO: 949149 - protein, 34 aa, Homo sapiens
YLTSILQTQQKVNESVIVSKAVSWNSEWWSMTEY

SEQ ID NO: 949150 - protein, 88 aa, Homo sapiens
MSSLYPGCSVIEGGTLTQYEGNTESVEEMAQVPISTCRRVQFCIKVQTIEYKQPMDFSCSHVKRLQEQNAIDMELMVNAKTWLEATEA

SEQ ID NO: 949151 - protein, 56 aa, Homo sapiens
SEITHYSHYVVIIISIFIFFPFFLTLQSRVGSGGLLLLLLLLPVKLLTGSPLLPLL

SEQ ID NO: 949152 - protein, 59 aa, Homo sapiens
MTRAIESRLEPEREQCLLRLPVCWSMYATLYLQWYGDVLGGLVWTSGAVKVSLDCHIRQ

SEQ ID NO: 949153 - protein, 127 aa, Homo sapiens
MQEGRGTLSKLYGDHKALYDVRPGQWSGTLDLVETLELQNLMLCALQTIYGAEARKESRGAHARKDYKVRMDEYDYSKPIQGQQKKALLRKHWRKHTLSYVDREAPGKVTLEYRPVIDKDFEHGYRD

SEQ ID NO: 949154 - protein, 114 aa, Homo sapiens
LYESELPSANVHIGQGVLSASAPQRASSVSPVDGLGVIVLINPHLVVFPGMLRPVTPSVPLLREIVCSAHSIRFCSSRVSTRSVSQTIPRSNVFRCLRSPESLLIYQQTFLQQR

SEQ ID NO: 949155 - protein, 45 aa, Homo sapiens
SHRILILEGTILTASAGMCVDVNECSATPACCCGHNVREHAGLLP

SEQ ID NO: 949156 - protein, 76 aa, Homo sapiens
SVTFRHSGETDDPVKPMVHWWPLGQSGLLNLGQTDFVFYVGGYPMYLHAPVPWFRFPPGYPGAWVGGSNAGLPRLE

SEQ ID NO: 949157 - protein, 61 aa, Homo sapiens
MTNFAWPCLIIFRVCLYPRTYFPLFITSWSLELIDSSDFFVFLAATIFLPEERDGPQPTAA

SEQ ID NO: 949158 - protein, 73 aa, Homo sapiens
WGPVRHLRQDDCGRKEYEKVVESINSRLQLVMKSGTYVLGYRPTLKMIRQGKAKLVILANNCPALRKSEIEYY

SEQ ID NO: 949159 - protein, 75 aa, Homo sapiens
WGPARNLRQEDSGRKENEKSRVDINATLGSNSFMKSGKYVRGLQADSEDDQTRQSEIGHSRYTTAQLCRNSEIEY

SEQ ID NO: 949160 - protein, 83 aa, Homo sapiens
MPGVDRGLGEGGVRNDILWVDLVFLKITKMEGSDTLFTQLIIEGVVQPSLGGGRTIGGIGPVRNSPTSTRARNIRVESACRIG

SEQ ID NO: 949161 - protein, 40 aa, Homo sapiens
  misc_feature (35)..(35): Xaa can be any naturally occurring amino acid
ATCPVLHHQYKVSISVSNALGHNATAITFDESPLXSLILQ

SEQ ID NO: 949162 - protein, 70 aa, Homo sapiens
LASLVARSLFFAAFSSTTCCRTEIACSAAASHASFASSRAAVCSAAFFLTASLHSFCTSTWAIFQRLLIP

SEQ ID NO: 949163 - protein, 63 aa, Homo sapiens
SPTTAVCCLLWVVAVLLEHGLHILPHSLGALLLQQGPLGVQNLVLLLQEPHLVADGGKLLVEG

SEQ ID NO: 949164 - protein, 58 aa, Homo sapiens
LEGEEERLKLSPQAILRVTVSKSHLSSSGSLSVTGRLGRSTRKRLEVEEPLGSGPSVL

SEQ ID NO: 949165 - protein, 85 aa, Homo sapiens
INPSTKNTYGHHSAIHSSKDRSTWLPINSGLDKENVVHINHGVLGSHKKNKIMSFAASHMDAAGSHNLSKLRTENQVLHVLTNGS

SEQ ID NO: 949166 - protein, 91 aa, Homo sapiens
MESRRQATVSWDSGGSDEAPPKPSRPGYPSPRSSEGFLSQPHSTWYKPFITRFLATLVHLESQPWLAASIPGQGFSFGPNSFMRSQTSGDS

SEQ ID NO: 949167 - protein, 81 aa, Homo sapiens
SGYGVSLSSSSISSEDILAVLQREMTCVSTLRQYFDGPSGSAKATQEPVDIGSLLVFMDLCQTLKKSAFLQLTLYEFWGYS

SEQ ID NO: 949168 - protein, 70 aa, Homo sapiens
QEMQQSSEKRYISSGHSTTKVIPVEKDGGVSFIFEDNAGVIVNNKGEMKGSAITGPVAKECADLWPRIAS

SEQ ID NO: 949169 - protein, 157 aa, Homo sapiens
VGLECSVSSMLVMVRVCSPSLLAPQLCLSFVVLAVWCVFRSSSFCCGGSVSLGASCCLLLLVWFCGVRLLFVLLFVSPLPVFSRRCSWSFALSLSSACVGGWWVLLRRGLRLAVVYAWEAVGGFRVVRLCVLAVAGFCVVRGGGCALFAVAGCVSGV

SEQ ID NO: 949170 - protein, 116 aa, Homo sapiens
PPHSTVLSRVCWALVMSGRCLGPRELMYGSRTCLAKGVSVCCVHACARSRGMCFIHAAVSQPRLGPGGLRWSKTGTGQMQWLMPVVPALWEGKAGGSPEVREFEISLTNVEKPCLY

SEQ ID NO: 949171 - protein, 55 aa, Homo sapiens
CACFHQVCMFLSSDVSAALFPHDAVMLPPELLLMYLLVCDLYVSDRACACNACAR

SEQ ID NO: 949172 - protein, 40 aa, Homo sapiens
VVDPANGFLPKWAIIEESQKTMACSQIFMPFQMDLDGSVR

SEQ ID NO: 949173 - protein, 39 aa, Homo sapiens
KARSAGGRGPPCCRGPVLLSCKERTMKYMQRRGVSMAKR

SEQ ID NO: 949174 - protein, 112 aa, Homo sapiens
QERDAGPTYLIIQLNTNSIIGDGPIVRKEIEYRMARGPWAEVHAVSLQTYKLWHLDPDTEYEISVLLTRPGDGGTGRPGPPLISRTKCAEPMRAPKAWLLLRSRPVSISALE

SEQ ID NO: 949175 - protein, 69 aa, Homo sapiens
RSDLAGSPFQTRQIGGHDHRYRIRNQWAFMAVCIDDQPSATIWMTTWTPGVHPSEQALAAIHLSLQEQC

SEQ ID NO: 949176 - protein, 40 aa, Homo sapiens
FPKRDADPHRTTTLPVELECPDGEVMNEEHDVHQDLCLPL

SEQ ID NO: 949177 - protein, 42 aa, Homo sapiens
MVSIITSMGIMGVACCLVRRGSGLGHFESSERKPIITAPAHK

SEQ ID NO: 949178 - protein, 35 aa, Homo sapiens
SSLYPKYVELINQACPAQWLCRIAGDSLAVYVRDT

SEQ ID NO: 949179 - protein, 49 aa, Homo sapiens
SRASPITIAEPSEGREGMTCYYLTHVKAVGAVTLHVQVGLGVSVLHHHD

SEQ ID NO: 949180 - protein, 67 aa, Homo sapiens
SKRSTKGFFDPNTHENLTYLQLLQRATLDPETGAPISFSLSTVTVLPPCSFLQTLGEVEAYFVCLGL

SEQ ID NO: 949181 - protein, 70 aa, Homo sapiens
TTYRSVATKLTANSRVALSPNTANTHSDEAVDKAFTLAFENTWFKYKIANAFGNLELKEKNKKIWAITLF

SEQ ID NO: 949182 - protein, 43 aa, Homo sapiens
NQHLNLNPHKGSVRAREANREAGLSSQEKHPESSHSGVTHPML

SEQ ID NO: 949183 - protein, 73 aa, Homo sapiens
VTSYAIIYSTKKTLSVCSKSKTDLGEIYGASPQSKKSRNSKNCGYYWNGIGHQPKNRKNLAEVGGFNMHIMEG

SEQ ID NO: 949184 - protein, 84 aa, Homo sapiens
CSPRTACRLRPRRLTTQHTQRVHVAGLSWVRLAQYRLSVKQRTPWRLKDGESSAPCTFLLDSGLVQADQWQKDCLKSKNCVNND

SEQ ID NO: 949185 - protein, 109 aa, Homo sapiens
MYDYTSLHHNSSLNNLSFDLTHWGVKRLLTLPQLRQLHLWKERAHRLQIELDELILTAEGVSTPKVCNTARVIKEGAVSVKPRMLLFESLVQSARTLSVSALILKLNLG

SEQ ID NO: 949186 - protein, 67 aa, Homo sapiens
FIVGHAKSYFLQGGPSFHFQLHPPHTLTEFTVAKDLRQHQRFWHRLADVFGSTRQITAQQGVRGLYE

SEQ ID NO: 949187 - protein, 96 aa, Homo sapiens
GEVYQCFGAYLYSLSQIRCQLLNPMVACTMTVGKLAVTDQKDKNAEVHGYMDTLHQAKKQLLYADGSDKTLGISKIPALSVLVSTNRIEIIKQHFN

SEQ ID NO: 949188 - protein, 82 aa, Homo sapiens
MLLIDNLPAHHISLAVDHSLTAGHLNLVDHRLAGHRKVLFHLGFLIIPCFAAIPGYYMVAGYISSAYDSHKHHRTVNNLTDL

SEQ ID NO: 949189 - protein, 57 aa, Homo sapiens
HPFVNDRTAGNDAGIMLLNHNMTAHHLSLDVDHSLTAGHMNLVDHRLAGHRQVLFQL

SEQ ID NO: 949190 - protein, 62 aa, Homo sapiens
MGLLALTTGLMLLYHYLTAHHMSLDVNHSLTAGHMNLVEHSLAGHRKVLFHLGFLMIPCKAA

SEQ ID NO: 949191 - protein, 55 aa, Homo sapiens
MSQKGLWRTTHSVKHNVSSRRKLILYDMKMINIMHCYNYYMYAVLQRHSIKFALI

SEQ ID NO: 949192 - protein, 150 aa, Homo sapiens
AGDIKPDYSANSAMIPQMHKGGRYPFRIMIVASVMSPESYLGSPQNSPSIRSISKLESLPSPGVLCGSEPIQKLTILLERRWTQQKKTGEKMDKEADKKWSKTRQQPLGTDRRRGRSRRLLLVSAKSWKKKNEALKERADSLAKEIQLLE

SEQ ID NO: 949193 - protein, 41 aa, Homo sapiens
MCLMKIYGVTDLTSITSWRTLSYSFQSHLKIVSALFESEVR

SEQ ID NO: 949194 - protein, 121 aa, Homo sapiens
CLPPRSSSSSAYSMCRPAPAAFYVDPLPFNDSYLYFLFLMIYYITFSLAYFIVGISCIIHITRKICVNLLYMLSERNMVNSKLFGSHDLADPRIVSSPKPHVQGSAVDIIDGPTSSFQNII

SEQ ID NO: 949195 - protein, 49 aa, Homo sapiens
  misc_feature (19)..(19): Xaa can be any naturally occurring amino acid
NDMVCGDIPFRAYEEIIRXQVFVQAEGLFRNVSISLDGALAVRPSDRPT

SEQ ID NO: 949196 - protein, 84 aa, Homo sapiens
IRRKRSVLVLAKASTEGQPFFTTAGELWWKTVLHMHTYTCGVKLRGEDDVVMLADLADEAALGAQVAVINMLGGKYNQGLKESF

SEQ ID NO: 949197 - protein, 39 aa, Homo sapiens
TPRYSQMRDIADEGYWLIEEYAMSDFRSVSRKQMELVII

SEQ ID NO: 949198 - protein, 37 aa, Homo sapiens
LTRYRPGTVALRDHFTVTPTRPPEPSDFAKLPFHASG

SEQ ID NO: 949199 - protein, 100 aa, Homo sapiens
MRPTHFLVIPKKHISFISAAEDDGESFLGHLMILAKKCAAELGLNMGYRMVVNEGSDSEQSIYQIISMPLEAGKCSGLLAKHVFVYNIMSYPQHHIDRND

SEQ ID NO: 949200 - protein, 40 aa, Homo sapiens
RDLTQMADEMRRNLELKEKGRHVELGAIENKLESTGNFTY

SEQ ID NO: 949201 - protein, 51 aa, Homo sapiens
MLSSHSSPQLLATGLQYPQLLLAPLKPCTEPVVAASARPAGDSVNKDSMNA

SEQ ID NO: 949202 - protein, 61 aa, Homo sapiens
RLSCAASAFTFSHYAMNWIRQDPRKALQWVQQFVLVVKNADYADSADGPLHHTPRDEFPRI

SEQ ID NO: 949203 - protein, 77 aa, Homo sapiens
FNWVLEYVPEARAENGRQLALSAADACGGCRRSAQQVGDRRLYSAGSPELLQWEPGVVMEQVIFHPHPRRPQPELKD

SEQ ID NO: 949204 - protein, 52 aa, Homo sapiens
MFQKRVGRFITVAAAPWARSNQGVGPEASPCVQWVLLVCEKSNFWAQVMKAD

SEQ ID NO: 949205 - protein, 88 aa, Homo sapiens
MMTGVIYSVQPYTKEVCSHSRLDEIIRHYQLLTEENIPENPLCFLYPRIPRDEAFGCYYQKKVNLQERRKYLKHRLIVVSNRQVDELQ

SEQ ID NO: 949206 - protein, 94 aa, Homo sapiens
  misc_feature (2)..(2): Xaa can be any naturally occurring amino acid
GXERSERDGFRFNGVLDRDCAYGAVSMSCKEKGNKALKPVGTLMMPYRCYSEAIKLGSRTNHCAVQQPVSAAYAKKKGGDYQKAYEDGCKTVEP

SEQ ID NO: 949207 - protein, 93 aa, Homo sapiens
MMKCVILSLLTYTEGAAHSAYVIICDIGCSLWRIYLKNPWGFFYPRIPRDEAFGGYYQEQVNLQERRKYLKHRLIVVSNRQVDELEKTAFERR

SEQ ID NO: 949208 - protein, 119 aa, Homo sapiens
  misc_feature (54)..(54): Xaa can be any naturally occurring amino acid
GAYPGINKNPKYKKLKDAIEEKIIIAEVVNKINPCYWEEYISGFSFYNKQKSPXLADPKVLDNINVSRFPLAGMGPKVSDELTKLMASSPSTLKEGSEAASKGDFLFSSDHLIEMVANP

SEQ ID NO: 949209 - protein, 58 aa, Homo sapiens
CHNQEATDKSLQACKISDICLFSSSTSIEVSFPGAHSKFTSKHKAINQQGFIFHTASG

SEQ ID NO: 949210 - protein, 34 aa, Homo sapiens
ASYLNQIYLNPVLLSESREKYKAIRLIFVIMAIW

SEQ ID NO: 949211 - protein, 100 aa, Homo sapiens
CIPTHCNIVDLYVQDHNSDTGLNYGPQSRRSQVYAETTHKPFITSNNSNPVQDEDAVALTCEPEIQNTTYLWWVNNQSLPVSPRLQLSNDNRTPSLYSVS

SEQ ID NO: 949212 - protein, 62 aa, Homo sapiens
TIAQQRGESKALSLPPLWAGTLAWDDDYWSVEPYGQGPWLEAGCHEEGQGPPNVHQVTCLYG

SEQ ID NO: 949213 - protein, 56 aa, Homo sapiens
MARAEAALELKKKGSTWCWVHREQGESKGIHLRAQERACREEKGPAVRGIGVGDTI

SEQ ID NO: 949214 - protein, 102 aa, Homo sapiens
MGMSHQRASVFPTGMLPKGQCCAVGETLQGAGGSKDRAFKAAAEAWDVEISVYSPIPDGSSRAKHTALDSALQAIHINSKLLGFLHVPIRKAKHTTKYTLSH

SEQ ID NO: 949215 - protein, 50 aa, Homo sapiens
RRCHIAQEPLEFSISVKQRPGQQVATGVRLLGRNSNSKRLLSYVATLKDN

SEQ ID NO: 949216 - protein, 115 aa, Homo sapiens
IPYLSQHHVPSLNLFRTMGCATGRGDAVGEIVGIITRHNVTYEFLQGRLRQHYQTILTAQPTLSWCCLGEANHAHSGGHSWLGLFRGMEDSQSPTHSESRESSDTLLVRGPGGGF

SEQ ID NO: 949217 - protein, 53 aa, Homo sapiens
EVSWSASDSALKARTGPHGGWAVARPSGGTSFGVSNVCSLRAGTFLNIKMGVF

SEQ ID NO: 949218 - protein, 122 aa, Homo sapiens
MIIATHRNTDERVISLEKSDELRGYIYFTRSFSEKAEEESERLLRELYLVDVLRADRTTGCHGLELRGHFYDHRFSSYYLSLAPEMRIPKNGIEKHLLRETFEDSNLIPKEILWGAKEAFSV

SEQ ID NO: 949219 - protein, 34 aa, Homo sapiens
MYVDTAQGSRIRPSKYAGDSAGAPGDMGQQALSH

SEQ ID NO: 949220 - protein, 89 aa, Homo sapiens
VLLSWHVTVQRKRKDIAMASCRCSTSHTDMVETLCMHVTTRDAGKTDVTGHVDVTHIKLSPQDRPGENGQFTQDGDDVTHRHSDNTHHD

SEQ ID NO: 949221 - protein, 95 aa, Homo sapiens
YELHDEDIRLKYTFDQATGGTAPFETHSDTHALGLLNVTSEQLMVDEGMAREVINRIQKLREKCNQVSTDEIPVYYKTKSEGSYLNSVIERHPEI

SEQ ID NO: 949222 - protein, 85 aa, Homo sapiens
QQCISAGSSGTIVSLLLEVAGGRKLKSKPALGVTSVDQEVQWGPGVTNRTSITTCDLRFLEWHGDPSTSLTLHGYAMLVLLACLF

SEQ ID NO: 949223 - protein, 43 aa, Homo sapiens
SWYEVQVGFRNGWIQVIMFLTVMIRAQFVIRPLCVEVAVDIRP

SEQ ID NO: 949224 - protein, 109 aa, Homo sapiens
SRFLVDTSTLTIIATDTRMGAYYFCQASHDTTVGVRRVYPADRPGITPKAAPSVSSVPALLCGASANKATLVCLISHFYPGSVTVDSLADSSPVKAGVETTTPSKPSNP

SEQ ID NO: 949225 - protein, 33 aa, Homo sapiens
TVCHGYLLQRKKEPSESSSVHGELAIEEEGAVG

SEQ ID NO: 949226 - protein, 52 aa, Homo sapiens
MIAHAPNTVFLMLHMPSAEPGCPHTGTVVATYTLHRRSYLLPQKFFSSERWS

SEQ ID NO: 949227 - protein, 38 aa, Homo sapiens
LRFLAGAEQDQALGALLCHSSDLGRLEGGIVMYGGAMN

SEQ ID NO: 949228 - protein, 40 aa, Homo sapiens
PRLDRLFTCRWSEECPPMLDATQQQQQQVAACEGRAFDNE

SEQ ID NO: 949229 - protein, 54 aa, Homo sapiens
MTLRTEEQILTATVDTANVFLQIDNALSGLLDDFLHQCMSTELTVRTAVWKPDT

SEQ ID NO: 949230 - protein, 137 aa, Homo sapiens
LLVGWREVYGRTTSDFIWRRHIIGCGIHLGYEDIRVFAELLAKYFILGLQVLTVTTPRGIKFKQHIFIYIIHYFIKILCYQYLHRPIIALWDRSRLPVSLQIGIKVIMQEPLKSLPITRELLLHDKLISFNSSDSNN

SEQ ID NO: 949231 - protein, 105 aa, Homo sapiens
KHKAKEKRPRSIFEQLTESERVRRAHLNDLENIIPLLGMGLLYSVSGPERSTDMLHFRLSVGARIYHTIAYLTPPPQPNRASRSFVGYGVTLSMAYRLLKCTLYL

SEQ ID NO: 949232 - protein, 61 aa, Homo sapiens
MAVDGSGPLKPYRRPSSKKCTNTFKVIQVGSAYTFYPVICSKILLDLFSFAQCYTVFWIGK

SEQ ID NO: 949233 - protein, 38 aa, Homo sapiens
SQIEHISSLIKLSKADVKRKLSQMVLDRKFHGILDQGE

SEQ ID NO: 949234 - protein, 44 aa, Homo sapiens
SFFSLGQQATEVSPEQACDQQPGRSPGPGVACTPVSAGPCVDKS

SEQ ID NO: 949235 - protein, 51 aa, Homo sapiens
ARIVCTPQPAQEPVLGRGRGEIMALEAHKIQRECSMYKDCPKHTWTVINGA

SEQ ID NO: 949236 - protein, 123 aa, Homo sapiens
SSTSSSEFVFIVKVMESVLSTITSLGCFITRISGRAMNLPRLLHSSAPLWCCPAQIPAFGPGLPGCEGSAQQPWQGHQLESLPHCSPVALLLPWPLKLSSLSCQPQKLKPVDYEYREEVHWAT

SEQ ID NO: 949237 - protein, 63 aa, Homo sapiens
EPSHVCRFFVLVNAYASVFFLQSPHLMVPTLHHPPPPGRGYPEGAPLGSSVSSWGLAVDELTG

SEQ ID NO: 949238 - protein, 40 aa, Homo sapiens
TLERSHHRDRHLGLIPPSPLKGPEEGVRDVSCVELGERQK

SEQ ID NO: 949239 - protein, 59 aa, Homo sapiens
  misc_feature (33)..(33): Xaa can be any naturally occurring amino acid
PYERNVSSCKSSGADIDAVDIEERASPLIHAVXTTALHVQLLLQHGANVNAQMYSGSSA

SEQ ID NO: 949240 - protein, 58 aa, Homo sapiens
  misc_feature (14)..(14): Xaa can be any naturally occurring amino acid
LIRGSRADTTVRGXKAVAEKVVYVGSDPAVLLTIPDFHLWPRQEADEDYICDRSTQLT

SEQ ID NO: 949241 - protein, 77 aa, Homo sapiens
MCMSGVEHECAAYYTIAAYYKSTAASTIDPDDGGFDMGLRASEVESVNSRSLYIINSSLCQRQSSSSCRLRRFDSTR

SEQ ID NO: 949242 - protein, 87 aa, Homo sapiens
SVITVSPDTVLGDKTNPSPQQCKAVLDMSWNVCWAHSTYSPTAEGRPPSDDKQTLANTLYSSREGDKTHMHEETLTPVSNGIGMLEL

SEQ ID NO: 949243 - protein, 67 aa, Homo sapiens
HTGVVGDRVSCTPRARYTVARLGMAWAAPAGICLVFQLRNTTFDRGLACRGIKEEVVIWSKVPGLVR

SEQ ID NO: 949244 - protein, 49 aa, Homo sapiens
LIGNGDDLACQAARELFSSEELEAAVAISCSKSSDDVAQLSPLYVTALI

SEQ ID NO: 949245 - protein, 52 aa, Homo sapiens
MGALIQKKLQEEVEKYQQLQKDLRKSMSGRQKFEAQLTENNIVKEKLALLNG

SEQ ID NO: 949246 - protein, 99 aa, Homo sapiens
VRVLDRVNLTERLLPKEYYFTPSGVQSLSIQMSVYILDKKADADRIVYENPDPSDGYVLIPDLKWNQQQLDYLYLIAICHRRGIRSIRDLTPEHLPLLR

SEQ ID NO: 949247 - protein, 137 aa, Homo sapiens
MRKIAQLIIGGWETPGMCITSYGLDVLMATADGLRQRSGGLERPVCPGQVSCSLDPSGFGAVWTGDNYCRAESNVRKSSIRYVSSSLELGGTCLSVGRMSGGFYKNPEPELLVRWYQMGAYQPFFRAHAHLDTGRRE

SEQ ID NO: 949248 - protein, 192 aa, Homo sapiens
MPVSGENLVEEALLSREHVLELENSKGPSLASLEGEEDKGKSSSSQVVGPVQEEEYVAEKLPSRFIESAHTELAKDDAAPAPPVADAKAQDRGVEGELGNEESLDRNEEGLDRNEEGLDRNEESLDRNEEGLDRNEEIKRAAFQIISQVISEATEQVLATTVGNVAGRVCQGSQLQGQKDRAVSSSPKTAWP

SEQ ID NO: 949249 - protein, 145 aa, Homo sapiens
KIYQRELGVYHLSKMSEPLLAGYPQIPVVSFTILGGQAMLKVVTGDCLLPSLPGSVCRAVAEQCSTTLRCAWGLPRPLGPDKEGKRQLTGPNASHTEGLPCGAGTAGVQGVGKPPLYQGRLAESGLQIEQLRWLRRGRGKKQKRI

SEQ ID NO: 949250 - protein, 76 aa, Homo sapiens
SSRFLRIPALDPSYCEQLVSVELGTTHVPVVQKKRSHNNGSVKSSRGGSVLFLLRGLLFVGLLLCYRLFCVALVFC

SEQ ID NO: 949251 - protein, 89 aa, Homo sapiens
PWMRPIVAENPEYFSEISLKPGAVLPPPPYRHRNTVVKLSCGFLGGETHLLQFPHPPLFLWWSSFYPKASSFDTSQWKIQRCNDSYVLT

SEQ ID NO: 949252 - protein, 81 aa, Homo sapiens
IGVGECQLTDCISRLLNHCLDHCSSSAFVSKGYLCKNFFFYARNSIREAQMSPLNNRALNTHIEQQLCWSVCAVNHIKESA

SEQ ID NO: 949253 - protein, 54 aa, Homo sapiens
LKGGDDAEKVENDKLEGASKQREKKIKVQCISSTRLRTRSVSTCDHFMGVGAQP

SEQ ID NO: 949254 - protein, 104 aa, Homo sapiens
ASSSGHCLQVAVAPPPMSCSIEAARVCRCAAVSSNCTRTPSGSWQARLRPHHHPSARPERNVGWKVRGLEQPCSLFGLLLEAVPFAVILVDSCQVSPGHLHPPI

SEQ ID NO: 949255 - protein, 35 aa, Homo sapiens
  misc_feature (21)..(21): Xaa can be any naturally occurring amino acid
TLPSGDPLGEKWDAPNWRSRXVIKSNFKPSLLADE

SEQ ID NO: 949256 - protein, 128 aa, Homo sapiens
HVPDSDYWRAVHESLGVGGAVDRPLPSACGSSSLSHGNIFFTSSSLRGRIHLKNSLYINLLGSFHINTQSYLFHCRLWRHFIHFPLPVSIFHCTFPIICTSLMVLHSLWVPVGLTGAQGYQHGHASLK

SEQ ID NO: 949257 - protein, 32 aa, Homo sapiens
SHSPRPFTETLTESMLDSAELKEQIQALMREN

SEQ ID NO: 949258 - protein, 58 aa, Homo sapiens
WFHEYSYCLSRRRRQAGLREKPLSDLAVSPTWHIGQSVILEYLYHHHDEAISIKAISR

SEQ ID NO: 949259 - protein, 161 aa, Homo sapiens
  misc_feature (49)..(49): Xaa can be any naturally occurring amino acid
  misc_feature (93)..(93): Xaa can be any naturally occurring amino acid
KDPCIDGSLLTADQVRPSRTLLSPYDGRTWAGLEVVRSPCGAALSCSNXTRSLLSPLGHQSFQFDEDDGDGEDEEDVHDEEDVDEDAHDSEAXVASLRGMELQGCAGTQVESENNQEEQKQVRLPESRLTPWEVWFIGKEKEERDRLQLKALEELNHQLEK

SEQ ID NO: 949260 - protein, 81 aa, Homo sapiens
MEGVYRKQTEANVEAEFLVWGTNVQGGHIDDGQAGGLGGFVFNHCLAPGSGVTRAAIDSDAVGEAAVALGADLDLVGALEE

SEQ ID NO: 949261 - protein, 128 aa, Homo sapiens
TGTLTGSNFNREGKSYSFLHHEVEAEMETPHSHLSGTGKMIGEGAQVSVGRGSWWTWGWGGLPTSSHYAYKNTDTCRCLCRNKARVLQVTKGRAGTTLASQSHTRQLSHTLQAVRDTSEPWALSLLAA

SEQ ID NO: 949262 - protein, 146 aa, Homo sapiens
PRIQISTVLCELINALYPFWQAPVKKIQACTISFKQMEQISQFLQAAERYGINTTDIFQTVDLWEGKNMACVQRTLMNLGGLTVARDDGLFSGDPNWFPKKSKENPRNFSDNQLQEGKNVIGLQMGTNRGASQAGMTGYGMPRQIL

SEQ ID NO: 949263 - protein, 128 aa, Homo sapiens
  misc_feature (12)..(12): Xaa can be any naturally occurring amino acid
MLTGSGTVFPAXAYVQSYPSYLSQMACPSIHSTTPLSSTRGTGLPAITDVPRRISGASELGPFSDPRQFPSISSLTESRFSNPRMHYPATFTYTPPVTSGMSLGMSATTHYHTYLPPPYPGSSQSQSG

SEQ ID NO: 949264 - protein, 70 aa, Homo sapiens
GGVTVAGDYFQYIPLIHIPILFIGSKYLCLQILFCWLLGNQSTSCSFFLLAVEPEEDAIYTRITILKNSM

SEQ ID NO: 949265 - protein, 74 aa, Homo sapiens
CPAICRLHAAETLYSERCCWTSQLRRGILSTWTILGKSSEVHAEVPSKQQARQKPALNIFLDIKDNLQPKVNNK

SEQ ID NO: 949266 - protein, 105 aa, Homo sapiens
EGGQDELPTCPPPPGLFRRDFGSFEHILQKRLSISFSGLLLSISLVTSFTRNSHTLQETSDFAETSRFLMGSTSSRAGMTFLEATLAGTRVCMGISFTSSQNPTS

SEQ ID NO: 949267 - protein, 81 aa, Homo sapiens
MRLTLILTRPARRTENYYPSERLKYHSPHQARDDMPDAATQFSESGPYKLGGVLALLLPILILAIIPILHISEQQSIIFRP

SEQ ID NO: 949268 - protein, 65 aa, Homo sapiens
MLYCKEWKKKYVEQEVVSQRTFNQNTAFEFKIQYTGLWGIGVATQKVNLNPIPLGQRYAQSGDEK

SEQ ID NO: 949269 - protein, 162 aa, Homo sapiens
MRINKRIGSEYCDRNTQIFKTNTQTYRESCESARYYNQSEAGLTIIQRMYGCDLGPDGRLLRRHDQSAYDGKDYIRPELRTLSSLDRGVHRGSDHPAQVGGAPVWRSSGEAYPGGPVRGVGSRRYLENGKETLQRGEPPKDNVTPPAGLLGPIECHPEVLGP

SEQ ID NO: 949270 - protein, 112 aa, Homo sapiens
MGRESRVTVRARGSSAQSAQASLVYPPPWSQGCGGHPQWILYPPRQPRSGVGVGGICSLKWAEDHSGSEAWGPVHQIPSRHSRAGGGAGHAGVPPSGTACEVAVDGSSKVDE

SEQ ID NO: 949271 - protein, 63 aa, Homo sapiens
EDLWGEVEHGGQWIVLVSSTAMGGSQPLPNSAEPSTWDSNCSSWPMKLTVGRDDASPLLHKLK

SEQ ID NO: 949272 - protein, 117 aa, Homo sapiens
QPHLQEQHDSMHRFAGMLIALGPRFMPGTLCAERKLLEGNHELQNSFMARGNPLWEVQLNKAQSLQFLLSAETVVIILAAQFKVKALKVLSNAFWCHSIGDQPQVPLHGDTGSGTGL

SEQ ID NO: 949273 - protein, 84 aa, Homo sapiens
HTIDSAWIVHPRGTVCKCEECGLGLQSECRLAAPSAESILDKTPYECDICDKDFRLPYQVVTYHQNAPYGYKALEMRSVLPTFV

SEQ ID NO: 949274 - protein, 39 aa, Homo sapiens
RGALENNQLWRNCCHISWGNVGFVVSPQEALTDDQWTCC

SEQ ID NO: 949275 - protein, 149 aa, Homo sapiens
  misc_feature (114)..(114): Xaa can be any naturally occurring amino acid
MHTIYQKLAAIASIRLMDEKQSCMSSDHHQYSTTEFDHLSPRNGADFDIIGIKELLEGLDHSVHLEENLTARAYCSRRCCLCFTNQSTSPLTAHSWYSCLMASWRESAELCMMXKKQMCCFDDTIFQIFNKRNCLSLKDKPKVIIVQAC

SEQ ID NO: 949276 - protein, 38 aa, Homo sapiens
GNKAEVIVQVSKDVFELTDDSFDKNVLDSEDVWMVEFY

SEQ ID NO: 949277 - protein, 32 aa, Homo sapiens
AEVIVQKKDVIELTDDSLIRSLEVKMFGWLSS

SEQ ID NO: 949278 - protein, 167 aa, Homo sapiens
AAHHINGTEKVSFRNKSKLRNSFKFLVGVADLFLVPGKNTAFDGCERHSGFVLTIPGLFSIGLYSLCFLYTRREITVTNMAKQPTEIRALFAILKGEAGSLSGTGIRVLVKARLVSSPRVRFTQYVPDPLKVRLTVSRHISSTSTGLQTVFWVISQVGSEMMVQTSV

SEQ ID NO: 949279 - protein, 68 aa, Homo sapiens
  misc_feature (29)..(29): Xaa can be any naturally occurring amino acid
IVFYASDSVATEKAVELAANKRVICFIAXQAPMNAIIYNNNEDFQVGQAKVVLKSMDDQVTVIGAVVT

SEQ ID NO: 949280 - protein, 34 aa, Homo sapiens
GIITRITDGHCHCQPCELQRWIQGGFHLMWLRCY

SEQ ID NO: 949281 - protein, 128 aa, Homo sapiens
QQRSNINENLLNPSLGLQGWQWAVGSVISDESIQGNTLDLVQLKQNEAAFSVAVCRFSNTGEDWYVLVGVAKDLILNPRSVAGGFVYTYKLVNNGEKLEFWHKTPVEEVPAAIAPFQGRVLIDVAALL

SEQ ID NO: 949282 - protein, 62 aa, Homo sapiens
MSSVCTGRDCRRSSSSRARRCSDARSGAAPVGAQGPLTLKEVEELEQLTQQIMQDMELRLLR

SEQ ID NO: 949283 - protein, 97 aa, Homo sapiens
MSDPYLIKRNGCSMATYWHEKGGYEDVENLGCRLYNISDQHAAPWVVSGCHQLLISKRSSRALSFQAAKAIQLNSNESSGSAHFKGAALQATIGRIQ

SEQ ID NO: 949284 - protein, 126 aa, Homo sapiens
SRISLGCGYLRLRIEIRTGFAADTVSHTLAHSCILRQTDGPGIPQGLNAVSDRAMQTKVNFLMWAAVTVLLVLTGFVAGRYFLSTSRYTPARTFRSSQSVWHCDRTGVCGMSNIATAVVMACRTCH

SEQ ID NO: 949285 - protein, 60 aa, Homo sapiens
MSDDELSLVLGTEKENSGVNLMRQRVMMMVRHTSVREQWQKGISRMRICYLSMLLEASGA

SEQ ID NO: 949286 - protein, 57 aa, Homo sapiens
MFGGCDKSYLSGCLNAVGMNDKIVLKEGKGTADETSKSGKQSIAIDDCPSTVCATHS

SEQ ID NO: 949287 - protein, 94 aa, Homo sapiens
  misc_feature (1)..(1): Xaa can be any naturally occurring amino acid
  misc_feature (65)..(65): Xaa can be any naturally occurring amino acid
XKRMIFITCLKKTKRDEADMKNPEVPRIKSVLGFKASEAERRMEHSLVTCRVNLVPVDPVDPEVXSRKPSMNSDMGKVSKNDTEEESNKSATTD

SEQ ID NO: 949288 - protein, 62 aa, Homo sapiens
MTLRTSLPGPQIVCPDLTLPNRAVRGTVHAACRAKYVLPAGRSERLGEQNFHKGRCFVEHVT

SEQ ID NO: 949289 - protein, 58 aa, Homo sapiens
MYGLGKSRFPQEKPTIFPCTDDNTDLQQNLEKRQQIPKEAPSSTTQEDPSQKGGFPPP

SEQ ID NO: 949290 - protein, 97 aa, Homo sapiens
AVTLEVPDFDAFSSMIGADGFREKCLQQDQRTESEIAFLGVMTIVYKNSIDLFLYVVGSSYENELMLMSVLTCLFESLNHMLRKNVEKRWLQENASK

SEQ ID NO: 949291 - protein, 200 aa, Homo sapiens
  misc_feature (60)..(60): Xaa can be any naturally occurring amino acid
  misc_feature (65)..(65): Xaa can be any naturally occurring amino acid
EIPADTLKREVQPRNIVHMYDGSVAAFLCVQTISPTWLSTLGWSSYRQCCEEWVCDEDSXQDPMXDQDGLLGKELGFGASEVELTRNNELIAVGKGSSLKRLPVFGMEPRILYNPLQGQKCIVQTTSWSQCSKTCGTGISTRVTSDNPECRLVKETRICEVRPCGQPVYSSLKKGRNAARPRNPRTSQVYLRWMFECDTG

SEQ ID NO: 949292 - protein, 30 aa, Homo sapiens
MNLLVTLAYGVVWSRVVPEAIGEINFYEAS

SEQ ID NO: 949293 - protein, 140 aa, Homo sapiens
NSAHCIDGAWLHSSVSQELSLPNWAVPPLGWSQYPGSAAEEWVCDEDSIKDPMEDQDGLLGKELGYDASEVELTRNNELLAGWTRQLTEAAPCLWNRRLESYTTLYKARYVLVSHNFMVPVLTDLLDLVSPHESPMTILS

SEQ ID NO: 949294 - protein, 108 aa, Homo sapiens
YRHRKSAKEKAIAIYNVKDTPSFIMDPKELDKVFKSLHSQFHDLLLLKIGMQVFNYLMAGSLPDQLRKAPNRDQWSMTPPIVNAYYSPPKNEIVVPAGILQAAFLIRS

SEQ ID NO: 949295 - protein, 41 aa, Homo sapiens
DGDRNPKEVGLTKFNADESEDMVAEKGLIPDVCGVTYIPMS

SEQ ID NO: 949296 - protein, 37 aa, Homo sapiens
  misc_feature (30)..(30): Xaa can be any naturally occurring amino acid
SKQASRCLWKAPVHCGQVHIGQVIMSIRTXAAETRKH

SEQ ID NO: 949297 - protein, 34 aa, Homo sapiens
MALTGSKQACSAWKAPGTVARFTFGQVIMSIRTK

SEQ ID NO: 949298 - protein, 58 aa, Homo sapiens
LVSYDGGRTFGSPHECRPATCPEGHVGDVLTPQPSGQVAGPAFLGSGVRFGILVLSCS

SEQ ID NO: 949299 - protein, 56 aa, Homo sapiens
HVVPRPVDWWGLGVLLYEMQVGESPFPGDDEEEVFDGIVNDRVSLTPRFLYSTFKW

SEQ ID NO: 949300 - protein, 46 aa, Homo sapiens
PRYRGSPFPSGYSGLITSPPVDIKGDNAILDEITPKRIGDCPNTYD

SEQ ID NO: 949301 - protein, 48 aa, Homo sapiens
AICFTVDDKEHSIQGQRSEGSTAGTWSIEVSPISTPNSHTIKVGTKSK

SEQ ID NO: 949302 - protein, 40 aa, Homo sapiens
MSIRTKLQNKGACDLSALRRANVQVSCAARKIHYLNRQWW

SEQ ID NO: 949303 - protein, 64 aa, Homo sapiens
  misc_feature (51)..(51): Xaa can be any naturally occurring amino acid
VLTVWDRKMNSIYKLLPSCELWHVVRSHQRCKALEKTLAMTLTPLYKPWVXLLWLVLVRHLSTG

SEQ ID NO: 949304 - protein, 49 aa, Homo sapiens
QEVGVANLVVEIAVKDLFLIIPWEWGLANQHLVEQHTQSPPVHSSRVRR

SEQ ID NO: 949305 - protein, 74 aa, Homo sapiens
PLTVLTETRLSHPFSIDVFKDYIYVFNFFNNRVFKIQKVWPQPLVNLTGGLSHASYVLLYHQHKQPEVTNPCNR

SEQ ID NO: 949306 - protein, 72 aa, Homo sapiens
LTVRQAQTGIELLCTAWTVPGYHIGQVIMSSRTKLQNQEHVIEALLLRQVQDSWPPEDPHLIEVALSPMFTC

SEQ ID NO: 949307 - protein, 77 aa, Homo sapiens
HIGSLMSAAPPLARGHEWGCTWPQWHLYQPLLMPPLSTNSSAFNFVKPHFFKMCIFWRTGILRTCACAGVQSHAPCT

SEQ ID NO: 949308 - protein, 38 aa, Homo sapiens
MSISSKLQNKEHVIEALDSLTGFLDVLPPLLILTNKFY

SEQ ID NO: 949309 - protein, 44 aa, Homo sapiens
ADRCEMLGRSVHVLWILQSLFRIKGPTQCLQNASGAHKEGETVT

SEQ ID NO: 949310 - protein, 127 aa, Homo sapiens
LNGAEQEENLLVRKEGGSTLEALMSAGPAIMSRRATTGDVLDPTAIWDEPLFSHHVFKFISIELGEAPLLLDVDLLAARKLELGPAQGLNHMLLVLQLGADGLDNLANVNPGHSALGFSKGTSLACL

SEQ ID NO: 949311 - protein, 45 aa, Homo sapiens
TGGGFSASESCRSLLLGPASASSVENLISPTDSTPALLSAIVSPF

SEQ ID NO: 949312 - protein, 126 aa, Homo sapiens
SPDSKKNYGEYKEGGSTLAALMSAGPETCPEWPRLGMYLTPQPSGMSRYEATMSSNTSALNLVKPHFFEMWIFWRPGNLNLALRRASNHMLLVLQLGRAGHDTLAIVNPGHGALGLAKGPSHAYLK

SEQ ID NO: 949313 - protein, 55 aa, Homo sapiens
NVLTDDATTGPVLDLVSEMEIIEDDRENKNIINLLCACTQGGPLYVLVEYAAKVN

SEQ ID NO: 949314 - protein, 192 aa, Homo sapiens
MPPCMVLTGLKKGELVIEPVSSRPIPRWIMIRWNRSDHVWNRFLILISSVSVLRFRLLLHPLPEGLGASADRKKDPAFGGKLDAPSSPIPGPPCGVDQNASPSKLSQEALIQSMDRVDREIAEVEQQILKAEDGNNNSLKKRQVNLLSLRSPLSPPPVVQNHRRYSPSGFIDETSANKQKTLIKILEGLWPK

SEQ ID NO: 949315 - protein, 71 aa, Homo sapiens
LQNRHEVAEKAPGTVARLTLAKLSCPFRTKLQNKEHVIEALRWAKYKFPGRQKIHISKKWGFTNVQVLSEF

SEQ ID NO: 949316 - protein, 53 aa, Homo sapiens
GVEDPPFPTVIYVVTHERDGKKYKLFYGMSSEMAMKKKAGGVREVQEPQTGKT

SEQ ID NO: 949317 - protein, 67 aa, Homo sapiens
SEYGSSGTGMPDTGSLLLEGVVGLPSSDRRGTGFHQIPAKRLLTGDCKFWYKSCNYEFNNLFQFIKN

SEQ ID NO: 949318 - protein, 75 aa, Homo sapiens
HFYNCKQVVDSSNYKYLYKYIHSACEEPSVLELVTPVPSPDERRGSPTAAFQSAASRVSWHSLVPLLPPFTVVEG

SEQ ID NO: 949319 - protein, 39 aa, Homo sapiens
VLVKKTEHSMFDENGLPTIDMECKELSKEAAKKLKKLFE

SEQ ID NO: 949320 - protein, 67 aa, Homo sapiens
KGEAAETVECQTQARCCWNGGVETSIPLSGEAQVSPVPAKGSSQALEFWYKSCIYRTQQLVAILIKI

SEQ ID NO: 949321 - protein, 62 aa, Homo sapiens
MPNKLAVSVCSRLYDYLVLSVVLSQDVKTRIQSRYNSSYVSERGQGVPEPGSGAALLTVGEG

SEQ ID NO: 949322 - protein, 47 aa, Homo sapiens
RLRWILHEATRRDDNSAGTQLRKLNKNEMMQSSVKVRWHTNMSLLRE

SEQ ID NO: 949323 - protein, 36 aa, Homo sapiens
ITPSHVGETCFSTQGTNGFYSQRIRYTITSLFRMEV

SEQ ID NO: 949324 - protein, 101 aa, Homo sapiens
PLAPIVSDFLKNSFTTNKRCLNRSAFVKHYGWYMFATDSCYLAGKITHVTKFGIHFQLLLVSCVLRNVYCMKNLKILMNEKCLRKKIAIFMQLCTVSLWRR

SEQ ID NO: 949325 - protein, 31 aa, Homo sapiens
MVLVSLVLVGIEDPFVFVYEQARSPPHCGGG

SEQ ID NO: 949326 - protein, 38 aa, Homo sapiens
HVVWSLFNTLFMNPCCLGFISIRYSVKSRDEEKMVGDV

SEQ ID NO: 949327 - protein, 68 aa, Homo sapiens
YLFLTGFYSRDHIIDPAYISYTNACSLSITLIATTLTSAYYTRGILLTLTGQARFPSLSNINDHTPTL

SEQ ID NO: 949328 - protein, 36 aa, Homo sapiens
EEVLGGLEGQVKVQVTKKGVIYGAKVTAIVPSNRVP

SEQ ID NO: 949329 - protein, 61 aa, Homo sapiens
ILEPPAQSQAASDPNDTGPSLIHQMSQGMMKVPYECGIQKRNSVLTTDDPGHPDMSSMCPR

SEQ ID NO: 949330 - protein, 45 aa, Homo sapiens
ICDKYLQQIFESQQYEVFRDVFKMMQAEETPKTPSQKSMDRLGKQ

SEQ ID NO: 949331 - protein, 56 aa, Homo sapiens
  misc_feature (9)..(9): Xaa can be any naturally occurring amino acid
ELLTVCVCXRPTTGGGGAYNSCSSADSAGPAHEVVIWFLFLDSALESSPSLHSPAD

SEQ ID NO: 949332 - protein, 38 aa, Homo sapiens
LEDSLALSSTATKVHQDCCERNASEEYLLCFSHMGLYV

SEQ ID NO: 949333 - protein, 79 aa, Homo sapiens
FPDALLSSSLCKAVIILGPMKDRVNDDLDLRNFQHKISDLCGATIQSPGKAQEDVTACVPWRIVCSTCFIGTRSRDHDS

SEQ ID NO: 949334 - protein, 68 aa, Homo sapiens
HICITLHSCELLTLTLTICLIENNLKPNNSMHCLLQFYLVSLLLPLPTMRSDVPSGVPDALTFCNSLC

SEQ ID NO: 949335 - protein, 34 aa, Homo sapiens
GDSKDPVQGAVHLELRLAAFAVRHSCRCLLAASS

SEQ ID NO: 949336 - protein, 37 aa, Homo sapiens
RISAMVATEDTQGSAEDMWVKTEGLGFSLTLEVEGYR

SEQ ID NO: 949337 - protein, 33 aa, Homo sapiens
  misc_feature (1)..(1): Xaa can be any naturally occurring amino acid
XDLSRLQPRGSSSSNSSAWRKVLHSCGNASSKA

SEQ ID NO: 949338 - protein, 34 aa, Homo sapiens
LEDPCLLEAGGCFFYQLTLFSSQDDIIDDVESFV

SEQ ID NO: 949339 - protein, 85 aa, Homo sapiens
MSVHMHVQHEGLRSPSPLRWEPSSQSTIPIVGIVAGLAVLAVLGAVIAVVMCMRKSSSASGGSCSHAESTYSAHGSDYSLILLYA

SEQ ID NO: 949340 - protein, 61 aa, Homo sapiens
SPPRISSVTRYRVFAIIIHIFQSDDVGVLAITAEESQSLLVVNGLFAQAKVSEFDVALLIQ

SEQ ID NO: 949341 - protein, 54 aa, Homo sapiens
SSVPHCYVPLLRAEETSSPVIGELWLFSRRHHHSCPLLEGSVSYWTCSRLDLIS

SEQ ID NO: 949342 - protein, 42 aa, Homo sapiens
ARVFPGTIARCLPGTIARNSPGTNAGIFPTIIATITLLNLYF

SEQ ID NO: 949343 - protein, 80 aa, Homo sapiens
HSTTTETTSHRTPSFTSSITTTETTSHRTPSFTSSITITETIITQYSQILDTDSAGSSESTPAVLEGLTLCAGSQRDDGE

SEQ ID NO: 949344 - protein, 77 aa, Homo sapiens
CYTFMLLQACRSVVLHIHAVAGMQVGGVTFTLLQEYRSVVLHTFMLLCSYHLHLQRCLVVRSGLGIFNLRAKTYNHC

SEQ ID NO: 949345 - protein, 58 aa, Homo sapiens
MAHLAKKPVSVCRPPRERRVDGIKGASHVSSFQGPDSNSVCDSEDQLSSRNAVVVRII

SEQ ID NO: 949346 - protein, 46 aa, Homo sapiens
MCLSPCFDITREEGVLTLWRGCIPTMARAVVVNAAQLASYSQSKQF

SEQ ID NO: 949347 - protein, 87 aa, Homo sapiens
RTPPTFGDASDIALELLNSEYEFDEGSIILNENNSVLSYKTDEKPILSLNTVTKVCQHKLSMTDIDADGACKITKNNNLANIIYYSL

SEQ ID NO: 949348 - protein, 93 aa, Homo sapiens
  misc_feature (4)..(4): Xaa can be any naturally occurring amino acid
GVSXLRRFTQNPAGEVLLVPLTWLMKDYEFCQSPRGQSSGEEDTVWFGKDGYTEPHLPSVHGGREAAKSLNKPNIFGEKDHLGDIIQGALGPV

SEQ ID NO: 949349 - protein, 34 aa, Homo sapiens
ATTPEDQRLLAHVTLELQHYHQLLEKVRIRDALR

SEQ ID NO: 949350 - protein, 97 aa, Homo sapiens
MRKGKINYNRNSSEITSYQNIISEFCSSPRTYAGFHMGTSQGTCHGRSRSRWNTGTQQHTSGMVLSCSIWASVSCNSSTVFTEPTIAMVFSVATHHH

SEQ ID NO: 949351 - protein, 104 aa, Homo sapiens
LGSPVGIKSVSLLHGTLAALVQLVPTEPLILDSEALLPASKAAVQHLAILFGLCIQCHTHLFHSLQSHVSPAPASVPHPKSNCSKVLSSAHLCHHSIAVPVHFL

SEQ ID NO: 949352 - protein, 119 aa, Homo sapiens
PKAQAPSVFRHTADAQLCNHQTCHMTAASILNYQNNSFRRRTHLTVAAARKNIPCAAVSPNSSKCARNTVADVDEKASAALYDFSVPSSETVICRSQPAPVSPTTEVSVGLINLKYLQG

SEQ ID NO: 949353 - protein, 103 aa, Homo sapiens
KFTILDCKYLRARMEEIWLACGTVCEKKFEEIRKLSCSENGEYMTVKQVGLRELNVEESYLNDDRMKTDENQPERLWGLNLWDAFLFRVSVEAYLEAVAAQVV

SEQ ID NO: 949354 - protein, 62 aa, Homo sapiens
RSGLIKVNAAAVEMIVAGTLVVQAAGASSASRRGAIWCVVHSCRVQGGGHVAEIYAIRQSIS

SEQ ID NO: 949355 - protein, 107 aa, Homo sapiens
GPVILDEDVIMISFLEASYHDDILGNRPPGLWQHGLTDSINLGHVDLTPLYTDTAVYTSESPLAREAELGSSSLTVACAVNHLQGPPVHLDETIAAYAVRHSCRCLL

SEQ ID NO: 949356 - protein, 99 aa, Homo sapiens
GRLPAPFSMSLSLLLFLKQQRSSALNPCIHKAQCKRHPLRGFSGPPGSKHQYPQAHSLTAFISFFLEMESRSVAQANEDFVSEKKKKEKEKLYLREKTM

SEQ ID NO: 949357 - protein, 153 aa, Homo sapiens
QSDSRPTPISPDYIMFQTPHHTYSKIDHIVGSKALLSKCNKKEIITNYLSDHSAIKLELRIKNLAQSRSTTWKLNNHENTYGNNFFKGGFWGSHGNNQDSSDSDNEADEASDDEDNDGNEGDNEGSDDDGNEGDNEGSDDDDRDIEYYEKVIE

SEQ ID NO: 949358 - protein, 60 aa, Homo sapiens
DIAVYHWTSMSKVTSNLRNASGCRRYACKYKLAKQVVILWYMARYALHKPRIQHTQARYV

SEQ ID NO: 949359 - protein, 210 aa, Homo sapiens
MSSDSLIFPVKAHPGVQAIGNLHSYQNFSMIFPENAGKNIYHSIAKDEHRQAWWLMPVIPALGEAEVGVSQGQEIETILANTAKPCLYYKYKKISRVWWRVPVVPATWEAEEENVVNPGGEACSELVITPVHSSLGDRARLHLKETIDERWVEGCECTAVLMRWLLAEASTVIENRAMKDEDKMEIQEMQLKEATHFAGKADRKYEEVTG

SEQ ID NO: 949360 - protein, 64 aa, Homo sapiens
MQVLEEENTQLTKIWGEKKAVLAGDLTSFCSIYSSGTNLEIQLFIFFFNPSLLKTLSAWVNFRS

SEQ ID NO: 949361 - protein, 132 aa, Homo sapiens
SYDVPDGALCNVDAYGTFQLRSLHRLTNPDCAFYYTRLQGKSKYRYGGLAPPPRATVTGYFSPHDHNVVSMPKAACVKQTYTYGILSDMEKYRMQSIRRESRARQKVTGPVMSQYDNMTPAVQDDLGGIYVI

SEQ ID NO: 949362 - protein, 34 aa, Homo sapiens
MVGRAGRPAYRSVKRVIWLDTNKSLRPSFPSGGT

SEQ ID NO: 949363 - protein, 72 aa, Homo sapiens
RGVIALVPTRMLYYKDWPANEALQHRPLEVSPIVDPQLYHVPPSSELAHNNISVYHNSQILREPESVKVGYS

SEQ ID NO: 949364 - protein, 76 aa, Homo sapiens
GIPFLAGFYSTYQLIDNPEYILHKRLTPIYYSHRYLPNKRLQHSNHSSDPNITRRTIPYLGLLTRQNLSLLLLDLT

SEQ ID NO: 949365 - protein, 75 aa, Homo sapiens
TDEAVQREMAVDLMVMRPLLLVLPGSVKRVSPGPGPEADMPALHTRKSVSVDLPVVHVGYEDILRMLAFFYGFVG

SEQ ID NO: 949366 - protein, 109 aa, Homo sapiens
RQKTKGNQRLKEVAKTVWDWELMNPIKPILQRPSEEVEEDEYKAFYKSFTKESDDPMDYITLLLKGKVNFKSILFVPTSAPSGQFDEYRSEKSDYIKLYMRRVIHHRRL

SEQ ID NO: 949367 - protein, 57 aa, Homo sapiens
MPPEKESKAERVVSSALLLGAQNPLSQADRAPQLFADPRPPPSAPVPVVSSLGSRAS

SEQ ID NO: 949368 - protein, 60 aa, Homo sapiens
LLVTIYSASHSSTVGRLGPLALNAHFVPLLSWYDTAFGSSTRVVDLIAHMASKEKNPKAP

SEQ ID NO: 949369 - protein, 37 aa, Homo sapiens
MPCLLVRIGGGLFGHTRGGTVYYTSQPPAYLLKDLIV

SEQ ID NO: 949370 - protein, 47 aa, Homo sapiens
CILRIPHSFGLPSSSRDSSPGFSKELAAALAAVPGFECVRSWIGARA

SEQ ID NO: 949371 - protein, 80 aa, Homo sapiens
EYPFYGHMLLPSAAQALMDSMGEASVVSAVSTVLVHLVLVALPGERGAAGTPSSKGDKGEPGLRGQIGNPGRDCARGAPG

SEQ ID NO: 949372 - protein, 86 aa, Homo sapiens
RVPLVCDVFCAPRVTSSRLPKRQCYRPYCWEKQRSAEVDLERVRVWYKLDELYEQERNVAHSHAKPTMGLLTLMLHQTIKNNPLTT

SEQ ID NO: 949373 - protein, 48 aa, Homo sapiens
AVQWNGACKQRRQWQGVVGDGGLTREWTKAQLLAQNQMPLGPEVFSIT

SEQ ID NO: 949374 - protein, 73 aa, Homo sapiens
CTSPKQVPAGCLCNLMGTSRVTTLRVLALPIFSAFGMELKPGLLYRVPFKAKDQAALEDGKPQDRQAAPVGVI

SEQ ID NO: 949375 - protein, 68 aa, Homo sapiens
VLLQFSCCNRDARYSVQADTALVKTPCFMGTLVCLPTTDSDHSTLPFFTQCVSGHFCGHTLLRESTVA

SEQ ID NO: 949376 - protein, 53 aa, Homo sapiens
RLRTVHSSPAVGRVIQAPDAPLTGQQQSALPGSPHGFRLRTFSSSIGLLCWIP

SEQ ID NO: 949377 - protein, 98 aa, Homo sapiens
FRRIRYPQRRACPVENYRVWLAHFAIFIAFVMIIDKLCKKDISSSMTISSVASRPPVTLRLVVPASQCGSLIGRGGCKIKEIRVSTGAQVQVAGDMLP

SEQ ID NO: 949378 - protein, 107 aa, Homo sapiens
MLSLPVSETHSRQLDAPRYPEMSGKLRRQLYGKLDKTPLIADVYYIVWWHVPPGGGGHHEETEMAPADIWPLDPLNGAVVSELRTNNDHWTASPKEDDRRKSAITAL

SEQ ID NO: 949379 - protein, 134 aa, Homo sapiens
KLFRVVSYRQPIIISIVLQSPQQLSGIHAVYYYSTGIFKDAGVQEPIYTTIGASMVHTIFTVVSLSLVERAGRRTLHIIGLGGKAFCSTLMTVSLLLKDNYNGMSFVCIGAILVFVAFFDIGPGPIPWFIVAEL

SEQ ID NO: 949380 - protein, 93 aa, Homo sapiens
PDIEHAEHEGPIANIISTWNTEDLRNRDHYLKQKRAKLMSMRKAMRTNQIQNMEQKGQPTGEVAEMTEQPEHDYAEEQQTLLKRRSLAEQVRL

SEQ ID NO: 949381 - protein, 91 aa, Homo sapiens
STGSPTSCPSYLNSDNNNKLGRYTEENSITLSTCSEAESTKYPEAVGCREILVVLQPMMAAGLATVEGKLTEGFLTQVFVPQDFSVDLQST

SEQ ID NO: 949382 - protein, 47 aa, Homo sapiens
GSEGQLKSLVGQRLELGSPQSLRLPRWPALLPSSAEAPPGFTAPNCF

SEQ ID NO: 949383 - protein, 68 aa, Homo sapiens
  misc_feature (33)..(33): Xaa can be any naturally occurring amino acid
  misc_feature (35)..(35): Xaa can be any naturally occurring amino acid
  misc_feature (46)..(47): Xaa can be any naturally occurring amino acid
LRRVVRVTLVTVILVLHENVDALSNSTSRSLNXAXVTINYQILVSXXHCTYIISVSTLFDSPLIFNQS

SEQ ID NO: 949384 - protein, 71 aa, Homo sapiens
QLAYVLPVFHVCHGCEPQPPHYAAGALPIFSAAYGTQGPICPSVAVWPEWVPSSPTFVLAQTFWQVVWGLT

SEQ ID NO: 949385 - protein, 133 aa, Homo sapiens
PTSCPSYRNSNNNNVLKNNRRELKKLFRHVVRQSLPSTLKQLGAANPGGASANDGSKAGHRGRQVTEGFLTQVSVPQDYSVDLQSSGVTARENPPDHLRLALPGSLSNALRARSSEQSLCFSFPNSDNSSGTE

SEQ ID NO: 949386 - protein, 68 aa, Homo sapiens
DVVLCFPSLAMCSPCACLPFPPAPPGPTRNPCSAVTEACAQPPWSFFGSQGSRRIVFREKYISKFLDL

SEQ ID NO: 949387 - protein, 51 aa, Homo sapiens
FQGQAGCHMHPIMPQAPYPSSGSLWDAGPILSLGRRVAGGGSVVPNSRARS

SEQ ID NO: 949388 - protein, 73 aa, Homo sapiens
YNAQEVIQQFIDVPSVAVKKRVLCLTRDENLIATEVWNTCDRTANVAILFSGGIASMVHSPPLLTVIIPFTCN

SEQ ID NO: 949389 - protein, 39 aa, Homo sapiens
EPDRDIHRKVMVYEDSGFIAPSFICFICVNSSSSLKRNR

SEQ ID NO: 949390 - protein, 55 aa, Homo sapiens
LYEDPLAGNGLEPGGKCTRLACFGDKGKGPGRMSQTVQPGVYIVLDLWEEEVSSL

SEQ ID NO: 949391 - protein, 205 aa, Homo sapiens
MSETEILDVRMDVATSELHGNSWRSSQIFRVKVWAIFPLLFLLPQLRVKRFSAEPSSEALGVGEVLHVKTESLAPPLCLLGDDPTSSFETVQINVIPTSDDSSDVQTKIEPVSPCSSVNSEASLLSADSSSQAFIGEEVLEVKTESLSPSGCLLWDVPAPSLGAVQISMGPSLDGSSGKALPTRKAPLQAQNCSANHCSNAIRAA

SEQ ID NO: 949392 - protein, 81 aa, Homo sapiens
AIRPTRDDFHLYQQTLSALLPWCRRLRLSQGLFLRGGLLGLRTQYPRLGSCIFPVLASERDLVLHFGGAQILARLMFLAKI

SEQ ID NO: 949393 - protein, 77 aa, Homo sapiens
  misc_feature (42)..(42): Xaa can be any naturally occurring amino acid
  misc_feature (63)..(63): Xaa can be any naturally occurring amino acid
PFPSQEKVVPLRDIITPNQFEAELLSGRKIHSQEEALGVMDXAALLCGPDHRVVITKLLTCPXPQGEKLPDLCCRSQ

SEQ ID NO: 949394 - protein, 37 aa, Homo sapiens
  misc_feature (24)..(24): Xaa can be any naturally occurring amino acid
MAKAPFPGLVLHTGWSSAERWCKXRHGLLTGHLEVIG

SEQ ID NO: 949395 - protein, 32 aa, Homo sapiens
MQNETWRRAKLQVLRCQVKGVHSWILFTSGDG

SEQ ID NO: 949396 - protein, 149 aa, Homo sapiens
KTPSVYKEKVVPLEDIITPNQFEAELLSGRKIHSQEGALGVMDMLRSMGPETVVITSSDLPSPQGRNYLIVLGSSEEEESGGSVVLERIRMDIRKVDAVFLWALGDLFAAMFLAVTHKHPNNLKVACEKIVSTLHQVLQRTIQCAKAQA

SEQ ID NO: 949397 - protein, 49 aa, Homo sapiens
MELADLTLPRTQYELTLESVTVHEKKFRKSEVRVTLFMLLNGQDGEQKS

SEQ ID NO: 949398 - protein, 41 aa, Homo sapiens
APWAQMGIKMTVVRGTQAEGSYGIYHGLEAALSRLGCSDRQ

SEQ ID NO: 949399 - protein, 102 aa, Homo sapiens
HSASAMTVYALVGGVFFLITGGIIYDVIVEPPSVGSMTDEHGHQRPVAFLDYRVNGQYIMEGLASSFLFTMGGLGFIILDRSNAPNIPKLNRFLLLFYGFVG

SEQ ID NO: 949400 - protein, 105 aa, Homo sapiens
SNRNRTSLTCAVYHMEPDHPAAGLSSSEPVRLVYFRGNCGDSSSMYSLEGNMVEHSVPVVPGAADLVEECDPALNPDWLQRGLTDTPRLKRCAADWGPAPAPCAG

SEQ ID NO: 949401 - protein, 96 aa, Homo sapiens
SLYSHRKRGLEDVMEFAPSNGGAEMVTATVSWPGGVTGMLLGELQITASPSTRAGCGGDSPKRHSNSSSSLRAGRGLTVSCTSPWARRLMFYGFVG

SEQ ID NO: 949402 - protein, 74 aa, Homo sapiens
PHHSVAAFLWEGLGPRALGWPVGCHRFILGPADNHDIISMKLFQLMVEHTPKRERASSVDQRSEPSGQSSFKFA

SEQ ID NO: 949403 - protein, 68 aa, Homo sapiens
  misc_feature (2)..(2): Xaa can be any naturally occurring amino acid
  misc_feature (15)..(15): Xaa can be any naturally occurring amino acid
GXHVTRSHKPGRSAXGELAGYIQAVWPSSHQNPENRKYGITRKDRGKPIHCVTQGQRTFGPIDVPGHQ

SEQ ID NO: 949404 - protein, 62 aa, Homo sapiens
RVPAYAVKSQFPFIFRTSVVNVFKRLGLIQEEVPKLCVPSLPVDLDSPMNPSRVLDSVSLTV

SEQ ID NO: 949405 - protein, 39 aa, Homo sapiens
TEELLSPSNYSLGCKASHDDSGPAWSTFEHCSTTRIGPG

SEQ ID NO: 949406 - protein, 42 aa, Homo sapiens
REFFPFSKQVRERAELSGKIHRRNVIITEISDESARGRMNAL

SEQ ID NO: 949407 - protein, 54 aa, Homo sapiens
SKEEGGLSTMEGLELPEDEEEKKKIAEEARQEFENLRKAHEEKSLIREVEKRDN

SEQ ID NO: 949408 - protein, 93 aa, Homo sapiens
LADLRTLCSARSGWLYAALYVTPLILSSYRRKGDSRPHLQPFFEHPDCCQQTYSGTSLVLVQDRNLQLVCCYQQDYRHHPVLPQHLDSSVLIQ

SEQ ID NO: 949409 - protein, 100 aa, Homo sapiens
TDRFPEAGLCHYAAVGARGFPDPGMVLSWSGAFMSPRVWLTHSTAYSCRPRSGPACGPASSGNHVVSPANGAIKCRAWTLSEFEKVTNSSTSSSYNSGDA

SEQ ID NO: 949410 - protein, 36 aa, Homo sapiens
MIPERGEVVGQDSSSRCQWLKTAPPPASGAQEPLPA

SEQ ID NO: 949411 - protein, 80 aa, Homo sapiens
VLEVPFSAHWSPRLVTRCGPEAAGLGADAIAPTAPGVHGVSVKLEWEQDNMRAALDLCEEALRGYEDFPNGCGLINAGTI

SEQ ID NO: 949412 - protein, 125 aa, Homo sapiens
  misc_feature (54)..(54): Xaa can be any naturally occurring amino acid
  misc_feature (64)..(64): Xaa can be any naturally occurring amino acid
NRLLSRIPRKRKGGPEYWDGETGNVKAHSQTHRVDLGTLRWYYKQEARPGSHTXPDGCTGCDVXVGLGASSCGYHQYAVRRLVITSALTRGPALYGPAVGLLAASEPTKAQSREGGPMLAEQFEK

SEQ ID NO: 949413 - protein, 44 aa, Homo sapiens
MDRRKKALIRLLETLRGLLSWRRRSISCRRLSKERGAPLSDELG

SEQ ID NO: 949414 - protein, 62 aa, Homo sapiens
IEDPSKEKGGLVMSQTQEQEVMLLTQVNTALDNKASLLHINAYSLLFDALRDYNSHITSSDK

SEQ ID NO: 949415 - protein, 142 aa, Homo sapiens
DGFRVVNALRYDVEYCHIFERSCPLCYDTRLGQWQKSILAVGIAGMMTTEEAGTAMKTDMTDGMIGRGAPELIPLGMIIGVMIEVPPKTKLNLKPRSPPKDDDSSAQYLTVHSKLILSLEEQSLLTQLLEKERSKHVIEEPI

SEQ ID NO: 949416 - protein, 132 aa, Homo sapiens
MNPRKSKVVLGKSLPWYSCEETSAAVDASDEEMGDAGQPPIECPFGDFTCRHQLVLDHHVTWLGGTRLSSAQIVLTGARTDRRSPGTGVCTLGKTLNSVTSAHYTYADPSRLRYHMRIHKEEGISLCPECGY

SEQ ID NO: 949417 - protein, 50 aa, Homo sapiens
YTNTKNIPKTWRRSIMEYFEEAMTYYAQSSRRYNGPRTLGMLGISKRGCS

SEQ ID NO: 949418 - protein, 158 aa, Homo sapiens
SLRNVLSPSVLFFMELIAACSRMQRNEQTPVQALLLPSKKRVVEVVAEVGAPVADGLVVCGVEDLGGKRGPVGCRRRQREKMKEESVAHLLILHVVDHLTRPPAGSQRNHEQQHQRANAQQVGTVGEGHQDDCHEVVYHLLLEILALDIMGSLISSDE

SEQ ID NO: 949419 - protein, 55 aa, Homo sapiens
  misc_feature (38)..(38): Xaa can be any naturally occurring amino acid
EDPFSAYLVSEVSLAPFFALSYSYINGFVAHFYRSFLXLLWVAYLLSPFQHMPGA

SEQ ID NO: 949420 - protein, 50 aa, Homo sapiens
MPSLRDACDSDGNTLASPNSETGPGQPNSGDEDIDSLQRMVQELRKDIET

SEQ ID NO: 949421 - protein, 41 aa, Homo sapiens
ANLRAGGCRGRRVIGHTRLQASSSVKVHCMKLMKGSAPGEV

SEQ ID NO: 949422 - protein, 106 aa, Homo sapiens
PRSRPTLLMVPLFPGQVVFFRSLHWTLSLSPLLSHSAASGGVCCASLTLVECGFNVLTLSRVAYLHKLLGILHGIFVSYLYILHFICIKTHNIILRPLYFFLQLPL

SEQ ID NO: 949423 - protein, 46 aa, Homo sapiens
ISTGLGSSILRSSVASKYWKDESINLRLSQTRHFLMRDRYLLVREN

SEQ ID NO: 949424 - protein, 84 aa, Homo sapiens
RIARPTLRVLTPGRPRAGTVCSGRLCQSLVPWMRHGIKSSVQSFQRVTLSPKFGSSCKGFMFCDGEHKKKPLPHSERSYSRMAA

SEQ ID NO: 949425 - protein, 54 aa, Homo sapiens
STNDDVLGSLNDRPSFPLLHGLLGTNIDRRPSSQIATYTAFLGNLPYHVIEEPI

SEQ ID NO: 949426 - protein, 75 aa, Homo sapiens
MIVLLGRDSNRDSDKTDTGLEGLVLLQTALMTTHLEEVMNAFGDKYRDRNDSDRYRDGYRDGYRDGPARIWIDIV

SEQ ID NO: 949427 - protein, 106 aa, Homo sapiens
LSGLVSSILRSSVASKFWKLVLNLRFPSKNFLSEQILLVEEQDHRDGAQPSVVPDALNEFRSLLQSLGLFVLRVDHLVAAAGRHVNIMAVTSLKHWIHLRAYIALA

SEQ ID NO: 949428 - protein, 40 aa, Homo sapiens
MKLRISETQKHETSKSPEKDVSQWIEKKSKKPKKKEKKHK

SEQ ID NO: 949429 - protein, 52 aa, Homo sapiens
  misc_feature (27)..(27): Xaa can be any naturally occurring amino acid
  misc_feature (38)..(38): Xaa can be any naturally occurring amino acid
  misc_feature (40)..(40): Xaa can be any naturally occurring amino acid
  misc_feature (47)..(47): Xaa can be any naturally occurring amino acid
NSVALIWCAKIHSCDEECLAYKHYKVXDDIIIVTVIIXIXKPSRAEXQNMTG

SEQ ID NO: 949430 - protein, 32 aa, Homo sapiens
TLKRIPADVTVPSTSCDKIDVIKQADYMPERS

SEQ ID NO: 949431 - protein, 68 aa, Homo sapiens
LDHPLTFTPMAPQYNLIWPLPTHRDEAYNKRIISTTPATCNTSGIIPPCLQPIATSLHRATVPPADGQ

SEQ ID NO: 949432 - protein, 73 aa, Homo sapiens
LRIPTRTAGSNAGDSCRNAIPEESGDEDEDDPYKGHLDLLLLQTNCLLEEFSDIFKRRERGAAKKLFQLQKRP

SEQ ID NO: 949433 - protein, 69 aa, Homo sapiens
FSSLVFFLFGDFFLLLLVFLFFILCFDSLGFLEVGRVLAAPSPSSSESENSSSQAIRLAEEQIQMRLSG

SEQ ID NO: 949434 - protein, 109 aa, Homo sapiens
APRVQMQAIHEDAIPEESGDEDEDDRVEGASQICSSDKRIACEEEFSDSEEEGEGGPARNSSKFKKAKRVKTEDEKEKDPEEKKEVTEEEKTKEEKPEAKGVKEEVKLA

SEQ ID NO: 949435 - protein, 52 aa, Homo sapiens
PTLHAVQMQRFLRTHPEESGDEEKHDLGGAHLDLLSDKRIAVRKSSPILKRR

SEQ ID NO: 949436 - protein, 37 aa, Homo sapiens
MCTVHTNEQFINWPWSEFFRTLIAALLYLITSIVVLV

SEQ ID NO: 949437 - protein, 115 aa, Homo sapiens
SSRSLIAFVSRKPPEYEGLSRPQSHPVKVGTLAQEEQREGEELRFTRLESFLHDSWRQKHDKVCLRRLEVKPHTLESPDKHSLDFVVRVERIDGVSLRVRRAIARLKPKNAAYSM

SEQ ID NO: 949438 - protein, 49 aa, Homo sapiens
LQWETLLDGNAMSMEASRTGFCCYHASCYFSQEPRKFHLMLNHAEGSWG

SEQ ID NO: 949439 - protein, 74 aa, Homo sapiens
MNSETSSAARPSGLQEESQHHGSEQQPATYAQGLRSPQAAMTPGIPIFSPMMPYGTGLTPQPIQNNNSLSILAE

SEQ ID NO: 949440 - protein, 47 aa, Homo sapiens
SDQAVIRLTVKAMQSPNEGAIVEVALEWYYKDKLFDQREFVFEIGEG

SEQ ID NO: 949441 - protein, 44 aa, Homo sapiens
MSHAWSQDCLQGLFPEIGSSSYQDKPPVSVWAFAGHSLHENMAV

SEQ ID NO: 949442 - protein, 137 aa, Homo sapiens
QAVKYRLNISLSHTGQHTSRCPMKHETGSWKSHWIWAAPPSALIFLQEQFCLFCMPGSVTEELKHFLTLKYKTFGTDSPVTGYLGIPHPQQKKKIQGQISGMFGKISGGLNFVGKRHYEIFLTLKGHFSLRLTEPHL

SEQ ID NO: 949443 - protein, 167 aa, Homo sapiens
LLRRVKFIHFTTDRWLWVSSAQCPFQKHSALAAYAEVTMVDSHTVSPPSCIGTVIAAGGLRRATFIDVLASSTELFILEAGGTHALVAPQGVVTGGSSADVSAEAFVFINTLVPLVVLEVALGAAAPVAPNDVLAVMLAAVVNLTLVHVFTAGAGSDQVRIPVGIHR

SEQ ID NO: 949444 - protein, 39 aa, Homo sapiens
AVIQTQVVIDAGAFAVFPSLLTNRKTNIQKEATWTMSNI

SEQ ID NO: 949445 - protein, 77 aa, Homo sapiens
LKIPEMQLMQSDTKMEEHYVVAVQEWNCRMVKKEVEIVAQLPLGVVAPEMIIEEESSTSSQISKKEKVLSQPEQVPF

SEQ ID NO: 949446 - protein, 41 aa, Homo sapiens
KQINTDSVLCLDAGELAVLPSRVTNPKTNISEGSYVDDVKH

SEQ ID NO: 949447 - protein, 32 aa, Homo sapiens
MGKLRIEIGTLGKADTSMRSLTKSGNKPSEKK

SEQ ID NO: 949448 - protein, 94 aa, Homo sapiens
MAEYLISLSCFPLNVSGDPDPIIMTTEHAYASLMPLFYMGGNLNSYSMRGYTCAYLVLQFKFLGSQKSLLGSDYVIGTRASHFRFCHKISGNPK

SEQ ID NO: 949449 - protein, 68 aa, Homo sapiens
KQLIQTHQATDLSSTMHVLTYSHDSPKATPVLKGLDFNDMSGVETNSQGDRLLSIQVSNSATGSTIQC

SEQ ID NO: 949450 - protein, 70 aa, Homo sapiens
HRMPKRPSSSRRSPSWIGDGESTTPSDKVVKKGKKDKKIKKTFLEELAVKDNRAGKEEKVLKEKEQQQQQ

SEQ ID NO: 949451 - protein, 90 aa, Homo sapiens
HIRLRVSDRKELYCHGMPKRPKQQRDAELIGEGESRTPSDKVVKKGRRARRIKKRFLEELAEKDNRAGKKENVLREDGSRSRRNSTSLPC

SEQ ID NO: 949452 - protein, 81 aa, Homo sapiens
MRRQRETPRKRERDREREREGESERERERKRSKPTHHLLDVSQGVSGLEERTYSDNAVCGPVLFFFFFFSYYNWGVSLYKV

SEQ ID NO: 949453 - protein, 78 aa, Homo sapiens
FRCSSSLSPRGGSVETGNEDMKSSDRDAAETLKLFPEGLHCLDQGHHLLLHPGLEPACHRGLQPLKHGLEPSHDLCTQ

SEQ ID NO: 949454 - protein, 72 aa, Homo sapiens
CLCASSNLTCDREEYVQQIADALQYLQNVSGDLFSQVGSATHPSPDERAILVLARIPVNTASESIPLAGLPF

SEQ ID NO: 949455 - protein, 83 aa, Homo sapiens
RATGHWVQQQSIAFLRAHGLALRLLVVMVKDHVRGVLRPPVRLTKVLLAKLMDLEDTIIDVGDTIDVILKDVDADGVTEASFA

SEQ ID NO: 949456 - protein, 72 aa, Homo sapiens
ARPSLTFLITRPTGYALQVSDYPCCISCERKSNGKLLKKGRYDCEQRVRTISIVLPTPLCNFIPDTSQCHLV

SEQ ID NO: 949457 - protein, 63 aa, Homo sapiens
LFVSADYCANHIEQIAAASIHCVWITNAAILWLWSTHYRVNTRFACTPSEDPQFPLVQWSARE

SEQ ID NO: 949458 - protein, 42 aa, Homo sapiens
RIEYRLRRERNNIAVRKSRDNGPSSCNVRDAADKVLAADHVT

SEQ ID NO: 949459 - protein, 90 aa, Homo sapiens
CLFMWQAATKFTGCPLHLCELGVLAGGTCQASIDPFLDCPQQEDSGVGTPHPVHGGGSHLLEVASAVSAAEEVVHVASDGWEDLLGLAIC

SEQ ID NO: 949460 - protein, 44 aa, Homo sapiens
MSDDRLSRPGDDASPEPWFSCIQNKPLYFADRLYDSMEGQVGQR

SEQ ID NO: 949461 - protein, 172 aa, Homo sapiens
  misc_feature (107)..(107): Xaa can be any naturally occurring amino acid
MCPYTRIYLVTMVPSLRLGTTLGHNDKHTGRRVKHDPIDVCKIGSKVCARDKIIGVKVLGILAMIDEGETDWKVIAINVDDPDAANYNDINDVKRLKPGYLEATVDXFRRYKVPDGKPENEFAFNAEFKDKDLAIDIIKSTHDHWKALVTKKTTGKGISCMNTTLSESPFKC

SEQ ID NO: 949462 - protein, 68 aa, Homo sapiens
AAGKEGCDINAIIFHTKKKLSSVRNSKTDLGEIYGSVSYSKKVKNMYNCGLSRNGIGHSPRTERTLQG

SEQ ID NO: 949463 - protein, 30 aa, Homo sapiens
  misc_feature (12)..(12): Xaa can be any naturally occurring amino acid
GDIVTVGECRPXEQDSAASTVLKCHQWLPG

SEQ ID NO: 949464 - protein, 73 aa, Homo sapiens
AAHGTFFKMFATVALVDVGPTVYVVMTSVLAVPPVPELVGRGRQLRVLSFQGFHFFLQPGDSLHFGLQSSVEA

SEQ ID NO: 949465 - protein, 40 aa, Homo sapiens
YTFCNEIFSRFSVSKMAAMGSGVSDDVFSSSRHESVSKIS

SEQ ID NO: 949466 - protein, 82 aa, Homo sapiens
TLQRNFEQIDHVWGKHTKIAYERDLETRAYIGDTYCHFQKMLVVLLQGNQGRRNNVMGRGPWYNEDGPGPNTKAGARVPKLR

SEQ ID NO: 949467 - protein, 43 aa, Homo sapiens
SRGSRKVIKAEVSSVIFSLRNIITSMCLTEAPCVLVHCNTVST

SEQ ID NO: 949468 - protein, 40 aa, Homo sapiens
YRHYAKQKTFFLKEEEEEDMILHRGPNTEWWELEVAGGHG

SEQ ID NO: 949469 - protein, 57 aa, Homo sapiens
MKLVGYTCPGCTKCPEVFEDVQRCHFTRPRKLEDAQAGSGTIGRLVSSVEGPLEDPE

SEQ ID NO: 949470 - protein, 48 aa, Homo sapiens
WHRFLTLAIWQIVDPLHRDIETFAKEGPKEDIDVSILPQLEHCRSSKM

SEQ ID NO: 949471 - protein, 51 aa, Homo sapiens
FPSGDADQVALNPQNTVFDAKRLSGRKFGEPGGAVATCKHWPFQADQLTET

SEQ ID NO: 949472 - protein, 83 aa, Homo sapiens
FPRANAVLLLLGLRQVEGRRCGKVGGHVPRTWYLYPVCAAQYADRSKEVGVLSAVSTDCMEGHDAVRFVTNAPIPDLVSELRA

SEQ ID NO: 949473 - protein, 48 aa, Homo sapiens
MRCPWACKKGAKLTPRRRRDIYTKNDAKKIQKKYDERKKNDKISSLLE

SEQ ID NO: 949474 - protein, 148 aa, Homo sapiens
  misc_feature (79)..(79): Xaa can be any naturally occurring amino acid
TKRSTIHSCFGMISKQDNGIPCASTYDHFPIMPATINKHISSYSISSPELVKTFSVCDYFLEVMTHTLFYMSRLSCGHXSDFRMQQIMGSQFKMVWAVWSSSFPELTELRLPAWLEMALTMTDVLRCRSGRPVHRVSGSSLIVGYYAC

SEQ ID NO: 949475 - protein, 104 aa, Homo sapiens
MTSLEILSGHGDPGWTPWSLHAPVCAQWPHEYTCARCCSQCVVGLRCPGQVPVRSWCRHVEEVGYWTQSVYLHIAQAVRQAGYGWQVWCMCPGGCREGPSEASF

SEQ ID NO: 949476 - protein, 101 aa, Homo sapiens
ALADYISATKEVTPFKKVRDLAENHHSVDRSKRNIIGYSEQQDSDKYRVIDRVANIWHDDCAFLSAFGDVSKPERYRGDNIIYKPTGHSAPDMVYLGTTLR

SEQ ID NO: 949477 - protein, 64 aa, Homo sapiens
DVSKNLHLQSFCQSPYGKTCDADVVLWNRIIPNCPACGGQNRILPTWCSFMVVITARLGYLRFG

SEQ ID NO: 949478 - protein, 51 aa, Homo sapiens
MNGCYYEGLCVSDEEYANELILGLFVVRTIELVIIMPHMDSTRKGYNRRSR

SEQ ID NO: 949479 - protein, 53 aa, Homo sapiens
GGSDRARYQDLSQSKKELSATEGMEPIAVRANPLSLGGKQLGLTSFYIIAGHE

SEQ ID NO: 949480 - protein, 104 aa, Homo sapiens
EAVIELVYPRDGDYHSFTGFGIGGGVRGNVLRAGDGSQKYILKGGENDKETFLRVGEIAKYIDQQGGAETNHNGGMSSVKALFAYFVDLQLLQAIWMYNRRSRD

SEQ ID NO: 949481 - protein, 65 aa, Homo sapiens
SPRLNHRGHGHEVRLSQSRCLSEHAQLPAPERHSEFVTSVQGTGRGERAATLHQGQCHDDVTMEG

SEQ ID NO: 949482 - protein, 50 aa, Homo sapiens
YARSIIEARRRRSLCLELVLRSTLRSTDVQLRHPLLVSSKATVTSVGLKI

SEQ ID NO: 949483 - protein, 98 aa, Homo sapiens
SRGSDIVSQWVRTQNMRRLAAKYSSGYAACPQAWQVVDTNALWLKDNICMSLHLARLHLDALTWAIVVVLKELYTLLNENYVEDSLTNIVRLDYSPGV

SEQ ID NO: 949484 - protein, 44 aa, Homo sapiens
RKIDQPIPSRIPGLAGCQPQPKRNEQRIELFQILRPDEHICKLA

SEQ ID NO: 949485 - protein, 118 aa, Homo sapiens
MRRQQAEYSSRIRSRPKLASGNTIARGAEGHIRRALHLPRVHWDVWTWAIVCAKRTLHPLELRTIVKIDDNISDPDIPGVHIVGFRATGCSPQCTVAYECLKSEIGWFISAIPAKHSI

SEQ ID NO: 949486 - protein, 67 aa, Homo sapiens
AIVSYLANHQRQGHLLFLTHISYTYYFYVNATAKKQNTTKNSICHLWPNTDEYARALTCLQLACAWH

SEQ ID NO: 949487 - protein, 55 aa, Homo sapiens
TVDGHKDIQMPDGIRREEYVQWVELLPETQTPSWMGLSNNVERVLLTTQGVYVIS

SEQ ID NO: 949488 - protein, 75 aa, Homo sapiens
MSLVRMETVTQECQRQRAAQEDHLFRKFHYLPFLPSTEDVYDCRMEHWGSDEPILKHWELDAPSSLPETTENVVC

SEQ ID NO: 949489 - protein, 51 aa, Homo sapiens
LPRRCCVCCLTCRRPVLLLPQSCQLSDNVVPPSRAAAAPAQQQQHRDAVAA

SEQ ID NO: 949490 - protein, 89 aa, Homo sapiens
GFQAYEDMMSSDSRAQKLWKLFPEGLHCIGPRPPPSPSPHGQIAPVPPGLQPLQHGLEPSHALVTEALPRLLDSGILNIRDRGSVASAP

SEQ ID NO: 949491 - protein, 52 aa, Homo sapiens
RGFQAYEVGLSSVVQSFLAPWLSVSLQALTSSSFKRPTMTLGRHQVQQQSWR

SEQ ID NO: 949492 - protein, 47 aa, Homo sapiens
DGGAVGVSTVSTGWTEDSALMVTRPSWNGLPVSMASTCYWRYHESIS

SEQ ID NO: 949493 - protein, 55 aa, Homo sapiens
MVSKCPLYTRITIMQSQYPVLSASHFTKTTYFLLFLFGRHMELTDVADQFYSTTP

SEQ ID NO: 949494 - protein, 95 aa, Homo sapiens
MEYLLQKKLPGEVENYQQLQKDLSKSMSGRQKLEAQLTENSIVKEELALVDEYNVVFKLLGPVLVKQELGEARATEEKRLDYITAEIKRYESQLR

SEQ ID NO: 949495 - protein, 127 aa, Homo sapiens
  misc_feature (2)..(3): Xaa can be any naturally occurring amino acid
RXXFLHFFKKIVLYMLRFIYAGHELKTDSRKAVPTREGPEVTTPAWPGKHGCSDPSFLLPTGVAHLGTHCELLRGTLVGSSHRLSQCLRPLHCLPGDLAPLAPVPPAVRAVALKVVDGQGAQPLGHG

SEQ ID NO: 949496 - protein, 134 aa, Homo sapiens
PGLGSCTSMPSFSSRGMAWRSSTGWILADGTYSRGPRMSQWSPAWCETFSSSSPSSRGCRALSSSPCCSDSTYTSWMPCSSCSPGWRKKDFSPLTTRFLPQLILAIRSDRDENHAVVVGAQGGDGHNPQHLLVD

SEQ ID NO: 949497 - protein, 78 aa, Homo sapiens
FACSGSLTVDVKVRTGSTLIPDWFMAVISIDTTGEPFRLIYDTKGRFAVHRLYTLGGQVQVVQSETDLGGHKRNPVIW

SEQ ID NO: 949498 - protein, 164 aa, Homo sapiens
MADYYCQAWDSTSGVAFGGGTRLTVLGQPKAAPSVTLFPPSSEELQANKATLVCLIRDFYPGAVTVAWKADSSPVKAGVETTTPSKQSNKQVRGQQAILSLGRLSSGSPTRSYSCQVTHEGSTVEKTVAPTECHRVSTITPSRENELRIPGRGSPPPRNQLGTS

SEQ ID NO: 949499 - protein, 92 aa, Homo sapiens
MDLLGALTRTLGICLRRKMLLLDCNPEGDGLKHVLKTVASFNAPPYPCKQSPVHLAAGSGLACFLLWQLQTGADLNQQDVLGEAPLHKAAKV

SEQ ID NO: 949500 - protein, 111 aa, Homo sapiens
MMPGALRNLAKASQPQSITLWLRHMSMCGSRTWASVPQGSCGTTVHQLCFPFLPCCSATGWRKSLPVSRVPAGPTHPTVEIGPQSWAVMGVQGLARLGSLVLKRDLPEASM

SEQ ID NO: 949501 - protein, 143 aa, Homo sapiens
GDSDYHRDSCADTESSKRHAVASKAFATDFHDKAAAKKLINDYVKNGTRGKITDLIKDLDSQTMMVLVNYIFFKAKWEMPFDPQDTHQSRFYLSKKKWVMVPMMSMHHLTIPYFRDEELSCTVVELKYTGNARALFILPDQDK

SEQ ID NO: 949502 - protein, 61 aa, Homo sapiens
LVLLSKHTSSAESERSYKKSKKHRGTVRRGDIKSDSPESDAEREKDRQEKDRESENDRTRQ

SEQ ID NO: 949503 - protein, 50 aa, Homo sapiens
MFTYICHITTSLYRAQQIIQLNIQASPKVRLSLANEALLPTLICDLLADE

SEQ ID NO: 949504 - protein, 146 aa, Homo sapiens
  misc_feature (18)..(18): Xaa can be any naturally occurring amino acid
QGISQQCQLLVQPLYLMXSTEPLGVTETDICNAAEKTKELVGISYENGTMIQTPKAVQDSGMEVVVETKTNLDHRKNVKRFALLCSPNPEHQCDGNLSVGGQHHIPLEEEGVSHRQLVSVEAPGVDSPHCIILCFDLHSNSRGTSC

SEQ ID NO: 949505 - protein, 117 aa, Homo sapiens
MNHVAHGLLDLEGVHDDSGTRSIRKDVEQSVRTADVIERHLQLVHCLQEQPITLELQVIRREGYPFDQVKVPNEWLRIKKPMARHYQTFLHLGSTQVKGALVVGTGHGGQIEVTHPV

SEQ ID NO: 949506 - protein, 53 aa, Homo sapiens
LPFSEGITGMRHSVGLRVPGRLYGSCRSARTPPPPAADTKLLVHLLQENASKS

SEQ ID NO: 949507 - protein, 97 aa, Homo sapiens
GAGSDIWASIGLSGVHWAKVTDAAGILTCAAGPFPRVLGLSEGATTEEVHRSYQELVKVWHPEHKLDQTEEAQRHFLEIQAAYKVLSQTRKPWGSRR

SEQ ID NO: 949508 - protein, 79 aa, Homo sapiens
IPLRIGGLVEDEIPLSEGKSSTRGCQSRTGPSGDPLQNHMGLDLAYSPQTGFKAVVHKAWYLTFIKISCLKYSTLPQMI

SEQ ID NO: 949509 - protein, 89 aa, Homo sapiens
TVLRDATLSDIKAPIRKHEAFESDLAAHQDRVEQIAAIAQELNELDYYDSHDVNTRCQKICDQWDALGSLTHSRSVALEKTEKQLEAID

SEQ ID NO: 949510 - protein, 119 aa, Homo sapiens
SREYIVGMSLEYRTDKAAQRDSRTAEAASSEMAAYFTHSKPADLLHIILVLRTALNLYFNAQELQDRCQLCYGAYYNSGPSLRLAHKTRTLLVCLLEESHRIANQLNIDMHYLFDICAA

SEQ ID NO: 949511 - protein, 82 aa, Homo sapiens
NWFFDDGGKEGNWVKLSGWAGGQGTGEDILEAAVGVCVGRGPAKTLTPSGSAASPPSASAGPGRSWHCSYTGLPRSVIEEPI

SEQ ID NO: 949512 - protein, 91 aa, Homo sapiens
VPISLTPGGEKTARVFAKRQWVTLFSAPNYCGELTMRGAMMMCGQRPFMCSFPVSSKPARQRTSGKYWAVPVAVNPWSVAADWEIHLDVDR

SEQ ID NO: 949513 - protein, 33 aa, Homo sapiens
MPKSAGQSDINTLPKAENSELARQSPWSVNVFR

SEQ ID NO: 949514 - protein, 41 aa, Homo sapiens
GYEFLCQAELVTLFSAPNYGGEFDKCVAAMMSVDRDPLCAL

SEQ ID NO: 949515 - protein, 34 aa, Homo sapiens
PPLTAPLQSLPKLFHGLLALDGGPLLHIPPNLYG

SEQ ID NO: 949516 - protein, 92 aa, Homo sapiens
MFLLLALLLRTQLPASPDAGGRAALPGCQEVCMPTVLPCLSPQPGSACSTEEHRGCMGGLEQGGSPLAWRSHVCTSSALSPCLVGSVHQGAS

SEQ ID NO: 949517 - protein, 57 aa, Homo sapiens
  misc_feature (33)..(33): Xaa can be any naturally occurring amino acid
  misc_feature (44)..(44): Xaa can be any naturally occurring amino acid
RKATAGFLVEGGMLKGLLGVDWMLRCGGWKLCXAHLGTHASVHXWLPGDSKQSQRSL

SEQ ID NO: 949518 - protein, 185 aa, Homo sapiens
RRKGSKWCRPCKEKILMWKQLTQRETALGGYFLKQESGNLVLTVVMDFPGPLNIETKSNALDIIFQTDQQGKKKGWKLRYHGDPMPCPKEDTPNSVWEPAKAKYVFRDVVQITCLDGFEVVEGRVGATSFYSTCQSNGKWSNSKLKCPPVDCGIPESIENGKVEDPESTLFGSVIRYTLEEPYYH

SEQ ID NO: 949519 - protein, 46 aa, Homo sapiens
ADDPECYQLQNFTLEQEQCLVDGYSPNRNEPLTGNSDLPFWAVILI

SEQ ID NO: 949520 - protein, 55 aa, Homo sapiens
LTYIVSTCQRLFTCQRRGHLSRVSYGRSGLYSLSSVVTVPSSSLGTQTYICNVNH

SEQ ID NO: 949521 - protein, 47 aa, Homo sapiens
MRHSERIPEPNDADSPKFKTTVGSVKWVPENSEIVWSTKSRSLNAAS

SEQ ID NO: 949522 - protein, 30 aa, Homo sapiens
MAVMAVTAMTSSTGYLPSLVVLRRSLNAAS

SEQ ID NO: 949523 - protein, 40 aa, Homo sapiens
MRSSMVPFHQHAAGTTSNLAVVLPVKLVCHLDPNPCKFAQ

SEQ ID NO: 949524 - protein, 72 aa, Homo sapiens
FSLVAIWCVPPNPWLLVCRRIHGSWAHIPIQHGAGIGRGERRCRSGAPSANNSLNDFEEQPGQAQPTDIFTS

SEQ ID NO: 949525 - protein, 77 aa, Homo sapiens
RRRLEDFHSLRSNQARVEGARVEKEKCPLGDRGGPQHGRPPKPHQRSFHLSSVGCIIWERPSKNFGYTLSGECTDTE

SEQ ID NO: 949526 - protein, 40 aa, Homo sapiens
MLGNKACHRSHLLFMRSPLFLHVSVFYWDLYGANLATNAW

SEQ ID NO: 949527 - protein, 45 aa, Homo sapiens
GVGEAPKGYSPGVTCWCSSCHKFSGQYWEACCRFLISGLLMGGKM

SEQ ID NO: 949528 - protein, 36 aa, Homo sapiens
RTTGPKNQKRGKPSEQDTKRRHGRQKIRVEGPSNVR

SEQ ID NO: 949529 - protein, 62 aa, Homo sapiens
KLNERISINGGYLSILEWILEKKDAMWIGSLNRTVLENSTSYEESKNLLDKNKILDPDYFIL

SEQ ID NO: 949530 - protein, 39 aa, Homo sapiens
LHSVTAMSVTCTYSPALNKMYLPTGQDLRLLQLVGMIPH

SEQ ID NO: 949531 - protein, 70 aa, Homo sapiens
KVQCTEHKDSLWGPGAMESTLMEPTTPGYPQTTCTEKIRVEGPERTCSGVDALSMDNGTPDVQADILDDS

SEQ ID NO: 949532 - protein, 107 aa, Homo sapiens
MRQSSALELLNSGYEYDAGSIIFNQFRSVISYKTEERPIFSLNTVASADRMSESNNDIDADVLQNYQEYNLANIIYYSLKESTTSEQSARMTAMDNASKHASETIAQ

SEQ ID NO: 949533 - protein, 39 aa, Homo sapiens
NQQRSNTSRRSWGPPSPLGHVANFFSNSLIKSHYLSVHG

SEQ ID NO: 949534 - protein, 65 aa, Homo sapiens
MALLLQVWVAKSVHTYHSVVAVTVPAGSQTDYVNDSKGGKESISDEQLQVVPEQCVPSFLSRCLG

SEQ ID NO: 949535 - protein, 57 aa, Homo sapiens
YRRLRLDCGATRKRPCCASVSRGTPISRHCHEAQAVLGVLLRLRGPRWTRCAYQHMP

SEQ ID NO: 949536 - protein, 179 aa, Homo sapiens
YEVELVPACAVSQSVGRRRCPMRERLRQLYAAHWRAQSRTDCPGPEGLRAGLEGYFRLAQTPKVMRELDEWLRHRLRAVQLKQWRRGGNGLPGTVPVGRERGPGSAGLQHMPACAVGQRRPVVVCLRFTAPSRGPKSCCVAQAARLEWSGMISADGNLCLPGSSNCPASASRIAGLQHM

SEQ ID NO: 949537 - protein, 96 aa, Homo sapiens
GRPGDNLISACLRRLGLGIFIGVGVTEVGDQLVVEYRMVSCSICIFMLIQFLLGSGGDAVFKLVGNSSYAGIQDLKNIFKPFLNTNKGLMILTSEI

SEQ ID NO: 949538 - protein, 61 aa, Homo sapiens
PYSIRDPAEAHQEGVIAVESLVKADYQVPPSGTIQVPYVILIRRCLLCYMTYEIFAGSADR

SEQ ID NO: 949539 - protein, 52 aa, Homo sapiens
LRGLYQQRSDLARGGSALKWNAELILCGLQVLPQLQHPQLAGPYDTFIEHLP

SEQ ID NO: 949540 - protein, 182 aa, Homo sapiens
SSREGAGVLLITQPTGSQVLSTPVSTGRTQALVKVVLLLALCCVLTLLLWTAVAGGQGFLGGGQGCPQPSPELGQDDVTLDNLFRVHEHTGEVGVVQGRSQLLQHQGLAKLRTCAPHVPGWCSPPTVAWEVLNEGTIAQPVEDAEVGGKRMQATQDKLSVPFSGTSTSGQVTSLMDNLGSEL

SEQ ID NO: 949541 - protein, 57 aa, Homo sapiens
LHHTYPFIIPTTVGDVRLCEKLLRDAGGQGAVAEDEKQKAETVQAALEEAQGATGVL

SEQ ID NO: 949542 - protein, 43 aa, Homo sapiens
FYGGEQSILLYNSTSCVRFELFNLLHSKLVNDSEAVHKYARNR

SEQ ID NO: 949543 - protein, 33 aa, Homo sapiens
MPRVPHSVALSLPFQAEQRVMSRVHSLELRLLR

SEQ ID NO: 949544 - protein, 54 aa, Homo sapiens
MLAGSRRAHNSVQYRQLQVSAGENGTQVAGPRCSPGHRVNESDIKLQQRNVICP

SEQ ID NO: 949545 - protein, 32 aa, Homo sapiens
INILSDFELFNLLHSKLVKIVKVHKLPAKSNG

SEQ ID NO: 949546 - protein, 44 aa, Homo sapiens
MRVVEQRILLIQHQHLVSRFELFNLLHSKLVKIVQRALVARQSE

SEQ ID NO: 949547 - protein, 49 aa, Homo sapiens
IFAFEESGCSWITVACSTRMRSRKLVTFVYTPGTSYLSTGPMPQPDDAH

SEQ ID NO: 949548 - protein, 51 aa, Homo sapiens
FDCRALIKDGKLIKNNASTDYTYLDKSINPLGCFVHYGERDPLTLVWLKGL

SEQ ID NO: 949549 - protein, 56 aa, Homo sapiens
TFDWRALMHLTILTALSAEIEEFKSDQMLCWIREFSAPHLLVARQIEGVPEARNSV

SEQ ID NO: 949550 - protein, 45 aa, Homo sapiens
ETFASGDTFIDEHRRSYVRVSYTLLHNIAVTFVLTQYKYIATRSL

SEQ ID NO: 949551 - protein, 48 aa, Homo sapiens
CVNDPLRTAEINGNYNAEKPRWTDLLRCASFLGSHCMQSAEAQSTIMQ

SEQ ID NO: 949552 - protein, 44 aa, Homo sapiens
LSDVLHDPLRTDEINGNVQAKSEQDGPSKMCQLPGISLQQSVRP

SEQ ID NO: 949553 - protein, 98 aa, Homo sapiens
MEAAEALEGAILITRDMTLGASQNTSDKANDFQRCLSLYFLHYHLSRKSSALSWTTSVRPMMQWSPESEITESSIGTSATPSLSAVTLQHVSHCNTVS

SEQ ID NO: 949554 - protein, 52 aa, Homo sapiens
MRSATPESPGIGLGFPLQQSRGAAPTLCLRILSQNDGRFTPMLIADLKEVLL

SEQ ID NO: 949555 - protein, 78 aa, Homo sapiens
ITQSVMVIAPFEFSSGYWFSEARVSRAVSPLDSHSSSPEELRPLWPENTFTEDGRFTPSSSQISKKFSSVTSSGALAE

SEQ ID NO: 949556 - protein, 41 aa, Homo sapiens
MQKSPVDSGVGSMAGYRGIHLFSSLPFASEILLETIATRSL

SEQ ID NO: 949557 - protein, 104 aa, Homo sapiens
VCSVSADNEWCALSASFERFCDLTLQETIASLGAHWWFMTNADYLGKGGNEDSTKKETLEVVGLVVYLGSPNKHSLGCSLRPLNSSVILLAVEMYPDKHCNTVS

SEQ ID NO: 949558 - protein, 110 aa, Homo sapiens
MSSRRRHPCTVALAPPVTAVVLGSRVGGRCPISQLLSVVQKFNCPASQKLLSITLIDHQSLVSVLCIWDKHPFVFSCAFCDLLCGESSGPRGAVALVPSLSETLIATRSL

SEQ ID NO: 949559 - protein, 96 aa, Homo sapiens
  misc_feature (48)..(48): Xaa can be any naturally occurring amino acid
MGVEGCTKCIKYLLFAFNFVVWLAGGVILGVALWFRSDPADNKPPVSXSWQTSRGQKPSNVGYLTSSIAGGPWSRIAPVGFLGLATGANPRESPGA

SEQ ID NO: 949560 - protein, 48 aa, Homo sapiens
MWRPGRNLQHTVMALMSSLDAEKAQGQKKVEALEGEIITLNHKLQDAS

SEQ ID NO: 949561 - protein, 65 aa, Homo sapiens
KPSDGLMASTSPVPEPQDLRLTVKMDLSSQGTVSSFVAKLFIFVSAEFLSTRFRVAGSPFLLVSL

SEQ ID NO: 949562 - protein, 67 aa, Homo sapiens
HYHAERSDQGVSSTDPRGSVMGTRTEVSEVNVEVLLLGSSCVKRCLPLSFKEDVIHHDHDRFGTRSL

SEQ ID NO: 949563 - protein, 42 aa, Homo sapiens
RGTKKEELLKQLDDLKVELSQVRVHKVTGRSGPLKLSRDPRS

SEQ ID NO: 949564 - protein, 43 aa, Homo sapiens
LREHRWLKTRDLGSSSEERDHLRSQKDSEPDERGIDLPHGGEG

SEQ ID NO: 949565 - protein, 65 aa, Homo sapiens
TRPRAATEGGCSSVVLRDLTGTPSPRSMLLSVVSALMAATMAELVYWVVLPNHESSVTLTRGEPF

SEQ ID NO: 949566 - protein, 76 aa, Homo sapiens
RGAPWWRAALCECRRWWGFTTSVVLGRRTSPLGSLSTSDIHLINLLRLEKYRSFSRHRSWAQQEAQAPHWRRTYRK

SEQ ID NO: 949567 - protein, 61 aa, Homo sapiens
TKDILDTSIKHGAEHGALINVTLEDALYAIGIYHGNCFPLSGGYLRPSGEMDSVSRSPHIW

SEQ ID NO: 949568 - protein, 49 aa, Homo sapiens
HEGFLCPLAMCLSVYPLIIYTKFGCIGEAWSHVKFWELQQQVSSYDPSP

SEQ ID NO: 949569 - protein, 40 aa, Homo sapiens
TRIMLTSKHLKYQDLDIIAPDWVLSHTPVILAHFNSQRTQ

SEQ ID NO: 949570 - protein, 73 aa, Homo sapiens
MGKENTHITIVIIGHVNSGTSTTTGDLIYKCGGIDNTIIDKFDKEAVEMGKGSFKYAWVLAKLKADRECGITI

SEQ ID NO: 949571 - protein, 81 aa, Homo sapiens
TRIFIDGHVVARKSNITDHLLKQCGRSDRPITIISLKKTLLSLYLHLSSLPGSDIDLYYSANVMQHFDLIITVWNSEVIGP

SEQ ID NO: 949572 - protein, 113 aa, Homo sapiens
HEANAHFYNIPASSSAGPGATLEPMDRKAARRHNDSCPEPSAPPWAEINARTSHPNHPMLKKQLLLLTLPTESACPSQNTSISLGAADLHSYPSPLLPTCKTKPKAEHQWMNG

SEQ ID NO: 949573 - protein, 67 aa, Homo sapiens
IRDKAPSRFSAGRKWEEEIAAPVIDNGTGMCKAGFAGDHSPRAVFPSIVGRPITPGRHGGHRAKGLL

SEQ ID NO: 949574 - protein, 76 aa, Homo sapiens
RGEIPWPTLTLPKPNSHGPTPCNIVFLETSDRSNPIFLFMCSVDSAARTHPVSHVLVLMKGLPGGHPSLPRYLRIS

SEQ ID NO: 949575 - protein, 47 aa, Homo sapiens
RGVIQPNLLMIDKEAEQSNKLMTGSEDSKLSTDQIESTGLRFHNGKI

SEQ ID NO: 949576 - protein, 116 aa, Homo sapiens
RGLSPELELAESCAEAQDGELDGLWPIITIVIILFLLSVCNSATITFFKVKWIFPPVVDLKQTIIPDYMKMIGQGAYGHPLRGVQGRPYPSTAAMGHSSSITQAIPGPDLTALKPM

SEQ ID NO: 949577 - protein, 42 aa, Homo sapiens
MMASDRSGRSWAARVESRVGACGLSVHHGRWLGLAGPLAASR

SEQ ID NO: 949578 - protein, 50 aa, Homo sapiens
RGLSKSAHVGLTLPNSTHIYINKGFYSIYNLDRGKRDMEERKEITGEKYT

SEQ ID NO: 949579 - protein, 76 aa, Homo sapiens
HEVDGSPSSNHKGIVNYLWTLNVGTPSTWEVLNHSEHHPILFLSNLHEGTYSFHLKVTDAHGESDTYRTTVEVKPD

SEQ ID NO: 949580 - protein, 62 aa, Homo sapiens
RGGAEVQLGFLRHPSPSGASPNLPPGGPTPPYYPLRREPGVAPSVPHQLPIMGSHSSKAPRG

SEQ ID NO: 949581 - protein, 123 aa, Homo sapiens
  misc_feature (8)..(8): Xaa can be any naturally occurring amino acid
DPRTPTSXNPGHPNTPEKVDLDLKAYLMMMVEDIKKEFNNSLKEIQENTAKELQVLKEKQENTAKELQVLKEKQEGTTKQVEVLIEKQENTTEHLKELNKTMQDLKRNRNKKEVGRRGREFSS

SEQ ID NO: 949582 - protein, 114 aa, Homo sapiens
  misc_feature (35)..(35): Xaa can be any naturally occurring amino acid
  misc_feature (67)..(67): Xaa can be any naturally occurring amino acid
  misc_feature (82)..(82): Xaa can be any naturally occurring amino acid
GSPPLGYLLRSPPSRVSSASLPGLPGTTSPSCPLXHSALDLCGPSHRLPPITLSDPPLRPHARWEPXCPTNFFFLANHVLSXHRVHWTACSGCHTATGLRSLIFKSPPIPPAGD

SEQ ID NO: 949583 - protein, 39 aa, Homo sapiens
  misc_feature (10)..(10): Xaa can be any naturally occurring amino acid
  misc_feature (24)..(24): Xaa can be any naturally occurring amino acid
  misc_feature (31)..(31): Xaa can be any naturally occurring amino acid
KRLQTQGGDXPAHCCCFLSPSFSXPPLSPIXSPLHPLGK

SEQ ID NO: 949584 - protein, 96 aa, Homo sapiens
  misc_feature (28)..(28): Xaa can be any naturally occurring amino acid
  misc_feature (41)..(41): Xaa can be any naturally occurring amino acid
  misc_feature (51)..(52): Xaa can be any naturally occurring amino acid
  misc_feature (68)..(68): Xaa can be any naturally occurring amino acid
  misc_feature (72)..(72): Xaa can be any naturally occurring amino acid
  misc_feature (80)..(80): Xaa can be any naturally occurring amino acid
  misc_feature (85)..(85): Xaa can be any naturally occurring amino acid
AARGGPSVRVSPTPGAQRLCRLSVWIWXSVIHLLQMGQVWXYIRTMYLGIXXQRRKEHQRRFYWAMMXEYAXVNMLRLLXTFLEXAPQLVLQLYII

SEQ ID NO: 949585 - protein, 54 aa, Homo sapiens
  misc_feature (45)..(45): Xaa can be any naturally occurring amino acid
MCPWVLEIMEWSSLLPIRHVCQYLFIKAPLAPPGIHVTLMDTPHXPESTRLGSR

SEQ ID NO: 949586 - protein, 33 aa, Homo sapiens
  misc_feature (17)..(17): Xaa can be any naturally occurring amino acid
  misc_feature (22)..(22): Xaa can be any naturally occurring amino acid
MKYPSVIFRSHCSERPXIGHSXLTSGDNSLDCW

SEQ ID NO: 949587 - protein, 67 aa, Homo sapiens
  misc_feature (66)..(66): Xaa can be any naturally occurring amino acid
MDSGLMDSGLINSGLMDSGLMDSGLINSGLINLKVKMGFHHVGQAGLKPLTSSDPPALVSKVLGLXA

SEQ ID NO: 949588 - protein, 77 aa, Homo sapiens
  misc_feature (28)..(28): Xaa can be any naturally occurring amino acid
  misc_feature (48)..(48): Xaa can be any naturally occurring amino acid
  misc_feature (59)..(59): Xaa can be any naturally occurring amino acid
GCHVSKLDFVLYDPKRLKEEPQVKSDGXKDCSTKLNSDDFPKDSHRSXSLGKKRAHYCXKIQTFEPSSCQGDKGSGR

SEQ ID NO: 949589 - protein, 73 aa, Homo sapiens
HEGQCSFLRAALTGPDSADLARERMGFESTADCIPECLYLNHGMELSCTGSRDRCKSIVPAVSRKAPVPPRSC

SEQ ID NO: 949590 - protein, 48 aa, Homo sapiens
HEAADRPRVSLTPSLLLRPRQEPYVFKPAVHPGLVLGSTSQGPCRGGG

SEQ ID NO: 949591 - protein, 47 aa, Homo sapiens
HEELSGLLTLRVCAALALHALRSGPGPAPAMENTELSEKAKLADQAE

SEQ ID NO: 949592 - protein, 131 aa, Homo sapiens
LFDLNHQVYADPKISNSYKELKRNYVFYLQYIAIIVSYVAALQIISVRPCWDDTNLLPENINTKHIGSPFHGSEQHTAYHNVLNNGQIYCLENINTKHIGSPFHGSGQYTAYHNVLNNGQVVDAAANLVIV

SEQ ID NO: 949593 - protein, 71 aa, Homo sapiens
TRKDTAAQAFLAEASVMTQLRHNNLVQLLGVIVEDKGGLYIVTEYMAKGSLVDYLRSKGRSVLGGDCLLKF

SEQ ID NO: 949594 - protein, 46 aa, Homo sapiens
MGFSTLVLALGVCKMNIEEVKSTTMTQCIASHSHVKGLGLVHSGLV

SEQ ID NO: 949595 - protein, 40 aa, Homo sapiens
HEGNSKPEEWEMPSHSSDTVATKPDDWDDYIGVYWEPTLI

SEQ ID NO: 949596 - protein, 49 aa, Homo sapiens
YEGHSGGVTAVCKPGAVVKGVPLYRHNSHFVDNSEVILPVPAFNVTNGG

SEQ ID NO: 949597 - protein, 97 aa, Homo sapiens
  misc_feature (80)..(80): Xaa can be any naturally occurring amino acid
  misc_feature (92)..(92): Xaa can be any naturally occurring amino acid
  misc_feature (97)..(97): Xaa can be any naturally occurring amino acid
TTSATEGPVWATLSHVSMDDQIEPCHLELADITPANNAGLNRHTTGNSIYHPLRRKYDGSNAVIKYSNHTKVVDNSNQSXNRHIPLRQSIIXRIDVX

SEQ ID NO: 949598 - protein, 72 aa, Homo sapiens
HEGDPCFPELLVREERTWRLALDLLQVDKGGDPPLIRETQDMRFKDPGLLDQLVNAHSEWRRCKFRAHNLNN

SEQ ID NO: 949599 - protein, 51 aa, Homo sapiens
RGEAEKRAPDIREEKTSCQYQVQTERQLIQTEFDQLIIILNNEEQRELQRL

SEQ ID NO: 949600 - protein, 37 aa, Homo sapiens
RGLYMYRAPWRAFKALISAQYSGAHVRVLSAPPHFHF

SEQ ID NO: 949601 - protein, 160 aa, Homo sapiens
PEMPGSTTTIHFRPCRLKVLSVTQPKPPNSKQCRCRSTVARKNSLERPKPRKKPREEPGYVGWPVLFWLCRVEIITEHGQDVKMFINYQHGQNNNKAEQLKLEQQHSQVDWGQQGVIMSGSPGAWSYGSGPQKERIRESICGVASYLLAVPGGDYNRTST

SEQ ID NO: 949602 - protein, 46 aa, Homo sapiens
HEATSRFSASERTATGTELDDGSLLTPDRGRHRFQMLMSRLAFCGN

SEQ ID NO: 949603 - protein, 42 aa, Homo sapiens
TRAAQDDFYRIGGVLNMNELNLLHTIWKGEFGDVMLGDNRGN

SEQ ID NO: 949604 - protein, 86 aa, Homo sapiens
  misc_feature (20)..(20): Xaa can be any naturally occurring amino acid
  misc_feature (37)..(37): Xaa can be any naturally occurring amino acid
  misc_feature (51)..(51): Xaa can be any naturally occurring amino acid
  misc_feature (65)..(65): Xaa can be any naturally occurring amino acid
  misc_feature (74)..(74): Xaa can be any naturally occurring amino acid
  misc_feature (84)..(84): Xaa can be any naturally occurring amino acid
GHCHAWSRLDAFRGSVAIKXAWRAWAGLTMPDRVGGXFAFYTQRCLGMAKXWMDNEYNCKQHCTXVVSQEAGTXVRPMLLLTHXPT

SEQ ID NO: 949605 - protein, 119 aa, Homo sapiens
GGFDFARIHPIEFYAVFPDEERARRAAGKFRGESLNAQVSVRDDGAWYLELSKVMYATYGGIGDFEQNFGAVVEPLGGTIEGWGVKHPVRALNECTSSFNQQRLTQGLAVFVYHAQKVD

SEQ ID NO: 949606 - protein, 35 aa, Homo sapiens
RGHLLPPASSASSSPPWKSGRRNLNFAIVKNGDTW

SEQ ID NO: 949607 - protein, 136 aa, Homo sapiens
  misc_feature (2)..(2): Xaa can be any naturally occurring amino acid
MXVHGDGGGCLNLHAWQDAQDYLAWIVESGQMEQALYQALQVFGVPWIEDRFERLEGHTIVTAGQKRISADLFVGADGARSGLRSAAGIEHQGREYGDAGLVAHFNVERPHQQVALQWFTGDSILGRRGREFSSSR

SEQ ID NO: 949608 - protein, 38 aa, Homo sapiens
RGGKEKTHINIVVIGQVHSGKSTTTWPSASIYAVASTQ

SEQ ID NO: 949609 - protein, 148 aa, Homo sapiens
RRRLQAAHELRIGQALGPDTGVDALDPQTTEGPLLNLAVAIRILTGLFDGLARDADGVLATAIIALRLFQNPLMLRLGGRAPLDACHIFLPFQKSVQAVRRPGLHGLGVGIGQDRGAAVLADILAVMADQAVALAGHTVLELAGRGST

SEQ ID NO: 949610 - protein, 39 aa, Homo sapiens
  misc_feature (3)..(3): Xaa can be any naturally occurring amino acid
  misc_feature (13)..(13): Xaa can be any naturally occurring amino acid
  misc_feature (30)..(30): Xaa can be any naturally occurring amino acid
ERXPGVGLGDLKXGTKLCWEMGRRVTVVSXLCWEWAAVA

SEQ ID NO: 949611 - protein, 68 aa, Homo sapiens
RGRSARYVGGLLSDRTFLLGLRKTPFGVRPWRGEPCSQGGDTADYPPCAFRWLLRGERGLAGGCGREG

SEQ ID NO: 949612 - protein, 45 aa, Homo sapiens
RGKHQMADDPGAAGGPGGPGGPGMGNRCGFRRGFGTGIRGRGPRR

SEQ ID NO: 949613 - protein, 51 aa, Homo sapiens
RGVLLTTKCLLIHPNPDSALNKDVGRLLLENYEEYAVRASLLTEIHGGACG

SEQ ID NO: 949614 - protein, 46 aa, Homo sapiens
TRSFSKPSSAILVAVATHALAAAMIEQMTLRCILKGHNGWVTQIAI

SEQ ID NO: 949615 - protein, 96 aa, Homo sapiens
HEVKDYFTAKANTCRIMGPGSGDLLLTGTTMATSIWVSSVPRLCPPASVGTSSFLCSHHRAQRLLGDNYQKLPHCPLHSDMPLPLCAVTPHPRTHR

SEQ ID NO: 949616 - protein, 39 aa, Homo sapiens
RSHPGQGRSGESVEEVPLYGNLHYLQTGRLSQDPEPDQQ

SEQ ID NO: 949617 - protein, 48 aa, Homo sapiens
TREPENSLQEVQVISLGHQADGRPIVFGDSQNVVSVNDTFDEVINLSG

SEQ ID NO: 949618 - protein, 65 aa, Homo sapiens
MHLKRVAAPKHWMLDKLTGVFAPRPSTGPHKLRECLPLIVFLRNRLTYALTGDEVNYICLQRFIK

SEQ ID NO: 949619 - protein, 56 aa, Homo sapiens
TTTIFDPQSALTHITVLKHNLTIVINRSNSTAATTDVPEATVFSKSPVILGQPNIL

SEQ ID NO: 949620 - protein, 77 aa, Homo sapiens
YEAYSLLPYGAGILISTYQAAVTPPSPPIPATPLSAGSSGFKSVGPLRGLFAVCYALGLWSHTAGIRMAFVPASTGL

SEQ ID NO: 949621 - protein, 98 aa, Homo sapiens
TRCIDRCVCSTWNHPSPQVDIVSPPQQLPEEQTSVCPDTTKLNQTCIQRFIKNHGKGRNEINYPAGVMGVITTDNTGNNFHLIYGTNGRFAVHHNRPE

SEQ ID NO: 949622 - protein, 59 aa, Homo sapiens
MAYPENWRAFKALIAAQYIGAQVRMFTAPYKLDFGQTNRTPKFHRKFPAGKVPSFEGDD

SEQ ID NO: 949623 - protein, 36 aa, Homo sapiens
HQDDSKNVHFVFDAVISYTITNKLKERCLFCGTSGP

SEQ ID NO: 949624 - protein, 54 aa, Homo sapiens
HEGNQYERKRDKAPKLTVTIRALLHNLKEKIALLKDFIANSCVNTSDNTALKGT

SEQ ID NO: 949625 - protein, 40 aa, Homo sapiens
YEDEHIFWAALFVAQFPLIGRVSSPHPPFPLHSRPGSRRH

SEQ ID NO: 949626 - protein, 53 aa, Homo sapiens
HEASRGYFWRWRGSKKGIPCIIFHLLLIEGNMSESRAKSNQPLVSKHVKDGTE

SEQ ID NO: 949627 - protein, 50 aa, Homo sapiens
HEGGVRPSMERSWPSEVTGSYDRDRTPQLVVTMGFTGFGVGNKAHIFALV

SEQ ID NO: 949628 - protein, 74 aa, Homo sapiens
HEALRRNRRPGRPKAQIPREPHLSFVDETGPCGVRVEPRRNEGPRVSSECGTGWSGVPPKAAEHKPRITPSAAG

SEQ ID NO: 949629 - protein, 63 aa, Homo sapiens
YEENYTLTMTDDQCLLLSEIAGDLFRGPATFSQLVWQSVEGTFFINMTEIEDFPRVPHHGLVV

SEQ ID NO: 949630 - protein, 71 aa, Homo sapiens
MEDAETVADKIRDVLARPVTMDGHDLTVGASICIARWPENGDSAKDLLLIADAAMYAATGGAEGSPLSARS

SEQ ID NO: 949631 - protein, 192 aa, Homo sapiens
  misc_feature (18)..(18): Xaa can be any naturally occurring amino acid
RSQGGWRTGTGGEEMSHXVGADLTQAVLARLDSCSDPRFKAVMSALVAHLHAFMREIDLTPDEWMAGIDFLTETGRTCDAQRQEFILLSDTLGASMLVVALQQARALGSGQGATEATEATVQGPYYLDGAPDRPLGADIGEGVPGEPTFYAGRVTDTEGNPVAGALLDAWSGDGEGVCDMAAGGRRGMPARG

SEQ ID NO: 949632 - protein, 100 aa, Homo sapiens
TRLTNIYCLVAIGGSDNFYSVFLGELSDIISVVHASIAGCRIIRCMCVGNRHVSPGTQQYHRPGAVTHSTKFPDTVQIRRVVERLSTLGNVTTCTDYVGL

SEQ ID NO: 949633 - protein, 91 aa, Homo sapiens
HEGGGSGRKRISRLREAGLTRSQDNKFSLFHHQNSLYPGEQPPTGFFQSLRGDGNRYVHPDIAYGSTTHAFKFQHGVIATLVSPVSTGSYI

SEQ ID NO: 949634 - protein, 73 aa, Homo sapiens
TRGPTSAIFNAFDIIIVMLVWSTGAHVQMVRDMSPNSPEGSITNAGIPHSIINCVKQISVARLENLSQSPPKG

SEQ ID NO: 949635 - protein, 60 aa, Homo sapiens
MPEAKKVDAGAKVKKGNLKVKKPTQGKPHCIRNPVLVIGIGRYSRSAMYSIKAMFMRKYS

SEQ ID NO: 949636 - protein, 45 aa, Homo sapiens
TRRTHTEPYVLNHTFSSSCHAESHKLILNFEDTIIYQCRVCVSKE

SEQ ID NO: 949637 - protein, 93 aa, Homo sapiens
MVNMATSQSNYFLMINHIVDNYLRCLIGRGDIVGTKQMEQIFMSLHVNVVELLGIKTIKHIVIRWQLENCPALAKQSPHSLGNVRFVFNTVVL

SEQ ID NO: 949638 - protein, 40 aa, Homo sapiens
MTEKAPEPHVGEDDHHYLDSKLNEKPPPQKSLRELQEMDK

SEQ ID NO: 949639 - protein, 71 aa, Homo sapiens
RVQVLVLDGPCQLLGRLPAIVSNKVLLGRHVMILLCQRINISGIFFFHHFLYLAFLRRRVNITPSRGSYHF

SEQ ID NO: 949640 - protein, 74 aa, Homo sapiens
MTSLRSGHKVLTQNEGMNGIPLPPPKQELVLVPTPSMLASRLKAWFPNVDVSIIPQGKEATEPSCPVGEASHSC

SEQ ID NO: 949641 - protein, 86 aa, Homo sapiens
MRSFDQRPQNAKLAEFPHYPHMMSHEKVKHTSQVLKAARISAKNYKAKGIRGLYYRFSFCVNGTIIYRAAKFCLVQRVKGTIHESK

SEQ ID NO: 949642 - protein, 41 aa, Homo sapiens
YEGTLSTYPDNWRAFKALIAVQYSGAQVRVLSAPPHFHFWH

SEQ ID NO: 949643 - protein, 117 aa, Homo sapiens
TRSIARAFGGPLSHLFSSRDIPASSWILRGTGGHPDHPPQSEPLSMCPSSYVVARNQIMCTEQTGSGRVIAKWGPGGSQRGVLRSTRPRGLFREKPNSPETWWPHSPQHCEKQLCFT

SEQ ID NO: 949644 - protein, 75 aa, Homo sapiens
RGKLIREVGLQVDDSRGHSVIVRGPPVACAALGAGVAMNVLSPQSLVGGKQGPIPGPQGGAVTHSRFPASWGSDS

SEQ ID NO: 949645 - protein, 43 aa, Homo sapiens
TREGSMYTQIGRVYFLDSSALDKVLMISSFIGLEALFTALACF

SEQ ID NO: 949646 - protein, 36 aa, Homo sapiens
HEEHSSYPDSEGAPDSLWDWTVAPPVPATPYEAFDP

SEQ ID NO: 949647 - protein, 35 aa, Homo sapiens
MATISTKSDGEMVLPGFPDADSFVKFALGSVVAVT

SEQ ID NO: 949648 - protein, 74 aa, Homo sapiens
HEVSLCVAVVGNCNNPGHLYQVKIQIFSKTPIGKTITLEVVPNDTIKYFTAKIHYNEGIPPDHQRLIFAGKQLE

SEQ ID NO: 949649 - protein, 41 aa, Homo sapiens
MTSTPGILEKDGGTSVQAEASLPRNRLFKYATNIELGYWCD

SEQ ID NO: 949650 - protein, 93 aa, Homo sapiens
MAVFTAVMKDLNSELCARLQLQKSHYLFLGPTRGHYYGGSLPNVKHIVSGTMVLPFQTPFYSSGLETNLPTRDHGLVDMVYLERGRIDFTNRR

SEQ ID NO: 949651 - protein, 76 aa, Homo sapiens
HEGRAGFAGDDSPRAVFPSIVGRPIQHGVMLGMGHLDSYLGDDAHGKRGILTLKYPIGHGIVTNWDDMATIWHHTF

SEQ ID NO: 949652 - protein, 59 aa, Homo sapiens
RGGRLSYNSLRISSDSPDFESVHGGLDPSTPLGHTSPFLSASLAQQGKYCEAPRFGANW

SEQ ID NO: 949653 - protein, 61 aa, Homo sapiens
MSGAHYASKPHHQGVVSQFLGAKGNEKTCRETDLGNPAGNKLAKPEDKRLRLDDGQTADGQ

SEQ ID NO: 949654 - protein, 36 aa, Homo sapiens
TRWLSRGYGDNHMTLPDTPWLCLCTMRVTINCQSIQ

SEQ ID NO: 949655 - protein, 201 aa, Homo sapiens
  misc_feature (61)..(61): Xaa can be any naturally occurring amino acid
EGQEIFRLAGEEADHGAALEQPAGVALADEGGEVSAEEHVEDAVRPALGERADGGAGIDAXEGRELLGDHLESRHRRAHQALEGGDRRLAVLVVGRHDGPALHALPLGGIDQHLGLHVGAGADAERVGVAAAHGERVCERLGGEIEHLLLVGEVGEREAHIRQEGAGDEGDVLAGDELLGDAHRVTGGRAVVAEDDFERAA

SEQ ID NO: 949656 - protein, 37 aa, Homo sapiens
MRAPQTLLLLLSGALDRTDTCACSHSMRYFYTAVSRP

SEQ ID NO: 949657 - protein, 61 aa, Homo sapiens
HEGYPPNWEKKSRISTLHVIGHVNSGTSITNGQPIDKCHGSYTCPIKYFCTDAADMGTGSF

SEQ ID NO: 949658 - protein, 75 aa, Homo sapiens
HEAWGNFHSLAEGINWAGVCINDTDQVKAEYVPRSLTTSSGGTNKLNHCPHLGGYSHKYIGDIMMTYMHCPDIFI

SEQ ID NO: 949659 - protein, 38 aa, Homo sapiens
TRGNGYGIPRNSTCLRVTPGNLNINMQAKSPPPMNLGM

SEQ ID NO: 949660 - protein, 98 aa, Homo sapiens
  misc_feature (43)..(43): Xaa can be any naturally occurring amino acid
  misc_feature (50)..(50): Xaa can be any naturally occurring amino acid
  misc_feature (54)..(54): Xaa can be any naturally occurring amino acid
  misc_feature (79)..(79): Xaa can be any naturally occurring amino acid
EFWILGGGTTRTTLNHALCATSYVMTHITASTSIISPHWWVNXGLGTIRXSLLXLPCQWVCTASTGRNERESVDVSVKXCVSREGVDLRFEWYFYLDM

SEQ ID NO: 949661 - protein, 78 aa, Homo sapiens
GNSPGPVQSRKDSIINPWVLSKKWFLSKDLREVQSEPCRCCETVAQDSAKSHGRSLPETLEDQKGAIWERLEMTEVVT

SEQ ID NO: 949662 - protein, 217 aa, Homo sapiens
  misc_feature (2)..(2): Xaa can be any naturally occurring amino acid
MXTRFPTTPNTARYVPAPEVINAESAQAMRTVCRRIQDGEYAKMFISEGATGYPSMTAKRRNNAAHGIEIIGEQLRSMMPWIGANKIVDKAKNESTLNRLPGPSGLSAGQAAPKRPDLSGRFVLSHKAFMSDVEQFQVKDVIYLHVRFFGGQMPRKKTADDKPLTGEKASSPAKTKTTADYVRDMRTRLRDAGLVKREFWILPENATALRGIEKAVD

SEQ ID NO: 949663 - protein, 115 aa, Homo sapiens
RRHQRGLHCSALPTHSSLRPPPTGQVAYPHQRGLQCSALPTHSSLGPPPTGQVAYSHQRGLQCSALPTHSSLHPPPTGQVAYPHQRGLQCSGLPTHSSLHPPPTGQVAYPHQRST

SEQ ID NO: 949664 - protein, 106 aa, Homo sapiens
  misc_feature (7)..(7): Xaa can be any naturally occurring amino acid
  misc_feature (13)..(13): Xaa can be any naturally occurring amino acid
  misc_feature (22)..(22): Xaa can be any naturally occurring amino acid
  misc_feature (24)..(24): Xaa can be any naturally occurring amino acid
  misc_feature (84)..(84): Xaa can be any naturally occurring amino acid
ATLRILXVAHSIXKKLSNVACXRXVKLRHLSERPASLTHSLEKFWILPSYLLVYSYSYSPVSTSHKCPALVYTAGLHCFSKPSXLISLGAIPKPPLLTLKVNNLCW

SEQ ID NO: 949665 - protein, 201 aa, Homo sapiens
  misc_feature (22)..(22): Xaa can be any naturally occurring amino acid
  misc_feature (54)..(54): Xaa can be any naturally occurring amino acid
MLAGSFVFWLASIACSWAPNLXVMIIIRVIQGAAGAVLIPLSFQLIITELPPSXIAMGMALFALSNSVAQAAGPSIGGWLTDAYSWRWIFYLQLAPGILLLLAVAWSIDAKPMQLSLLKSGDWGGILAMIVGLGGLQIVLEEGGRKDWFGSDFIVWVSLIAGVALVYFVLSQLYGRRSFINLRLLKSYNFGVASAAMFMST

SEQ ID NO: 949666 - protein, 72 aa, Homo sapiens
AFSKGPPPPGVRQALGSPENKTLASGIRKWGAGAKINGNNQGGGPIPLGDKWAGGQTNPFGRNLEEGPFPFI

SEQ ID NO: 949667 - protein, 79 aa, Homo sapiens
VVPPRKSLLGHFNRRALGKIDLQFIAAASKFGHGRFPTVEEKKAFMGPLNKGLIAKEEGGYCQEQILQLVGSPKKLFFP

SEQ ID NO: 949668 - protein, 73 aa, Homo sapiens
GHPALGVKEASALDFDVSSNPIYWTDISLKVGWARTCPRAAYMGKPSLWTCLKGFKHFVLKPYNIYCNPIPAN

SEQ ID NO: 949669 - protein, 123 aa, Homo sapiens
PRRPMTDITSLFSMTDVTSLFSMTDITSLFSMTDITPLFSMTDITPLFSMTDITPLFSMTDITSLFSMTDITSLFSMTDITPLSSMTDITPLFSMTDITPLFSMTDITSLFSMTDITSLFCRR

SEQ ID NO: 949670 - protein, 138 aa, Homo sapiens
RRQCEFGKTSLNYLGHIVGGGELKIDPSKVEIIVNWPKPKSATEVRSFFGAAQYWRKFISSFFLIAAPLHALTGLNKVFQWGGKQKKTFDTLKENISTTPVLALSDLQRPFKIQTDANDYAMGAVLTQHDKPICYNVD

SEQ ID NO: 949671 - protein, 79 aa, Homo sapiens
QGFLDQVAHKLPFAAKAVNRGTLKKMRKDPEERERNHQNPWTFEGIAPANMLGIRKVLRPYDLTPKGKYWGKFYMPQRV

SEQ ID NO: 949672 - protein, 115 aa, Homo sapiens
VDQYRDSLSAHLFTSLAASVKYLTASSAVMRIIPFGACDEVTKFKPVSIRNVVGEIDRLSADFELFKHVIARSYCHVATFIYAPCFAVRLSIYANLPVTSKASTGIASRCFDIRR

SEQ ID NO: 949673 - protein, 64 aa, Homo sapiens
MRLSKPDKYVELGHLIPTLVSAFGDSGSPPRLHTRITGGAETRCPKSNSRPIDPKPCPQGGFPL

SEQ ID NO: 949674 - protein, 89 aa, Homo sapiens
  misc_feature (57)..(57): Xaa can be any naturally occurring amino acid
  misc_feature (76)..(76): Xaa can be any naturally occurring amino acid
  misc_feature (85)..(85): Xaa can be any naturally occurring amino acid
ILPPYLSRSSTSHFQVESDRTLHLNICPDVSSRLFVGISRTLLRMIVLPGVPMWPRXQPQTGQLGAGTTANGYIHXMTKAYLPLXVFNK

SEQ ID NO: 949675 - protein, 35 aa, Homo sapiens
GEFGTRAEKMADDKDSLPKLKDLALLKNQLESLQR

SEQ ID NO: 949676 - protein, 71 aa, Homo sapiens
KGGFLSKAWDYIRELGQTNQGMQETFKKAERLQMDNELLRHQIEELKNENALFGAQLQQPNLEMVGEGPRQ

SEQ ID NO: 949677 - protein, 55 aa, Homo sapiens
  misc_feature (27)..(27): Xaa can be any naturally occurring amino acid
MRLTRELDQGTWQTQSREELWIFEAVXVAPSRNFPFTILFPKCPVLCSNLSPPPS

SEQ ID NO: 949678 - protein, 45 aa, Homo sapiens
  misc_feature (44)..(44): Xaa can be any naturally occurring amino acid
PAGLLHHKLLLMWLQPHRRLPALTGSASGPWHWQSPLFKRQCVXE

SEQ ID NO: 949679 - protein, 66 aa, Homo sapiens
MAETGFWQPGDPDAGLKVPFLGGGLSACGQNLQSGQDFQVDIFCPNLIACPCPSGKWGSLKETGPL

SEQ ID NO: 949680 - protein, 122 aa, Homo sapiens
GDHTRCKTVLTGKVGGLLAFAKRRKFCIGCRPVFSPQGAVCEFCQPREFELYQKKVSHLNALEERFLRLWTQCQPCQGSLHEDVICPNRDCPIFYMRKKVRKDLENQEQLLRRFGPPGPKAW

SEQ ID NO: 949681 - protein, 30 aa, Homo sapiens
PAEGRARGCWARAVYPYKNSTEKRQEDPYY

SEQ ID NO: 949682 - protein, 88 aa, Homo sapiens
GREAHPGKLRNPITEVLQGTLEPNDVPPKGCKVVIDIQYKDTITKKEWHTYLKKAPQYKERLGSQVITSTAKCMCHTVPRKHLLCLQV

SEQ ID NO: 949683 - protein, 98 aa, Homo sapiens
MKHIPVSYQQKRGGVHTGNIPSPPPKGTQFYCAGEFLLEFRPFCPGAQSIPGTFNPQGGPGRFLKFFPHGKKLGTTGEFSPHPFKPHKGFSSSLPVPL

SEQ ID NO: 949684 - protein, 99 aa, Homo sapiens
MPLPSSLGDRGRLLFHQNLTLTHAHTHSHTHSHTHTQTLSLSFSHIHPHTHLFTRSHTSSLSHPHYIPSSLITLPPTPHRNCFTYLTPHLHILTLKGRS

SEQ ID NO: 949685 - protein, 36 aa, Homo sapiens
ILPPYLSRSSSYHFQVEADRTVHLNPCPYCLVVTSM

SEQ ID NO: 949686 - protein, 47 aa, Homo sapiens
KWMEQGRNKVSPEETEEEEPGDTIPHDSSGTRTQARQHAQLTGTHGL

SEQ ID NO: 949687 - protein, 102 aa, Homo sapiens
LSFVQGDKNGSICIILHDTFQFTQHLFLKMLSFFPPLDGFSSFVKDQVTIGVWVHFWDFNSISLIYLSVAVPVPCSWFLFVCLFLFCFVFSQLQISQSARFY

SEQ ID NO: 949688 - protein, 84 aa, Homo sapiens
ELIEDKGCEPRIGSHQGLSEHELRKNDREQADQYWDSRRNRTNPPPGDGNGPSTGGLSPTLLNPPLFSAPGPPSAGGGSPPFSP

SEQ ID NO: 949689 - protein, 36 aa, Homo sapiens
HEENLQSFNEITAMTGDGVNDAPALKKAEIGIAMGS

SEQ ID NO: 949690 - protein, 63 aa, Homo sapiens
TRGNDAARSDKCKWIAIHMTRITPRNHANQKVRNFVVHFNNTRESAHDNNGMHIRTVTRYLKD

SEQ ID NO: 949691 - protein, 84 aa, Homo sapiens
HEGSSLVISPPVRTARVSSRLTSPRSPSTLSLRSESESVSATEDLAPESSQGEDNSGIEEVLEQEEFEKEGSEGSSSEEDEPLP

SEQ ID NO: 949692 - protein, 86 aa, Homo sapiens
HEAHHGNTLDLSSANLLSFTGRIATTVLDIYHVMIIVLLFIWHPVKVAHRMASCKIAQMGHITIGDRISSFRLITMLFIIIPNATG

SEQ ID NO: 949693 - protein, 166 aa, Homo sapiens
HEGDDQRQLHRRLQRPGDEEARRIGADAEIGGMAEGDDAAIADEQVQREGGEREDHDLDADLHLVGVAEDRDEQQGDGEADPHERLRSGEGLEVQDALRQHGAARGHLRLAEQAPGLHHQHHRHQQEDQHEGDLREDEDAEGLQHLDDQRRDEGARHRAHAADDGD

SEQ ID NO: 949694 - protein, 63 aa, Homo sapiens
MVTRENVLAGESLRERDRSQQSTAERGCTAGYPKKSQRQGYNPHHAKGYTRAQRSPKACHERC

SEQ ID NO: 949695 - protein, 137 aa, Homo sapiens
EFLVLVIGSCFEIYLMAVLSLGLVVSIVEERLGWDAIRVGSVYNGGREIVRVGAVGSVRVGIGRDREGSAENDGQSGFVFRVNDIDGDDGSDGGKDKVGLIFLFGIVVVWSYIVTTVFYCECRKRHVGRGEDESVTV

SEQ ID NO: 949696 - protein, 121 aa, Homo sapiens
HCMGDHIIVFTVWPISAQETMVTTKWLVHKDAVEGVDYDVTRMREVWDATNDQDRRLAEENQRGINSTAYQPGPYSKTYEFGVVNFVDWYSERLLSNLGAEPAPYLKGVPVHGYSKSFGRR

SEQ ID NO: 949697 - protein, 108 aa, Homo sapiens
HGAPTNATECLLLRHNRFRRLLLQSVLFDELCRYHTFTADQPIQLRARQSSGQQADTFFVVFFFLYGAQFEKLCTQSSKTLRQAQGADKQIAAQQFGNRLFKQLQTST

SEQ ID NO: 949698 - protein, 118 aa, Homo sapiens
MGIYDLLSSSLLDAMAAHFTFTPPRNPGHNTVGALQAMLKGDAKVLICLGGNLAPAAPDTMRTEKALSNLDLSVQISTKLNRSHLTPGREALILPTLGRTELDMQATGSQFITVEGRR

SEQ ID NO: 949699 - protein, 151 aa, Homo sapiens
LVRPKRRLGSPSVPPLDTRLDVARPRSFLQLHGRESLSPAQPARSLRGTLQKDRVSVIPPWPYPESLPRPTSLQALWRSPRLRAPGLLDTRRGLRSGHPERRRSEPPGGERAGPQVAAGRSPLLSEPSRPAPGLRSTPPADVKGKGAESRG

SEQ ID NO: 949700 - protein, 57 aa, Homo sapiens
ADHLKPFLDDSTLRFVDKLFGAFGEGRSFWPSKFSSDQEQKTGAKGWVLAIRGETLS

SEQ ID NO: 949701 - protein, 36 aa, Homo sapiens
HYLHKLCALQPANELLKRTVTLHIFNAYMSSFLLGT

SEQ ID NO: 949702 - protein, 99 aa, Homo sapiens
MGLGVDDDLCFLVHRSHAGIALNNAFARGHLGRFVIGAIGEAHGAFGTLAVFCVLVQPLAQLFGFFLQPRKLFGLTRRRGFIGGCGIGLTVFVQHLLGG

SEQ ID NO: 949703 - protein, 38 aa, Homo sapiens
RCRQGRTRSSQTKSAHGQTTLQPDRADQTAPMAERPRP

SEQ ID NO: 949704 - protein, 41 aa, Homo sapiens
PGETPDEEGGPPNMAVLGKTWVITNCVPWYMWVEKYGFKIC

SEQ ID NO: 949705 - protein, 70 aa, Homo sapiens
SPDAYHRGSNKALLRDARFHELKVSADEDCRVNPMEVCPRAGLYIFVLRGLRGSATGQRRGAGAAHAARG

SEQ ID NO: 949706 - protein, 43 aa, Homo sapiens
MGPTSGGGEGTGASMMSTTGLLTAIEDTMPPGTFDTRGYEGPW

SEQ ID NO: 949707 - protein, 151 aa, Homo sapiens
PVREVWACCGVCLRTQQPRSRHLPSAQVLSQESLRRKKQVDLVFRVQEPVPLVLFHHVFDLDATGPQCGHDVVGLRLDHTNIVGALHNQQRGADLIHPADGRAGEHVGFLLRHRGIADVAIPVVGQVRTDERGKGAHEVGQVGDAHVIDGG

SEQ ID NO: 949708 - protein, 95 aa, Homo sapiens
EQEGFLPGYQGLLVIEVKWTNYVSMLNPQAKIVNGGANLMSSAFREANSGSERAIRIPAANTFVDVCAHAEAGVRAPPAINARMPFNFFFPLECH

SEQ ID NO: 949709 - protein, 126 aa, Homo sapiens
PRIRHEEKDVVETLAGRVPAEGWNPAELSKEFGELEYRTMRDSVLDTKVRIDGRALDTVRPIAVKTGVLPRTHGSSLFTRGETQAIVTITLGTARDGQVIDAVAGEYKENFLFHYNFPPFSVGECG

SEQ ID NO: 949710 - protein, 120 aa, Homo sapiens
RETAASYTKSRKSCVPSCEQIPPFAQKLLTSTLSAPHGRPSSQAASRHASSLSCSPATSPSSARSPAARAPMPGAIAMKASGSREVRTRSTRSRRYSGLSCSGSPSANKDASAARLPCAA

SEQ ID NO: 949711 - protein, 36 aa, Homo sapiens
TCVENGKCLACRKPYPEDPAVHNPVSQAVLQRFPGE

SEQ ID NO: 949712 - protein, 72 aa, Homo sapiens
RLACDVIPTGRVDLKGDVGYCSHWHLSQMCQRFYAGQARSSAGRFAEHVPGGANQISPAQVQDESYGIKVAL

SEQ ID NO: 949713 - protein, 79 aa, Homo sapiens
RSDVMHKGVRKRRQRKGCGGMSMVPPGQRKERGIRWKGGSQGKWRSMPLVYRLKPDPKIEQECQVHQKWYSRGHGNGSD

SEQ ID NO: 949714 - protein, 103 aa, Homo sapiens
CTRKLPGRLLRTDLQPLSEYNLGRRIEICLEPLQKGENLGPQDVLLRTQVRIPGEWTYSPSLDLVWNATQGGTTGSLRQRVSDLSRLPVEKIETAKYFPENFE

SEQ ID NO: 949715 - protein, 42 aa, Homo sapiens
QREQDKQRNRRRANQVQQRQQILAPEQPAQRAAVIRADDVGG

SEQ ID NO: 949716 - protein, 56 aa, Homo sapiens
GKNMDANEIPPENKVKIFGISGVKSQVGKPCTQKCNPSFIAGQWKKAVQWVVSVLK

SEQ ID NO: 949717 - protein, 79 aa, Homo sapiens
PRIRHEDEMQTEADDYAGGLEGEMFHMGDGVRSTNVLVARLTCSMPCGQRMTVTFVPPSEEKSQMRVTPEHSGSGPKFF

SEQ ID NO: 949718 - protein, 82 aa, Homo sapiens
PAATVGHRRLLLSVIGDGPSCAGNRPPSGWSGPAQSLVYTQDLHEFSVWEVGQDHGEVSKKWRKHSLASAGKVHPATVSALH

SEQ ID NO: 949719 - protein, 39 aa, Homo sapiens
WTPQEIERVAERDETQLWTRTPVDDDCLERLNLPTPKKK

SEQ ID NO: 949720 - protein, 115 aa, Homo sapiens
  misc_feature (37)..(37): Xaa can be any naturally occurring amino acid
  misc_feature (46)..(46): Xaa can be any naturally occurring amino acid
MPPTTPQPPTTPQLPTTGSRPTQVWPMTGTSTTIGLXSSTGPSPSXNHTPASPTQTPLLPATLTSSKPTASSGGKEPPAEPMERAAAGGPRYTSGVGLGMALLPGSHLPLSRFPA

SEQ ID NO: 949721 - protein, 99 aa, Homo sapiens
QGRGVSGIDLCVGNNSLPVMVMSCFRIRDHPVLRILSQRTRKAGEGEQLDVDESACSVPSDPARVDSGVDLVLITVPPSRTWTCDVRTCPVKGHEFVSR

SEQ ID NO: 949722 - protein, 70 aa, Homo sapiens
LVGCMKPRKFLDHYGVVLRICEEAWTNVLETCAGSCFRPPKSGKRLGDPTSIEDPSQAQRKLLTPGILIK

SEQ ID NO: 949723 - protein, 36 aa, Homo sapiens
LGRTFSFPLSEKEPPEGFEQGRVLICWILNKDPPRN

SEQ ID NO: 949724 - protein, 117 aa, Homo sapiens
QNTCPFVRTPSPPVLYFASPEGGFPGALSDQPLGSPGLKLSPGPLTILARGACLTPGPSWGFPFCFPPGSPMFSGGGPLLGPLLCHHLKTPPPNTESPLGLPPWSPLGAVFDSTQLL

SEQ ID NO: 949725 - protein, 56 aa, Homo sapiens
ARGSWYLSASARRAAAEAMFESDFRTEFYEVVQSQRVLLFVASDEDALRACKILQA

SEQ ID NO: 949726 - protein, 146 aa, Homo sapiens
QDNDLGSQLPWRGLLMIVWGLIPDQEWRVMSPCDIMAGPFCPYCFSPTLFDFSLRGGGQRKSPVVLGTWDPKLKTLQLGLPCQCHKVPWPRKTGFFPFRPGHPVAILRVLPPPPGVTFENQKFVPVDFFWGMDHCPFPPSINFETC

SEQ ID NO: 949727 - protein, 117 aa, Homo sapiens
KKDFLKKSLQTQVFKVGLAKSIPHAWVLIPQPQIRVRKQVVKIPSFIVRLDSQKQMDFFLGSPYGGGPPGRVKRKNSKKGQGGAGVGTHKEEELSPPVPPGVVDCFVFPPKKQDQRF

SEQ ID NO: 949728 - protein, 106 aa, Homo sapiens
EPPGVKFNLSPNMGSFLVAYETPKEAPAPMEGPNGQDLMGHPLSVDWCFFRGPPKGKRKGGRKPPKSPDRRGCCQVLCCPGVFFKIPFGHPPLGKKGWGGTCGGYI

SEQ ID NO: 949729 - protein, 127 aa, Homo sapiens
PPPPPPFPGVLGNQVSDVVFQFGNFLALESLRGVWETHFPVASMQLQKICDAPEIKWERSSFFSILVEPAFIVPGKLWKKRGLCDLILWARTCILCFYPQAFLVFPTPTPLHGVFRTSNKNFFSGFG

SEQ ID NO: 949730 - protein, 45 aa, Homo sapiens
MPIYKGSIGPDVIDIRKLYGATGMFTYDPGFMSTAACNSSITYID

SEQ ID NO: 949731 - protein, 105 aa, Homo sapiens
QFQSHSRHLQPAQSQSCIYRRNAEIDAGGVCAHGVHHIMPAENGNTERTINTVDSEICAFFCLLYFFQAEIIVRTFAVCRCPASVRLLAQQRLIPEIKQHSVFRR

SEQ ID NO: 949732 - protein, 129 aa, Homo sapiens
LDTKLRALGLDTKLRAPGLDTKLRALGLDTKLRVLCNWIQDFLTGRTQAASIGNRTSSTLILNTGAPQGCVLSPLLYSLFTHNCVALQDTYSAKPKELIVDFRKQRRKHSRINFDVDAAASLVVVVVGG

SEQ ID NO: 949733 - protein, 30 aa, Homo sapiens
MRSYALHPCSVELPMINIPGQLAIRTISGR

SEQ ID NO: 949734 - protein, 82 aa, Homo sapiens
FRVKYNTHCSETRLAGEGELTEEKSGKEKDKESLLNHCLMTDFHISMHTHIYALTHTHSHKNTHTEKMVQPPESIHVTITCQ

SEQ ID NO: 949735 - protein, 137 aa, Homo sapiens
VDIVAIAPELLNGVYGGTKAFVLAFTQSLHHELSEKGVKVQAVLPGAISTEFWDIAGLPIQHLPGEIVMNSEDLVDAALAGLALGELVTIPSLPDIADWQAFEQARQALKPNLSHQVPAARYTVKGWPCNLPPDSVD

SEQ ID NO: 949736 - protein, 132 aa, Homo sapiens
MPQLPILSQRIVLVSRPQGALTPENFRLERVNLPELADGQVLLKTLYLSLDPYMRGRMSDAPSYAAPVEIDEVMTGGAVSRIEQSRNPKFAAGDLVVGSTGWQSHSISDGNNLIPLPKGLASPSMALGVLVD

SEQ ID NO: 949737 - protein, 60 aa, Homo sapiens
MVLRFTRTLLLDGLACGQRNILPEPEGDLPMNAKPDINEILAMTGRKSIYQPEQQGLICR

SEQ ID NO: 949738 - protein, 49 aa, Homo sapiens
MTWPYSNSFKLIKAYQKHSNTYQSCTNHKYKSVLLKKWTQDVMYDAAAN

SEQ ID NO: 949739 - protein, 101 aa, Homo sapiens
CTAHTFEGFQIMKKNWFGAALLGSLVLAGCGPLSQVDSEGHTENPVFPEVDKATFHTGSYPNIDNLRQVREGVTRDQLYDLLGRPHFAEGFKVREWDYRRR

SEQ ID NO: 949740 - protein, 131 aa, Homo sapiens
GAGLRCRFWVVDVAIVQMNRIYNLLTIGLSANKRGFPIAHKLVPFLCVILFSYTQPSVSVIPFSYTQPSVSYTQPSLSVIPFSYTQPSLRLIPFSYTQPSLKLIPFSYTQPSLRLIPISYTQPSGRLIPCR

SEQ ID NO: 949741 - protein, 151 aa, Homo sapiens
PDDGDILWQAQSIEQLKEDYTRHLLYLGHKPAVKSLLTPYENLLSYYQMHHKEPEGERIWQALEEVSLIGYEDVPVCQLSAGQQRRANLARLWLSEASLWILDEPFTAIDVAGVKRLTERFHQHAELGGIILFTSHQAMSGHFGSLKLTVD

SEQ ID NO: 949742 - protein, 141 aa, Homo sapiens
PLKHWKVGPGQKVGIVGIGGLGHMGIKIARAMGAHVVVFTTSLAKTEDAKRLGADEVVLSTDPEQMNRHAKSLHFILDCVSAQHNIDAYLNLLRVDGTLTLVGAPMDPLPVTSFSLILGRRNFAGSPIGGIAVDAAANLVV

SEQ ID NO: 949743 - protein, 135 aa, Homo sapiens
IQAQPATDVCGMGIRCTQHCSGGWNDRQPWVTLSRTVSSVLEIDSPSATLSAGRNMVITGQNFTNRYSVVSAANDLSITGENILNQAATGGSGSQSQEYGGTYKISKGQYNQMVAAVQAYNRAHPQGSPVDEGRR

SEQ ID NO: 949744 - protein, 102 aa, Homo sapiens
  misc_feature (13)..(13): Xaa can be any naturally occurring amino acid
RKLVVIGRLGPAXAQRRQETARADLVQTVLQMVDQPSVRLAPFDAAAHRLTRKTLEKSFLTIFILAQVRRYGPVRSCVRRRCSTPAHPDRKVFVTHRGIAVD

SEQ ID NO: 949745 - protein, 100 aa, Homo sapiens
YVSVNRVSSPLYVSVNRVSSPLYVSVNRVSSPLYVSVNRVSRPLYVSVNRVSSPLYVSVNRISSPLYVSVNRVSSPLYVSVNRVSMLKRETTVSSNRRST

SEQ ID NO: 949746 - protein, 78 aa, Homo sapiens
HSRIQGKSKLVKVLVPVFVLGPYIGSNHCLQGSIYSLSEIGLWVIGRGQLLPQVPSLAGLLKEIRDKLGTSIRQDVVD

SEQ ID NO: 949747 - protein, 114 aa, Homo sapiens
STFLIIRKTCVAYSVFQVNVPNRKYCSRTATAVQGPLSCSVCVSDGGRMLSSCILGLPFFFFFFFFFFFLTTVNLLCIRKLNLKTNSIVKRYFETCSAMNRDNISFVDAAANLV

SEQ ID NO: 949748 - protein, 56 aa, Homo sapiens
AVFKAGNIRQDGIDRRRETFQFVAARIKRLLILRKRIREMHHFRSGNSDRTSLQEC

SEQ ID NO: 949749 - protein, 82 aa, Homo sapiens
VDRHLEQRKHVGEIAWFKFEGLKLRLADNTFYTPDFVLMLSDGVMEAHEVKGFWMDDARAKIKIAADMYPFRFIAVKAQTST

SEQ ID NO: 949750 - protein, 121 aa, Homo sapiens
RRRDDFCPVMVTPVASKERSSFVKAMFAQDSVFQRKSCAVRCSFAGVVAFFSSNHDPMKGRAGGVFFIFYFENEIMRFWFFESRRKFFFRVSEYMLLFLAMTVSIDIAMAFCFSLPANTVD

SEQ ID NO: 949751 - protein, 67 aa, Homo sapiens
STWNLQFSFRELPNGVRTSHMVQPGKSCHWFLTIFESAVWEETKHATSQDLWVPCSAFRTTGCSADR

SEQ ID NO: 949752 - protein, 125 aa, Homo sapiens
MYCADRCGFASLQKPQKLKHLFEQYGEVGRIYCTPEGMLKTGSHYSGCASAGMVIMFGKRERGKRSMNCAMRDCLKRGAALHGYSGMCQQSLGQQPPRTHIDKQVCKQGSGEAWGTPEVDGPRST

SEQ ID NO: 949753 - protein, 109 aa, Homo sapiens
RRQGEGAQNQGKKGEGAQNQGKKGEGAQNQGKKGEGAQNQGKKGEGAQNQGKKGEGPQNQAKKGEGAQNQGKKEKGAQNQGKKGEGAQNQGKKAEGVQSQSKKGEGTRE

SEQ ID NO: 949754 - protein, 67 aa, Homo sapiens
LDGLLAPTDIPPHGPNILVPDLNVDPFPRPRWTTVITWTETNNAVQTGSDAPTRVHLFVHHMSMEKV

SEQ ID NO: 949755 - protein, 105 aa, Homo sapiens
RGLVPHLHEVHGRHHPALGEGIGQRADPGRQQHIGRHEAELEQRRPPRRTTLLHEQRDGDDQHRVVSQGRRELRADDEAKAPRQADRGRRGIRGLGDGGHMGVTV

SEQ ID NO: 949756 - protein, 57 aa, Homo sapiens
  misc_feature (9)..(9): Xaa can be any naturally occurring amino acid
SKKDFYDCXEIVYLMAVALLMLTYDKKVSYNSIESDYYLLNYFVTVCSVLLRNGPKK

SEQ ID NO: 949757 - protein, 40 aa, Homo sapiens
PGEAIEDDDDDYDEEGEEAAVGYQLFEEVKSCSKLFQRWL

SEQ ID NO: 949758 - protein, 34 aa, Homo sapiens
SGKKSRRGSKIEKVLLITLKKNSGSQSGTKMKAT

SEQ ID NO: 949759 - protein, 114 aa, Homo sapiens
  misc_feature (110)..(110): Xaa can be any naturally occurring amino acid
MMKRRQPGKGAAEPQRNGSGRSRRKNPWEEVNRPGGDEMPQNSVPERGGPRPTTHLNTQLGKEECMRTVIPGSDLDYGDEERRQKRPSGGLLERQKEFDPTINRCKSVAXKQKN

SEQ ID NO: 949760 - protein, 38 aa, Homo sapiens
QSPVSSPNAKAHLVRRKDDTVSCANSHTFNKLTTAVPK

SEQ ID NO: 949761 - protein, 155 aa, Homo sapiens
HEGNRRACQWYLRYHECREASPIPHDGISRGHIEDSCPQFLGRSPLVIPMDHSTDVTFQGIKLDTVMGSSLHVRSDLLKFSGAGDHAMKSGTFAFRTPKLSHHVIETLALHLYVKSSGNNIYSPLHVSLQICSFARSDCILLPGRISRLQVCVVR

SEQ ID NO: 949762 - protein, 47 aa, Homo sapiens
TRKLLTAATILADATAKMVQVAMGSAAHPDSEEHHQRLLEVSEGLRM

SEQ ID NO: 949763 - protein, 60 aa, Homo sapiens
RGWWERREGAERSVCTCGYTEGQARRRETLAPPPDSSPHSTLTVFVARIVPCPGYEVGLR

SEQ ID NO: 949764 - protein, 34 aa, Homo sapiens
MMHMSGVLRKVIDYIIYLQQVNHKLRQENMALKL

SEQ ID NO: 949765 - protein, 71 aa, Homo sapiens
YEASCRRLRRQEIGARSRRRATPSPSRSLHSDPRAHIWTQQSRDSPHVLMAGIGTLTSFRSLDNLEISLGN

SEQ ID NO: 949766 - protein, 138 aa, Homo sapiens
  misc_feature (124)..(124): Xaa can be any naturally occurring amino acid
TRRPYVGAGTPERCRTLHRVSGGRGRFLDFDWVQDAIGFDQEIDLQKVFVAVEIKWRLFPPVPVTFQQLHHDPGLEYGSGEGPGFQALRAGPLGEVAAQARVQKVQLGCLDQAFGEIAVPRLQXVHQSRSFENRKAAF

SEQ ID NO: 949767 - protein, 102 aa, Homo sapiens
MGDMVNYDDIKRFIRQEIIKLFDERMAYYTSRMQFPMEVAAAPGRPGPPGKDGAPWRPGAPGSPGLPGQIGREGRQGLPGMRGLPGTKGDKGDIGVGIAGEN

SEQ ID NO: 949768 - protein, 147 aa, Homo sapiens
TRAEKRKLPKAAATFSVARKRPTGVASPPAPSLSVRCTISVSNAQMARFMPPNDAPSPTSSTGSATEAGAIINPNIAAIAAPWAPIAIVRGGSRRDAAIHRGSVSDCDSVIVNSAGPAQLEIGMNRLAVKGERTLEQGHQRRLERDD

SEQ ID NO: 949769 - protein, 66 aa, Homo sapiens
TRLLLLALARRLHGEAEHRPGELERCEMDVVLVVAVVHHRVEMQLLDLGDGGDVAGNGLLDLDVLL

SEQ ID NO: 949770 - protein, 116 aa, Homo sapiens
QRGSQPLGVLVEHRVDDVHERLVAVEEPVPAGQQVPLEPALAEVLRQHLHHSAVRREVVVLGPHLGKPDPVSGVEHRIQPVGGRLVGPHQPEPVGVALDDVTQERAQHPGGLVGRG

SEQ ID NO: 949771 - protein, 35 aa, Homo sapiens
MIGLHSEGVEGGNSVTADLAGDRRPLQGDEGPLQL

SEQ ID NO: 949772 - protein, 40 aa, Homo sapiens
MLSRRNVIPGGEGAGLLVVWGRLLLVVEVFVVPPPAVFPV

SEQ ID NO: 949773 - protein, 123 aa, Homo sapiens
MGARGERHVDSGMTPYGGARVLQPPAPVGIGVGRVHVQGQGEHVRIVGEGLLHPVAMVGVQVQIQHPPSFRLKPQDRQHRIVEVAEAPGMVGPSVVHASCGIEGDPSGEHRLRRLEAPAGGGG

SEQ ID NO: 949774 - protein, 112 aa, Homo sapiens
  misc_feature (99)..(99): Xaa can be any naturally occurring amino acid
HEDHRVLQVVGRDVGLHERRVDHARRERVDAHAEAAPLDRERAREADHAVLRGAVVRAARMAAEAVDRGHGDDRAAPALEHAPAHGLQRAEHAREVDVXAAGPEFVGHRVGG

SEQ ID NO: 949775 - protein, 79 aa, Homo sapiens
MSLPSRRSRRVLVPGWLAAAGIALSRSAVRRRQEGEMPLVRFETRESVAIVTIDRPDVRNAVDGPTAAELAAAFRRFED

SEQ ID NO: 949776 - protein, 42 aa, Homo sapiens
YEHRVIQEINFQKRFTNHLRTLVAREEVAIRLMHLWEFVSAL

SEQ ID NO: 949777 - protein, 62 aa, Homo sapiens
HEAKRAAKRYIVSRQVQKLSAGSVLALGQSGHRTLEGVRVQVGDAGQRPAAVGGGGDKGGGG

SEQ ID NO: 949778 - protein, 53 aa, Homo sapiens
HEDVVYEFTGVVPSSIVPVSSPIISSSSSRVSTSRSLVGSSITTRLVGCANSL

SEQ ID NO: 949779 - protein, 71 aa, Homo sapiens
VFQELADCQEASCKSSVLLIHALILVGGRRVDSSWSSTVTCINQLKGDTYKPDANLQRKTEPLESQTEAKL

SEQ ID NO: 949780 - protein, 42 aa, Homo sapiens
HEECFERSEPIHRKRQLTHSRPLTPSCSSSCPVLQSKEPAYL

SEQ ID NO: 949781 - protein, 97 aa, Homo sapiens
TRPVQSPTFALVNEYETTTGDVVYHFDFYRIKSEIEALDLGVEEYFDSGHFCFVEWPSKIPNLWPEKHLKFTLATQPDGSRVVTAGISGISIRNGLR

SEQ ID NO: 949782 - protein, 109 aa, Homo sapiens
RGEMFAEIKMDLGDRGAQGNHTDVVTLDATLLGIETTDSQHVASVRFSGMIRENEGEAAQPFAEVWNLAKPASGAGGWVLAGIQQEPEFADELLIEPKRGCGVMCPALA

SEQ ID NO: 949783 - protein, 44 aa, Homo sapiens
HEDDGSTSGNIGTLITIPTAAPPSSTGVRKGWHEYVTQELRSHL

SEQ ID NO: 949784 - protein, 72 aa, Homo sapiens
SRPRIRHYEFSDHSDVPNNNVNALINGFVYGWHGQVCYMDIMTATPMKVGLLPPFPNIVLSLLSELNISDIH

SEQ ID NO: 949785 - protein, 54 aa, Homo sapiens
HEEDSRLQSQLKSQLTSVCVTNLTVSSRNNRGSLCSIRGSLCSTQCSLSSVSFS

SEQ ID NO: 949786 - protein, 122 aa, Homo sapiens
HAGMVRTRQLNGKLARALQKHERTGSRHLRLPHLQSRIRLAEFMLHSDMEPDLDVITEAARDALAMSNVQLGEELARFALDRGGGLPAALVLAEAVSWQGRGEEAGFVLAHAEPDGDDDWLI

SEQ ID NO: 949787 - protein, 107 aa, Homo sapiens
MPWATKRCRSCAVSTPRSSMPRSRSMATRKSILSARAMARSVRLEARTSKMKVPSRLPENITTLFAGARSINVVHGLGIAVDVLHGVDFELGAGVREAQHRHRSHRG

SEQ ID NO: 949788 - protein, 153 aa, Homo sapiens
MLSHLPGSPSPHFPRLTRTLRSNPELQRLESRRLLRLVAIHAMEHIVEKTHCLDDEWSFVEHHAFSALRHGRIGYFRPAGCSFFHHAGQDLGRPDDRHMGRLAEPQDVLLDFADPLETKFDRQISSRDHDRQWLLPGAMHDQIRKVPDSKRGF

SEQ ID NO: 949789 - protein, 168 aa, Homo sapiens
TRCQPPYGRRVKLFHGGAKASPAPVKRFYLCTEGGCYGACSSKGAEPEPRPKGLHLLGDLYGCKGEDRYFFSADLLREHCLRLVAEAGLTPVGDYFHQFGTDGGVTGMVVLAESHLSVHTWPEKRYVTVDVFVCNYTSDNRHKAHKLFDALVDTFRPDEPRVRSVERE

SEQ ID NO: 949790 - protein, 145 aa, Homo sapiens
HEAGATVHRLRIRGSRCTGVEYTTAEGRQVTAAAREIILCAGAIGSPHLLLASGIGPPNHLRSFGVDVALELPGVGANLQDHPIVPLVYRAARPVPAGRYNHGELLGLIRRHATGGPPEIQIFGVDSADVPGLGGADGYVLGVSV

SEQ ID NO: 949791 - protein, 69 aa, Homo sapiens
MADMVYVTQSAGRLMRVIFDIVLKRGWAQFRDKTLNLCKMIDTRMWQSMCPLRQFQKLPEDVLQKIEKK

SEQ ID NO: 949792 - protein, 37 aa, Homo sapiens
TRPDTSLNVIPHASSNSSSIPPHLEASPILDTALVFR

SEQ ID NO: 949793 - protein, 36 aa, Homo sapiens
RGDILSASPCCQARLTCKHCGNSVIDLRIGMHYFSE

SEQ ID NO: 949794 - protein, 135 aa, Homo sapiens
HEGENGAIPDLENQIYGARLPDAAGETGGEVSPERRRKPLLARQIDPPGGEAPGKGILDGADEKGQGGRGLDVLVGGDGIAGIESDLRLIEHGAGVHPFVDEMDGHARISGVSRGECPVAGILAAVLRGDTPRGS

SEQ ID NO: 949795 - protein, 123 aa, Homo sapiens
RGRSVFRLMLELNERLGTSYVIATHDPEIAAGAQRVLRLEEGVLVPAKAAYGAYGKWLTNHLPLFCSLLLGRVLDLQHAGLHRLGVPGFILEGLGDHEIGCRALDEARSDEARQEDQDPEPQL

SEQ ID NO: 949796 - protein, 42 aa, Homo sapiens
RGSHAKDKLVYVHTNGPKKKKVTLHIKWPKSVEVKRYAIKIM

SEQ ID NO: 949797 - protein, 36 aa, Homo sapiens
HEDVATPSAPALLILTILHLPEVPDWPAAIAALRVG

SEQ ID NO: 949798 - protein, 64 aa, Homo sapiens
RGEENRLDKNGLFNNLQVATVADLLRQHAEQVAEDRKKARVVVPRSHPKDSFLQVVASPDGKWA

SEQ ID NO: 949799 - protein, 40 aa, Homo sapiens
LEAKNSVRRRLRSDIHMGRHTNSLRAASTKLVTVPSAYNL

SEQ ID NO: 949800 - protein, 99 aa, Homo sapiens
TRGHTELDDAFYTIPIMYKIIRARRSIPPTYEEHLNAGGLMTQEEVSDTESSYYAKLIDHVCNMVHYRPPALNLQAHWRAWFIQKRKSPPGVQVCPSTS

SEQ ID NO: 949801 - protein, 107 aa, Homo sapiens
MPLSQIVYKFLSALVSTYATAACQPPSKFFVTPTFQSVKSVIVVVLHLLVTDVNVGDPRRHELVVRVLLISTQKRPTNPQDFHPNLTHVLTLTCCFVEEQETRSDRR

SEQ ID NO: 949802 - protein, 138 aa, Homo sapiens
  misc_feature (98)..(98): Xaa can be any naturally occurring amino acid
TRGRAWSTLGRPLDPLTQDVCAFYQDHAVYDDFGGVVVELDEGQRIANALGPNKAVILQNHGLLTVGRTVDEAAWWFITMERSCQVQLLAEAAAARRXTISDAAARQAYSIVGTAQAGWFQFQPLYARIVKEQPDLLD

SEQ ID NO: 949803 - protein, 138 aa, Homo sapiens
HEEDAHFPHRAVHFQGIGEGAALGQEGDVPGLEAGDAHVHRHLAVGFQPGHDHPRAGLHPDLPLGGQALLVHEAHEAAGAVAALFHFASVGVEDPVAEVHVRPGRRFHQEDLVAAHAVVPVGQAPQLIPGENDGLAHA

SEQ ID NO: 949804 - protein, 149 aa, Homo sapiens
MDVGQVVGERPDVVEVVLGPAGEVVALQLPFGPRLGERCVLGLTALDGVLQLGAELVAAQEFSHGSDPFDQLMSRNDEQQRMFRNDGGCETPRRCEVASAPATLASRPALRHGQHHPGCPRRRGMVHTASVTADRSGQRLEFGQDRRTD

SEQ ID NO: 949805 - protein, 36 aa, Homo sapiens
NEGDARSIHCTIRDIDGHLVCHIFLASCSAHREVID

SEQ ID NO: 949806 - protein, 95 aa, Homo sapiens
MRSWYHLWTPEVVCRSAQVDWSLQFRIEKSVRFRATSQIRKFPVVGAKLLTVDSNCFYCDEAVDSQLIRQFSSLTHMFTRFSRFADFVAGDSRHY

SEQ ID NO: 949807 - protein, 36 aa, Homo sapiens
TRWTEIHLDPRPPAIIPVTEGPLQAGNISKSLRRSR

SEQ ID NO: 949808 - protein, 119 aa, Homo sapiens
MQSSQRGSTRLTNISTGSRSSSGAIRCAHTARRAGLQHLAAASQPQRHRRQPGGAMGGGAATDLGEGAENAHAGPHRAAQCAMAAEQAQAGGHVERDGGGAEFLVQRDLRREAQQGQRG

SEQ ID NO: 949809 - protein, 71 aa, Homo sapiens
HEGDEDLYDRYEYTFETQFTTCEPMRRMYGMCLTESGLETGSSACSMILVQPTLNTSAEDDCCYTYQEKVS

SEQ ID NO: 949810 - protein, 39 aa, Homo sapiens
MDTTLIRLTYSEFGPLGQKFVSKKIRSRITESTSSLTSA

SEQ ID NO: 949811 - protein, 138 aa, Homo sapiens
MRGGADPRRATCSRTSRIPNPESQISLLSFHRDEAIDCRHPAPGRLMVPISFEFYPPKTDEQRAQLDKTAAKLKTKAPEYVSVTFGAGGSTLSHTPEAVQRLRSEFGLEAAPHITCMGGSREEIRNLLKLYRALGARR

SEQ ID NO: 949812 - protein, 140 aa, Homo sapiens
  misc_feature (135)..(135): Xaa can be any naturally occurring amino acid
RGASACHDSSLSFVNEIRPAAIVNFSHDSGEHLVGAEPTKLLTDEHLYLTTVQGYSARWFSRDPETAYLPLRRRISMSPPEVDMTIAEMPGASVVTRSTGTPRRNPSQAASSIAGALPAADSTRADSTVLDVDPXLLRLG

SEQ ID NO: 949813 - protein, 84 aa, Homo sapiens
MRQLMCSGRGATGTVPITIIPTSAIGVRNTRSYMTRVGMAVSCPLSVCGEYYYACSIDSVAQYTRSLPIGVEPKQCEQQRPIAA

SEQ ID NO: 949814 - protein, 123 aa, Homo sapiens
TRNIGESVASRIHFDWFTDETRHLVPDLTLAVAMTYKVQTTRLVAVLPRQLTVARAGEGLKKVRDSDEPTLGRSIKISSATELLTFSGLEVPALEVTATVKGIPLMLSDERPTSDFVGRTLMP

SEQ ID NO: 949815 - protein, 127 aa, Homo sapiens
RGLFFRPVGFKYRSLIQDLRWRYAWDWALFAGAVVPAFIFGAAFGNLLQGVPFHFDRDLRVFYTGSFFAQLNPFGLFCGLLSVALLVMHGTHYLQIKTAGAIYERARRAGWIAAVLMMALFPAGGFW

SEQ ID NO: 949816 - protein, 141 aa, Homo sapiens
TRAQLLRGAALLQAAQAGRLRLAAAFGQRFGEIGEQHGEPQPQRVGADEPGRRLALTGQRLQPQRADQHGAQPDHEHDRIAPLRGRIELDEGIAHRAAQQRGIKQTGSRARRVKGVRHDPENLSDTVDLLDHRAERQRGQV

SEQ ID NO: 949817 - protein, 44 aa, Homo sapiens
MRRFQLQPLLLTTVGPTVSSLTHAVHVEVSDARLIMPALHPGLE

SEQ ID NO: 949818 - protein, 119 aa, Homo sapiens
RGRGGAGFPTGMKWSFVPKDNPKPTYLVVNGDESEPGTCKDMPLMMVSPHTLVEGVIIASYAIMAKMAFIYIRGEVLHVVRRVQQAVREVYSAGYIGKNILGSGYDLDVVVHAGAGAYI

SEQ ID NO: 949819 - protein, 125 aa, Homo sapiens
HEAPRSLDKVALDPLEAGAVQRHRGDFARGMRHRGGRLGLPALGLVGTNLRAAIPGRAARGLAARMRDLHRDLDRRIGAHGLQHAGQRRFVVVRVQAEVVRRDPSLRRDRGRFENQHAGTGQREM

SEQ ID NO: 949820 - protein, 92 aa, Homo sapiens
TRLIDTSGTIRTLRSDLTGVSGMAFDIYTRLLVSDPNTNRILRIDLDTGVATRIAGGNGAGFTGDGGPATSARINSPGDIAVDSGGNIFFID

SEQ ID NO: 949821 - protein, 134 aa, Homo sapiens
HEAGDQGAVDGADGRARDPIGCEAVLLQRLIDARLVRTQRPAPLESEREPPDLRPGREQAPSFGVGTLLIPVRRRPHLRDPSLQAASPRLSPLKVSRAMAAGHPARSSTGSAGGGAPACSRNTSDEHGDETVLL

SEQ ID NO: 949822 - protein, 80 aa, Homo sapiens
TRVEGLKPKDLVGQPWRLAFALQDAGWWLRQDIIWHKPNPMPESVRDRCTKAHEYLFLLTKNERYYFDQDAIRTPYSAET

SEQ ID NO: 949823 - protein, 38 aa, Homo sapiens
HEVMFEMMQCIGRLQDPTPSSGDPVEHDPASTHISTRP

SEQ ID NO: 949824 - protein, 36 aa, Homo sapiens
HDDYGQHPQQDKRNYTQVIQNTIIAHIDNGAVKALC

SEQ ID NO: 949825 - protein, 42 aa, Homo sapiens
HEGHSDNIFSRQSYLWNFGVDLYKLFSYCDKRCSPTDVSLIP

SEQ ID NO: 949826 - protein, 142 aa, Homo sapiens
RGASTWRGRCSARCARNPLPGKGSPIVVRASVVAARPGCRARQRRWPATGPARCRRAGAPASPGSGSGRGGGFATRPNRSGAGRPSIWSSVVLSGPWSPTSQRWPHGVGIGATTRLPAKARAWAARPVGRPDTDHHPRPRAP

SEQ ID NO: 949827 - protein, 133 aa, Homo sapiens
  misc_feature (96)..(96): Xaa can be any naturally occurring amino acid
RGAGIERARLYRLRDESLGAGLDPDDRFVIRPAHDRLARQCNALDGIGQPGQDGDRLPDRQRHGGPIGEPERQRYGAVRRLRPAPTNCSAPPSTLXNAPSRIRVAKDASALCASTSNRADIDDLVKHVRSLDE

SEQ ID NO: 949828 - protein, 105 aa, Homo sapiens
RGLPANALVLGPDLGQVWFPQLVGEEIAAHRHRAGSVRHPDDRARVVGRDLEHRVHAGGGGPADEQRKLEALPLHLPGHVAHLLQRRRDQPREPDQVGLFLPRRL

SEQ ID NO: 949829 - protein, 156 aa, Homo sapiens
MRAGAGNGVATRNQRDTGQCEQRDQLFHDDLLCLARVRRVAATGKTDAAQGSVDGARHESSPAASLKPFGRTQDGAWAYSSITLEYLFELERLVKKIVGSRLGALTPVGGHLRMIGVDDPDARRLRLLDRPQYVDTVPLTQLQVDDDDLIPAAFQQ

SEQ ID NO: 949830 - protein, 44 aa, Homo sapiens
HEGHTNIHLLVTTYSLRDAPVDSVAYHARNGPPVPPEPHPNVQE

SEQ ID NO: 949831 - protein, 125 aa, Homo sapiens
RGDLENGPACRLELFGEGAVGGLGSENLLRACHIAQVGGQVHGIAKDVPPLLHQIPVMDPDVESHLLPGTGLARRLPLQDAGRAERLVRGGKDAQGGVPHRLDQPAAMLLGDPGAPLHEGFHHRA

SEQ ID NO: 949832 - protein, 65 aa, Homo sapiens
HEVEIKRAGEDEPVKGVRNWLENNRDVVQPWIEAAKEARQSSCRARGDRLRRIDRRRFLLGMGSA

SEQ ID NO: 949833 - protein, 69 aa, Homo sapiens
EGAFVADSFPLWAGLMDTMEVVDGAEPRVALTCESRLVDLERAEVRRYTDADQQAEYPGDRFFEFVPAL

SEQ ID NO: 949834 - protein, 74 aa, Homo sapiens
TRWFSCDHRNAASNATAMGSAIPPGTATVTEGWAPPLCMTQLSTSISLTTCLLLSLLMLLFLVLLGASYWYRVR

SEQ ID NO: 949835 - protein, 119 aa, Homo sapiens
TRGIEVLSHHCDSRITIPDDILLTVHVRMATIIKRIRDVNNLLLGAIQVICRMIMRSGLINILFRKLRIVDGLDGAGHDGDLFRPQPAHRTGLARWPDRTSTAPPSDPIGSQRYPCLHQ

SEQ ID NO: 949836 - protein, 135 aa, Homo sapiens
  misc_feature (105)..(105): Xaa can be any naturally occurring amino acid
TRQPAKPPKTASQPAKPAKKPSQPSKPPAKPAKPASQQSQPTSQASQPAKPAKPASQPLKPSKQTSQPSQPSHRNIVALEHIQPAKPAKPVKPACQPNQPSHPAXQASQATQPAKPAKPPSQPSWPSHSTSQASQ

SEQ ID NO: 949837 - protein, 147 aa, Homo sapiens
TRVVTEAGTPTSTTQTLKAWLAGLPDFELSGHESFSIPQWRWTGGAAKISAAMMQALRNPITIEVPKSDVANLDTANKTLSFTTAPIEEFFNRSPKICDDNGCQAWEEVLKRALTTNSTQHYEAIEDTGASYKITFWPDYDPARHIR

SEQ ID NO: 949838 - protein, 98 aa, Homo sapiens
TRRFRIAAIRWILLHIPDSACDPIKKRLLQIKEHFLTHSRYNPRILFQLLLDSAQFEFILREMFMQMLSEKQARWEHYKKEGSGRMTELADVFSGGET

SEQ ID NO: 949839 - protein, 166 aa, Homo sapiens
RGHRHTEFIKFLNTIDREVPQGLQVHLILDNYATHKHVEVTNWMKRHKRFHFHFTPTSSSWLNQVERWFRDLTDKNLRRGIFGSVPELIASIESYLNAHNADPKPYVWTATAESILAKVRRARTKLQQVVNQKLRHTTSAKGTSGLPALASDGRPSVGAGLQDQQI

SEQ ID NO: 949840 - protein, 66 aa, Homo sapiens
TRRHEGDEVAVVQDVVVRQRRALRRAGGAGGELDVHRVVELHRRLHRAQPLPRRLRRAEGGDALDG

SEQ ID NO: 949841 - protein, 35 aa, Homo sapiens
TRGQVLRCAFLLNAAQAGRLRLATGFGQWFCINWG

SEQ ID NO: 949842 - protein, 40 aa, Homo sapiens
TRITIDSDLFRYLAFVLSQESCPGVHAYALCALVGVPHLT

SEQ ID NO: 949843 - protein, 41 aa, Homo sapiens
HEEDLLQTDSCNTSLLLLHVCHAFLIWSPDTTWMCETSSTQ

SEQ ID NO: 949844 - protein, 115 aa, Homo sapiens
TRRTDRGFSFSSRISSWNASSGKAPSRLERTETSMMLLAGMCSSIHRKATSTTSVATVPISARPKKETPYSVPSAEVTHSEAAVVSPCTDRPWREITPPQRKPMPVRMPCAIRTG

SEQ ID NO: 949845 - protein, 95 aa, Homo sapiens
MGRGRTDKRHAIHRSDPTAMTSAQHPTVEIKILDPRLHQWGLPSYHSDMAAAIDLHACLDAPLTIEPGTPAQLVPAGIPVHMGNPYMAATIAPRS

SEQ ID NO: 949846 - protein, 77 aa, Homo sapiens
TRPRQTLRPVARAEDAAIGGDPLDEKLAGLGGRHGREVNGPLVAGCERDAKCNVRSRDFTPRNDILYKSVVAPGGME

SEQ ID NO: 949847 - protein, 67 aa, Homo sapiens
HEVELEPPAVLVQRAHAHTVGALDAMLDLGDRQGALFPDLAVATGPDDLGIDEHAQPVAGLRHVDHH

SEQ ID NO: 949848 - protein, 37 aa, Homo sapiens
LEAKNSVLRSLRFTLSSTLLVVLHRLGCKGPGRTQGM

SEQ ID NO: 949849 - protein, 130 aa, Homo sapiens
DEVDYYENKMYLTPIDKHMLLKVMGFGLYLMDGNVSNIYRLDANKRINLSTIDQFFKQLQVVPLFVDMQIELDRYIKTSAHYEENMSKWTCTQNSISPQYNISEQMVQIRHDHIRFISELARYINSEVVT

SEQ ID NO: 949850 - protein, 85 aa, Homo sapiens
MARIGAEPSQTAQRMHVAIARPVRMEQELRLGQPDMMLQLTGHGFAAQECADRESMSKIASIPSPIANVLQVLSGDDARPTMDEL

SEQ ID NO: 949851 - protein, 41 aa, Homo sapiens
HEGDDHWSPVVTHMRIRSGLTGHEARNILLFLQGSPEMTGL

SEQ ID NO: 949852 - protein, 46 aa, Homo sapiens
MAIPILSPSSFSLSLNESVALETAAELVQGHAIGNGIDSELVHAVD

SEQ ID NO: 949853 - protein, 100 aa, Homo sapiens
HEGDNVMKGYENNEKANAEAFTKQGWFRTGDQGVLSPEGYLSITGRLKEIINRGGEKISPREVDEVLMDHPAVSQCVTVAVPHDKLGEDVSAAIVLREGV

SEQ ID NO: 949854 - protein, 152 aa, Homo sapiens
AGATRRRRHRMAIEQHSIAVSRQRAVEEHVDATMIGAVQRADARFDLGQAQPAGIDVETMRGDTGDDAEPGGHTVAGLTSRRRQRIGDHGRVDFVGVAVEVEIGAAVAGSDQRYALGYRVAEQLVDIGVLGAAELPERQPRLCQEGARIFAA

SEQ ID NO: 949855 - protein, 114 aa, Homo sapiens
SSNHRALTFGIFAFLAHPTPTCTLTCMASAECGCCEGAPTSVSPTQPREPGHRQDVGAAEVPPLLCLPRSPGNLGPTGAKELQHRTKKLDLFSPTDKSPVLWSNSVLYIKEQLD

SEQ ID NO: 949856 - protein, 64 aa, Homo sapiens
PRTQVGGLTEAMPLAIKTCTDPCALTMLNATVGVSGTGNHSIMSLFQRGCPSGDANTMVVLPSK

SEQ ID NO: 949857 - protein, 148 aa, Homo sapiens
HEADAAVAAEAEPDAVVVDDDLRLTVAGPAYALHHVVAQRQRQQEDQHEASVVQGQSRRIGRIDHEIRITATIMPNDTTAMLRLCSTPKRTITGDTAISAALGAMAQQVVGQHHRHHRFGDRRAADADAGIVAALGAQLDLLAEAVDA

SEQ ID NO: 949858 - protein, 104 aa, Homo sapiens
WRRSLALSPRLECSGAISTHCNLRLPGSSNSPASASRVAGTTGACRHTWLLFCILVETGFHRVAQASLELLSSGSLAALASQSARITGESHRGPALGIFFYLRL

SEQ ID NO: 949859 - protein, 123 aa, Homo sapiens
TRRDALVLDVRDEGEYRAAHIPHSRHVPLSAIDSRIRELEKYRKRPILIICRSGNRSGAAANLLRKRGFEEVWVLKGGLVAWEQANLPIEKGSSVARVNMYCTAICPYCQMAEALLRQKGVLE

SEQ ID NO: 949860 - protein, 73 aa, Homo sapiens
TRPRADVLGVGGSPRFEFADIGLGGRRESGEVVFVHAEHNSAAAAQLGIRHTKRYSSCVLILARRVPLHRIHV

SEQ ID NO: 949861 - protein, 47 aa, Homo sapiens
HEANTHCHELWHLCLQGSLYITLIREDVMQAYKITDDLFTSLIGNGM

SEQ ID NO: 949862 - protein, 104 aa, Homo sapiens
MSSSTGGNSGRSADGGTGIGVRDLVHHAEIVAALERQLAGQQLVHHHAQRKDVGLVIERVFLDLLRAHVGRRTDARHLGFGGRYRHRGAEVRHLHIGAADRGAV

SEQ ID NO: 949863 - protein, 146 aa, Homo sapiens
RGVADALRRYLESHPNASDSLEGVMRWWLASERIEASQAMVRSALAHLVEDEVVEVRVLSDGTRVYLAGALRQVFAPIGDTAMSQLRVQLSSRTGKSFAGHRVVASFAQLVTIDAESAPREVPGEASKAVEDGGLALIELPGKDTL

SEQ ID NO: 949864 - protein, 41 aa, Homo sapiens
TRLAALCARHKVDLVSVGNGTGSRETDKLVAELIAKRPQLT

SEQ ID NO: 949865 - protein, 67 aa, Homo sapiens
TDGVLILCPLARPELRHPREEDRKYGKSVLKHMNGHLEEYHHAIWWSMDPQRRYMLMDEIITNNSGG

SEQ ID NO: 949866 - protein, 84 aa, Homo sapiens
RGAVQGGKGIRGDGCCMDSRIIGAVNAAVVYMGDPWSELIESVPPPGPEESDSTTGENDDDITLLVHDHYYLFLNTLIWSAVMD

SEQ ID NO: 949867 - protein, 41 aa, Homo sapiens
TRSIVASFLHLANIHFAAIDASNAQVTTENQLTYLTRLLSV

SEQ ID NO: 949868 - protein, 79 aa, Homo sapiens
TVMLKGSPKEEACVDPRGTPDQVRRTWKEYYLQADERGLEQILPSRHSEDAKPAILILDFQPPELRDNTLFLLFEPHSW

SEQ ID NO: 949869 - protein, 63 aa, Homo sapiens
HEAALDRLYRSHVGPGDRYALLDFPDHANVGDSAIWLGELAMLRAITGREPDYVCTWHDFDER

SEQ ID NO: 949870 - protein, 145 aa, Homo sapiens
HEAHGSNDAQNTMGIIALTLVAAQADGTLDNLPSWLAFLHPSPNALANNDIDAWIKVTCAIVMAAGTAAGGWRIIKTLGHKLVKLHPIHGFAAETSAASVILEASSLGIPVSTTHTISSAIMGVSTAMRFNAIRWTVVERMIWAW

SEQ ID NO: 949871 - protein, 151 aa, Homo sapiens
HEEVGAIGVILWIGGHDVLAGRLTAGELSAFVFYAAVVAGSAGAISEVVGDLQRGAGALERLMEILRTEPEIQRPARPVPLPEPPVGRVEMERVTFFYPSRPEHPALYDFTLRVEPGSRLALVGPSGAGKTTVFLLLLRFYDSAAGFIRVD

SEQ ID NO: 949872 - protein, 42 aa, Homo sapiens
HEEYIGLHIMPQALPKFLTHSTLSLAGDQKFDSSHLPNFKLG

SEQ ID NO: 949873 - protein, 60 aa, Homo sapiens
MHLGPGGSADTSQGRDEKATSYQEEVLKDALQCCHQCRARRRQNSTPCRTGQVLAALGML

SEQ ID NO: 949874 - protein, 116 aa, Homo sapiens
HEGDDQWKPVVTHMRIRAGLTGQEARDILLFLQGATEMRALAAVAIGGFLDGVGGTDLAASHGKSVYEQTCIAFMADGKGSVPGAPDLTRKSGPLAKPDDVLFKNVKNGFQTPGSP

SEQ ID NO: 949875 - protein, 81 aa, Homo sapiens
HEENKEVELASRENVRITEYELVDKDAEGDARFAPKITLQATTVGRAILSEILPQGLPFSVLNKTLKKKVISRLIITALRK

SEQ ID NO: 949876 - protein, 108 aa, Homo sapiens
DEGCSGISALKGCQLIAYLWSQFDLTVRVSTDDLIRFIYGGDGLNPAAIEGPYDTLGFNKVLGNISPSFPCPSQPAHRNTHWILTTDSIMVKSEFLCCQDSFLHEITT

SEQ ID NO: 949877 - protein, 76 aa, Homo sapiens
  misc_feature (65)..(65): Xaa can be any naturally occurring amino acid
RGGTRPVGPPYHRDALGHLGRAQDHGADGRGPVGLAVLPVGQHFPVPGPHQHQVPPGADPAGERXSGVHPPHGLPT

SEQ ID NO: 949878 - protein, 39 aa, Homo sapiens
  misc_feature (7)..(7): Xaa can be any naturally occurring amino acid
MPDRELXVSDLELGSNKAFSTSQHAQPPSNKDLMPGKRL

SEQ ID NO: 949879 - protein, 107 aa, Homo sapiens
  misc_feature (98)..(98): Xaa can be any naturally occurring amino acid
MPARSPSVAISDDCPGYDLALFCLPNHYAVDLGNEFIPHGLIMDRTERLARDVMKDMGGHHIVALSVLKGGYEVFADLLNYIDALNRNSDRSIPMTVXFIRLKSYCS

SEQ ID NO: 949880 - protein, 117 aa, Homo sapiens
TRVSARLKLLNPELEAVQILMSATSCIQLKTIRDGAASLIYRDLCGPCLVPFVHVDDNGFLGSGSMIGIPTIEMIAQEPFGVTQPIIDAVKVSPVSYLKVSRSPVLHTHKNEVLRVV

SEQ ID NO: 949881 - protein, 76 aa, Homo sapiens
MERAELLAQLQALTARVDELADRVRRLQDENRSLRQQQEQLVIERSALLAKNEQALQSRGGDDRPPDIAGAAYMTA

SEQ ID NO: 949882 - protein, 88 aa, Homo sapiens
TRDARLYRTGDRVRWRTDGSIAFVGRTDQQIKLRGFRIEPGEIEAALAALPGVNQAAVMLRTATDGERRLFGWASGDGLDGAAPAHTA

SEQ ID NO: 949883 - protein, 100 aa, Homo sapiens
TRVVPNTCAINSTDDPQVIFNSNYIDIHSNSDSGSTFVNVNEDSVPENTCKESLVLGQKQSTWVPESQSPNCMNCQVKFTFTKRRYHCRTCGKVFCGVCC

SEQ ID NO: 949884 - protein, 36 aa, Homo sapiens
YEQTVNQEINFQNSFNIHVRTLVVREEVVYRTDASV

SEQ ID NO: 949885 - protein, 88 aa, Homo sapiens
TRLDLSQDHEPDRVHRREQHERERRAQVEVAAGDPVAECVRKREIDRLHGDNEHVHEDVQGCPAPADSDRSRPHGPLTRGAVDDEPDR

SEQ ID NO: 949886 - protein, 93 aa, Homo sapiens
RGEWSNVTSSQYDWRQPLLKADEEPLNLDWGEDQDSALDDEEDDAVGLAMKTSYDMEKRYNNHITRPQTLTCYLIPQEEDDPEGDTDVDCACC

SEQ ID NO: 949887 - protein, 75 aa, Homo sapiens
HEVDLNSEMVYQLGQDHDLKAILHETELRPVKTFDSYILQAHIQDSVGISEGLLRCGKTTHVLQFNLYNFIQIDR

SEQ ID NO: 949888 - protein, 143 aa, Homo sapiens
LLDQLPGEVGIPVREDPRCDAEDMLAPEVVRIPLALIDERDASQHAGVLHRRLPEDADVAVGDEVLPGEQLHEGRLAGAVAPEQAVDPVLVGAERHVVNGGHPTETLGDGVDLDDGGHAPSVLIMSASSREPDAEIGRIVEQR

SEQ ID NO: 949889 - protein, 52 aa, Homo sapiens
HEAHPLLEGDRREPPLAQQKFVAFPGEPPVLVEGFDLLDHALTLDDLEHHTS

SEQ ID NO: 949890 - protein, 36 aa, Homo sapiens
HEVYPCLVFSGDSMATDYRAPSKELATSNLVSMNNM

SEQ ID NO: 949891 - protein, 76 aa, Homo sapiens
TRQIHKNTPCPDVTLGTNPGTEYIQVPIQEIPLGLDLKNLRIPKTIMSFDITYKSEVFSRFGIYLSTWLGFHTTRI

SEQ ID NO: 949892 - protein, 52 aa, Homo sapiens
HEAARGDTLTPSYGTAVGASGDRPAALSELVGILLSGGVQPYTETVRWLDFA

SEQ ID NO: 949893 - protein, 152 aa, Homo sapiens
PDADDRYAYESGFGAQRHPRPGMEPIMAALQRQDGWYRAYLANMTKAVSAPDLAELAALLSCEMPLDLAVQRGKTALMVAAELGHQAVVDMLLVHAEEHGMRQLNLGAADSGDTALMLAAFHGHVAVVERLLAASAATEVPSQCGDTALMAA

SEQ ID NO: 949894 - protein, 125 aa, Homo sapiens
TRPKKYLDDAPRLVHNPDGSDMWKFRDTVIPNVALNAVAGRPKEEYGIEPTGLDEIRPGCYNVDERVKDMNAGGILASICFPSFPGFAGRLFATEDNDFSIALVQAYNDWHIHEWCGAYPARFIP

SEQ ID NO: 949895 - protein, 82 aa, Homo sapiens
MADMPVEAGESRVSVNISGQIEIDRKKQALTLTAALLLAGCGTLTAPAPDVPASPQPPVVQTPAPAPTTGLQLADDTHAQDA

SEQ ID NO: 949896 - protein, 90 aa, Homo sapiens
MITPCYVIRLTNGALEFKPGGGKLFLKVTGFNKFLTFGGKGLPVFKEGSEPGFGRSALFKGVTGSKKRGNKRFTFKKGFKNKWGSFGGPK

SEQ ID NO: 949897 - protein, 80 aa, Homo sapiens
RGGLGVNCTTLRKPCTGEDRYTWLVLREGMVFTIEPLINQGGNAVLTVDAGCTVVTRDGQLPRNSSTPCAVTPKGVRVLT

SEQ ID NO: 949898 - protein, 40 aa, Homo sapiens
HEVERHRALELLASRETLKVRPSKSKPTLRVDEAQLFNTT

SEQ ID NO: 949899 - protein, 76 aa, Homo sapiens
TRGHQACLVRYFASSLSGNFIYRALPDQMRILPPMCASLTRADSEVNLTPIFCLKLQIVETHSELLQGVPDLTSPH

SEQ ID NO: 949900 - protein, 90 aa, Homo sapiens
HEELTGYQLTGMNWLANLYEQGINGILADEMALGKTVQSIALLAHLAERENIWGPVVIISPASTLNNWHQEFTTFVPKFKVLPYWRNPHD

SEQ ID NO: 949901 - protein, 41 aa, Homo sapiens
HEADDNHAHDAVLYVLGLIGTHFRFGGRNSVSGVDCSGMRE

SEQ ID NO: 949902 - protein, 162 aa, Homo sapiens
HEVHLAGQPVALLRRGGQSGCALQLVVGAPRGLRGHPDRHADRQFDDDGGVVPEVEREVVLDGEIGGHHRQARQHAAHRTELDGGRDGGIAGPQRRRPGLVVGRPVRARDEVVRPHQQHDDHQLGQHPRRPAAEAPQISQRAGRAPADQPGEKHPTQHGAKQ

SEQ ID NO: 949903 - protein, 108 aa, Homo sapiens
HEVLGDLFGGAPDQAQRREDLAGDDPRRDPGQQQPDSADDGHRADRLLDVGALGVDALPGDEIAVHQRVVAVDEGARPAQQARRGDGLAGVGDRGVEDLREHLLGDRR

SEQ ID NO: 949904 - protein, 131 aa, Homo sapiens
RGDEVEAQLVVEVVVEARTDVAGPGRQRDAHRGVLVQQRAPRVQRFRHQPTALITCCANRWISRYCLCDNDNWSGFGTSNSVTIMLRSSRSQVAPYMLEDLAHREVVGQHPRGEPLDARAPGRGYQRVHQK

SEQ ID NO: 949905 - protein, 130 aa, Homo sapiens
  misc_feature (90)..(90): Xaa can be any naturally occurring amino acid
RGGESIFIATGSPISSAYTMASVALRATTVCAIGMRKAASSAFDSISVSTVRRSDSAVSITSRADSTDGGSRSCASEAGAWRSSCWLRQXEEMWWNSSTAGSGERKVGMCAASNSERAARTWSQPIQQVI

SEQ ID NO: 949906 - protein, 159 aa, Homo sapiens
CVIALGRQQRQHAIDAGVGQNRFERRAVARIVGVADQVDRVGVRPGRRQRTVEHFQRFRRQLGERNAEVAARSAAITPGPPPLVTTASRLPAGLKPVNSALAAENIWPSVDSRTTPARRSAASNTSSAPTMAPVCESDRLGAGRMTADLDRQHRLDAGG

SEQ ID NO: 949907 - protein, 127 aa, Homo sapiens
HEGDCTGLLPLASVAAMQGRIAMYHALGEGVSPIRLRTVAATVFTRPEIAAVGVPQTMIDDGSVSARTIMLPLRTNARAKMSGLRQGFVKVFCRKSTGVVIGGVVVAPIASELILPIAVAVQNRITV

SEQ ID NO: 949908 - protein, 124 aa, Homo sapiens
TRAKVMGRSAAGQPRVVILGGGFAGLAAARALKGAPCRVTLVDRQNHHCFQPLLYQAATAALTANDVAWPIREILGRQANLDILMDEVEGLDPEARQVRLSGGTLDYDRLIVATGASHDYFGHD

SEQ ID NO: 949909 - protein, 119 aa, Homo sapiens
  misc_feature (114)..(114): Xaa can be any naturally occurring amino acid
TRGQGTFRQEPGFHTKESTTMAGPQRKSVNKKKVVPIKTVHIGAVDYKDTALLRKFISERGKIRARRVTGLSVQDQRKVAIAIKNARNSHCSRTPRRLAEKGEDMKLILTAPVXKLGVP

SEQ ID NO: 949910 - protein, 115 aa, Homo sapiens
MRGQLGLDADACLEGDACAALGHLQGQLHRTGFQRRLVPRASACEQRRQQVMDGKVALGQDERVLGAGGEADVPAFGQWMPRRDDGAQTEMTDAQLLQVGGTRQGEGQTDIRLAA

SEQ ID NO: 949911 - protein, 43 aa, Homo sapiens
HEVNTGLIEKNIKFFFSGSAIPIINEYPSLDSGVTVKTLGPMN

SEQ ID NO: 949912 - protein, 165 aa, Homo sapiens
AHTFGVLQYDDDVAGEDLASGGQAQAAGQSLEQRRADLVFELENLPVDRRGGNVEPARGFADRLAAAHHVEIVNGRRVDAQLAGQAFSAPLPVAESAALENDGDQIVAGKGEVRAGHPLAVDAADLVGEVGVVLRSGPDQEDQVHGVDRVHLAGGDPGVEYRGAA

SEQ ID NO: 949913 - protein, 129 aa, Homo sapiens
MAFSEKPADAMTASQMPRRASALLNILSSTEDGTEHAAHDFAADRAGDGARHRLGGGLGQTVTLTAARAGRAEHQILQPAEQAAVTVLARWSHRVVRPAQACRWRPDSRSLQRPAFRRRTRGPASVRSG

SEQ ID NO: 949914 - protein, 64 aa, Homo sapiens
RGFRTCFFDQLFATASSEASFTYMSACCCDKLQNPLQFQCHLFVITFINETASIKDNVVTSKLL

SEQ ID NO: 949915 - protein, 74 aa, Homo sapiens
RGECAYFICLYPDGVFYDLHIMHAFHQPDSKGAPDSLGDWTVDPPDPAIPYDTFYRQQPLLSTPMLPNSATNPP

SEQ ID NO: 949916 - protein, 103 aa, Homo sapiens
MEAASSLMRHGLSKTLSDACKPLKKRLSGFHGSIFSVLGLAKVHLLLQSLSENEVSDSPGDEPSESPSDSADDPQTDVTVSSKWSERGVTAMKEYVCQLLEKT

SEQ ID NO: 949917 - protein, 130 aa, Homo sapiens
LEAKQTPADLVEDQPDQGLGARDVGGRHDEIERRRPRSAYDVGDAPVAAPRDCGDDWIAIEAEKGHGGREHAWAFVVRFVQQLAGSGGDDGMRSGRAKVRGLHHGRERRLDRAFRVGQEGGDAGERLVSL

SEQ ID NO: 949918 - protein, 49 aa, Homo sapiens
TTAAIAVVIDFRSEGSSLRVREKLERLGFHIEAGVRCHEQFLLSVRRQH

SEQ ID NO: 949919 - protein, 151 aa, Homo sapiens
HEGKTSIKAAEEDGGPGVEFAYFLTEATLLITPVKVSNSTKSFLASAGYGEQELDANTALMELVKGLRSGKLGEQCETVVRFPRLFQKYPFPILINSAFLKLPDVFTVGNNFLRLCVLKVTQQSEKHLEKILNVDELVKRIFSVIHSNDPV

SEQ ID NO: 949920 - protein, 95 aa, Homo sapiens
MVPNGQLSGTLSEQDKLGHLNVNFNPQALVLKHIVTMFMTVRMNLWAASAPWYCTMSASATTRVSTVCSLVSRIAFLRSRQSREGLPHVGFFFSV

SEQ ID NO: 949921 - protein, 76 aa, Homo sapiens
QGTKDRGALYEKAKLPFISYAIVDGNLVAGQNPTSTKETAKKLASLLREISGYPKQPQPAERMTEAVRRALTPSAA

SEQ ID NO: 949922 - protein, 116 aa, Homo sapiens
HEVLFQQAMQWVTLGSDAGGFVHVGSISIGFFATAIAVRLLARRVIANESLARERGRDLAEQVRVNERVIRDMDDGVLVVDTLGHVRQANPQARRLLDPLMPRPVMLADYSPALAA

SEQ ID NO: 949923 - protein, 104 aa, Homo sapiens
RLVLSLYKLWFYKLACTRWLDHHTLTGSAYLHAHCGLYLVHLPARCSSVSPNEIRDGRVGLGGNGVCTHKCWGLGASILSKAGAVNMVGAALPTPSGGYERKHS

SEQ ID NO: 949924 - protein, 120 aa, Homo sapiens
TRQRHLNELPGHGSPSCRRRTGEFSAGVNGNILRPPSDTNHTLEPTVSLDSVSYLAGYPDSMTAPTIRVLDLFAGAGGLTAGFHTASSRFRSIAAVEMDPEAAASYRATFPKTEVYAGAI

SEQ ID NO: 949925 - protein, 33 aa, Homo sapiens
RGAELFFPHLAGGLTTCWYSSSDRRASCTNASD

SEQ ID NO: 949926 - protein, 82 aa, Homo sapiens
MVRLSTRSDDREADTQMARGGRGFQGTVLKALRAPEHKLTITAVRELAPYTELTVHCPSLLGTGAAMLPPTAWVRMWIPQGG

SEQ ID NO: 949927 - protein, 128 aa, Homo sapiens
RGERQKLGLPPLTSTTLSVCSTTLWVGQVGKKGTQQDLTNLFEKFGHIESINIIPPRGCAYVCMVHREDAFRALQKRQFCASYTIGSKVIKIAWPLDIGVKTEYLQFWDVDLGVTWIPRETVKVDDLE

SEQ ID NO: 949928 - protein, 77 aa, Homo sapiens
HEDNSYYVISFMKGSHYEFTSCGAPEQAAGLRQGGTGSHTMGSDPGHDAEGIQAVGRVRSERNPTWDVGVCDRVISV

SEQ ID NO: 949929 - protein, 52 aa, Homo sapiens
RGEVEAHLPEKVDYVIRCDMSALHRLLYRHMQAKGELLTDGSDNDKKGTGGT

SEQ ID NO: 949930 - protein, 38 aa, Homo sapiens
HEGGRAHAQAQCASASDGRDVGEATAPCLFGLWAVRTG

SEQ ID NO: 949931 - protein, 40 aa, Homo sapiens
RGVIPIKYRRHLYIHEYPLFSSHLSVQTCSNWPSVSASIY

SEQ ID NO: 949932 - protein, 43 aa, Homo sapiens
DVNRNASHILHSKLYSLSRRIFICWDCLSINTHPFCISRARHP

SEQ ID NO: 949933 - protein, 141 aa, Homo sapiens
HEEGSDDSSFSIGDNNGLQQAGKRRRRRLELGDWTPHSIKQLACLHQVIFPVSYIDKFYRDVLEVGELASLAYFNDIAVGAVCCMVDHSQNHKRLYIMPLGCLAPYRRLGIGTKMLNHVLNICEEDGTFDNIYLHVQISIE

SEQ ID NO: 949934 - protein, 166 aa, Homo sapiens
IKDKTGKTLASGISKEGDARDLTGTPPFKVVFGNAEAVESLAVGGATVDLQKYARNLRGTGHVALNRLVIGAVPVGSAPCLIMEISTPLDCAPALVGPLPRRNSRAAQIRWGDRVVHVGGDAPVCVQSMTNTDTSDAIGTAIQVKELARAGSELVRITVDTPAAAA

SEQ ID NO: 949935 - protein, 147 aa, Homo sapiens
TRVAAALVQTRMQGTGGHSSAPPADEAVKALDKRLAAGIEEVTAEIGILSGIVRELASVVAAQDGDIDRLKVQTQAQAQLQAQAAAKPAAPSRPASRPNPPEAVPPSPAAQEAAPMRLVPRTTPPAPRLSDPFETVADETPLIRAFD

SEQ ID NO: 949936 - protein, 65 aa, Homo sapiens
TRASYTLLSSVKPNSDSMCLHSFGLLMANWEIPVSSDGQHWWDYVDPTVTLELLDAPLHEFLDVL

SEQ ID NO: 949937 - protein, 44 aa, Homo sapiens
KRRAEGCGRDRADVSVNLWSEYTFTCAPGKHSVPGLIARLADPA

SEQ ID NO: 949938 - protein, 90 aa, Homo sapiens
RGFRTHFIANHDGRASSRISFRWKVSAAVQGWKSHCFPNVTCLAIFPSGEEPEALSGSSDPGFFETPAMSFSIQLVHVMHTLALAVKETL

SEQ ID NO: 949939 - protein, 38 aa, Homo sapiens
  misc_feature (1)..(1): Xaa can be any naturally occurring amino acid
  misc_feature (3)..(3): Xaa can be any naturally occurring amino acid
  misc_feature (33)..(33): Xaa can be any naturally occurring amino acid
XAXCISLFHVTKLLIYFIFSVMYMRDCVWMLGXNENCM

SEQ ID NO: 949940 - protein, 34 aa, Homo sapiens
GWIKEPTDLLSCPAIVQDLTNGNITWADVEASIL

SEQ ID NO: 949941 - protein, 32 aa, Homo sapiens
MPSGDLFTGLADTILETDCRSAAPITTTGTHF

SEQ ID NO: 949942 - protein, 118 aa, Homo sapiens
  misc_feature (99)..(99): Xaa can be any naturally occurring amino acid
AAQRVERRRDPVAVECFDRLRPGCGVQVEGGRQRVLQQYEIAFLQCDAGLVRQRCRPHAGGVRQTVRQRVVRPQLHAGNVGAYRQAAGAPEPQAVDDRXGRLFACDVDRVGVEQHLRF

SEQ ID NO: 949943 - protein, 37 aa, Homo sapiens
HEENPNSSLVCDMSSLFQELNSGHRPPQIPWMLLHLV

SEQ ID NO: 949944 - protein, 108 aa, Homo sapiens
IIPGGRAGAIRYHADPMNYEILLGLRYVRAKRRNGFISFISLISTFGLALGVAALITVLSVMNGFQKELRTRILGVASHIQVTGYDNELADWQQVADAVLKNPEVKAA

SEQ ID NO: 949945 - protein, 38 aa, Homo sapiens
HEGGADSIACGTFSRELHTPEKMSQGPTLFSCGNMEND

SEQ ID NO: 949946 - protein, 90 aa, Homo sapiens
TRGIVRPASLQVHSVLVTSSDSSVIIQEGVPSPTSSSVITQAPSSKRPIVPVPGPFPLLLHLPKGYSKPVAIPASITSSDVNVPDAFRLV

SEQ ID NO: 949947 - protein, 96 aa, Homo sapiens
HEAEAGPCGAVWLGQAVGCPEGQLRQPAGGVLIWRSKVLPSPEGPLGPLPARVWLGRRNKAELQFPGLDLAYGFSARARGRGSGSHVWILKRHVVF

SEQ ID NO: 949948 - protein, 105 aa, Homo sapiens
TRRYPDIHAAAFGTCLAASVVAPGSGRVLYAVFSRDSRRSGGPGAGLCLFPLGEADAKMEDSRNACYTGTRDARDIFYKPFHGDIQCGGHAPGSNKSFPCGSGHL

SEQ ID NO: 949949 - protein, 123 aa, Homo sapiens
MRGSAGCCGPWQGGSPGFMNSEPSLWGMEALSTGHVWSLQPVASKHGDWFQAQYGGEGDYGRNQGDSGVEEGSRRAVGGYIRSCGHGVQTRNPGRGARIPCTKRMVALGLLVQSISPTLGVWR

SEQ ID NO: 949950 - protein, 37 aa, Homo sapiens
MADLAAPSLQLASSLMTESALLAHATAVLKQIARNGQ

SEQ ID NO: 949951 - protein, 126 aa, Homo sapiens
RGQVRLREKNFTVLASHQQDLTSVLTLLCVHLRLQPRCFRVGLQLALMNNQMLLKQQERDGQYIEPVVPLTDLLEVSSGEENEQVVFSHRAKLYRYDKDVGQWKERGIGDIKILQNYDNKQVLIVM

SEQ ID NO: 949952 - protein, 121 aa, Homo sapiens
HEGDADLTGEEEGGLAGGGPVAFTQGGTEVGAAGPEGLGDLAVGGDEGDVGVGDGVEADHQAAGERPGLAAEVTHLAHPRPDLLVDLAQHTCLQRLAGLHDPEEHGIAGLRPAGLAGEQDL

SEQ ID NO: 949953 - protein, 49 aa, Homo sapiens
HEGHPHTDSISDRQLLHHGVFVFSISIALSGENMPMIQLLPASLVTDGN

SEQ ID NO: 949954 - protein, 59 aa, Homo sapiens
MGSVRRRCCTIKDRPSMPRSMLVAPVATQMCVPDGNNIVLDAFEQLCQCVGIGPVFIAA

SEQ ID NO: 949955 - protein, 164 aa, Homo sapiens
  misc_feature (117)..(117): Xaa can be any naturally occurring amino acid
LEAKNSLTNLTLAQLYYKRREYSRAMPFIERVNGRGNPTAESLWLGARIARRLGDTSQQNAWSAQLQRRFPNAPEEAAFNEEPGMTDRDVASAADFSHGAAPVSNPPAAPSSERDDXLREIAERLRAGRERQRLTVDDLATRLKVAPGKLLAVESADVSALPDM

SEQ ID NO: 949956 - protein, 55 aa, Homo sapiens
MQGKRRALNLNFADPPFKSTGWVTLNPIPRGVQNPHIEFGQQWLKNNSMNFLWIW

SEQ ID NO: 949957 - protein, 157 aa, Homo sapiens
LSEHLFEHRFGTAVGIADSISRLAGADGQRHAQRGQEKGVAQYACERAAAGDRGRAHPPTRSCWISQRPSRRTSVSVLVVLVFQADRLVVLAERGVGTVCGDRLHLHVLDADLDCARLGDARPALGFPGTAGFAVRYLEVGRVIAKVALHILARPGG

SEQ ID NO: 949958 - protein, 148 aa, Homo sapiens
RGEMQADTGDDRDAEGQHDGGTAAGERGEDADADDGREMVDADHRMADARQQALQERLGHLAAHDVVGPCRLRRHDHDDRKRAEPPGENTIASSVVASPKARMDAVSDGAPSSSPAAGEKRCLDPRCAPRDGSDAVFDGKFPGSRVFA

SEQ ID NO: 949959 - protein, 121 aa, Homo sapiens
HEAQHLVSIGQGLEEIASEVGYADAATVRSLLRRKLGRGVRELRSALAEVVGHDLFVSANGAIRKVSNWRVDSVNAQLLFFFHGPAHRRNSARSFDARRVASAFHAQASPQFERSAKGSYS

SEQ ID NO: 949960 - protein, 99 aa, Homo sapiens
RGLVLSMNFGSHLASVRKRDRALVLTLAVADLLGRSGERVGLLGLTEPTSSRRAASRIAEDIDSNSDAPQLASGRPSIARVRRFSRLILASDFLDPIET

SEQ ID NO: 949961 - protein, 101 aa, Homo sapiens
RGGELSSFFKRTEPHSPVGFLLDRAISWANLPLDEWLREVVSDDSVLNTVRDRSGSREAEPGRSSRRSGAGPTNGICRRMAVRLILAGTERSKTPGVEARA

SEQ ID NO: 949962 - protein, 46 aa, Homo sapiens
RGFPMSCIFCSHYGHCLEVTFKGGCNFIFGLHDHLGSGSYYYAISH

SEQ ID NO: 949963 - protein, 57 aa, Homo sapiens
YEGYPGIHKLAPQVHNTLSKQLNVSKSSSFDETASVSVSYKEALSFPHLHLRGQSND

SEQ ID NO: 949964 - protein, 155 aa, Homo sapiens
RGTLAVRHLLPADEHVEIGAEFHQPPEKVRRHHISIVRDHNQGARRARNELVLLAGDPALLRKLFRLYDQPGAIAAGLDRCPETLGTADQCFAAQPVGPPQRPDAVEECVQSRRVLAVVYDAEGHAIDRRRALRLRQQAEPRQDGAILRIEILQF

SEQ ID NO: 949965 - protein, 125 aa, Homo sapiens
TRMATLTLAAATVAMAAGVGVAHAADVIDNQNSVNAKGKPNSGPGVQGAPDTRTGPATRAPGGEESGTANEGASSGASGSGATTQPSQDSSGVEGMPGNKSGPAAKSPSTTNYRQSAEFPRDPRL

SEQ ID NO: 949966 - protein, 157 aa, Homo sapiens
TRSGESLWSKGQKAAVMHLLDYVASGDQADYADYRRNIGITLGDRRAREALDRPDPDRAAAAQGFLDGGNDVGDVPSLIRLFVWFRWAPPMRDAIDLWTEGDRLIGEIDAVARVAHGQISAGSLTADERAVLTLRVRQLDATLETVAVRFSWTLGDI

SEQ ID NO: 949967 - protein, 156 aa, Homo sapiens
  misc_feature (146)..(146): Xaa can be any naturally occurring amino acid
RGSDTRGIGAARRWITAELTACSKAAGGRLQVEEQSFIEPAGNRVSQPTELVNVVATLPGRGASKSRVLVVSGHYDSRNSDVMDSLGEAPGANDDASGTAAVMELACVMARRQFDATLVFMAVPGEEQGLLGAAQWAREARAAGTXVEAMITNDII

SEQ ID NO: 949968 - protein, 81 aa, Homo sapiens
MRSIYETTRLGMLKVTPAAILLVAQAVTGFLVDPVPNQRLYVHEDVYAAVTSPELHKQMLSAENAVIGYIDPYSASIISLF

SEQ ID NO: 949969 - protein, 107 aa, Homo sapiens
RGQLLCSDVKFTTLIHVLHPLQVKEDIESLSRLIDGNHIDEDPPSTFEIFRVTRIPQGHPMSITVDVMESSPFIPVLGASHKHPTHAHIMYNGSFPTLPQMLGRHFV

SEQ ID NO: 949970 - protein, 155 aa, Homo sapiens
  misc_feature (21)..(21): Xaa can be any naturally occurring amino acid
RGRDTPSAAQCACSAAGGAPXNVTLCTDSRLCAPVISAPVFDRDAEPFPERPEFGVQRVEVLADIGQQLRGIAEFSVPVAGVVGQVGPHRRLGLGRELAPAESVITPHGPNMIGDEVGVAQVQDARIVDQGIGHRVGDAGPGHLEVLLRLCVQVD

SEQ ID NO: 949971 - protein, 56 aa, Homo sapiens
RGGPRARYVDLLRPCGNHRSDPGLAHADFGAPLVTLAILSILFVPRPDAYQPYLPD

SEQ ID NO: 949972 - protein, 84 aa, Homo sapiens
NRDRQCRRGTPTVPPSTCRRAVGRSARDRRRRPGPPRRPGPAAGRRAAAGRPGTPRRMMNSRTIAAVDVDVAVRQIAGPDRGAA

SEQ ID NO: 949973 - protein, 147 aa, Homo sapiens
MVAEIAQRDARDEVGGLTPVAAGIRSKVHVRIRTHLRTPNRPVRAVSVASRSPVTQAICVGDCKGSVIVSHNSRAAGRPERARKNLPCRSGPNRETAGEHVLISCSAVRDRPWPDQCRVSTSTSSRSWASKTASTSVSVSAPYCPNT

SEQ ID NO: 949974 - protein, 84 aa, Homo sapiens
MSAVRSSRARSVAWAPPTPSSGGGRKARLVALRALLIDLPRRQMRLGAEALVAVGRDLGHQLVLADEVAEAVEDRLSLVELQPA

SEQ ID NO: 949975 - protein, 97 aa, Homo sapiens
TRDRREHGQHDDGAEGDRRRPGLYGGQATEIDERHQYRDDVDVEHGPAVDEFDDAEHPGALHDAAPPAELQRHGITTRTSMIFNSGTMLLAKKTTAD

SEQ ID NO: 949976 - protein, 45 aa, Homo sapiens
TRCTSLLPLEDVGSVVPHEDCITDVKKAYVNFLTHCYVDTEVEMK

SEQ ID NO: 949977 - protein, 116 aa, Homo sapiens
HEASRCLTGPPGRFWHNRNHRFSPDAARPRGVRLPGNPAMTHTITVIRGDGIGPEIMDATLHVLDAMQLGLSYEFVDAGLVALEKHGELLPAATLESIRRNRIALKSPLTTPVGEG

SEQ ID NO: 949978 - protein, 167 aa, Homo sapiens
HEGALLGESTISVTTLGAPFIRGLSGQFAIGQFGGRNVVLEWQEAQQNFVLRGGHPSRYSNATRNHDADCQANLDADAEACTDSSSLLPCVHHRKGVRQLLHLAKRHMPRRPRMRVQRVDVCGGLSSAGRPAGRPCAKNAASLGVKGVSLIFPYHGLRSARPRPEER

SEQ ID NO: 949979 - protein, 318 aa, Homo sapiens
  misc_feature (32)..(32): Xaa can be any naturally occurring amino acid
WSSREAWLREASACNRKATVLKTWMRVATKSXEEEMVEGNDYEEFGAFGGYGTLTMLLHPYPQSLLDVGVHCLRFLIELSPVELGKPLFLPIPFVDAFPVGYGNTFHDDGSPFSSNVARAACLQSVRLGSAAAAVPYSSFSHGGRYLTGVATPHVSCERITQPTTYAAEAQGPTPEPPLASPQTSQMLVTSKMAAPEAPANLRTAQTGSPAQEAATEGPSSACAFSQAPCAREVDANRPSTAFLGQNDVFDFTQPAGVSGMAFPRPKRPAPAQEAATEGPVLPLVCPDGTWQGGGSTRPRPQVGEALAKSVGELKFCA

SEQ ID NO: 949980 - protein, 111 aa, Homo sapiens
MGASDAVEGTGLSCGVTTTASAPGDVQPANQTHPSSNTALGFIGPQLGIAHGVSRTGQIIIQPFGTQGAGQEEWRVHVRHLDRLRQHHVHDLVRRRRWHVDAGAVIRDEQE

SEQ ID NO: 949981 - protein, 59 aa, Homo sapiens
TREESVCLTVGITDARAHHEPLLRITEIPSPNQMHHRTKKKHHRNPISWIGEAVETVWQ

SEQ ID NO: 949982 - protein, 52 aa, Homo sapiens
  misc_feature (18)..(18): Xaa can be any naturally occurring amino acid
  misc_feature (46)..(46): Xaa can be any naturally occurring amino acid
TTKVFLVGDYSSSAEFFXTVAVFSFLYSMGALATYIFLQNKYRENXKGPCWT

SEQ ID NO: 949983 - protein, 38 aa, Homo sapiens
MEQFRHLPMPFHWKQEELKFKTGLRRMQHRVGEIHLLR

SEQ ID NO: 949984 - protein, 62 aa, Homo sapiens
MEMGMPKSPMMRRALPPKKRLFLNFRRKKAMRKVPSMRMRDSRAVLGWFLGPGGPSVGGRAL

SEQ ID NO: 949985 - protein, 107 aa, Homo sapiens
  misc_feature (89)..(89): Xaa can be any naturally occurring amino acid
  misc_feature (105)..(105): Xaa can be any naturally occurring amino acid
GYNELKACAGLVCERAWVSQGQGPGQSHRAALAVAVVVPGTSLGCEEPAGPGAGLRLGPRCRSQGIGVSEGHHVGGSHGHVQLVVFILXVLVKVWFSVFRVPAAXAP

SEQ ID NO: 949986 - protein, 158 aa, Homo sapiens
TRWNPEKYHDEYRAELMNWIHKRIKAGELEHPPEPPEEPKDEHAPINFMEALKNSLAAVGKGGHKPAAGRAVTPTPPRTAKTNKKKPARKASAAGTAEGRVISAGRRKTARVMHFLRARSPGLLAVVLTILGTAACQPVRRDGPERSSAASALQEGWC

SEQ ID NO: 949987 - protein, 74 aa, Homo sapiens
MLVEPGRSWFNRETSPAFCFAVLLVGYRVPTSPEALYDFAPNDELLGFIIYLIDLYVYIVLGSVILSWVMAFGV

SEQ ID NO: 949988 - protein, 171 aa, Homo sapiens
HEVFAFGSVAVTAANVVTAVVTTTVPMAVTEAAMAVDMAPALSGDEGSWRCCGQYVASQSGHLFRQTLCRQLNIQEQTMKLNVLAAVAMTILATPALAGAGHCDADLKEIDGAMAKAKLSDADMATVKAARAKGEELHKAGKEEECEKSIADAQKLLGIQEQHKEIIIILE

SEQ ID NO: 949989 - protein, 119 aa, Homo sapiens
TRGILNLLSLAVTSLSARDRSPSSRAPSSLAPGASTSTSTLGRETSTSGAVTSTLGSFRSSLGPLMSISGPLRSTLGTLKLGICSLGRCPLRPAPSGTGPSGSFTSNWPAWSSRSVEGG

SEQ ID NO: 949990 - protein, 128 aa, Homo sapiens
PRGFNYRHTPSIEFARQLIADGRLGTVTNARAWLIADYASDPHGPLTWRYDRERAGAGVSLDLMGHGEDLVQELLKGGFTDVSSVSETFILQRRKARKEGIVLHRLGRLGQLGSVGNEDYCAVIARFE

SEQ ID NO: 949991 - protein, 155 aa, Homo sapiens
TRRLLHCRENSWRRDRTAMTKNVSEEERAMRFRDEFSQHMRRVAAASDARAGALALAGEERIADSWRRSMELYRVDPEVPAAPRILSAAEVRERCGRIESFLQLARLGVGKLHSQIKDAGYCVLMTDADGSTVDFRGLPNIDHEFKSRGFRVGAC

SEQ ID NO: 949992 - protein, 136 aa, Homo sapiens
HEEPADRDGPVAAKAAPTGNAPDLLPEPGQGILWEGSGPRQQPVSRPADRDGPFREGRSHSGNSPHLLPEPGPMPAHPAPKKDAAPARCVQARRERTLYQRMMSYEYVGLARNDGVHVDRLEELVEQHHQHAHAAF

SEQ ID NO: 949993 - protein, 107 aa, Homo sapiens
HEVELERLAVLVQRAHAHTVGALDAIVDLGDRQAALFPDLAGVAGPDDLGIDEDAQPVAGLRYVDHDDLLMHVDLGRRHADAGGFVHGFRHVLDQLLYAVVHLRDGL

SEQ ID NO: 949994 - protein, 180 aa, Homo sapiens
TRGHHVFGHGSTIDELREDQATSADRPPNEILADAFAAFVLMPTLGLREAFAKRGLDPNRATALDMYSIACNFGVGQATLVNHLAYGINMINQAQRDRLGRITPKMIRTELLGEVVSTPLTVADQHWNSPTLDTEQDALLLLPSGVVVDASMLVPERELAAGRLFRAAKCGITRAAIPGT

SEQ ID NO: 949995 - protein, 131 aa, Homo sapiens
MSASPMWLLPGQGMVQRHDQQRVEVVHRRIVEVVGHVEHRAHCQVDRIRAQQRQAVAAGHVLQRQLDLRVLLAEPTHQVGQQVEDRRTAGRHPQLARLDAAHAAAEFRVDTVDALHQRAREFVQRLPRVGE

SEQ ID NO: 949996 - protein, 182 aa, Homo sapiens
  misc_feature (7)..(7): Xaa can be any naturally occurring amino acid
MVPSVDXMNTVAGLPTSRPRSVAASMVTDDVTTWSPPSSVTFTTAITVPSSTSVMVPLSWFRVESRIARTSMSQRSGSAVSVALPGSARNGLGDFHLRERTGLVPGAEQSYGRIHGRFHDSSDRFSVFDRKCGQLPQPAEQDHGQRRGQRRKLRAAESGTGAQVDQQAGQQLQPAALHRARG

SEQ ID NO: 949997 - protein, 160 aa, Homo sapiens
HEGYQYLAESIRKHPPQDELKGMMETAGFARCRYRNLSGGIVAIHDGFKALSAGGAAVEPPRHFHPLRAAAPVVGAPARGPAGRDADCDERISAFPGALRRNVPCHSVVMQCLARHGASCRSALARDEALPGMPVARERAPAEADVRAGWRSEGRSCDPR

SEQ ID NO: 949998 - protein, 174 aa, Homo sapiens
QEMKMADSGMHTPGPVQLSVAVDDPAQREILSPEALSMLAELHRRFDPRRRQLLAARRQRQARFDAGELPDFRADTRAIREDDWRVAPLPDALVDRRVEITGPVERKMIINALNSGAKVFMADFEDSSSPRLDNMLAGQVNLRDAVRGTIDFTAPNGKHYTLNDSGLATLIVRP

SEQ ID NO: 949999 - protein, 160 aa, Homo sapiens
RGNAVVIAGYQAEGTRGDALLKGKRSLRIFGRDVPIACEVAQVEGLSAHADWKEILDWLRPVDRAPQRVFVTHGEPVAADSLRQKLEHELAWSAQVPEQDEEFTLTEPMPVDRDDSFAAVLQSRGGGSLISAQNTPICVTVRENWSKSTGFTTYALMPRP

SEQ ID NO: 950000 - protein, 154 aa, Homo sapiens
HEGGRPSTSSRTRAGLGAQTRNSVFCSVMVSLQQHDGQFGNNCAADVGPSTTLPVRASFQVPSGSGNTVLPQPFSASRTVQRVTATTMSAPRVKASTVIAGVPVGEQGGVVAVQEGIRMGPPHPQGGGDHPDLRMLQRLQRGAPRPVVDWAAIV

SEQ ID NO: 950001 - protein, 94 aa, Homo sapiens
MREISCHTSALACYPAARLRQSSNSEATVRSEDRSGDVPGLPLRRQKCIEPAIRVRARNGLQWHITLCARQNRLLWSLIELPDTAQRRGRYTGC

SEQ ID NO: 950002 - protein, 79 aa, Homo sapiens
MVCQDVFYSNTTLTIWMLILPIPMMSERYRYLHAQTFQVPLVMWMSHKTLITGTEDTLMHHLQCNTESRSDQYGDLFQN

SEQ ID NO: 950003 - protein, 138 aa, Homo sapiens
MARPADERHLDTGAAEHLGEFDPDIAAADNEQRARQFLEVERGRAGQIWHGLDPGDGGHRRPRTGGDDDLAGGNARAVHLDAAVDEMRRPVAIGDAVVSGEEVDVLGLAQLGNERVLLTDGPAPIGQFGFGVDAGKTG

SEQ ID NO: 950004 - protein, 106 aa, Homo sapiens
HEAPVELEGLTRTEGQGNEGAAAGCLLSHQALLLPEAGKGRNAVVGAGVAQGLQIGVHLLDGAPLLAIAARFCLEPARELQGEGIDLGWTDPLGIVRLGLACPQVL

SEQ ID NO: 950005 - protein, 134 aa, Homo sapiens
TRGWITVSDCINGQRHVVSSCRIAPAVFRQTRTPLDALPDQAQARQHRTGGRCGRCGGVAITASGLHHPFDRVRVASDESTGDTGRLAQRADVYQTRRRDAEVRQYAAPLFAQHAYFVRVVDHHQCVVALAERQ

SEQ ID NO: 950006 - protein, 127 aa, Homo sapiens
MTKVVAPTRANLMSSWCRSAKGRIGRGSRSNRGISEGHEEQVYGNTLPKVNLCRSPPVPVGPDAGRGRHDNICAVPRTPSDSRAPIVAMIGGGQLARMTHQAAIALGQTLRVLAAGPDDPAAQVTPD

SEQ ID NO: 950007 - protein, 126 aa, Homo sapiens
TRAAPQVGANEFSPDQRKAIEAIVKDYLVKNPEIFLEVQSSLEAKLAKDEADRTKAMVAEHAKEIYRAPNAPVAGNPDGDITVVEFFDYNCGYCKRGFGEIAKLVEKDKNVRVVFKEFPILRDESE

SEQ ID NO: 950008 - protein, 146 aa, Homo sapiens
TRINGALPVQRQVVAVLGGEHVGEQPGAGQPAHDRAAGGGRLHDGLAPAAGEFRAHVAHHPEAGRDVLELFGHVLAQVLERAAALRAVAAGWQMFHAAARQVIGQPVAAGVSRGGFDRDDLGECGEIDCCATGLAVFLLGRTQPEI

SEQ ID NO: 950009 - protein, 37 aa, Homo sapiens
TRIARILHSDFLEPASAGIGYRCNMKENDVIQVLKGH

SEQ ID NO: 950010 - protein, 65 aa, Homo sapiens
HEECWDHPVILHRRLHLMLRNVSFTGWNNGLNVTIVLTMEDGLKYYRMMETAGRMEVKGYQLYQQ

SEQ ID NO: 950011 - protein, 124 aa, Homo sapiens
  misc_feature (104)..(104): Xaa can be any naturally occurring amino acid
MLRPMINAARRKNWVERLSPARRCLNRWDQVPGDSTMVWCACSTKVFEFDSTFASVAIALLPDAGDKRFVQAADAISRRLSQQAEYRMRCGAAFIAVAASAGVXTMPVERYRHRLNLSLTWPPA

SEQ ID NO: 950012 - protein, 85 aa, Homo sapiens
MAVVGSGGYALNDAWEKLPSVMAGVPARREKSSPPPAPPICLRGRMRLSTVSEETVHNRMSLDKVLGITAQNSSGLTCDPGIGHV

SEQ ID NO: 950013 - protein, 157 aa, Homo sapiens
NEEARSLFEFGVQSLLGVTGQPPDNLVDLVFGAPLFLGLSHIVRIDAGDGYRIDTMLFHGASGQNSIDPLVAWLLIDPPMNRCICCADWMLLLTILEAQINAMPDRILTADIAGLVRDPSVDARIISEVIRIVMRSCKAGWIRFSELMPPSLRTCDA

SEQ ID NO: 950014 - protein, 36 aa, Homo sapiens
HEGYFASVRTIVLLPVHVSCEFVYHSKDFDNVCIVS

SEQ ID NO: 950015 - protein, 57 aa, Homo sapiens
HEACREGCVCDAGFLLSGDTCVPVGQCGCLHDVRFHPLGHTFYPGPGCDSLCRCRKV

SEQ ID NO: 950016 - protein, 54 aa, Homo sapiens
RGWVNVHPYPYTSPNRQMRPVDANLGYGSCIEGEVSKNWFRNLLSFSTIPYQSL

SEQ ID NO: 950017 - protein, 60 aa, Homo sapiens
RGLFKCDECAKLFSRIERLKQHVSYMHSRNEVDGEYRYRCGTCENTFRIESALVFHICRT

SEQ ID NO: 950018 - protein, 117 aa, Homo sapiens
RGQVLVATQEAASRFRHGAHDIGGRGATDVLAGVDRRFDRQHAIDAAIDLGLDRLHLGERELVEIDALVGGDADQPPGDVMGLAERQADLAHQPVGKIGRHRVVGRSDGAHALGVGL

SEQ ID NO: 950019 - protein, 135 aa, Homo sapiens
TRPRAEALPVGLAQLALQHLAGARERQRRVAEVDAARTLVPRDLAAAVLHDGIGRERDAALGHDDGVHALAPAFVGHADHGDLAHAGQQRDRVLDLGRVDVLAARDDHVLQPVDDVDEPFVVHVGAVARVVPAVL

SEQ ID NO: 950020 - protein, 46 aa, Homo sapiens
RGVVPIPFHYGSRSSRFSSLPAPERGSGVSRKSMLPGHLSPAIWLR

SEQ ID NO: 950021 - protein, 34 aa, Homo sapiens
MRENPGVTHQKRRAGNRPFTKCCRVDQVRIVGAS

SEQ ID NO: 950022 - protein, 153 aa, Homo sapiens
HEVFSMRDVTPSRENRTPTLMGSFVDTGLRPGDKKRDRYYQSLTARKRLTKIHSTLRPANTAGRKTGKKACTDVRIRQAFLFWFFAFVFSQFFAIFRIGQCRPVAQELPDVQPLKESAVIPIPRKGTPERHRLIQEHLECVKSMAGVAGFSVL

SEQ ID NO: 950023 - protein, 118 aa, Homo sapiens
MTNISRRAAKKFSRPISGGPEGRLEPRMNKLPSGPTQDEPPPTAAALTCRTKAGEPYCRHQSVEAEISVGRRQPHNRWPSREWRLQTLAHLIRLRSHDNDPEVLGRLTHTFLERVKPI

SEQ ID NO: 950024 - protein, 151 aa, Homo sapiens
RGQVRHFATRFASVSPPRLRLLRHSGLTPAAVGLSVGSGITLDAAARPGQAYSTTRGPSVTNAPAETSAPYTASTAIWIALIAGLTVIGSYGYACAAPLAAVAALAALKMNRRNGAILVGLAWIINQAVGFLLLNYPHTAETYAWGAGIGF

SEQ ID NO: 950025 - protein, 38 aa, Homo sapiens
RGGLVLSLYCPRLHTHLCTHPRTLLTGRAVTSPAGWLR

SEQ ID NO: 950026 - protein, 38 aa, Homo sapiens
MRGVPLSVFDRLTGLSAVNDILQYLSELSGRPVTSIYR

SEQ ID NO: 950027 - protein, 115 aa, Homo sapiens
HEGSRMLFNFAVRFIRLSTREKSWLSKALAPAFERLSSSLSIDCASKSQAAVMLRSPAPAPLSGGGTVPEDGVSAGLAAGFCDEADDLVDTGVEGSACAGVAAAGLACVDAGAWF

SEQ ID NO: 950028 - protein, 102 aa, Homo sapiens
MPTVAHSARISSDDLKRGPSGVGFIMRYHSSQTAPGMRPLRGQKSLPEGDELFSDPFVHVADIEKRDIRLAERGEHGLGVDNDVGRFWHDRECLRGRRRHFG

SEQ ID NO: 950029 - protein, 157 aa, Homo sapiens
RGLVPRARLVHDRILEVVDEADRALHLALGVAGQRPVAGDAQRAAQPGQPRIDADQQVVGDVAEQGDPAVVARDLVKVVAMHQPVAAAIGSLVDVLALQFDVAEHGAGVFAQRLVVIARDEDDLGALARAAQDLLHDGVLRRRPVYGAAHRPEIDDV

SEQ ID NO: 950030 - protein, 121 aa, Homo sapiens
HEGMAEHATPRADQWREAAPLEPCEKEQLFRCRELHAARAGEDAEDARFGCDAEAAEEAGAGRCGIARPPPRAVGYDVCDARVGKRAAAARMVACFENQKCAHASGHQSTALLAALPDRAI

SEQ ID NO: 950031 - protein, 128 aa, Homo sapiens
MNFRSHLASVTKRDRALVLTLAAAELLVRSGERVGLLGLTQPTSSRRAATRIAEAIASNSDAPQLASGKPSNARVSRFSGLILASDFLDPIETIRESVEVLAANGATGHMIQVLDPAEETLPYEGRTE

SEQ ID NO: 950032 - protein, 150 aa, Homo sapiens
  misc_feature (96)..(96): Xaa can be any naturally occurring amino acid
LEAKLDLPADLGGDRHHPGERGSDVVRVGAVGLLGGGHVDGDAAVAHHHRSQLPVENAHHGAHAAFVGIGDGLQADQQLHAALEFDAVFVALGNPXKNWLALSPEVSPYCSRCSSSSLVGPGNSSRFSAACRRAPGATNAASSSAVSGCS

SEQ ID NO: 950033 - protein, 37 aa, Homo sapiens
TRGNGSSLRIVIRDKAKFWGLTVFHEDPIESKISFRL

SEQ ID NO: 950034 - protein, 45 aa, Homo sapiens
HEGRIDAFAQMDLDTQSEDDTINGRLLTPRRPTVKKPPGSPPDVT

SEQ ID NO: 950035 - protein, 126 aa, Homo sapiens
RGGPSANSSASDGARAARERLAPRYQPSAGRRKAPSVADTLSKSRLTAAVFSERRSRLQAALDPPTAAIQALKGEDPGLSDLHGRHIGLIAQRLEVAGQALNAHGALPAVALGLHQFQPGLPALGQ

SEQ ID NO: 950036 - protein, 93 aa, Homo sapiens
TRNESYRYVRTDVPWAKSEDELRDIWRKRVKNDWLRLKLAGKDDAAIRETLGKRYDLALTNLNRAKSDDVFQLFMNAYAESIEPHTSYLGPRA

SEQ ID NO: 950037 - protein, 96 aa, Homo sapiens
HEDHVEDERVAATEPEEQPEPEEREPGPRAVMAAESLPFTLETVSSWELEAWYEDLQEVLSSDEIGGTYISSPGNEEEESKTFTTLDPASLAWLTE

SEQ ID NO: 950038 - protein, 97 aa, Homo sapiens
VTRTSQSPRSPDSSQSSMAQEEEEEEQGRTRKRKQSGQCPARPGKQRMKEKEQENERKVAQLAEENERLKQEIERLTREVETTRRALIDRMVSLHQA

SEQ ID NO: 950039 - protein, 101 aa, Homo sapiens
TRPFYARSELASRFAGEEVVAVQESLDMRRFASPLVQFMLPYRMPRRKGEAAPGRHGSVPPPDCLVVNPMVKFPRPEYGAAVRSCSATQGPDDNRQTTCGK

SEQ ID NO: 950040 - protein, 102 aa, Homo sapiens
RGVPYFGAGRPAAVSTSPKEPRSSARSMASGAVPTIGTPASARRCASPSGVCPPSCTMTPTTPGPPAPDCCSARNTSRTSSKVSGSKYSRSAVSYSGDTVSG

SEQ ID NO: 950041 - protein, 125 aa, Homo sapiens
TRPRAEAASRPFSKERDGFVMAEGAGALVLESYQSAVARGAEILGVVRGCGEKADDYHRTRSKPDGTAIIGAIRNALLDAGAAPEEIDYVNAHGTSTPENDKMEYLSLKAVLGDHLASTPVSSNK

SEQ ID NO: 950042 - protein, 107 aa, Homo sapiens
HEVVALPVEIDSRYRVDVRTVQRTEALQGYSARFRIHAALSLRKVINRLVAALLVARQDRYFMAGRRRVFIMLGIHRWLRAGLIFTLAGALGACSSRVPDAPEPLDL

SEQ ID NO: 950043 - protein, 172 aa, Homo sapiens
SRARSSCSGNPCSEGSTRSRRRRQPPLRVLSHRLPTLRRKSSRLLADLPSLSWKNSMSSVVIAAALSASQASKTMANSWVSAWRICSPRSSGGAGAATRPAASRGRVSSSMAKLQGTVREGWHAGDRGGTALRRNRLGAVRRPARPVRLRVAACAGDVMRGRDSLTAATGRG

SEQ ID NO: 950044 - protein, 114 aa, Homo sapiens
HEDGCASGERLIATVGARPDHAHNSSSRVRIMITLRQLYRYPVKGLSAEPLVRVELRAGEGMPLDRLYALTNGSWDFDAGSYQPRPKTDFIALMDHPALAALTTHLDDDARRLT

SEQ ID NO: 950045 - protein, 47 aa, Homo sapiens
TRPDCDANSAGGSVVPSECLNAMEEHDHGALLLLSCTTHPHGQSVIT

SEQ ID NO: 950046 - protein, 48 aa, Homo sapiens
MDVFCENHLKDVDFSENALKEDPLQLFQLDALMFLRLQGNHLVELPPH

SEQ ID NO: 950047 - protein, 143 aa, Homo sapiens
TRAGGKLPRAGNVLLSVRAADKPRVIEIARALASLGFGLMATKGTAAALEAAGLSVTPVNKLGEGRPNIVDYIKNGEINLIINTTDDSRAAIQDSYYLRREALQHRITYYTTVAGARAACLGMQHMPESKVYDLQGLHRALRA

SEQ ID NO: 950048 - protein, 133 aa, Homo sapiens
MAPKGSASMTAAAIVAAIALSAGKGGHDPGPAHSSILHLPRVWTQGTCPCIDLSQVLGQFTASTVEGMRLVRKGLRRGKEPRAWQRMLSGRRLDLLDPSPMDIEIEDIAHGLARVARWNGQTVGEHAFSVAQH

SEQ ID NO: 950049 - protein, 135 aa, Homo sapiens
HEGDDGAAAEGEQQHQRGRQAVVLTGSGCVHGGPHDGSVRTVARGNDLYNALASPASGWPVQVKQRYGAKPRRRIRRVRNAALRRIERCRSGFGVQHLTQKGNERGDPSRAALIGHIHHADCNAHRTRCHLVLRQ

SEQ ID NO: 950050 - protein, 60 aa, Homo sapiens
TRRAGYRAPAVDLGDLVLLHQVVDALDDPGADLVRTRVGRAVGHRRVTLDAVLGLVVGQR

SEQ ID NO: 950051 - protein, 109 aa, Homo sapiens
HEASCRDDARRIEAGGAHQQRRQPGMPVVGMHGGGHRQRRSARRDRGGGVRQRGEALRVVGKVAPGGIGVGRARAIVERRAVEQGDLHVAARQAAEHQPHLTVAGRQLQ

SEQ ID NO: 950052 - protein, 58 aa, Homo sapiens
TREISGTDDGQNHGMLTCLSSLTLPHTDHCLELVIPSLNAQIHGEAIGYHDYKLIINK

SEQ ID NO: 950053 - protein, 87 aa, Homo sapiens
SRPIALMVFSVLLVLIVELLNSAVEATVDRISLENHALAKRAKDIGSAAVMVSLLNLLLVWALVLIARFLDRLKGAAPAPVAGAPPR

SEQ ID NO: 950054 - protein, 145 aa, Homo sapiens
  misc_feature (95)..(95): Xaa can be any naturally occurring amino acid
HEGSRRVKNPTERWRFRETLCATAGTTAEVSRAATRLLREIAPPPEREDGGRRILHGEKTTLSFTGPAAEMADIWATAKDNPLAWLTGSRAVAPXSVTTNVIIELPDYLKVLRGEGSEVRLAMTNGATITGADLIRRTLAGAGLF

SEQ ID NO: 950055 - protein, 139 aa, Homo sapiens
  misc_feature (124)..(124): Xaa can be any naturally occurring amino acid
HEALVVLNQDQAGKVTQLFPNSFSASTQAGKAREIIHAGETIEIPGSDQSFMLKASPPAARNTIIAIVAPPDAKIGDLVDPSKALQEIADPVALLTEITQRSNEADRSRGVDVVGAAKVGRAVXKRSFDIVTNYQNVNT

SEQ ID NO: 950056 - protein, 85 aa, Homo sapiens
RGPDTGLGQCAQQSFQPARALVPPLPEQLGVEGGNDMRRPADAFGFLAQPAVHHADEIRDMLVIALSGRSGSYGALASEGTLRPV

SEQ ID NO: 950057 - protein, 57 aa, Homo sapiens
ERKSRTPIWRQDEVRVNDDAVYGPVYSVSRPAAEGVPFYPSPVVCGLTQEAISLKKL

SEQ ID NO: 950058 - protein, 98 aa, Homo sapiens
QQEYDNFSTSVHTLSPESRVTVRKRIRQRAPDRGGRRRDSVVADLAEMRIGFDCRPFLLGVEKGINLYSILDLWFVVGETRYVDKNTVGKIKMPILHL

SEQ ID NO: 950059 - protein, 70 aa, Homo sapiens
KNSARGVILLGRHSLFHPEDTGQVFQVSHSFPPPRVSSFGLSLSHPMSLAILDDSPPVEKRNQVKAAQFA

SEQ ID NO: 950060 - protein, 48 aa, Homo sapiens
MPIPKAGRVTPSGHLAPPYQFCDGYDARTTGSGRSGPNNIPFVSPFMN

SEQ ID NO: 950061 - protein, 39 aa, Homo sapiens
TLLHDADGVEPQYKREPVEDGRENLSVTCINNKIPGAAA

SEQ ID NO: 950062 - protein, 55 aa, Homo sapiens
CGVSEPSEEEQDHRKRASLSEKKSPFLSIAEGAVPKLVKEGKVLKNQKKQKHLRP

SEQ ID NO: 950063 - protein, 113 aa, Homo sapiens
  misc_feature (71)..(71): Xaa can be any naturally occurring amino acid
PPPEDAARVPLPTAGAWSTGVKPLTGIAVGRGMPLATPAAAIAPAPPAGLGGPVWGVGAPAPGLMQPRALXGMPPPPPPPTGAPTAAFGRGMPPVTAVRGYPPPPPPPPPGYR

SEQ ID NO: 950064 - protein, 104 aa, Homo sapiens
MSCLCVMIAASIYTDRREDIHDKNAKLYPVSREGSYGYSYILAWVALACTVFSGMMYLILRKRKESSGGGLFLVQNRIHFQISILYVTVFFEVFVANILFPFKA

SEQ ID NO: 950065 - protein, 40 aa, Homo sapiens
VKKNVEIMDFLDSSTVIRHREGCTSVRRVPAYKLYWPCSN

SEQ ID NO: 950066 - protein, 124 aa, Homo sapiens
DGPQGLGGPFGLRGGKGPTAQLFRVFGGRAPVFCLKTTGPFPSWGERSEGLGPSFLPTPPGPQNGASSQTDPCLGGQFFLPRRKGKKRACGWLRPKQAPGSTPAPPRVLPVPTFTNLIKSKSRF

SEQ ID NO: 950067 - protein, 51 aa, Homo sapiens
MGCAGSFSKAWCALACARDPGRGLSAEQGLRDVASAGLSPCRDDKVEAWAA

SEQ ID NO: 950068 - protein, 48 aa, Homo sapiens
MKLNDIHSNSNHRRPTVTTYRGAIPGGAKSDNREILNKQKVSKEIAIW

SEQ ID NO: 950069 - protein, 35 aa, Homo sapiens
DNIRKHYMSVKGIFRRGITALKSGQIKTYSAVIAS

SEQ ID NO: 950070 - protein, 41 aa, Homo sapiens
MSARYLSLLQPCQMRHARCRQQQRLQQLRLQPRAPVALARP

SEQ ID NO: 950071 - protein, 111 aa, Homo sapiens
MRLDQFGEGRANPLTFGIGKAVQEVAKALLSDQPSSSSALPCVTTRVRSSLLIIDESRLIEQCTQLVVGRGVNAMSGQSPSVEPGLGHRAPQQESGLVRRRRVMNGEPDAA

SEQ ID NO: 950072 - protein, 137 aa, Homo sapiens
  misc_feature (16)..(16): Xaa can be any naturally occurring amino acid
RSRALYKLSIGGHSAXVSKDHVCEPGFPVRKAFARDCGCLFCRPLPTGPPGVAERPTRVAGETEPGGGRVRLGGARGKTHGRRGHQVEAEGRDSPAEGQACEVCYEASTRGGAMREAPALSGETGSRPGVGKKGGGG

SEQ ID NO: 950073 - protein, 108 aa, Homo sapiens
VINCPMIALSRAKSNLTGPRWDSNPQSPAPEADALSIRPLGHHRIRLLTPSPYAMPSSRSRPRTSRSRTERQVIWQPPPAAAARACAILRPCRPRGLPARCTMGPERP

SEQ ID NO: 950074 - protein, 52 aa, Homo sapiens
AGQGVSCAVQSPSKGPGTGGGPSQSGVVCVEGKEVGASYREENQGPQRQINP

SEQ ID NO: 950075 - protein, 42 aa, Homo sapiens
MDLEPGWYLDPPGRCESKKFGGPWCPRSATRKPTDKPIVTQN

SEQ ID NO: 950076 - protein, 30 aa, Homo sapiens
KPRESAWAEHLQAEGAVAFGKGHKFHHTIR

SEQ ID NO: 950077 - protein, 51 aa, Homo sapiens
  misc_feature (31)..(31): Xaa can be any naturally occurring amino acid
GGGPPGAGVEGGKNAQEGAQGGAGAGDDEEXDEVHLSFLGCWILSLSCQIN

SEQ ID NO: 950078 - protein, 33 aa, Homo sapiens
  misc_feature (9)..(9): Xaa can be any naturally occurring amino acid
VLEGKELEXYLRKIKARKGKKILVVSITHVIKV

SEQ ID NO: 950079 - protein, 47 aa, Homo sapiens
  misc_feature (42)..(42): Xaa can be any naturally occurring amino acid
DSTSKLCHGRFQTMEEKKAFLGPLKKDRIAKEEGAEYLAQIXQFVGL

SEQ ID NO: 950080 - protein, 32 aa, Homo sapiens
GEREQIVLNPEEKFPQRKKISQKKLKNQNLMA

SEQ ID NO: 950081 - protein, 31 aa, Homo sapiens
  misc_feature (1)..(1): Xaa can be any naturally occurring amino acid
XASRFATGPSGPAHWMLRLSKVPVEVLPRGY

SEQ ID NO: 950082 - protein, 47 aa, Homo sapiens
HEGFLDLPDQRTVLRSTQALGQFGHDQSQCMHRLPEVMVGGGDDTRL

SEQ ID NO: 950083 - protein, 137 aa, Homo sapiens
MGFFPVAALFDHAAVVGAVARRRFGHDDELHQAEAAGDDPVLRVRRLLSGICAGRQRERTEQRAQHAVHDFSSGSAQMRRLPGQTGPALPGSSSVPVRRVRRLPSTMRYSNSRHFERAIEQRRAPARLQLDQLREIR

SEQ ID NO: 950084 - protein, 146 aa, Homo sapiens
ARHQQQAVTHGALFRPEHGQIDEEARQIEQAGEPAGDENDVQGLGPEVTALHGRQGQEVVEGEFSAAASTASTSGRDSRTRSSRFMRRLSSTRDSPMKESVIGDSFCAASCTCDARRARQREGIGDAVEIVGHLEPGVVAGVVGAA

SEQ ID NO: 950085 - protein, 42 aa, Homo sapiens
HEDYAGTDIPTLTGDGCGGWANEDSRSAHLRIRAMRLEEQHT

SEQ ID NO: 950086 - protein, 129 aa, Homo sapiens
HEGHIIKRDPGPLNDPVNRRIEVYPQRLAVCDPILHAKRRLIFPPKIPNFHCMYGGTPSSECRERWYWLQMKSTTHRSNSVLVILAFFSGSSSPFEVCFDPVLPGRDSDILCKRSKESLNVPAVVGSLY

SEQ ID NO: 950087 - protein, 108 aa, Homo sapiens
TRRWPIRGESENLAPAKFVNGGSAQESVVGAGSIISAASVRNSVLSSNVVVDDGAIVEGSVIMPGARVGRGAVVRHAILDKNVVVGPGEMVGVDLERDRERFRHQCRR

SEQ ID NO: 950088 - protein, 49 aa, Homo sapiens
HEVFCFDSEIVNAPGVVTEGVTNNVPTIVREAVMEEQMALDIDRGRKLL

SEQ ID NO: 950089 - protein, 142 aa, Homo sapiens
TRLTPPRIVTECGRAMTAHHAVLIANVSEVERAPEGRVPPEQADEPAVIRHLREIHAELPSRPAVELFHEAQHFHSEGIAGYALGQLDLLQRARLDDLFYAIAHAVRQRLTYDEKSHRDLLDELNERLVDKYFVNFSVFESL

SEQ ID NO: 950090 - protein, 34 aa, Homo sapiens
MGVDLVLTSLVSYKLQATVMCLATHGRFLEIGKF

SEQ ID NO: 950091 - protein, 46 aa, Homo sapiens
TRGIQELSHHCDSLITIPTEKLITVLGRYATMIQGSAPPRLCSGGA

SEQ ID NO: 950092 - protein, 53 aa, Homo sapiens
RGSTPLIHHQGNSNGLSQGSCQILMIQISSPVGSPLRSAIADAPIEMPGDEVP

SEQ ID NO: 950093 - protein, 81 aa, Homo sapiens
HEAELLGDEVFQNRLYHLKLLLHVQIRQGTHLATCNTTKEEYTEVDDTTRDLKQEVCGYSTALREHFPTLLVVFDFFNAVP

SEQ ID NO: 950094 - protein, 42 aa, Homo sapiens
HEGHHGYGNSPLCLLFILSHQYDCNHTLENRMLSFAKDTTLR

SEQ ID NO: 950095 - protein, 94 aa, Homo sapiens
MAFHHTQATNDPPDVTVFPKEPVELGHSTTLICHIDQFFPPVLNVTWLCNGELVTEGVAERLFLPRTDNSFHKFHYLTFVPSAKDFYDCRVAHW

SEQ ID NO: 950096 - protein, 30 aa, Homo sapiens
MGNFHKKQHLERTKIWKSLSEDKESGSVRK

SEQ ID NO: 950097 - protein, 39 aa, Homo sapiens
RGRTALRIDSRQSLARPRSGHVLRKVWTRADYRSTMAVD

SEQ ID NO: 950098 - protein, 53 aa, Homo sapiens
PKATGKTVSFSQAHVKPGIMSDPAWDRECDQGCSCGHPVLVHDFGRIKLPVSL

SEQ ID NO: 950099 - protein, 114 aa, Homo sapiens
RNLVAKGARGGPFTFKFPFPLAGGFLGGTSSLPFLGFFQVFFLRFPFPGVFFFWVQIPFPVWIKFCPPFSRGAFSGVSPLGSFGLAPPGPPIFTFFLGIGPFFPSRGINLFLAP

SEQ ID NO: 950100 - protein, 33 aa, Homo sapiens
IKKKDELERVPKSNLDFPSCCPINLFALWGSPR

SEQ ID NO: 950101 - protein, 44 aa, Homo sapiens
GPNGGVTVLSEKGPATRGTVDGGDCGREPGPSHGSPQMRRALRP

SEQ ID NO: 950102 - protein, 50 aa, Homo sapiens
LCKKLRKDLEDQVQLMRRFGPPGPEVLLTLQASHGAGAGPGRIHKVLDFC

SEQ ID NO: 950103 - protein, 38 aa, Homo sapiens
KNWSRKTAQNVRAFYVKSPMGSPSAFVKALLPNLYYQL

SEQ ID NO: 950104 - protein, 78 aa, Homo sapiens
PLVEKVKPFLGNPSAFVTAAPVVGATTDGPAGDATPGKVESKEESEESDEDMGFGFFDYSPKSNQLSQFYLQNKEIKA

SEQ ID NO: 950105 - protein, 81 aa, Homo sapiens
ASLGHPTQTVVLPRIGPIAQQNLALQLAEKLGSLVENNERVFDPKQGPYGGYFRDQKDGYRKNEGYMRRGGYPQQQFQTAY

SEQ ID NO: 950106 - protein, 62 aa, Homo sapiens
IPSPRFGRENPPGPEGFGGSRLPQVPGGSRGQPPNFSGGPVPPPQAVSPPSFKSIFSPPAPA

SEQ ID NO: 950107 - protein, 79 aa, Homo sapiens
KESLLRFLKDRFELVTDCRFENFWTGSTLLLPNVITLQENLLSLTSMRMKETAQFHLSHQLLTLKDEWEEHCQEAHNVE

SEQ ID NO: 950108 - protein, 45 aa, Homo sapiens
HEGVHNDGHLGHELLISWDTPTSDSQDAGTARVGQCHQARCSFFR

SEQ ID NO: 950109 - protein, 45 aa, Homo sapiens
TRCPHSQMQPFLPGPRRKDCDDHLPGEVRKVIIRKMSVLHQVHDR

SEQ ID NO: 950110 - protein, 83 aa, Homo sapiens
IHSFFHFPTQLFQFKVVGDQSLSQQLSVQGRDHSGQDALPSQGTLTPHTHSDCDQTTNKPHLHIFGAWEETRVPRKLSDREDV

SEQ ID NO: 950111 - protein, 68 aa, Homo sapiens
TRDARMVAGNTLLVERKRYRGHRCLGVGMLVILGWFTQARSLTAIHKFLHFYNDDFSHKGNHVTISKL

SEQ ID NO: 950112 - protein, 83 aa, Homo sapiens
DKIILKILSGIDKSTVLLQFRRQTRVVQYTTMQATSALDVPNSLHMDSRPDMRNVPTIVLDEDSSSSTGRVDSATCPMITECG

SEQ ID NO: 950113 - protein, 36 aa, Homo sapiens
RIRETDLVSVVALEGNTTADPDEVPQQGKSSIAYAT

SEQ ID NO: 950114 - protein, 178 aa, Homo sapiens
VVMATVKGDVHDIGKNIVGVVLGCNGYDVIDLGVMVSCDRILQTAREHKADIIGLSGLITPSLEEMSHVASEMTREGFDIPLLIGGATTSRAHTAIKIAPHYASPVVYVPDASRAVGVATSLLSKDQRAAYAEEVAADYAKIREQHAAKKGQKLVSLNDARDNAYCCGWGSEVIPERP

SEQ ID NO: 950115 - protein, 104 aa, Homo sapiens
HEEETYLDYVIPCFVIVNSARTILQENGCLSDTDMFSQAGLRSEEANENLDFVLSFLKSNTLPISLQSIRSSLLLRFRTSMNINLWSEITVLLYKDGRYCQESR

SEQ ID NO: 950116 - protein, 134 aa, Homo sapiens
KSAPAEKSTYLPEFLASMVREFLWFTFFKKRPPGKVIYSLIATVTDLDLDRDRDLWCSTDTGDLDLLERTTFLASSTGHGKTYYQNVTCSGSGLRDPCFLTGCKICDYGNGIGYETRGTSGPGIEDLLLDLLVP

SEQ ID NO: 950117 - protein, 101 aa, Homo sapiens
TRQIFHRFGASRGLLVCIPPTPAYRMPQKIFVDLMAALIYKKERTTGMPLQSYVPPSSRPQEAQGDTGSLGWAQFITRQKGTVGRYYPKIFSENGRPRIGI

SEQ ID NO: 950118 - protein, 37 aa, Homo sapiens
DRDYLLSVSLVRVHLLSVPNKPSQPLLVIQGHIVQRL

SEQ ID NO: 950119 - protein, 106 aa, Homo sapiens
PPTVVHLDVLDTGGMEPLYGLDMICGWDKKGPGLYYVDEHWTRLSGNLFSTGSGNTYAYGVLDSGYRSNLSPDEAYDLGRSAIAYAIDRYSYSAGVVNMYHIVQRL

SEQ ID NO: 950120 - protein, 62 aa, Homo sapiens
KGTITRVTTSSPGGSRVFTHRHDRSSVVRSLGKYLCIHLTHRDVPVVIGSQTIALDTRPYLS

SEQ ID NO: 950121 - protein, 58 aa, Homo sapiens
FTTLKRTVCSSSARISHCDDIIDLGRSLNQGDRCTDLFLWRLSNRLYLLDVVHIVQRL

SEQ ID NO: 950122 - protein, 103 aa, Homo sapiens
MYTYTLYPHTSYYQIPSASLIQPISPESVRLIRLHYCMPRLLMHLFGIATLVNINHYSLPSTLIIITILILLTILEIAVALIQAYVFILLVSLYLHRYHIVQR

SEQ ID NO: 950123 - protein, 67 aa, Homo sapiens
TRGAWEVDNDQLRAIIELHETLQKNSALTIQTVIMVVQHSKHLGKVKWLDKWVPHELSGNQNKRFEV

SEQ ID NO: 950124 - protein, 37 aa, Homo sapiens
HEEEGHFAADDVKAMLHYLNQKWEVLKAKASHRREDL

SEQ ID NO: 950125 - protein, 50 aa, Homo sapiens
  misc_feature (31)..(31): Xaa can be any naturally occurring amino acid
SSSVVIKTLLEQKETPNNHVSSFGSISPCMXDTVKSRACIFSVSQSTFLR

SEQ ID NO: 950126 - protein, 170 aa, Homo sapiens
  misc_feature (35)..(35): Xaa can be any naturally occurring amino acid
LRLAIVCAGAAEQGSDAEDDFHLPRRQRAQLGLGXPWAGTWASRETRAGPVPLAAILGADGQARLRARPPPRSHPGPIRWAFRVRPNVRGLRRTWSRVEEPDEPEESWRRAGAVGSCLGIPGRAGGASAVSMVGPDAVHYLPRIRLRWWRRHCPRPARGCRGGHRALKRP

SEQ ID NO: 950127 - protein, 72 aa, Homo sapiens
LYERPIMVLRILEKTVELEVEFTNRITYKRTYILEKVCADLIRGAQETISKRQGPARMPTKTFANHYKKNSL

SEQ ID NO: 950128 - protein, 98 aa, Homo sapiens
KWSLALSPRLEYNGVISAHCNLHLPGSSDSPASASWVAGITGACHHARHEWNFSVKSLPGPFLHSQVPGKQLACVGDTDDPNPMHIDHDRNMDWVSTQ

SEQ ID NO: 950129 - protein, 67 aa, Homo sapiens
MRFDNTARDEGDSQGDWWSPSLYRFPLVVLLITVSCGTNPAIKLSLHHIPQVAYQYLYGSSTAVERR

SEQ ID NO: 950130 - protein, 58 aa, Homo sapiens
MPVLFLGYSTGLKNESNGEALKIHLSSETKAVLEELGGSELELRGDVEMKGKGTVRTY

SEQ ID NO: 950131 - protein, 86 aa, Homo sapiens
  misc_feature (27)..(27): Xaa can be any naturally occurring amino acid
  misc_feature (58)..(58): Xaa can be any naturally occurring amino acid
SKDPIARQSSSRTCFALFYIPRCSAEXTKLLRTAWSQKTVDLQGFPLDSILDAVLTVXPKRQYRGIFSPTTPAHTGPVWMPMRKRS

SEQ ID NO: 950132 - protein, 45 aa, Homo sapiens
MESNGEALKIHLSSETKAVLEEFGGFELELRGDVEMKGKGKVRTY

SEQ ID NO: 950133 - protein, 64 aa, Homo sapiens
YWKSEAQKVKKADGTPGDRPGNEVKWLRCYEESPSAGLRSENMPLAPAHGWSPMAASYGCSLVV

SEQ ID NO: 950134 - protein, 114 aa, Homo sapiens
HEGDQDSSSVSDPEGPIAAKVLSFVRDDPDFESEGSGHTAEGDDFPVLDDPSDVTDEDEGPAEPPLAPKITRPAFILNNDSDLFGLELEEAGPIDSTEERNEGKTPSKDNTNTT

SEQ ID NO: 950135 - protein, 35 aa, Homo sapiens
MFNINIDDDYLPCLQGITRATFCNVYLEWIQHCAR

SEQ ID NO: 950136 - protein, 124 aa, Homo sapiens
TRLRITTTYMNGKPPFDSSICGDSAADVSQSIQIGQKSQTTAITNTKMNIKYYSLLVHGLVVTPLVSKISSPSDKKILAMNKSCPNTGRYTDQLLKHNVGDLVWAIVSGYPWRACMDSADILLH

SEQ ID NO: 950137 - protein, 35 aa, Homo sapiens
TRGGPIRDPAGGANSQVGHDRDQGIQSLICRQLGN

SEQ ID NO: 950138 - protein, 104 aa, Homo sapiens
MTHQTSPSLLGALRRYFFLMALYTHKNLRPLPSLWWPLLCVSFQGLSRSSPDRYSMEAVDMNTEDGFAFDEESDFNGNSHPSHTSELFSVNAQATRIHSLLGPS

SEQ ID NO: 950139 - protein, 77 aa, Homo sapiens
HEGCFKHTDLRTHVNMHRDQPFTPPHSQPSFDSQSSITHDFSMVSIYRTYFWPDQTIYHKSTSQGFYSTLLSLSPEL

SEQ ID NO: 950140 - protein, 69 aa, Homo sapiens
HEARVTFVDFTVNRRSLESQCLNEVHTAGRPDVDDKRSDLPKLQGEFQLRLASTWKNLYHKLLNEVKGG

SEQ ID NO: 950141 - protein, 41 aa, Homo sapiens
HEVSDPMCYIWRQCSVMFNYEIILHINVSSIEYISCSILPQ

SEQ ID NO: 950142 - protein, 70 aa, Homo sapiens
RGLFTCMGDNAPRQLVCFMGIAALDSCLRDLYQASLAAVNQHLAPRDGISQEGLRTQMVTAVHDISHLIE

SEQ ID NO: 950143 - protein, 131 aa, Homo sapiens
TRIPQKMQLKIYVGSGKQIINRSKDGTEDTFYSHTTSLQLIKSQIFLNKLVVLEEQDKEKILRPAYVFADTTFERRLLTTPAVDEEHALKVTGAHMMTIFISTWKMCNAPPLRKIMSCILSIGQGTTQDDS

SEQ ID NO: 950144 - protein, 65 aa, Homo sapiens
HEDYLSIQEIFLFKTAHPSDNLSPVSIKYAMYFIRLISTPGLASTSTLSTDNTAIFTETGDIFVW

SEQ ID NO: 950145 - protein, 122 aa, Homo sapiens
MAHFQGIRRQGQTCHGDSVHRGPAVPKRARHSAWIPSSLLRAPLLDGKLKACLGSVTLLMKKMFWVSVGDTDHQEGPVATHKGPCLHYCRKEGDLECGGSCCFCALLKIHEAQPYGSPGRLV

SEQ ID NO: 950146 - protein, 130 aa, Homo sapiens
HEVEDYIVVIEILATCDHPYIVNLLGDYYHDGKLWIMIDFCPGGVVDAIMLELARGLTEPQIQVACRHMLKSLNFLHSKRIIHRDLKAGNVLMTLDGDITLEMDPEVVMCETMKDTLYDYTHIWSLGITL

SEQ ID NO: 950147 - protein, 88 aa, Homo sapiens
MRGVLSPRFDKTGLSLKCSLNSIDTRIYMTERNEYMVTCLYKGACLAHEVLPEMNKTIYVYTSKYETWCYVIMIKGTQFMAFSLQNDD

SEQ ID NO: 950148 - protein, 31 aa, Homo sapiens
MLVILTGTLQPHRVNSSVSAAAGACARFARV

SEQ ID NO: 950149 - protein, 69 aa, Homo sapiens
HEADINIAEMIERLQKDCMEEINLFSEDKLQLKHMGDQLIKVSNISRAAEIDDTLNRINDRWQHLFDVI

SEQ ID NO: 950150 - protein, 52 aa, Homo sapiens
RGGFVLPNWVEFVGILCSPLVHISSGFQKGYSTDHPIGQNGCGDSDGLIDAS

SEQ ID NO: 950151 - protein, 94 aa, Homo sapiens
RGAIEMVEGEPPYLNENPLRALYLIATNGTPELQNPEKLSPIFRDFLNRCLEMDVEKRGSAKELLQHPFLKLAKPLSSLTPLIMAAKEAMKSNR

SEQ ID NO: 950152 - protein, 86 aa, Homo sapiens
LEAKNSVRGGFILQCNAESDSTSWTCHVQTVLKIIYYRDDVKSFSRRINHLFFHIDHDGGFSNFMAWSEVTDPDKGFIDDDQVTFD

SEQ ID NO: 950153 - protein, 100 aa, Homo sapiens
TRVICVDVWVINIRHFADPAHGGSWMRGAVYYFKIAVALLVADIPDGLPDVITTWLALGTRCMASNNVIVRSLASVETLGCTAVICPDSDGHAHHQSDVC

SEQ ID NO: 950154 - protein, 72 aa, Homo sapiens
TRGHIQEAIAVINNLHPQLLATNRYLYIHLQQQNLVDLMRQRKTKAAPVFVHTHQVAEGDESRHRLTQMERT

SEQ ID NO: 950155 - protein, 85 aa, Homo sapiens
HEDVHTNPNFETLKCRCDNCDAFFTAQKRSRQDDARHTEPYGHQASKIGFIKFFASHVGKSLDEQLSHWSPTHGTLFPFLVHWGK

SEQ ID NO: 950156 - protein, 139 aa, Homo sapiens
LSPCSVTGCALTYCEPHKSRVCFCFSYRHVFPQMCGHQMFANRVSSYLSFGHIKPFQHHFCTYLYTQISPRLQQSFLWVHAHTCKGTVVIQCSLHTSTSSKHTRVLAGEPNASHAPFCHTAACLFKLWLIHRLVICQQT

SEQ ID NO: 950157 - protein, 48 aa, Homo sapiens
TRGRQTIDMRPERDSHHHDPRHAQRSLKHRQALFMRPSFNAGQCKILV

SEQ ID NO: 950158 - protein, 47 aa, Homo sapiens
RGRWRSGKRAIVWELTLDDELILCHDRISQVYTDEYKDGTEVVLKEN

SEQ ID NO: 950159 - protein, 41 aa, Homo sapiens
CVICYMSSGAGGTWMPEDEINFSEDLNETELTELQSQISDT

SEQ ID NO: 950160 - protein, 77 aa, Homo sapiens
DFFSPMSFRMSISRGLRKDLRFPLANSLGQAELLAQVCQELDRRSAWSVFVRCILIFVHREYGLIRVNDCSVRKARK

SEQ ID NO: 950161 - protein, 75 aa, Homo sapiens
HEDNHTKLECKYSGNMYVGDVGTKLATILNTTVEMDQVIKRDTSCKPFSSRFTFKFYSFLIRSIENSFSYCIRIW

SEQ ID NO: 950162 - protein, 35 aa, Homo sapiens
RKKSLFRNRTGIAVRICVHTLECILGGVRDNGNTL

SEQ ID NO: 950163 - protein, 62 aa, Homo sapiens
PTRHVQVAGSGRVHGGSCMVGLLRLLFFLCILRYWPIWAPPPVRGGRPPRERRVDGLQGVRH

SEQ ID NO: 950164 - protein, 68 aa, Homo sapiens
TRWTCTQRLEMTYSSMNTGYLDMILKEKATSSMAKRISEFNHIGVHRPKQSLQSSITSSGDLMSMTTL

SEQ ID NO: 950165 - protein, 54 aa, Homo sapiens
MTNTLNSIHLLSLGGLPPLTGLFAPMGHSRRIHTQNDSLIIPTIIATIILLNLY

SEQ ID NO: 950166 - protein, 96 aa, Homo sapiens
HEAEGYISTLPGSSVVFHWPRNDYDQLLCVRLTDVPKRIWSVGFELNTNNSFHNNMRDTFRNSIFLQVVITLRGAMYMISFSDTYQLPPPFRIDNF

SEQ ID NO: 950167 - protein, 38 aa, Homo sapiens
IQSELISVDNFGHDHRFTVSVITVNDPLLRTPSVLVII

SEQ ID NO: 950168 - protein, 108 aa, Homo sapiens
  misc_feature (34)..(34): Xaa can be any naturally occurring amino acid
  misc_feature (63)..(63): Xaa can be any naturally occurring amino acid
ICVLCISLALQRLEEQQMCLVPEKQQNRIEEKNXSNEENRKWMRENVPENSRPATGLPLPPQXFNESQYRGDYDAFFEARENNAVYAFLGLTAPPGSKEAEVQAKQQA

SEQ ID NO: 950169 - protein, 43 aa, Homo sapiens
  misc_feature (6)..(6): Xaa can be any naturally occurring amino acid
IIIILXQLFGAAGVMAIEHADSAGVEAYTLVKGGEIASTFDHP

SEQ ID NO: 950170 - protein, 62 aa, Homo sapiens
MTDVQSVGRLMTMTCAGNASGGLDDNWLLLPGLLWLTCHEYAHERFKGLFVVGRLELVLIMP

SEQ ID NO: 950171 - protein, 119 aa, Homo sapiens
FWINRWLLTISEILFLNKQDPLAEKVLPGKSNIEDYFPACARYTTPERCYSRARRRPTLTRAKYFIRDEFLRISTASGDGRHYCYSHYNSAVDNENIRRVYHDCRDIIQRMHLRQYELL

SEQ ID NO: 950172 - protein, 41 aa, Homo sapiens
HCGLEKTYACQDKAGSELRSAMKMTLWVIGKQYKDYTDASI

SEQ ID NO: 950173 - protein, 67 aa, Homo sapiens
SLPILRIPGGRSTQRDTAYNHALDDNRDSSVVSGRHIEHQMDITHQELTWNCPISQAYCSITVQQPA

SEQ ID NO: 950174 - protein, 44 aa, Homo sapiens
GPESFPALVVTWSPEEGTIMETSHCALVYPAEPLHMPLSLGIAR

SEQ ID NO: 950175 - protein, 54 aa, Homo sapiens
IEPLLCGLPLICRLLLAPVLCARLEEGSPPIVCQANASGIRRPAWYQNGVPSDL

SEQ ID NO: 950176 - protein, 134 aa, Homo sapiens
MTKVHALNDVTAVVEHTADILSVHSAGELRVAVVTPISTGSADPQTLISNEVLGPGHAWVLSGLGSSILRSSVASKFWKVVLNLRFPRKDFLSEQIYAVEDQGSQRCAQPSVVPDALEEVQSLLQAVGLVVSRM

SEQ ID NO: 950177 - protein, 80 aa, Homo sapiens
MHNSAFHLSIQDRTKPSSFFPPVTKLLAIGSHCNVGAPAIILTWTSHNVSSNILLLDYMSIIPYTLPIALEHTPHVALTL

SEQ ID NO: 950178 - protein, 115 aa, Homo sapiens
FPLFRRVTVALLVGLLRLLFYVTSSLLAHLSTPPVSGGRPPRERRVDGIQGVSHVSLFPVLRYVVRVVVLEFNVDVVGMRIVVRTTYYLVNITNGYVRVVREDPAIIHPMWVIDG

SEQ ID NO: 950179 - protein, 38 aa, Homo sapiens
TLAEIAKVELDNMPLRETQLRVRFCLPIVPSLYSSETY

SEQ ID NO: 950180 - protein, 42 aa, Homo sapiens
RREIRYRMTGVTPRMHALSDKTGHTGGKKKEVKEELLHSEKL

SEQ ID NO: 950181 - protein, 68 aa, Homo sapiens
EWPMNGLLPGPSRSYLVPMIQKLWGSTIRLLTSLRPKHNQENYERPGVVNSETGTLVAHTDTWAYGRH

SEQ ID NO: 950182 - protein, 34 aa, Homo sapiens
PINQSYSHKTLHQRALKPATSTITLYITAPVLLG

SEQ ID NO: 950183 - protein, 32 aa, Homo sapiens
MQTHKQIVPSKALSPRPTPQRTTASLLDRQQS

SEQ ID NO: 950184 - protein, 35 aa, Homo sapiens
GLPKRRVTQDRRTFNVNKRTFNSGCTIGMSYGRDG

SEQ ID NO: 950185 - protein, 34 aa, Homo sapiens
EDPLSFDDELHMLSHVWNSASIFTSEMSYVVMTL

SEQ ID NO: 950186 - protein, 52 aa, Homo sapiens
STFRVYDLDVDQDIPSGAAAIKGSCVQRLKSYVLTDTLCPNQQQSYVVIDTL

SEQ ID NO: 950187 - protein, 72 aa, Homo sapiens
ECHSRRRTILTDPITLPTGTRYPRDKSAILYLKSISTKGNDLDVGSGHPDGAVAIKGSFVQRLKSYGLIDTL

SEQ ID NO: 950188 - protein, 43 aa, Homo sapiens
RRIHAGGLVATTVHITDKLKSCEVRLRMLNCKMLGVSYVLIDT

SEQ ID NO: 950189 - protein, 66 aa, Homo sapiens
TKTRMALMGVVVGVCVPVGVGVGVTVVVVVMGVRLYFCVPVGVGVGVTVVVVVMGVTVVLFVLAVS

SEQ ID NO: 950190 - protein, 128 aa, Homo sapiens
SVIMTLRKLQLEAGAYSAEATPSPHASSQVHEDEHLRWRLERGLPLPARLWVPLPAEEEKRLSAESGLSEDSRPSASTVSEAEPEGPSAEAQGGSQQETKTAGGKGGAEEDYQEPTVPFADVRTAAPR

SEQ ID NO: 950191 - protein, 58 aa, Homo sapiens
SRPELLGFSMALLSWVRLVACTAIPQCHDSSFAGDNIITAQAMYKGLLDLICVTRSTG

SEQ ID NO: 950192 - protein, 39 aa, Homo sapiens
MGAFSLIISVVPVCYSCANCDTILTNRSELLSTRFHRRH

SEQ ID NO: 950193 - protein, 102 aa, Homo sapiens
QCPFPPSSGCVFFTAAQKFSPWTSAAGLDLLCRPPSLGSRLVQPLRGRWKSACLLANVLCFPLRLFWRSEEEEEGEKQDGDHQDPVSVPPSAFSDHCGELTL

SEQ ID NO: 950194 - protein, 105 aa, Homo sapiens
ESDLSWSAALGIERPAAAQAPAPPSMKCPTGPGKDTPAAGAYRLCHCLGDIAHQAVILRAQAICLEFATELVERGRQVRLLKRLLPQGHKLGAAGASSSSRYPSG

SEQ ID NO: 950195 - protein, 109 aa, Homo sapiens
  misc_feature (21)..(21): Xaa can be any naturally occurring amino acid
EPVYPTAVESDARTSRRAEVXDLTLDMTMADHLATGFGSLPALEVLDFTYNKLSENSLPGNFFYQNTLLHVYLSDNDIEILPPDIGKLTRLQILSLREYDLISLPKEIG

SEQ ID NO: 950196 - protein, 139 aa, Homo sapiens
QRALQSTTQEDPSQSPKEKTVRKLRIMLTINPYATTMRRNTILRQAQEITSSGWLRQLLQQRHYKPHQLRRLAVAGQKPVVGQKGKKAAVGVKKQKKPLVRKKAAATKITAPDKHSLRRRNLLQRRRSLLHKLLNLIIP

SEQ ID NO: 950197 - protein, 42 aa, Homo sapiens
MGLLVPYRGLAAVISLARAHGKACRLPLVLGTTYIAYTHYLM

SEQ ID NO: 950198 - protein, 63 aa, Homo sapiens
SIDSLAPSVGSVSTFQRIWLSKLEYDASGPSIVRRNASKRPLQLRSICCMGSLRIEDLPLENA

SEQ ID NO: 950199 - protein, 118 aa, Homo sapiens
MPFQISTGTQICHTHYFSLHPAVPLVPRSLRTPSKNRSHGTRAAYFLNASKGSPPFHLFFFLFMLTVFSENPFGWFILGFLETECSSVTQSAVQWRHTGTIRTSDSQDQAILVPKPLK

SEQ ID NO: 950200 - protein, 181 aa, Homo sapiens
LGARSFQVSNVGQCPPLITLLFSCLSREVATVSDFGGPQCLLCHVVVRAHASAVPGLSLLASGEYHLRSSDDQNYGLFSDIQTGRVLNKVKQMRPLADLSPVHSSTLTDYSTLEQGTMDSQIKIWDLQERTNVAKFPGHSGPILSIDFSENGYYLATAADDLLCPSSGICARLRTLRLAAG

SEQ ID NO: 950201 - protein, 44 aa, Homo sapiens
LSVGLSVSFPKALVCISQEPNLAFRLVSRALLASHNGIIHTPIG

SEQ ID NO: 950202 - protein, 40 aa, Homo sapiens
MSPYSKAYGFTPSEYASTCTITHNDPPITCPMATREREDT

SEQ ID NO: 950203 - protein, 69 aa, Homo sapiens
WPSRNCVIGSEASLTCTLTGLRDASGASFTWTPSSGKSAVQGPPERDLCGSYSESSVLPGLCPDHGPYE

SEQ ID NO: 950204 - protein, 85 aa, Homo sapiens
MSVIPRFSSGLPEVDFSLQGELGQNQERVQPGHVALPVADELGTQNVGEGRERHLFIIRGSNEHAEGVPVVGQFQDVVIRGHRAE

SEQ ID NO: 950205 - protein, 40 aa, Homo sapiens
MAFHAVVHGRLPLLYDRSRCCAMILYSQCGDVMSGPGPDN

SEQ ID NO: 950206 - protein, 74 aa, Homo sapiens
NKSTLDGTGTPDTETAVYGAAGPGGVLGTPTGRRPYTLRLAGARKLMASQTLRRMLPVDEYPPIMFDQHPNEQY

SEQ ID NO: 950207 - protein, 81 aa, Homo sapiens
VPLELVVNVDALVHGPPGLAGAPGESGREGAPGAEGPLDETVLLAPRVTVVRPAPLDPLVFLVLLVPLAPLALLARVVIVV

SEQ ID NO: 950208 - protein, 47 aa, Homo sapiens
MRASEAVAGARCSQLIVVPGQVLAIVGGLAAHKHVPITQDFRFAQPP

SEQ ID NO: 950209 - protein, 45 aa, Homo sapiens
SYRWIQFAYAGRHRRLLDVAIQLTFLRLMSSEASQNITYHCKNSV

SEQ ID NO: 950210 - protein, 57 aa, Homo sapiens
VLVYWYQFFWATWAWCKHAGLTSLHVAEDFDGIQVAALVGVNPDTLHSDWKSGEYWI

SEQ ID NO: 950211 - protein, 62 aa, Homo sapiens
ASYRGCPGDDVMLPICVHATLNLDRDKKYLRPSVNSEAPSGVVIMGVVPCTYVNDEYTTHTD

SEQ ID NO: 950212 - protein, 32 aa, Homo sapiens
  misc_feature (17)..(17): Xaa can be any naturally occurring amino acid
MPRWPATMLWWRLWNRXLHKDGIITEGSRQPV

SEQ ID NO: 950213 - protein, 141 aa, Homo sapiens
MNLYSGCRLSVYLTVMGLRSYRYLICKDDAARVAVGDVFLVGHRVLVGVPLLATLVLINRGHNLQDVVVGGQGVGGESVCSPESIESSVDVLDLERVPKGELVDDMRHVWVLWLGCGTECGHVEVAGDLVDAELPLEAAAW

SEQ ID NO: 950214 - protein, 41 aa, Homo sapiens
IAGTVELGNSSSDLAHSYNAFSILKQLTLMTFCEPSQALEF

SEQ ID NO: 950215 - protein, 70 aa, Homo sapiens
LTKRTPEYGSGYGPQKGELSTLLYNTHPYRAYPVLAAGHRYPGIQRLYSAHPTPYTYQGSRQNTTKYTYH

SEQ ID NO: 950216 - protein, 94 aa, Homo sapiens
TRGIPSTVFWKSSRCSYSHATLLRQIHHIQDCSTEVGQVSDGLHLDGVPILQRVVQDPRSVYKLNTANLVTESTLTHKLLVQHIPEVTHNTPNQ

SEQ ID NO: 950217 - protein, 45 aa, Homo sapiens
EDLQRNLWKTILDGSEKCRPWKENTADNEKECIMGGEKKPTDEEK

SEQ ID NO: 950218 - protein, 111 aa, Homo sapiens
MCLDPCFGVPLPSESNDLVKCIPFNENSEALECRRLSSFMVKENEQQPDHTSRGTTEALQLSQDILISKDTEPVELNCNFSCQGKEKVSCTICGHKFPRKSQWMEASRMGT

SEQ ID NO: 950219 - protein, 106 aa, Homo sapiens
KSNPRPISWVTKKEICSKKRAVASPEATVSQTDENTAESRRERVTLSSSKNLKPSSETKTQKGLFSDEEDSEDWFPISKGEEVRRCISAGGQAPQVGFPVGWKRRA

SEQ ID NO: 950220 - protein, 98 aa, Homo sapiens
SIFALEQRDLLRELISNSSEAWDKIRYGSVTDPSKLELGKELHIMPYTEQTRSNSHIVDTGMGMTEADLINNLGTIAKSGTKAFMEAWQAGADISMIG

SEQ ID NO: 950221 - protein, 72 aa, Homo sapiens
RGPMRDASIKNGDQETSSEPGSFFPAFFFWLLFLNKNQSIHRESHVPQCSYGVATLHMSSPRSNDLFGSKSL

SEQ ID NO: 950222 - protein, 96 aa, Homo sapiens
HAAGFMNSGLPTTEARVSSRGVRVAIDVSVIKGSTNIWAYRACLADGKIPVSASKDETADLAEQNPKEFDEVTKLQQIPHLQSIQSCAKTGQEIRR

SEQ ID NO: 950223 - protein, 47 aa, Homo sapiens
KISWTQCSEPGLVVSVCPVCVLREGRTGAGSQHPGRSVLLFLMEASR

SEQ ID NO: 950224 - protein, 67 aa, Homo sapiens
PVRTWHVLLAGSVSALPHRQVHNRGGKLATFSGVSPFLLLCVRVPSCTAASSFTTLVSALLMEASRM

SEQ ID NO: 950225 - protein, 35 aa, Homo sapiens
MGGLDSDGGLLSESRSSYLNPDRQKYKAIRLIFVI

SEQ ID NO: 950226 - protein, 100 aa, Homo sapiens
NRLLVNMLIVSSCFGESSNRATPDPALIRSERVWNPAISGVLEHVWYHSMPALLISLPPALRGVPEALWCGHAGVVPLPVRTFLLAEDAPHGHYHLPLGT

SEQ ID NO: 950227 - protein, 144 aa, Homo sapiens
TISMVACWAGLNEGTTHTYPGIGMAADEKVHIECVIGSGEGEKVNADILIKWVNPALLKVQTKTDFYFPASRHHNLISTKFTVSSAFNSMHIATKCMIPSKHNASRQQQQLHLHAGTSCNQRSNTPNSSSSQSIGAGIYSIYWM

SEQ ID NO: 950228 - protein, 115 aa, Homo sapiens
RFRAECLPSVLEEKQKSDAEEDGGTVSQEEEDRKPKAEVKERGHTFSFTKLKVHFCNREYFNTGSFTVAYGSHKILFKAQFCCKWAFFVDTRSVFLYCIIFTATIFNHQQVSVFS

SEQ ID NO: 950229 - protein, 51 aa, Homo sapiens
DKQDEGNGIVGGGYREVIPKGKTLILVFPLFPGLANRVRPEAHPLGQSRRI

SEQ ID NO: 950230 - protein, 48 aa, Homo sapiens
LQAQTGPRKDMAHHYTLQSEIVRFYRRGCFRYILIELCLHVCGQLSGT

SEQ ID NO: 950231 - protein, 101 aa, Homo sapiens
NGQRAGSVLRTAGACMMAGRSLGAGAVAPLLAGGGLHVQVLNVYALTWSCEELTKNLLSEPFMRALYLRVSDLVTSAQSVTGGTDSDLQTSIGRLPLVDVF

SEQ ID NO: 950232 - protein, 55 aa, Homo sapiens
RYRMYFIPLSLSSAAFSASSQLLQGCSQALLEPGPSSSSNQLNAAVQGGHICLRI

SEQ ID NO: 950233 - protein, 66 aa, Homo sapiens
SKIGVWQLILTNIYLTPRAPTCCVAHNQMGSASCELTLSVTEPSQGLQWPGSSRIGCAPCGASSQQ

SEQ ID NO: 950234 - protein, 61 aa, Homo sapiens
RQERVVVGRVLGSSHPVQRAAILPLAKAVVQVVLVYDVAPADVERTQTVSFIFWKKSLLQS

SEQ ID NO: 950235 - protein, 58 aa, Homo sapiens
QGTSEILSDVQRIKTGDEVGASEATLLNMLNISPFSCGRVIQQVFDDGSIYNPEDSWL

SEQ ID NO: 950236 - protein, 48 aa, Homo sapiens
LAAPPKGSKGAAVEHVQQRGFAGSHFVSSLDQLHITQAFNGAPEDLLV

SEQ ID NO: 950237 - protein, 108 aa, Homo sapiens
QLSFTGIGTLSSHFCSSSFSSSLTVMFLISEDNENTLKSSISFTVGYHQLVVTLHCIIGDVLLTGYTAQFCHLEVARLLVVLDQIVLVQHQDSCMNQIYSALVQQGIS

SEQ ID NO: 950238 - protein, 41 aa, Homo sapiens
VSNELYNPAETYNTELIALNFARGAGTDVAGGWSPESTYDT

SEQ ID NO: 950239 - protein, 87 aa, Homo sapiens
TSSTWQVYLCFCPEGTTSVAHLWKVPSPAGLVYSELRVLPLVLPIPLPGQCDLRRVEAHGPAPQGGFMVRDTAVSHMRFGGVRALQR

SEQ ID NO: 950240 - protein, 57 aa, Homo sapiens
IKHMEVDVYRVLYNLLAPSLNMPSPTFLPEYYIGGIVYYMRVGYNFFSFIMMIVRLM

SEQ ID NO: 950241 - protein, 60 aa, Homo sapiens
FTESVSAARARGVSSLQEASLGLHSQKVARIPRTSQTSILECCSLVIVTSIQASGVYIQY

SEQ ID NO: 950242 - protein, 48 aa, Homo sapiens
TCKISRVRTEPWYYYESPKGFVLQLTNGWNKCQSWSAIHDIHHMNSQS

SEQ ID NO: 950243 - protein, 53 aa, Homo sapiens
DPNNISTCIEGSLENNQLWRNCCLILGGMWALLFTKEDLTEIRYMLLANKVAA

SEQ ID NO: 950244 - protein, 105 aa, Homo sapiens
  misc_feature (31)..(32): Xaa can be any naturally occurring amino acid
  misc_feature (47)..(47): Xaa can be any naturally occurring amino acid
  misc_feature (51)..(51): Xaa can be any naturally occurring amino acid
  misc_feature (62)..(62): Xaa can be any naturally occurring amino acid
  misc_feature (68)..(68): Xaa can be any naturally occurring amino acid
CTILSGRGHTCTWACCPVCLIQQWVPVVDTXXVHVHAGVQWFRAWAXHLGXGKNRHHRCAPXQDPHGXGGLSPGYVDHLAHSCSSRVRLQLRDIPGPEKKLSIQI

SEQ ID NO: 950245 - protein, 108 aa, Homo sapiens
MAEVIWRVCSSEAIHSTVWWDPMACGEIIVDAKIARLDFSLQKTKMKLGVQVVITYPEKPDQIIQIESDIPNERIHNILSTGANVILTTGGIDDMCMKYSWKADAMAH

SEQ ID NO: 950246 - protein, 51 aa, Homo sapiens
SSTWGNGTSTGSSWHLFVQQHVPDLNEGLLFEHKTHIPPDMRQKFLQSWVV

SEQ ID NO: 950247 - protein, 70 aa, Homo sapiens
KEEGTPKGVCKHKEKNVESVTTGTAQTATDKNDPHKCDFIETHNLNEQVKAIKEEGDHVTNLRKMGAPEY

SEQ ID NO: 950248 - protein, 97 aa, Homo sapiens
MRSRMEYGGTFACGGAALLGLAFVSTLRYLVLFPTLTILVILLVIAWRTPYDVDSVYNGYGSAAYFTALNWNTTRTRNICWLRTLFSFNNIKLHSLS

SEQ ID NO: 950249 - protein, 57 aa, Homo sapiens
LRRILVKIGKAGSPLYDMQLERRGLPYSLWTSKKKALRYQQPGLLGKGHRICVSCNA

SEQ ID NO: 950250 - protein, 32 aa, Homo sapiens
MWADWHCISKLITETSYYLTRTTVVAHFHYVL

SEQ ID NO: 950251 - protein, 40 aa, Homo sapiens
DAIVLMMVKGELTGCLRFRLNEEVCGEESIKSVSDQRKAP

SEQ ID NO: 950252 - protein, 47 aa, Homo sapiens
VVGSTSPVVASGQWRAALMSGFQCAAPLLILTNKFYFPPQLYKPATR

SEQ ID NO: 950253 - protein, 71 aa, Homo sapiens
SAHHMKLGLARGTNSRCPAFQSKKLLLEMDLTTATYLFLLSLLSDQLDPHVEQQRGPVKGCLQQDRCVGAC

SEQ ID NO: 950254 - protein, 125 aa, Homo sapiens
TVFSEFMIQSHEAAGRSCAAGPAPGGWPPQPGVPYLCRVVACLEPHDSPVLEVYVAICRKLILKLCILGTLCYHWLGAAGEPYLQGQCWADIVGQELDRYLVNGLSSPMLAGPAIVAGFRSLEIG

SEQ ID NO: 950255 - protein, 71 aa, Homo sapiens
LQLDGIQCGLFSGYVVFELYRLHLGRVELSNGSDLLTPSFHGDEGTVSGQSLRIAQPPKVTTFEVLVPTHL

SEQ ID NO: 950256 - protein, 85 aa, Homo sapiens
MIPKLHESRHTGEKPTSAPLPLCLWNLGNLKRHGRIHPCDKPSRCSLWNYSCNQSMNLKGHMLRHNRREALPLCHLGPIPGGTGT

SEQ ID NO: 950257 - protein, 50 aa, Homo sapiens
TCHCILSFNLWMQAGGMMPELSYRDVVQLLNTTRYSSCSSLGILGNKERY

SEQ ID NO: 950258 - protein, 73 aa, Homo sapiens
  misc_feature (2)..(2): Xaa can be any naturally occurring amino acid
VXAAGWGQMYRRGHVAGRWAVQEQHGMTSLRSTPTPVPTHVVYKSPSGSHWWSRVYSVELPRERGSPSSDPAF

SEQ ID NO: 950259 - protein, 43 aa, Homo sapiens
DKRGSNRKKTSRCWLNELATKEEPLRVVRRIEDVGLARRGCRA

SEQ ID NO: 950260 - protein, 94 aa, Homo sapiens
MHVGDHGRLSMVREPSATSSMSQALPATPPEWERVMSGPTGPIFLSGVSVQQELEIINERLEWVTQASHKAPREWGPPRRLTKTQEQHERQEER

SEQ ID NO: 950261 - protein, 47 aa, Homo sapiens
LVSCVTPHTESFKEVGIEFMDLYSQLVPVYDVEPLGEDNVMLTLGPS

SEQ ID NO: 950262 - protein, 31 aa, Homo sapiens
MYHMPRLPMEPEPDVEGVKTCDMRKSLRRED

SEQ ID NO: 950263 - protein, 89 aa, Homo sapiens
  misc_feature (45)..(45): Xaa can be any naturally occurring amino acid
KRMRAQLSLTLTSEIDLAVKRLGMTQPDEKTYGALIYYWQQYLTXPQVLNYQTWIKNFGWGDLGAESKLRAVHSEDFTSPSELLYSIDP

SEQ ID NO: 950264 - protein, 38 aa, Homo sapiens
MNHDGPWHLHNPPSGVVSILEGRFSAASPKDRACEQVW

SEQ ID NO: 950265 - protein, 73 aa, Homo sapiens
  misc_feature (3)..(3): Xaa can be any naturally occurring amino acid
GSXDLYLAGDQLTLRIAHCGVRRRYVRPTYLLASLLGARLAGPSLECKNAPVARQLLVPRIVKTASDLRGSEA

SEQ ID NO: 950266 - protein, 52 aa, Homo sapiens
AHDGCVCHGLHNASPGVSPSGGGGDSERGEGLLVCDGATDGDDVRVCTMPLA

SEQ ID NO: 950267 - protein, 73 aa, Homo sapiens
  misc_feature (37)..(37): Xaa can be any naturally occurring amino acid
GLEMRWKEVEGRGHGGVVRGYSVDASGAGRVWEVVSXLGKTAWDRSSRLNGGSVPCSEVCLAIGLEIPAAPGH

SEQ ID NO: 950268 - protein, 35 aa, Homo sapiens
MSPSPLFSLESCKGPGTDDQYENVIVLVSLTVTGD

SEQ ID NO: 950269 - protein, 49 aa, Homo sapiens
RSCCSRPAELSREYKLVLLGAGGDRKNAMTMQFISHRIPEDHDPTIEDA

SEQ ID NO: 950270 - protein, 57 aa, Homo sapiens
MAPTIYHIICLFLHIGRGLSYGSFLYSDKPEHIGFILHACKLIATAIPRLCPPRIQA

SEQ ID NO: 950271 - protein, 42 aa, Homo sapiens
MALLCEQGPSRSLWSCMVPRGPHWLCLVLRGKDGLNVSPLAP

SEQ ID NO: 950272 - protein, 46 aa, Homo sapiens
ALAPPMTVPASDRPSEKRYVCEKSCTAVTGNETLDYKHGSSGSRLS

SEQ ID NO: 950273 - protein, 200 aa, Homo sapiens
GYGRIHSTRGSFSPTVNISAHVLMAPWADSSVFPRTISPQLGLSKPRVVKVTGQCCEEWVCDEDSIKEPMEDQDGLLGKELGFDGSEVELTETNELIAVGKGSSLKRLPVFGMEPRILYKPLQRAEMYCSNNFMVPVLKDLWELVIFTRVTNDNPEWRLVKETRICEVRPCGQAVYSRLKKGTEMQGEQEIRETVRLLTL

SEQ ID NO: 950274 - protein, 39 aa, Homo sapiens
EYTQNVSKINLQKPPRVMEAAGVSCGRVLCEPAQNLMRA

SEQ ID NO: 950275 - protein, 164 aa, Homo sapiens
RRHADCRGARTGSAPAISAMGLSRGVREDTEPTLQGSEDGGPARPERSGTDASQQRRESPLNAQFALGDVLDVGLVREQVLQPLQEQQGLVVACDAPLTGLDHLVQGSRLHHLHSVAEDEPLGSDAVNAVQEPLLVQEEALHAHAQALAGHQADLVQLIQPGVR

SEQ ID NO: 950276 - protein, 203 aa, Homo sapiens
  misc_feature (40)..(40): Xaa can be any naturally occurring amino acid
ESHSKRGSSSPTVTSVHMYDGAWLHSLCPKNYLSQLGCPXLGWSKFTGQCCEEWVCDEDSIKDPMEDQDGLLGKELGFDASEVELTRNNELIAVGKGSSLKRLPVFWNGASHPIQPFTRPEMYCSSNSMVPVLKDLWNWYLHTVTNDNPECRLVKETRICEVRPCGQAVYSSLKKGKKCSKDKKSPEPVRLLTLEFECDSGGV

SEQ ID NO: 950277 - protein, 80 aa, Homo sapiens
FDGDLQRLSPDEEAEPSEPRLTAASRPSHSGHGHSSSLSWQSLLHTFRGRADSKCTVCGIFNWPPFNRKLTRLRTYEGTE

SEQ ID NO: 950278 - protein, 182 aa, Homo sapiens
EQISQSDGDKKPMVDAITSCRPETVSRENDFPSEAPISLNLSHNICNPMTVNSLPQYAEPSCPSLPAGPTGVEEDKGLYSPGDLWPTPPVCVTSSLNCTLENGVPCVIQESAPVHNSFIDGSATCEGQFSSAYCPLELNDYNAFPEENMNYANGFPCPADVQTDFIDHNSQSSWNTPPKMTA

SEQ ID NO: 950279 - protein, 34 aa, Homo sapiens
QLRFAGSECAVFHGFFSMPEYALPEAGAAPDGHP

SEQ ID NO: 950280 - protein, 48 aa, Homo sapiens
SLTFPFFAVYSSSSVILLLGIDIVILIIFSCPICPKLTQLLIFISILF

SEQ ID NO: 950281 - protein, 41 aa, Homo sapiens
RHLSSSSWMSAASSSSPPAGVERSSSSSSLALGHGRSLLIP

SEQ ID NO: 950282 - protein, 70 aa, Homo sapiens
RSRHCGNIRLRPPRNCEWTPGSQVVVIDIHTDSEEQASIAAVNDLKVPELHKVGVYGVSDGDHGMHLLDQ

SEQ ID NO: 950283 - protein, 52 aa, Homo sapiens
YDERKLLVSLEGGSSLEALMSAGPATCPEGHDWVMYLSPTGHLVMSRVFSPP

SEQ ID NO: 950284 - protein, 45 aa, Homo sapiens
MSPLSCSSRSGLSLLFFFSAGRCGQRSSSSSTLASEVMAVSLLIP

SEQ ID NO: 950285 - protein, 88 aa, Homo sapiens
MGAAHWKSLMSAGPPLVQRATSGCTVLEPTAIWDEPVFSHDVFYFISIELGEATISLRCGSSGGQETMKLGLEQVLCQMLHSSTSFVE

SEQ ID NO: 950286 - protein, 83 aa, Homo sapiens
TDGALLADLTDVLHCALLGLYVVGTLALVLLTASSGSSPAGVGYVFCPGVAPACEAYYTIAAYLKSTAARTIDPVNGGFDMGL

SEQ ID NO: 950287 - protein, 44 aa, Homo sapiens
CLRILYDEAKKGNAGSQFSHVLTEGFFCRGSTAFEMVGWWLGGF

SEQ ID NO: 950288 - protein, 45 aa, Homo sapiens
PLATAMKLQGRYKFFEASFQQDMEQYLLTGYLQIAERREPIGSMS

SEQ ID NO: 950289 - protein, 88 aa, Homo sapiens
MTYLAMLLDRVFYILLQFNSAPSMSVVGGYPRDFSLVTGAAGPPGEHTEELRAGKWTYSLTVPEKRFVLLGIIVLQADLQLHRLQELA

SEQ ID NO: 950290 - protein, 92 aa, Homo sapiens
MKVNTRLKEIARFTYTVLEEVARNTLGNVSKTVFEYRTRKGCEYSPIVASCTLMTLVVLQSRIWSWHVGPVMLFYSTQTRICKSHQNKIFNS

SEQ ID NO: 950291 - protein, 43 aa, Homo sapiens
NTQYRPLAVFENEYSYYTQIDYNPEDRLLYCLVTMATRSLTMC

SEQ ID NO: 950292 - protein, 39 aa, Homo sapiens
MRTYLLFMTYTVLRASYHLLPHVEFYKLREPYFSHTPPN

SEQ ID NO: 950293 - protein, 38 aa, Homo sapiens
TPVLHDVHCASGVLITCLLTLEFYDASMSLISPLPHPN

SEQ ID NO: 950294 - protein, 50 aa, Homo sapiens
ARENSIGSCFAIMWGAVMPWIATTRRNANISYAFDTHTNTQIVPRLLVRR

SEQ ID NO: 950295 - protein, 50 aa, Homo sapiens
TQLQERVRRGRGEIRLSKLIKFNVRSMNKYARSTVDGHKGAEVSQILLPG

SEQ ID NO: 950296 - protein, 111 aa, Homo sapiens
MRAMYPGTFYFQFKNLWEADASERNLAVLHRGRYQCAAQLSPGKTGVFRKPGGFVRPIVMQKGASSLGYCNDNTVSLTQRTRSTGNTSRKPLAHTVQGNSRPQFLGQAQAT

SEQ ID NO: 950297 - protein, 122 aa, Homo sapiens
HIRGPMRGLSRTYLPLEHDCGLTSSTYGSECVVVCSAVQGTFLTLFKPGPRIRGICLIRDSECKNASYFLASFLTVIYSCGVRFSASMYMCGISTVFSFNHSAAVPPGNNTENLVRGVDLSL

SEQ ID NO: 950298 - protein, 72 aa, Homo sapiens
MTLESSDPPPLRCTRDRTAPLWPEIERPGNCTIFAPYNAALGLLARCEMTSVCPGDSSGDLPYFPYWLGIKI

SEQ ID NO: 950299 - protein, 49 aa, Homo sapiens
QECCETINLPVSRVRSGRGESGSRRLIKFNVSVASYKDARCTVDGHEGA

SEQ ID NO: 950300 - protein, 93 aa, Homo sapiens
NGVSGYADPGLRRGEDFSLVESVSYRCAALSAQPRAMPGSLLTLQGVSLGRNPYWFSKFRLEGKILLRTHLYGDQGCPAGNLPSNVKLPRAFG

SEQ ID NO: 950301 - protein, 131 aa, Homo sapiens
VDFSYIHFGHHVFVVCKQGRELTCLIKTYAETRGTCCIRDSEAKNASYFLASFLTSFIFLWSIIQRLDIHMRNIHGLSTRHSAAGPPGHTQRHLGREVDLSLTVPKKRLSFWGSEFYTLICNSTVSRNLRR

SEQ ID NO: 950302 - protein, 61 aa, Homo sapiens
DGDLHGWAYKSIAKHGVEMDRGADELVQSLLVINKETKALEEEKAMPGQTWDLNPARALTH

SEQ ID NO: 950303 - protein, 45 aa, Homo sapiens
CCNLNLQEPCRRGREKSGSRSSLNSSEDACTRTPEAQWTVMKERR

SEQ ID NO: 950304 - protein, 186 aa, Homo sapiens
  misc_feature (23)..(23): Xaa can be any naturally occurring amino acid
  misc_feature (39)..(39): Xaa can be any naturally occurring amino acid
  misc_feature (79)..(79): Xaa can be any naturally occurring amino acid
  misc_feature (93)..(93): Xaa can be any naturally occurring amino acid
  misc_feature (95)..(95): Xaa can be any naturally occurring amino acid
  misc_feature (99)..(99): Xaa can be any naturally occurring amino acid
  misc_feature (102)..(102): Xaa can be any naturally occurring amino acid
  misc_feature (186)..(186): Xaa can be any naturally occurring amino acid
MYRRSYDYDRDDVETLLTLSYHXPDQQTQTHGEGDAVLXTWMEDGILNERDNCQYVYNVDQRDTDMDGVEISVTIAPWXTIPDQLDSDSDRMXDXCDNXQDXDEDGIQNNLDNCPYVPNANQADHDKDGKGDACDHDDDNDGIPDDKDNCRLVPHPDQKDSDGDGRGDACKDDFDHDSVADIDDIX

SEQ ID NO: 950305 - protein, 125 aa, Homo sapiens
LYEDLCEDRKYGLEIHPPVLDSELTNSPAHAGLAQRTVWVTCMRRLEDNNLLTEKQKLRVKKIHENEKRLEAGDHPVELLGRDFEKNYNMSSFPVHWQFGQLDQHPIDGYLSHTELAPLRAPLIR

SEQ ID NO: 950306 - protein, 42 aa, Homo sapiens
MCFGRPFTCFLTLNFMSFESLISPRTLLTRVLGRLRCRKNPL

SEQ ID NO: 950307 - protein, 48 aa, Homo sapiens
MIVCDHLVRGGRGSLHANQRKGQRGPWTTVELQISLKNYDPQKDKRFS

SEQ ID NO: 950308 - protein, 45 aa, Homo sapiens
PLLHDRPLCYRAVLSLCFLTLNYMRFESLISPRPLHNTAPYGRLR

SEQ ID NO: 950309 - protein, 66 aa, Homo sapiens
RFSEGRGSGRRALPYRRQVARAALKLDSVFEEPLSKKLFFFSGRQVWVYTGASVLAPRRLDKLGLG

SEQ ID NO: 950310 - protein, 51 aa, Homo sapiens
DSRDPSVVCELSLQERVRRGRGEIRLSKLRKFNVEEQATRTPEAQWTVMKE

SEQ ID NO: 950311 - protein, 35 aa, Homo sapiens
RHLDAIKVSCNLETGETCVVAESDPYDQKNWNISK

SEQ ID NO: 950312 - protein, 61 aa, Homo sapiens
AVSFRIRNNQVMECIPNAQLTSSGGCMPAVINTAYERKDGKFVFFKGDKHWVFDEASLEPS

SEQ ID NO: 950313 - protein, 108 aa, Homo sapiens
PDYEDPGSHAVELRPNRTGHRDPTYMNRGKIRPQPASHVFDIQGLQQQERNGLAVLLPDTKAVYPRDLKQLQKGSLPFLHSLNVIGQLFQKVSHQVRMDDGHVSKLLH

SEQ ID NO: 950314 - protein, 69 aa, Homo sapiens
ANLYMASTVLTVSPVVAKPAIWMHVLTKKRTVVNDISKAVLCFVLPPLSSKVYSFWSLFFKITLMIDFM

SEQ ID NO: 950315 - protein, 37 aa, Homo sapiens
SVSRIEALHRYVLLGLTKYVMAHTFSSTLKSKKLVRQ

SEQ ID NO: 950316 - protein, 36 aa, Homo sapiens
ALCTQCQIPKMPLFASLLGCGIDRFPCRSILHINFY

SEQ ID NO: 950317 - protein, 81 aa, Homo sapiens
TYWTDTGGCFHCAARYCDVILGSAQEFLTPSASFSAGEPRVLGLASGYPEHQIVTIEVQRESLTEPPYLLTTMALTFQDFH

SEQ ID NO: 950318 - protein, 117 aa, Homo sapiens
RSLLHTGGTAQMKTPPAVFCTFTVDMKFTVKDCDPTTGETDDERYKDKCVLKDLEVTVADHIQKVMKLNFEAAWDEVGDEFDEGGNFTLSTIKTLKEAVGNIVKFLGMHPCERSDKV

SEQ ID NO: 950319 - protein, 56 aa, Homo sapiens
MKQEQQRQLSSSAVPGDQQTPVRLQGSLTVTYTSARKRVVFRIHINSEVVITLLRC

SEQ ID NO: 950320 - protein, 89 aa, Homo sapiens
RQLHQRAKIYEDTWPATLLELRARADIKTGRETARQGRSWLCPRLSSHEYSGLEFHVRPFGHNELGGGEAGLCAGYSSCFRGYFLHISP

SEQ ID NO: 950321 - protein, 50 aa, Homo sapiens
MKEADCSQDMGVEKHLVTSIPSTLQAQWVVDLVPYAISTGVRANAVVRNP

SEQ ID NO: 950322 - protein, 124 aa, Homo sapiens
MIRVLAYSECITGDSWRLIIEEQNVRAYILYLKEVDITYCAELHRCLCSRDVDASRQPMSLGQTFGDKVMRWFQAMLQRMRTWWHGVLAWVKEKVVALVHAVQALWKQFQSFCCSLSELFMSSF

SEQ ID NO: 950323 - protein, 133 aa, Homo sapiens
EDCLAGCAPCTPRCGWRFQAHYRDEDGTWLPIPSDEELTMAMSYVKDDIFRIYIKEKQECRWDHCPPCAQEAPRNMVHPNVICDECNGPVVRNPLTCAGLPSYDLCSVCEENGFAPGAHKARIPQPLSGTLSE

SEQ ID NO: 950324 - protein, 32 aa, Homo sapiens
MFLRGDSVIVVLRNPLIAGKMGRLSVDRTHSS

SEQ ID NO: 950325 - protein, 47 aa, Homo sapiens
VTTRFSTSDLTGMGASRGITVLPGCSHPEPVQHDIPILEVSKGHGRL

SEQ ID NO: 950326 - protein, 117 aa, Homo sapiens
MGSEAMVLLSNFRGCCGGGLVLHLLKELVGWIFVAVLLHPGQVALLWGDSGVNLHHTMMNDVYCIFFSITKVMTITVAMTNTTTMSPMIAPLFEPTSSAKNTILDDELHILSHVGIC

SEQ ID NO: 950327 - protein, 44 aa, Homo sapiens
VPLYSLFHGHIVALRSSVRAYSVSKTCPFLRHSMVIPGSGDKAL

SEQ ID NO: 950328 - protein, 119 aa, Homo sapiens
RKGDTSVNHKMGMLLPTLFINGHRWVTEAIGHAVPTSEAASGGGLVLHLLKETCRYGLSVAVLLHLGQVALLWGDSGVNLQHTMMNGCDCFFFSITKVMTITVAMTTPTSMSPMIATFE

SEQ ID NO: 950329 - protein, 69 aa, Homo sapiens
MLTHQMRDLPSQVFEPSSKLGPNQNSAVIPAKSLSSLIKTEVNGFVPVSPQVSEDTPTSHVPAGALSSS

SEQ ID NO: 950330 - protein, 41 aa, Homo sapiens
DHVQKIPRTHASPGASLNPDGYEVAAQMGSEFGNWALGLWT

SEQ ID NO: 950331 - protein, 35 aa, Homo sapiens
VHWGEVGKQRPEKPEAGGMRGWKVSSGSGLGARTR

SEQ ID NO: 950332 - protein, 118 aa, Homo sapiens
  misc_feature (29)..(29): Xaa can be any naturally occurring amino acid
RGPPNRGSQRCVLCTQHMVTCEVIKSPQXNGTTVWSRSVWISDNTVSFLGMVSPGKICCSALENILKTNEFYMSYHLFIVGCAGAGATVICLVIYMMATTYNYAGLKFKSREDCCTKF

SEQ ID NO: 950333 - protein, 87 aa, Homo sapiens
CEYESILGYRAQRAVDLIQKHKSIEEIVAGDLTPQVPCDQKIGYHNGGSPCSSMEPRGARTQEYIVELEVGSAPNRSKSLIKLHCVS

SEQ ID NO: 950334 - protein, 80 aa, Homo sapiens
FLTWLHDGKLLPRKTAPLPCPLPEIKNSLTEALALLLVLWVGLWVLSGALQSPCLGALLCSHYPLLGACLVAVHMGHRSS

SEQ ID NO: 950335 - protein, 161 aa, Homo sapiens
ISAVIDVLSVAVKKRVMCNLVDENLTANEVQTPCDRTANVAILYPGGIDSMVIDPLLTVIYLYMHPIASSYCSFHQLKQKHHATSPLTEKGNPQNTYMCNITFSKHISQQHVAAAAAAQSSIHHVRVTSIESPGKGGHKGHYKLFSPSRIWTFCCKLMFLM

SEQ ID NO: 950336 - protein, 33 aa, Homo sapiens
MFSSTQCALLVAHWKPATTLSLISLRYCTPLVL

SEQ ID NO: 950337 - protein, 71 aa, Homo sapiens
SLDAAGDSDDYGSGGEICLCVYVYSYCKYMICCSALSPRTHLSFTVGALTGIVLAHSSLDIVLHDTLYVSA

SEQ ID NO: 950338 - protein, 112 aa, Homo sapiens
KRARDEPEEVELDVKLDKYTPLWIEEPHCPDDILGHATIIQELWSHIAIRHCHRENSATIRVIYKQLLQAKALQFLQIDSCRLGSVNENFSVLLMAKKFEIPVCPHAGGVGL

SEQ ID NO: 950339 - protein, 79 aa, Homo sapiens
KQRYWLRDQSVVQDRSIVAHCPGFVSHCCLIVLGATEDTFIADLVVGLCTGPDQEKVPLAGSERLTKYNQLLRIERGAG

SEQ ID NO: 950340 - protein, 47 aa, Homo sapiens
LEIQSVSLMITGVVRQWLSRGGEIEGFRLNAHCSCDSRHNTLQVDIN

SEQ ID NO: 950341 - protein, 43 aa, Homo sapiens
MCANPFQQQDVASAPDICARSASGPVAAFSRLSSLGLPQQGVL

SEQ ID NO: 950342 - protein, 151 aa, Homo sapiens
RCRVSQGHHTKDFTRQLRILPCHGNCHDSQKVVVWGHRRSQPRPFKRITSLQATYPMDLSRDPLSNWTIFPKSRYFQVEYKDFPKNNKNEFVSLINCSSQPPLISHGIGKDVESCHDMAALNILKLLSELDQQSTEMPRTGNGPMSVCGRC

SEQ ID NO: 950343 - protein, 58 aa, Homo sapiens
DLCGRKKWFLHTESFQSSNKNIRNPTPVLNIKIKTDDGPSDQGKVMDVMNLTRALTLC

SEQ ID NO: 950344 - protein, 61 aa, Homo sapiens
RTIHALLMPYGGGCIFMVIEGKKAAQDTDFNKLELRKDSSSERGSSYEGHNRVAEVSVLAG

SEQ ID NO: 950345 - protein, 99 aa, Homo sapiens
CGSVFWFGGRLELTLVYFAEELETVNVEVRPDAVVRKAVEPTEGWVMVVSVVVGMSVVREDRVMVVEVTMEPEVVETEEMAVVDVLTVEWMVEVKLGVL

SEQ ID NO: 950346 - protein, 110 aa, Homo sapiens
FSRINWRHSARVAAALHEIPGGALPEGSKASFAVSPGVIAEEQLRAEHVFICFHKNRENRAALLRTFSFSGFEIVRPGHPLVPIETRRVKQSMEIPISEIPSLMVLAVTT

SEQ ID NO: 950347 - protein, 74 aa, Homo sapiens
EIQTREIERDKDGRQFQTLLTEENMLKGQHEKEAADRKRKHEEQLETEHINPVTEQRLHVEQTRDEDLDTDSLN

SEQ ID NO: 950348 - protein, 37 aa, Homo sapiens
HRVDINLREIPVVFYPSRIVPVECRGMALENGAHSRS

SEQ ID NO: 950349 - protein, 74 aa, Homo sapiens
VLQTSCYSHPEYHSPYAHHSLIENNAKADIFTQLVITILLGLYFTLLQASEYFESPFTITDGFYRFRRSGYRRL

SEQ ID NO: 950350 - protein, 56 aa, Homo sapiens
MASYSGFLMLLWPWVKSSPENTGQALMTKAESNYGKDQDDNFLGTLGNLSSDEDVK

SEQ ID NO: 950351 - protein, 107 aa, Homo sapiens
RYYLASIRSPDIAWTLVIRVSYLRPETDVINFAVRRTACLHMLSYNVCSFTANGSHMPRLLHVQQSNRLTIYTPGLTVTPECAWTEGKVSRRMVLTPQYWIRIPGMT

SEQ ID NO: 950352 - protein, 163 aa, Homo sapiens
LEDPDQYTRFQAAAALITESLPPLGGRRKTIPSSRTDVPVLKMKTETKQRTLSPILVNPKGSPGLDDGGGYARELPKLPKKQTIAEQKSEPSGRGLNRNLKRQVEAKGEDESSSNGTAFSDNISFAAATKNSLNHEDYAERPSIPTIEGLYRQDPGRITFSGS

SEQ ID NO: 950353 - protein, 31 aa, Homo sapiens
MQMPECLRKRMSYVESLPTLWIKRNLNCSRI

SEQ ID NO: 950354 - protein, 42 aa, Homo sapiens
PYHPTRRALAPKQAYPAKSPRSPLLETSVLTRIRSINHLSSP

SEQ ID NO: 950355 - protein, 62 aa, Homo sapiens
GVYLEDPWETVLHDPLRTDEINGNVQAKSRCRTGPSNDVPASWDLTAAELLRPMQHNHAAGC

SEQ ID NO: 950356 - protein, 38 aa, Homo sapiens
MEGIPGELLKNFQDIMQKQRPERLSHLLQGYTLPNICT

SEQ ID NO: 950357 - protein, 43 aa, Homo sapiens
MIQRIPDPSTRSHAALELPPATDILFLCVSVAHSVTLRISMTN

SEQ ID NO: 950358 - protein, 95 aa, Homo sapiens
MLQKAGARDESEVSEQELLFWVPEVRPMSWVYGMAYGEFDGGVGAQIPVCNHSLEWKKSGLVPVPPVFRPGLNSGTWSAVGAVQVIIAAVVPGPV

SEQ ID NO: 950359 - protein, 87 aa, Homo sapiens
GANLSFYTAVPSHMLVGKGKHDREVHFVESKLDGNVEQSQRFSEKARHPRHAVPANRLAQQICTMDVSEPFFGKEDHSRSGAWNPGQ

SEQ ID NO: 950360 - protein, 163 aa, Homo sapiens
  misc_feature (82)..(82): Xaa can be any naturally occurring amino acid
RTEEWVQWWFLESSPSTAALSSWALVSVPGDIIFNKFLYNYTENSENIKSEGLGKKREELSRKPELERSIQAKFDLLFDPLXFWLLLLGLLLFGEFFLLLGVYLFSILCFDSLGFLEVGRVLADPLSLLFRIGELFLTGNSLVRGADRDALVRVVFVLIATLL

SEQ ID NO: 950361 - protein, 45 aa, Homo sapiens
MRIPERPCCMIQDEEGILHDQQRLILCLESGGKDGLHPVVTTTSR

SEQ ID NO: 950362 - protein, 74 aa, Homo sapiens
CEVISQVPVSVYSLQSHTTQVISHIALVVTAILIQTPWSFTGAVILIIAHGTYTPHLLFVPRQHSKLQYTFHAS

SEQ ID NO: 950363 - protein, 61 aa, Homo sapiens
SRRVEWNGYDLVKAMVTLVPQEALVLCRDETEGMVMPHEAMIIMREAYEKYRERTSNDNFA

SEQ ID NO: 950364 - protein, 139 aa, Homo sapiens
MRYRRNRENKAKIEDEKTDEEGTKTPKEYLNFGLTVMKNVDLPSAMVSGTRYTYAEALDRYEVKYSDAGQPMSIDLEFHFEPNEYFTNEVLTKTYRMRSEPDDSDPFSLDGPEIMGRTGCQIDRKKGKNVTLKTIKRKQ

SEQ ID NO: 950365 - protein, 42 aa, Homo sapiens
ASQMQAILRTPSLRRVAMSDEEEPYKRISICSSYKRIGCKEE

SEQ ID NO: 950366 - protein, 95 aa, Homo sapiens
EHKILTGGVDKNVVVFDKSSEQILATLKGHTNEGHQRGATPLSQDLVCCASPDAIIRIGSVPNASCVQLVRAHESAVTGPQLLMPPGDYLLSSSR

SEQ ID NO: 950367 - protein, 57 aa, Homo sapiens
RNCSGLNDEIFMASKEGKPCIIIKLTRVLGFKPKPPKNESLETYPVMQYNPHVLPVH

SEQ ID NO: 950368 - protein, 93 aa, Homo sapiens
  misc_feature (50)..(50): Xaa can be any naturally occurring amino acid
  misc_feature (53)..(53): Xaa can be any naturally occurring amino acid
  misc_feature (58)..(58): Xaa can be any naturally occurring amino acid
  misc_feature (84)..(84): Xaa can be any naturally occurring amino acid
NWVSHQAGCKKRKKDMMLKALALGVKEGGGIVADSFLSQSVFGEGCRIPXACXMCNGXAALYISLGTTLASNTIPWPRVTTQGXEDLSLTTLT

SEQ ID NO: 950369 - protein, 100 aa, Homo sapiens
MARPSVERDKNIFMEEEKIVNEVVASMEDFVLNDLKKDYHGSQADWLRLKNVEVRDFPTCVYVGAGCSYPDKENFQPIQNKMRAILRIEVEAVGFPEVGS

SEQ ID NO: 950370 - protein, 36 aa, Homo sapiens
KRTMARPSCKFSLFSKQLFGFPEAHFLSLRGLKKLP

SEQ ID NO: 950371 - protein, 114 aa, Homo sapiens
DRGSRSSSHQLDTFILPKGSKIPRSISSVMWKCNEPTYSLIGPALPLCKVFAMCCSSSFFLPRDALYYDVARLKTRGPVNPYSYEARELTSTQLHIMQFRWERLEFLSGWEQDA

SEQ ID NO: 950372 - protein, 56 aa, Homo sapiens
VLEIPTADVRMGTPDDIDECSSRRRNPLHLSAVVNVPVSYQCACPELGTTMTAKGK

SEQ ID NO: 950373 - protein, 172 aa, Homo sapiens
PVASTEDRELQHSLMMESDLARLVRKGLPSLLAKSKSPREVPSPKVIKTRELVKKTESPIKLSPATPSRKRSVAVSDEEEVEEEAERRKERCKRGRFVVKEEKKDSNELSDSAGEEDSADLKRAQKDKGLHVEVRVNREWYTGRVTAVEVGKHVVRWKVKFDYVPTDTTPRD

SEQ ID NO: 950374 - protein, 98 aa, Homo sapiens
MLNLNNHDHQLGIIVVWFPKVRRATCLTIPEWTETQTILGVFSLRKSGLSNWNHHLPWPKLYIRKMVMYNSKHGFTIYSHTTIVVTYFRRSSVYTCVA

SEQ ID NO: 950375 - protein, 38 aa, Homo sapiens
MLLLIDSSPESPSKLYHGLLALEGGQASPHSAQSVPDV

SEQ ID NO: 950376 - protein, 41 aa, Homo sapiens
MSPCRLALDGKTMRTRRQVQVKASKAAEPLLLLGTPALETS

SEQ ID NO: 950377 - protein, 71 aa, Homo sapiens
WCCLVQHEQRLPGVMKAPFLYMSALVGPVLTLCCRDMAVQVAGAAVGSLRGAECGGANTLVAVQAEAQGGA

SEQ ID NO: 950378 - protein, 104 aa, Homo sapiens
MLWVSVSEALLGSCGVCERGGLGDVNRMGKTEHHVNILSLEAQTPKAVNRLRDEGLYPVRVRVFPSIQHLHSSKLFLSPLGWHDRSELASLPEKTQGQLASSWL

SEQ ID NO: 950379 - protein, 60 aa, Homo sapiens
MLAHVSGSGGTEMDFLGNKRTLGLRGAYPKLKGFRETPPSSVGGQGSMAGSVGPVIKHLW

SEQ ID NO: 950380 - protein, 97 aa, Homo sapiens
VSLPLLAGLVLSHAALCDRLEELFDSWGTVYNFMVPELKRWVLNQLNEGNKKTPRYVPIYNQPFQENSCDLFLDGFRIALLQKVQHGALEVVSVAIW

SEQ ID NO: 950381 - protein, 51 aa, Homo sapiens
PPVVAVSVMSGRLGGHQAQTVSWMATSAWSEPWPSYSELKSHLVMLSPNQT

SEQ ID NO: 950382 - protein, 165 aa, Homo sapiens
GRTGDAVCCPPASWTPGPGVSQRWFRLQLPALATSREGHDGGRTTGLMMPMWFVTVTSRWTHPQEPEPADREHPEPRGKPARNPARTCCDLKMCSLTGRVESTGLTQTKGCNVDAIKVFCNMELVSTECTPFSPVWPRRTGYISKNPKDQRHVWIGESMTDGYPD

SEQ ID NO: 950383 - protein, 112 aa, Homo sapiens
VHQYYCKLCGLRQHTVITMWFLWVRNPGVTQLGSVQGYNHNVSQGSVLIWRLELVIDLLPGSSGCWQHSVPCRLLDSGPQVLAVLSFLPHGPLHLATHDMAAHIFKASKITS

SEQ ID NO: 950384 - protein, 80 aa, Homo sapiens
RSERIGIPILKTRSPVTFLSGLRRPLRVIQVNRGNRYTLKLIKACGALCGDSGHCAHPHHGHDIVSVSSITTTQADMDIF

SEQ ID NO: 950385 - protein, 191 aa, Homo sapiens
TPARYGQTTMRSELGNSLWTRVFREGDSLNASIVDAINQAAECWGIGCLRYEIKDIHVPPRVERVYADPVGGKSGVTGPQFQESEGDPESRAINCGSKGTKQAPDPWPRIPDQAEQINQAAGEASAVLGEGKGYKLKQCESLAAALTKHNVDAARSLTVGEQYVSAVSKVPRDSNSILLASNPGDVTSMLA

SEQ ID NO: 950386 - protein, 93 aa, Homo sapiens
TLADVVGRGGSVRGLSRDEALRLALEDVADCTGLSCCQFWDGTGVVKRWAETQHSQGGLVVQPPALWQIEKDDWTVPYGRIYLAGGAHALPAR

SEQ ID NO: 950387 - protein, 60 aa, Homo sapiens
VIDDMEDVSALDPQIVCQTVSLQTELSVAQCTQRTVDIVFLLYGSMRLGEQNFHKARRFC

SEQ ID NO: 950388 - protein, 39 aa, Homo sapiens
GARGGSAERGEHVHVTSLPKASTVGTTYCLRNGVRRPHA

SEQ ID NO: 950389 - protein, 98 aa, Homo sapiens
EHAIPEQSGDEEKQEPDKAHLDLLFRHNELPVRKSSPILKRTERGTAMNSSNFKKAKRVKTEDEKEKDPEEKKEVTEEEKTKEETPEAKGVKEEVKLG

SEQ ID NO: 950390 - protein, 89 aa, Homo sapiens
HWPRSLHSQEDELSAVQFMVPLLYEAKCVKVAIKDKQVTYFIPYSGWNHKYGLSGFRQSQSTQIRGTPNMQNQRELQKANQEQYAEGPA

SEQ ID NO: 950391 - protein, 70 aa, Homo sapiens
RRLEDPRDAGSYCCETYQYLRNRWMDGITDPYITDRFCIRNCVVKNILHHVWGDKADRMKRTNIIEGKSF

SEQ ID NO: 950392 - protein, 235 aa, Homo sapiens
  misc_feature (59)..(59): Xaa can be any naturally occurring amino acid
  misc_feature (115)..(115): Xaa can be any naturally occurring amino acid
  misc_feature (118)..(118): Xaa can be any naturally occurring amino acid
  misc_feature (120)..(121): Xaa can be any naturally occurring amino acid
  misc_feature (125)..(125): Xaa can be any naturally occurring amino acid
  misc_feature (179)..(179): Xaa can be any naturally occurring amino acid
  misc_feature (205)..(205): Xaa can be any naturally occurring amino acid
SRREREQSRGRARSQAAMGRAPPVSGGERTAGAEQGQAGGVGARGRASRGRAGPSAERXRSGGCGGGGWMEAAPPPRWRYLEVVLADVSYLIGLEKSKATPAARASKKILLPNPXIRXVXXNYLXDRGEVTFEKIFFQKLGYLLFRDFYLNHLEDGQALWLEFYEEIKKYEKLEKEEEXVVRSREIFDSYIIKELLACSHPFSKXANEHFQGHLGKKQVPPDLFHPYIEEICQNL

SEQ ID NO: 950393 - protein, 149 aa, Homo sapiens
HRIRFAMAIFFFEFSLLMGKEKTRGELRAGVHNGFWFFKIAALIGIMVGSFYIPGGYFSSVWFVGGMIGAALFILIQLVLLVDFAHSWNESWVNRMEEGNPRLWYAALLSFTSAFYILSIICVGLLYTYYTKPDGCTENRFFISINLIL

SEQ ID NO: 950394 - protein, 31 aa, Homo sapiens
MWSYGVETCEERYILLMPSAANGRGRLEVKR

SEQ ID NO: 950395 - protein, 54 aa, Homo sapiens
VGVKLQEDIHFAITSVEDIENSNFDMCTMSENASDFIEKSNIGWLFRSVVKTSI

SEQ ID NO: 950396 - protein, 37 aa, Homo sapiens
EIQDFVSNNTAVEQFYQLFSICPFSLKDEPLETSDNK

SEQ ID NO: 950397 - protein, 37 aa, Homo sapiens
MKGKVYRTINILNELYARHVNYFSNCIDLGYKVVSVP

SEQ ID NO: 950398 - protein, 155 aa, Homo sapiens
QTQARGKKYTMGDAPDYVTVSHVAVIEKYKLALDFPNLPYLIDGAHQITQSSAILCYIARKHNLCGETKEEQIRVGIRENQAMHVSTQLARVCYSPDLAKLQPDYLEKLPTMLQHFSQSRGKRPWLVGDKITFVDYLAYDVLDLHGILESVLPAW

SEQ ID NO: 950399 - protein, 41 aa, Homo sapiens
EAQKLGNGINIIVATPGRLLDHMLNTPGFMYYELQCLVIDE

SEQ ID NO: 950400 - protein, 41 aa, Homo sapiens
KDPILSPRPAESKPCVCVLDVPTVLLNFANSARYCLMRVPS

SEQ ID NO: 950401 - protein, 127 aa, Homo sapiens
MIIYRDLISHDEMFSDIYKIREIADGLCLEVEGKMVSRTEGNIDDSLIGGNASAEGPEGEGTESTVITGVDIVMNHHLQETSFTKEAYKKYIEDYMTSIKGKLEEQRPERVKPFMTGAGRTNQAHPC

SEQ ID NO: 950402 - protein, 110 aa, Homo sapiens
RLTLGSPATAVNAGDPEDAIPRELAIGRKTLTSASRSVLYKRIACEEEFSDSEEEGDGGPQGTLPTSKKPRESKQRMKKRKTQRRRKKSPKRRKPRRRSHEAKGAQRTEV

SEQ ID NO: 950403 - protein, 49 aa, Homo sapiens
AAPRVNWLPILYLVPMAVAENNGNRESLLAAKGNQKKSHCCRGSQPKIS

SEQ ID NO: 950404 - protein, 49 aa, Homo sapiens
TGTSTHVSSPLEHAPTARSALSREPLAGGWGHSTTRRFLGTRTGRLTDG

SEQ ID NO: 950405 - protein, 78 aa, Homo sapiens
KKNPPPPLWGPREGGGAPGPPTKFLGTTGSPEAVLIAGYCAKPDFMLRIQENGRNESCEKKFSFVCKFKKLEEAEEMD

SEQ ID NO: 950406 - protein, 106 aa, Homo sapiens
  misc_feature (3)..(3): Xaa can be any naturally occurring amino acid
  misc_feature (22)..(22): Xaa can be any naturally occurring amino acid
  misc_feature (53)..(53): Xaa can be any naturally occurring amino acid
  misc_feature (55)..(55): Xaa can be any naturally occurring amino acid
  misc_feature (78)..(80): Xaa can be any naturally occurring amino acid
  misc_feature (91)..(91): Xaa can be any naturally occurring amino acid
MAXTSSYFMLISCLMFLSHIQXQHAHTELPQARISCAEGTNAYRSYCYYFNEXPXTWVDANLYCHNMNSGNLASVLTXXXGAFAASLIKEXGTDNFNCLIGLHDPK

SEQ ID NO: 950407 - protein, 45 aa, Homo sapiens
SQPQRLSTQDCPALDRWSQGAKRHDPRKDKFVSPLLKKFYFGHAW

SEQ ID NO: 950408 - protein, 74 aa, Homo sapiens
KSNYQTKGMEYPTSGRNTEQLIDSLLAASQTTKWPINQENQRNQMTLTRISYLLMCFAQPSLHTLLMMSIPKFR

SEQ ID NO: 950409 - protein, 66 aa, Homo sapiens
PVDGPLNPNLTGVLLRRGRDTQRCAHFRDKTHEDTEKGGYLQARERGLGEANPAYALILDFQPPEL

SEQ ID NO: 950410 - protein, 135 aa, Homo sapiens
VILVKISNPQIPSAHLLKQMVFLGTLTLATRSRLTNFLSLFMEGDFTTFTERGAKDLVFAMTGFGPVHECPYGGGKGIAKRAEPQMGYYDKCSMKETKSRARSNIGHHLSMLCHLPTQVKHFLELSGTLATKSFL

SEQ ID NO: 950411 - protein, 105 aa, Homo sapiens
LFQTPPPFPPYSFPSFEGPSPLGLPLGFGAPPPPPPPFIFSPPFPRAPPWGPFPLFGLLEGPDCSQIFPPPFPPPPKGFSPPPFLPLFFGFSPLSLGFFWVKGGW

SEQ ID NO: 950412 - protein, 35 aa, Homo sapiens
LKNLTQYSWLLDGFPRTLPQAEALDRAYQIDTVIN

SEQ ID NO: 950413 - protein, 114 aa, Homo sapiens
GRRTSEAERRQRDRACQMTAWTQNACRSCDRGGPFLCEVPAERAGHGGVTSSGGTVRVGLKWSSQRSLMGSSTMTVQVAAAARGSIEAAQVVTVHLEHSINKHGVVAPLGVQCT

SEQ ID NO: 950414 - protein, 159 aa, Homo sapiens
PPGEKPPPPPGTVFRGGPPRGFFLGGAPPFSLFLSPAFPFFFSFFSRFTLLGAQGVGPRLKGLVPPFPPRGFCPGGPPLPFPFFFFFGSPGGEDLPFFLGGNWVGEIGVGPPWILGLTPVGPGVPPGFFPLFPGAPFFFFPMGFFFGGPPFFFFPIKRF

SEQ ID NO: 950415 - protein, 31 aa, Homo sapiens
VCSVRTLTLRQADCTKVRNNALSAKAGMAPA

SEQ ID NO: 950416 - protein, 33 aa, Homo sapiens
QWTDVTGGSLVPTAGNTSARKRPRECLFLTNPQ

SEQ ID NO: 950417 - protein, 76 aa, Homo sapiens
REAPQVTCLYTCSPCFRVASRSGELLVTVVRLSASEQGQCRFNVLKVTNAAGTLIETVPEVLRLDIGPFPHIVQRL

SEQ ID NO: 950418 - protein, 222 aa, Homo sapiens
AVSGVDIQFPGCRAASAHQHTVEDEIPEAKLHAAFPPLPPVPSPWSSQLEGRLNRLRGYDRLPKHCHTESSSISAVVRGAERAPCRGRGPRFASANPSTPVQTEYIKGRQYGLISLLGSFYQHSQRPFGTQHSHEIIHRDGAQDDPRGPLWEVLDEHQGHERTDHDEVGLLQHQRALPVDAHHAHCPEVPDSQQEGGVVHGHIVGLEHFPKVDIGEEEQQHQ

SEQ ID NO: 950419 - protein, 40 aa, Homo sapiens
KRTHHGKEKGHAEEKQKPQAERKEEKNGGCPFSLSEEIRS

SEQ ID NO: 950420 - protein, 97 aa, Homo sapiens
PRKPSAPKKGDSFSEELKLAPQLTGPVIPVRDVFKKGKARVLPGGGKNFKAFACFRLARSNARLFGIRAKRAKEAPEPGFEKKKKALLGAWNPSAVL

SEQ ID NO: 950421 - protein, 71 aa, Homo sapiens
YSQDDQKAPRSITEEYQSRSDSPRGSRVFTESEKRPLSIQDSFGEVSPGGPRPRVRLGSEIRDSGGRGGSS

SEQ ID NO: 950422 - protein, 51 aa, Homo sapiens
PTGIVYSCVDSLAADYIGSTDDDSFPHNGYIYTVSLLCVFSDVCEVHALPE

SEQ ID NO: 950423 - protein, 87 aa, Homo sapiens
PPLGRVAVRGMGPTVAVGVLKAVDKKASGAGKVPKFAQKAQKAEMNFFPNTCPPPLNQWWKNGFRTVCFNWPFKFCCKRLVNDNNAS

SEQ ID NO: 950424 - protein, 132 aa, Homo sapiens
FLKWTQGPRSFSAAGFRAGLTFTLILWLCAGTFLGGPGSCISGGLGPSMASLWMPCQFPPPDPRGGGWHFPEPRFFWPFPGFCDFPLLCIFRVFLGHLGWLPHIRVAEGRFSVLVKILWGYRGIWPVKFWGA

SEQ ID NO: 950425 - protein, 109 aa, Homo sapiens
AWNGPGSPRQSWGWSQPEAPGDALSSPGGGSPFSWVQGSLLVSSGPFSRLPFPLHLCLHIQKCLLSAASRKPPLSPGQGLQHFPLEHAPPHCFFCLTAPMGKVQPFCFF

SEQ ID NO: 950426 - protein, 135 aa, Homo sapiens
RRFFRLARGSFSRAASFSRTIPPLGLAFLARASTLWVALSPFVKWPMAFSFLKAFLLEPRSGFSPPASPFLFRRSGGLLGRLALSSLAPPPSFALAGSRPLGGRKPSLGPLRKAGFPREEGLYSRDRFFRLWGFH

SEQ ID NO: 950427 - protein, 102 aa, Homo sapiens
PHGGPPWGGGSNGRAPPGDGAPSPWGGGPFLTLGPRVWKLPRRGVGSVPQGPVSPGLFVSYAVVRGVSWGFLVSLTGPPPPGIRPPRPLAHFGPPQLPSCFP

SEQ ID NO: 950428 - protein, 96 aa, Homo sapiens
QTGAVLRGDGIERTTHRELSMRTEQVCHRLEDWEQPSLVVERLCRMLVVQRAVSRALVFCMVRTTAATSCGEPIRSRRDASFFEQLVTIMAALVTT

SEQ ID NO: 950429 - protein, 76 aa, Homo sapiens
EQVEMQIQMLAEELQGQRQTNGACVARIQAMRQALWKSDSHQERRCWAVGEASGHLQEQNTVLSLIFFISKWFANK

SEQ ID NO: 950430 - protein, 63 aa, Homo sapiens
MIPVIVSLGIQSTQLKNASNGQPEDPLSSKTKLSWRSLVVTKLEATRGCREMKGKGKGSEPSG

SEQ ID NO: 950431 - protein, 122 aa, Homo sapiens
SGDLLHELAELRLGIRLRMTDGGRVDGGGREPVEQLQTQKSGRAQNKGCPIDLVYKKGGGCRLLNRSTKFQQIVRGMNPGAGCAADCEDPAQASRERVNLAHRLLTELGDWGVHSSRFHGRS

SEQ ID NO: 950432 - protein, 52 aa, Homo sapiens
MPRQGAGENMYDPKNEEDDMREMEEERLRCGERLMKNVDTNQDRLRDPGGSP

SEQ ID NO: 950433 - protein, 58 aa, Homo sapiens
MKELKLLKTIAKGEFGDVMLCDYRGNKVAVKCIKNEPNGQGFLAEGSVMTQLRRTNLV

SEQ ID NO: 950434 - protein, 129 aa, Homo sapiens
LALLVKGFFPRDIPLGLGGPGPPGDKYNPPPSIFGSGGSFFLYRKLPVGQGRWPPGDIFSLSVVHGGFPNRFTPEGLFLFPGKWVGRPANPPFPGFWGCGGVFCTFPVYIFSGPPAWELSPPGFPGPLP

SEQ ID NO: 950435 - protein, 144 aa, Homo sapiens
SLTRSPRYHSPGESEHRELDDPRNTNCFELYIPNNKGQLIKAAKLRRTAEPVEGNHMVYRISDPTQEEKDEWIKSIQAAVSVDPFYEMLAGRKKRISVQEEAGAALSPYPNSIIYYGADPPGWPDPMGLGAVDPGSLFGKFITS

SEQ ID NO: 950436 - protein, 51 aa, Homo sapiens
TRCTLIDTFDEHDGPLRCIDFHNHHPLFVSGGDDNTTKVWNYKLRRCLFTL

SEQ ID NO: 950437 - protein, 72 aa, Homo sapiens
VWMFMWCMHRGSPTYRRGIPDMADDTCMWDRHTLRFTADEYDSDNGLWRRFGLGCSLRKGKSVNEASYAVKA

SEQ ID NO: 950438 - protein, 118 aa, Homo sapiens
TRGTPRSVLGPDLCSCFHSPHSCPKPLTPPRVVVCGLWDELRRGPFLSIGGFKKSTNTQFQFLSSNPVLQFLVVIDAYYFFYLQEMNVTSIALSAETWLLAAWHVNVPPMWLEACINW

SEQ ID NO: 950439 - protein, 129 aa, Homo sapiens
HRFIASALCEDSKLGVKCWASREDSQLHHLAWINTPRKEGGLGPLNIPLLAERDQTLSEDYGVLKTDEGIAYRGLFIIDGTGVLRYITVNDEPVRRSVNEALRLFQCFQYTDEHGEQFVPLAIIVSLPG

SEQ ID NO: 950440 - protein, 77 aa, Homo sapiens
TVQRIRTLGCEVLGVTVDSQFTHWLGSTPPGKREAMGPDTSPCSLTVTRRYVMRITGVLETRDASGWHWGSYYDVDP

SEQ ID NO: 950441 - protein, 109 aa, Homo sapiens
PGLGFVGPLPVFCSPIPPGLAILPPFWLGFRFPPPLVKIFFFLGGFFFFPRVVFGFLGPVVPLPLVPKAPAQFLVFSLPFLPPRGFFPFYGMAFLKWVFLWANFFSLEI

SEQ ID NO: 950442 - protein, 44 aa, Homo sapiens
MTVFDVLGHFGVNQSTGLILYQVMKLTDRWGSTELPVDKRTTLL

SEQ ID NO: 950443 - protein, 148 aa, Homo sapiens
GPFFFPRLGTLSGPFASRGIKRFFSPSPFGGARPEEFLGRGLKFGGFGLGKTNFPVFGNFGFGTRDPLNLGSNLAPAFGFTGLGFFLWWGGPGFAFPARRAGPGSFGPHPGFAKGGPFPFFPRRFVGTSLLANKFPVFSQRALKKFSW

SEQ ID NO: 950444 - protein, 51 aa, Homo sapiens
MTKTTAAKSDKNELIRHAITACGYLVRWGSRLTLPEFAAAIRRHSTDQRAE

SEQ ID NO: 950445 - protein, 108 aa, Homo sapiens
NKSTGSLQANVQRLKGYRSKIILFPRKPSAPKKGDSFVEELKLAPQLAGPVLPVRNVFKKGKARVITGEGKNFKAFASFRLARANARLFGIRAKRAKEPAEPGFEKKK

SEQ ID NO: 950446 - protein, 177 aa, Homo sapiens
EARGDMFERGVLQCFRRLSWDYKTNQPFKFGKRVIVTGLMTGGYAGSRATNELDDLMRVFHVLDGQPEADHRNGMHALISGARHERRREAENAYLHLRWFKNGNGHATFKRPDLVDKLNLILAKHYPAALAAELEAVMGFALDFVCPFETRPPEVPPQDQAVVMPGSRSRPAETPAA

SEQ ID NO: 950447 - protein, 153 aa, Homo sapiens
HEDSATAESSDACADALQSVMEDTDSAMEDAVDLFTTVVETGLPLILPLPPPAKKIAMHALTQVGNAAGLLLLNQVKAHDRALGEALGTLSTHCSEQVSVCGACPVEPPKPLQHCDAVTSRGKDAVPSVVPRNDIVTDSECLSFTGDAGLAGD

SEQ ID NO: 950448 - protein, 47 aa, Homo sapiens
MAIKYPLTVFDSRCFRCPLHSCVSCHAFQPFIAKAVTRSNDVVCPLP

SEQ ID NO: 950449 - protein, 35 aa, Homo sapiens
MTVTASQALSRSNLRNSRANSTGSAITPLHFIIIH

SEQ ID NO: 950450 - protein, 39 aa, Homo sapiens
GTIHRDELPSTRGTGGGDDSGTRAGPFQEITQVVWGVTA

SEQ ID NO: 950451 - protein, 38 aa, Homo sapiens
VPLTPGPPGTSTDVVVGPASALTGLARPPRILFIGWLL

SEQ ID NO: 950452 - protein, 81 aa, Homo sapiens
MRGQMTMTQTYAYCLETPWPQTRSYEHQLLVPFRYHETEEMLLTAVASAEPDTTNLVSGQCCSELSASRYLLLPDDFYGSA

SEQ ID NO: 950453 - protein, 59 aa, Homo sapiens
HEGDPYGCCGMNSLHGLPEYDSIPILVPAQRSLGPDMDASNPGLPPSPEGMKKYSDIFR

SEQ ID NO: 950454 - protein, 123 aa, Homo sapiens
MPASLTLEYPPGVHTGVERLPAKDIQTRCLHQAPSVPGAIPDGRGSYNTVFLANGNIPAESYTFFIDIPLDTIRLLDRCPAIEYAYRENSFSLRSTLDPLLHTHPSKISPPVYLPRNSSIIVL

SEQ ID NO: 950455 - protein, 44 aa, Homo sapiens
TRAVATVLPWADDGETRQEGGGVRHATGFVKCGYARSNFPEYIF

SEQ ID NO: 950456 - protein, 99 aa, Homo sapiens
AVQRVTYLQADSRVSPRGYVLRVSTSQDSFRELGLLCTSLGRSTLRVLSDCSMRALVTWAVRARVCSQNIPSPCAQTLYRGGYRGSTFVNLGSLAILLL

SEQ ID NO: 950457 - protein, 36 aa, Homo sapiens
FDSFTILIKDVSLQEVTDIGVRAGRTSGHARSPKGL

SEQ ID NO: 950458 - protein, 151 aa, Homo sapiens
HEVKQCNLVRKSYFISLPHQQKHFPFQMKTLAYSELKTESQMLRHILQQTLFKQKHQEISLRDTLAKLSGCQGLTLGSGEAWRSGGSHAQPSLLPTLKSKPRRPCPQVPRKLRTPGYERGSYQQGSRQERPQDDLTEPHLQAPFHKQGNAG

SEQ ID NO: 950459 - protein, 34 aa, Homo sapiens
NSMEYDISICLIATSSSLNHHLPYFCEWYCHPLH

SEQ ID NO: 950460 - protein, 171 aa, Homo sapiens
HEEGSCPDSKGCHEQLPGHPDSGSSQCATMELGPLEGGYLELLNSDADPLCLYHFYDQMDLAGEEEIELYSEPDTDTINCDQFSRLLCDMEGDEETREAYANIAELDQYVFQDSQLEGLSKDIFIEHIGPDEVIGESMEMPAEVGQKSQKRPFPEELPADLKHWKPAEPPL

SEQ ID NO: 950461 - protein, 57 aa, Homo sapiens
MAHPDRAAAIKGSFVQRLDCYVHLRSDRSNPGLVSIYFKFLPVRKDKRNKAYFTKRL

SEQ ID NO: 950462 - protein, 125 aa, Homo sapiens
ITDNQYEMVYGEVFQEVTEYETCNKKELQQSLKDFQRMYRAQYVIHLPCSLYPFTPQSATDTPTQSLLHLTDHVTCSVHYVKPCCATECSQVTLQIVLVNLTPRPCMGQTLHMYLVQLQLIIGDW

SEQ ID NO: 950463 - protein, 71 aa, Homo sapiens
PDRIHSNISVSKPDWFGGFLVLLHFLPFFRLLYTGRRQKTHLTNPGFFHKCGTLGLSYGNSLWRYHVPQCL

SEQ ID NO: 950464 - protein, 39 aa, Homo sapiens
HEAYDYLCRRLTAEDLSEARIISLRDLESVPGGYQDPSV

SEQ ID NO: 950465 - protein, 48 aa, Homo sapiens
STSFVILIVSIYFPLPEMHALPFSLYYAVGRQIIVILTVIVIHVITAL

SEQ ID NO: 950466 - protein, 33 aa, Homo sapiens
ALALSLYTLWLYNLACSRWLDQHTLTGPVYLQV

SEQ ID NO: 950467 - protein, 145 aa, Homo sapiens
TRIYVDVVIRLIILFFIYHPQAHAWDQRNNLYAAFLSFGWCSLHSFFFRVIFLIVIVILIICGILIVLIPEEEGSSCCFHRCWYNFIFILILVLVILLILLTVIILLFITVFLLGILAIHCPLGWDGSTLLTRSCYQCFAWCGPF

SEQ ID NO: 950468 - protein, 46 aa, Homo sapiens
HEGIVRMGESMITYAEVDRQVIPIIVKCLDGILKAAESIDQKNDSQ

SEQ ID NO: 950469 - protein, 72 aa, Homo sapiens
MRRILVAAGMLLEDEYFSEVGERVTLADITVVCTLSVALISMVLAAFYSARTFPKYQHAGSYTCINPAPSSR

SEQ ID NO: 950470 - protein, 35 aa, Homo sapiens
MLHGDTADGPCSKSALSGNNGESVQFQHFLQKSGQ

SEQ ID NO: 950471 - protein, 37 aa, Homo sapiens
PGMTAAIWREDFLLFSIRRMKDTRHSHSAPWRSLRNT

SEQ ID NO: 950472 - protein, 111 aa, Homo sapiens
TTASPATALPQKTCELMNQGILALVSSIGCTSAGSLQSLADAMHIPHLFIQRSTAGTPRSGCGLTRSNRNDDYTLSVRPPVYLHDVILRVVTEYAWQKFIIFYDSEYGKCL

SEQ ID NO: 950473 - protein, 68 aa, Homo sapiens
LLPERHATPEPETDPRVTRATVLHIEMRYLRLSTASGDGRHYCYPHFTCAVDTENIRRVFNDLAVTVI

SEQ ID NO: 950474 - protein, 176 aa, Homo sapiens
ALKEESLAGAGFPGPQQSLPAQRTDTFLGPVLKQMYITYVRNCKFTSPGALPFISFMQWTLTELLALEPGVAYQHAFLYIRQLAIHLRNAMTTRKKETYQSVYNWQYVHCLFLWCRVLSTAGPSEALQPLVYPLAQVIIGCIKLIPTARFYPLRMHCIRALTLLSGSSGAFIPVLP

SEQ ID NO: 950475 - protein, 211 aa, Homo sapiens
MLFFHDGTGKKQIKYRNQLARLVSSGTGGSVCVPGTTYPRITPTLVDSICENARRYAKLFADAYNSCCLSTKRGKWIHKDFLYVYIDHRLMIEQRSRDSEMPRSPQNQYPAELMRRFEPYFQGPSSSKPRVIREVRADSVGKLVTVRGIVTRVSEVKPKMVVATYTCDQCGAETYQPIQSPTFMPLIMCPSQECQTNRSGGRLYLQTRGPD

SEQ ID NO: 950476 - protein, 43 aa, Homo sapiens
RGGGDPFYTNTILIFRVTLDVYILHAYQASDYISHIVTYYSGK

SEQ ID NO: 950477 - protein, 131 aa, Homo sapiens
NILRVMSTEASQNITYHYQNGVDYMDHQTVNLKKALLPSHGSDEIKIRRQKGNSRFIYSVTVGGCTSHTGAWGKTVIVYYSIQTSRLPIIDVAPSWTLVPLDQECGFDVGPDCFLLTPIQSYLGPSQPTNF

SEQ ID NO: 950478 - protein, 50 aa, Homo sapiens
DTLYRHPLYDSLETHVRSPHRWVNSTCRSTLITSAGHGIIRLTLILNPLT

SEQ ID NO: 950479 - protein, 103 aa, Homo sapiens
YNFTPKPCQPPLPKPYPRWSCSSAWTHPLPINGVDCNSLSFLSVYHRRRPGRQRDADEGLEMDPIDCTTPEYHTCQCMPGADTVSPADPKNVTGNPMAEPEST

SEQ ID NO: 950480 - protein, 86 aa, Homo sapiens
ISNTSGLDYYINYTYSNAKTNRTNNYITYQLDMTYQKTPNWKRHPRQYQPLTFSSTLIIFTILILLTILANRCGLNPSSPIRKATQ

SEQ ID NO: 950481 - protein, 54 aa, Homo sapiens
SSSTSPIPSLRILYISDEVNDPVPYHHIHWPPVVLNLNEYTDYGGIIFNSYILP

SEQ ID NO: 950482 - protein, 65 aa, Homo sapiens
TLLPSEEAGMTQQDEKTLMELYYINANSTITNPQVLTIPTPVFKNYRLGDDSRAEPTPPTQYMLK

SEQ ID NO: 950483 - protein, 77 aa, Homo sapiens
MTKMDFPVLVSQQYSQCRLKANEIIYQISVELCSLLYFGNKEEVSRTHFSGLISNWQHTGFHGGVSRSPENTGAQPV

SEQ ID NO: 950484 - protein, 38 aa, Homo sapiens
GGAHACGQMNGHFSIAPLFSLYNPYATRAAKPAIPTGT

SEQ ID NO: 950485 - protein, 41 aa, Homo sapiens
TFVSRHILHVLHGGHHVRDDAVANLTQLIEGAQELHAYSMR

SEQ ID NO: 950486 - protein, 83 aa, Homo sapiens
ADVLQAVTVACVGCDFRCAGLDLFILEKDKMQFTASIWGKELEEPLTGQENSADVSSSLLYPHPLFILSRIMLFAVYNGSSGV

SEQ ID NO: 950487 - protein, 47 aa, Homo sapiens
VEEQTSFPALELIWSPEEGTTHGTTATVPCCYLLLPLHMPLSLGLPR

SEQ ID NO: 950488 - protein, 45 aa, Homo sapiens
RILIRDLGLTGHYHPADKAEHMKRQRHPMIAPPGRPRSIFPVPPT

SEQ ID NO: 950489 - protein, 75 aa, Homo sapiens
WKCFNVRKQLRRRAEAYYRCTLTLLQASLFAPGALHHLVLPGSEKHILQPCLTAFLRSDWRQRSIVDSSGLPYGT

SEQ ID NO: 950490 - protein, 73 aa, Homo sapiens
APPPNPLLDFNISLAMVMERGPSDKRISKRTPPIDCSMKHDLFAILLAPCLPPSDWQGRASSSTPPFSILPDY

SEQ ID NO: 950491 - protein, 93 aa, Homo sapiens
MSDPLIAGVHDCSPGTLCCTVVRVANFECSDGDLDLNAGPGLTRCAVLLVEPRLLIHRSGSFTVLLVSQDVSRPLGDCLLLTDPNFLCNLLNE

SEQ ID NO: 950492 - protein, 73 aa, Homo sapiens
FAPSIQSLQPDLGTPPLSSTKEKIAIVVLTYRPYSGSLLRSFLHLTTFNISFVILDSLHAYPRSFFPMSSIPG

SEQ ID NO: 950493 - protein, 70 aa, Homo sapiens
DLDDPLVHHPFTFDEAAINETDTPAQLEIEDEDTIDVSQQPAGGVPDSIPGRATVSIAARPQPGPSILAL

SEQ ID NO: 950494 - protein, 92 aa, Homo sapiens
TQCTLHTCKLTLRVFPLSCTISFHGFDGQASLMKLTLQHSWEMDDEDHHRRCTSITTAGVSPISLAGFSIYSARPQLRAVHPRIASIMDELN

SEQ ID NO: 950495 - protein, 65 aa, Homo sapiens
  misc_feature (18)..(18): Xaa can be any naturally occurring amino acid
DARQGVIAPAVSGLTCGXYTGTHRDTDARNGSSVRTGTFHGCYMYYFQYLSKTYCVDATRETNRR

SEQ ID NO: 950496 - protein, 39 aa, Homo sapiens
EVLLIRYTRLRLETEIEALKEELLFMKDEHEEEVKGLQA

SEQ ID NO: 950497 - protein, 45 aa, Homo sapiens
  misc_feature (29)..(29): Xaa can be any naturally occurring amino acid
CLAKMKQELVKLKKERYGGGLRFCVHGVXSKGPNDGVREVSEWYE

SEQ ID NO: 950498 - protein, 43 aa, Homo sapiens
QGQDYLSCKKDAKKVVNPLFEKRPKSFGIGQDIQSHKRDLTRF

SEQ ID NO: 950499 - protein, 63 aa, Homo sapiens
MIFKKGRRERESLQQMGEVTCEGIRLKKILIEDWQKAREEEAEKLIALQDGKKSLEDQVEMLR

SEQ ID NO: 950500 - protein, 107 aa, Homo sapiens
SYSRVSRSDYLVGVGPSCSEEAVRKESGESRCKSKVTKNCGIGQDIQSQKDLTRFVKWPRYIRLQRTRAILYKRLKVPPAINQFTQALDLPLSYSAALAGPHVLIGR

SEQ ID NO: 950501 - protein, 83 aa, Homo sapiens
RVSPVYLVHREGIMEYEEEERKYSGSAPGGPETPFEVLRSSLPEELQKCFDVKDVQMLQDAYSNDGPHRRKVPLCRRCILTLA

SEQ ID NO: 950502 - protein, 46 aa, Homo sapiens
ADSRVFRSALQHGKLACDELKEMQEKLDQQKPSVEHQMAKTGGTQT

SEQ ID NO: 950503 - protein, 75 aa, Homo sapiens
  misc_feature (14)..(14): Xaa can be any naturally occurring amino acid
  misc_feature (17)..(17): Xaa can be any naturally occurring amino acid
  misc_feature (54)..(54): Xaa can be any naturally occurring amino acid
AFSSAIDRLCYMSXVAXEVQRDAMCCPGTLCVTMFDYDGRCNPILERQLDEQDXHMQKEQLGTQSRKPTQKEAKY

SEQ ID NO: 950504 - protein, 80 aa, Homo sapiens
SLTVVTNYLVLGSVQAPSYGASDRSAAASSVYAGAGGSGSRISVSRSTSFRRGMRSGGLGPRDSRGSGQECDGIQTEKET

SEQ ID NO: 950505 - protein, 77 aa, Homo sapiens
SRKAPPCPRELSLPSIDYAELLPHFEKVQNKHLEVGTSGAGVRTNLDREVCPLKGLHGGGPNECSHEPLRVVTPSPR

SEQ ID NO: 950506 - protein, 52 aa, Homo sapiens
YISLMSALTGYVDILLVGTVRKLEDKSVSCITLKGIACLLTKVQGPSTKALF

SEQ ID NO: 950507 - protein, 34 aa, Homo sapiens
FAFFQPLRLSFGGLSLFAQATPFSRAGRGSVLKP

SEQ ID NO: 950508 - protein, 82 aa, Homo sapiens
DVPANFPLHGFTNYELSGVALVKILAIINRYPRDYDESLYSIQGHQQRILNVGSVHQFQKEVLFVYGPKNAKPDDGSIKSAQ

SEQ ID NO: 950509 - protein, 41 aa, Homo sapiens
MDLAFELGDRPSLASASVTDFILKFPHSATKVVRQAWKKAD

SEQ ID NO: 950510 - protein, 32 aa, Homo sapiens
MLMTSRPQWDFPCGRGGFDMNAPGRGGRPMPP

SEQ ID NO: 950511 - protein, 54 aa, Homo sapiens
DASEIPMRGRGGFDRMLLVGVGSHASIYEEIIDAIEPSSEKQHPLSSRNETDRD

SEQ ID NO: 950512 - protein, 56 aa, Homo sapiens
RIPAVHSIDVCYCRLSTYFGGTVRKLEDEISELHALIRHALSPHLSARSIDQSPVL

SEQ ID NO: 950513 - protein, 39 aa, Homo sapiens
  misc_feature (21)..(21): Xaa can be any naturally occurring amino acid
ERDIQEKQCAPEKRSSPFQTXNQLISEDSRAMNCSSTPN

SEQ ID NO: 950514 - protein, 121 aa, Homo sapiens
SLVVVIIVSTYDHHMSHDLPVLRIISIRSHPVIHKPSAILMSTMYLLQSPKLSSAQKPIHAVLTVSRSPSSVIGHEAAPPLGGAVRRKRKIPELCYHPGRLVWDAGESVSSISDSLYHYLY

SEQ ID NO: 950515 - protein, 41 aa, Homo sapiens
CRTSSGGPVRKLEDKSVSCITLKAWPVSSLECYVHSTKALF

SEQ ID NO: 950516 - protein, 102 aa, Homo sapiens
MLQQETVLTRDAPPGESMQGTAHPRAMHGHPPSPSQSSMHRQQDSSGALSSQAPGFSSSRGLGHSACAALGVCMHTPSVHTKLLHVLVDEVVAAHAEHPYRS

SEQ ID NO: 950517 - protein, 39 aa, Homo sapiens
MAQAVPLILVTAKVMFSVTGGAKIAEFLLLFFNLSFMSM

SEQ ID NO: 950518 - protein, 36 aa, Homo sapiens
FLRSSLSILRSFRYFQSGSGQKQQAPIILCMMQALL

SEQ ID NO: 950519 - protein, 83 aa, Homo sapiens
PAEMVAPPSLVMHRTFVREPGAPPFCSEHAYACICHMHSPGSACLLTCPWPISDSPTTFTEAAPKLRSLLLLTDSGRQIYTNA

SEQ ID NO: 950520 - protein, 51 aa, Homo sapiens
PYNISWRAYDNFLEHQNSGFYSQLVYKPCSSTIKPESATLAQQSSSDEMLE

SEQ ID NO: 950521 - protein, 48 aa, Homo sapiens
VPSNISYLLPTSHDESVEEEGIEEGIQQDEDIYEEGSYEMWKGDEMLE

SEQ ID NO: 950522 - protein, 132 aa, Homo sapiens
MEKSFEVVRHKNRGRDEVSKNQALKLQLDNQYAVLENQKSSHSQYNEGMGFDNPSEVTRLQLTTTNSHSSSDLCWIYRHRCRPLDFMTGPIALWKLKCHDCSMHIGFRGILIVTYMCDLVSTVFLHITSDNT

SEQ ID NO: 950523 - protein, 210 aa, Homo sapiens
LMLGDSRGPQQSSTRSCSENRQSSRVTKLRQRRRSEQLQTAGREMGGKQKLERHIFTLKHPALQTRKKESCRDFASTVEALEEGKKRVQKEIEETHPVVRGRRGPRMIKWKRPRTGFKQELDDLVVDLDNQRQLVSKPGKEAEEIGSVVSRGEKTSLPKYADERDRAEAEAREKETKALSLARALGEAWKPKRNLSGQQNAQSEMEDLVG

SEQ ID NO: 950524 - protein, 95 aa, Homo sapiens
RASEVRNCRWSSHIIVGTPGVLLLSRGFRTRFITYFKSSTSNNQGNFAVRHKCLLMCLEVTKEVHERTPFGILVKKEELTLEGIGQFYINVEGEE

SEQ ID NO: 950525 - protein, 33 aa, Homo sapiens
IVYGVFMLHKKTVNQKTTIYEIQDDRGKMEGTE

SEQ ID NO: 950526 - protein, 42 aa, Homo sapiens
MVTTTAYLAQVATGDHYESASLTQPGHAYPERPWNIEHEREM

SEQ ID NO: 950527 - protein, 58 aa, Homo sapiens
PRSRRIGDLTYKRNISILNSQLVYIILTTTAFLLLKPKLQHHDPTTISHLKQANMTNT

SEQ ID NO: 950528 - protein, 57 aa, Homo sapiens
MGSAQDYTRVRQLSLQDRIWVLTMWNLFSVSFLPAQERPSRKYDSCEMNLAWAVKHE

SEQ ID NO: 950529 - protein, 55 aa, Homo sapiens
VYSVTYAETHPEISTSPKYCGSCCAPRQPSAMADRINITRKGAWPSTLTVRAERT

SEQ ID NO: 950530 - protein, 102 aa, Homo sapiens
MGGGWAAGKAVDSSVRPEVVLSSVNSVVELRLAGCEQLSALHHEAEVVVLRGDTVISVEPGLLLETVVDSSLRPGVVVLAGDTVELSGTWLATGGGGFFTDA

SEQ ID NO: 950531 - protein, 50 aa, Homo sapiens
MELKKMEMLAEHDLRREERGQLTPASSCRLNSTCPHHKGTEPYPGWILSK

SEQ ID NO: 950532 - protein, 50 aa, Homo sapiens
VVYWNPGHIHLQGAEAGLSIIILRSAVAQLPWAAGCPVPELHLSTNLAIR

SEQ ID NO: 950533 - protein, 76 aa, Homo sapiens
SLKLTLTSDSAVPPEEAEHILSPGAGSCGGRTPEYSNYKQKNKFSPFSIKWYTQKYENLSIVTTVKAEQVVGQFHL

SEQ ID NO: 950534 - protein, 73 aa, Homo sapiens
TLFLRTTHDHRPVTDWDRAGWLQWRVLPFGNHCDLTSLLALHKLAPVKTEPPLCTFIETHYLNEQDKSHQRIG

SEQ ID NO: 950535 - protein, 53 aa, Homo sapiens
RNRDTTCMKGARLPGARVLLPAPLLPLPQRVQLLLVGLSIELHVVRHPSTTQT

SEQ ID NO: 950536 - protein, 61 aa, Homo sapiens
LTSHSVTSPSTLTPHSPPPRFLLFLLSLMPLTLFSPDLLGDPANYTLANPLNTPPRVIRDT

SEQ ID NO: 950537 - protein, 60 aa, Homo sapiens
  misc_feature (20)..(20): Xaa can be any naturally occurring amino acid
KWAGAATTVSSSWCLCLYVXYTRVSDYTHHWSDVLVGLLQGALVAALTVCYISDFFTARL

SEQ ID NO: 950538 - protein, 41 aa, Homo sapiens
FKSDRRFGKVPMELSGTSWGGLSSGSPSSAKISQLPSPLSV

SEQ ID NO: 950539 - protein, 80 aa, Homo sapiens
DLVPVGQEAAALPSLTLQKEGVLGVTEEQVHHIVKHALSRYSEDRIGLADWALESGGASVISTRCSETYEAKTDLLRGTE

SEQ ID NO: 950540 - protein, 55 aa, Homo sapiens
GPPVRWPMKAVSASSGCRWPNYMRQPVGHDCVRHEKASLLPHRTISCPPWAKGTG

SEQ ID NO: 950541 - protein, 96 aa, Homo sapiens
SWMSLPYDGPRGDITTSDRDRHTYGLLARLALEAGFDWLSYETKAHVYCSVSSEHSAAAKTGGCFPAGPQVRLESAARVVLSAVRSEDRVLTMGHR

SEQ ID NO: 950542 - protein, 42 aa, Homo sapiens
IRLKLLFRTRRQDAARGPHHEMGTVLLQHFSILLDGATTDAH

SEQ ID NO: 950543 - protein, 58 aa, Homo sapiens
  misc_feature (1)..(1): Xaa can be any naturally occurring amino acid
XELQQKKLIPLSYGEECLWKIRWRCCVTDEGWKLRSQRERPNEQHHEAVGKSSWRSAK

SEQ ID NO: 950544 - protein, 70 aa, Homo sapiens
VQQTVCTGERLLEQECTRLTICDMAERLSVSAASKLLSNMMCQYRGMGLSIGSMICWLGLDRAPGLYYVN

SEQ ID NO: 950545 - protein, 101 aa, Homo sapiens
TDLEFPPMAMTLQPMEIEQRVAQLHLSLISTLPSPMGRSYTCPLSLSAITCSLYDASANPTRTLISFTGLHTMKHTPSVQQTLGLPASLSCAGSTGKGRGQ

SEQ ID NO: 950546 - protein, 69 aa, Homo sapiens
FQQRTTCSFSTLLMGPVILARVASQDHPFSSSIFNAPNHIPVHSQERINDEHNLHVSGRRRRVPELVDM

SEQ ID NO: 950547 - protein, 102 aa, Homo sapiens
DEEVTVVVDALSGLKGDLAGRYYEASVQMTRGMNSSQLIDDHFLFDKPVVPLLTCSSEWLEIGQHFRRICHNNEKSFLIWVNEEDHTRVISMEKGGNMNESV

SEQ ID NO: 950548 - protein, 137 aa, Homo sapiens
LEITQHFSSVKGLVAGITAVLVAAVESLSCVQCNSWEKSCVNSIASECPSHANTSCISSSASSSLETPVRLYQNMFCSAENCSEETHITAFTVHVSAEEHFHFVSQCCQCKGMQQHQRCPGPSPEERVQQRRVPCLL

SEQ ID NO: 950549 - protein, 71 aa, Homo sapiens
GSSEGYVAQRERLHWLYRKAQDVKKRQRKALGESSTGAKTRLHLCSSYGFRGMQESPNNLMWYGDRNCGLI

SEQ ID NO: 950550 - protein, 37 aa, Homo sapiens
EDPDQHISRGIIYRDLKLDNVLLDRDGHIKIADFEDV

SEQ ID NO: 950551 - protein, 35 aa, Homo sapiens
DLLTERDLPRLRLLLLLVLDRLSGFGDYGHWDRLL

SEQ ID NO: 950552 - protein, 165 aa, Homo sapiens
HIQQRDVVYGVAARQVDMVALSDPLGLLVGNARMASRSLILASGRVDFNCSWAEIRPSISSMVWTMNMSWRSSMALSIQLLNGAARLSVFQVLLVDGLQLLLCILQGFPATICQRAEGVPLVTDLLAPGVDIVGVVILQLVQLLGQWRRSASTAVPRAQPGRSRR

SEQ ID NO: 950553 - protein, 39 aa, Homo sapiens
MHGVDSPSQCAATSMDNFYDLQELFSSRWRRPSDQLPLA

SEQ ID NO: 950554 - protein, 71 aa, Homo sapiens
SECFLSFARRCALWHLRLPRWPAALPFLPSLGPLGRDRLALASWRQSLRPDMSSAVRLAAVRLLRKSGGGP

SEQ ID NO: 950555 - protein, 111 aa, Homo sapiens
IRTKALQNKPKKAATTTCDIDKVDEFMQALADQKELGEEIQQPIRKPVGFGDTSDEDELMAEYEALEQEEPNKNMLEVSGPDNSHSPQCSLYSPTITTRQEEEDDDMNALE

SEQ ID NO: 950556 - protein, 83 aa, Homo sapiens
LCNDGSASSELVRCKLRACLKLRVSVIHRGLEESPVAECSEKLGIQAEEIMMLKKQLYCIYAKHTKQSLQVIESAMKRGSGCL

SEQ ID NO: 950557 - protein, 88 aa, Homo sapiens
SFGGSLNTYKRFAIKLPDDQIPKTNCNVAVINVLGNPEAGMNAAVRSAVRVVIADGHRMLAIYDGLEGFAKCPDHRIRLNRCRGPGCL

SEQ ID NO: 950558 - protein, 116 aa, Homo sapiens
FVMIPPNHSRSYFSYLSPDPRLLDITIATRQNEETQHHLIFDPDRRRSPHSIPTTSTDYTVTLKFIYLSLPRHRNKSPILYTYYSGKKRNIWIHRYGLSCDINRLPRVYRVRTHIY

SEQ ID NO: 950559 - protein, 75 aa, Homo sapiens
MRFRRIFLSRFTLQPSPYPPIEEGDWPPTGITPLSPLEVHSPKHIVITRIRSINHLSSASLIENKRKRHLPRGAP

SEQ ID NO: 950560 - protein, 36 aa, Homo sapiens
MISVDGRLTVDIARVALPIRRMSWSPRRSSKPTYSS

SEQ ID NO: 950561 - protein, 121 aa, Homo sapiens
EAGVVWNPYFLQNSDHKTKNNFGVFSYLAFFLFFYPTLFNSSFGSLKPSEKYQGTGGHLFLMIGHYGFKQRILPVLTAALPIRKKKKLRSLRTCNFAISFDVGNTVIYKMLLDNSSFKSKI

SEQ ID NO: 950562 - protein, 57 aa, Homo sapiens
VGLRGCYFPYHRRAYHLTVITLLMIIFLICFLVLYAAISYTLHEYRLTKYYTSQDAQ

SEQ ID NO: 950563 - protein, 64 aa, Homo sapiens
SCLILLRWTCRAGRCANLLNSSCDVFWTVCLYVEGPGACYYFKEVVPHEEITRLEQKYQGGTEL

SEQ ID NO: 950564 - protein, 236 aa, Homo sapiens
RGLLHAQRYVNTLLTLIPRGAGSAGSKLRQEVHNGDMETVPGICRIAVDLGEDHSAGLAGPSRALAEFPDTRQHDYVLHRHPLATILSMRPTSSLSLTFWYTLQDDILSFEAEKQAVYQQVYGPVYFQLVDVLLHKAQYPSDEEYGFWSSDEKEQFRIYRVDISDTLMYVYEMLGAELLSNLYDKLGRLLTSSEEPYSWQHTEGLLYGFNAIAETIDVTYSDVVPGSLAHPGIDQL

SEQ ID NO: 950565 - protein, 225 aa, Homo sapiens
MLREHTSMKHHPARLMGLQEQMRQAVQNGDMETSQGICRIAVGQGEKQSRDLLDQVEHMSEFLDTRQHDYVSAQGDSLSHYSCQGDHRAPYPVTFWYTLQDDILSFEAEKQGVYQQVYRPVYFQLVDVLLHKAQFPSDEEYGFWSSDEKEQFRIYRVDISDTLMYVYEMLGAELLSNLYDKLGRLLTSSEEPYSWQHTEALLYGFQSIAETIDVNYSDVVLGSLA

SEQ ID NO: 950566 - protein, 60 aa, Homo sapiens
MSISTRGNYINLQTKILQLVLLLVVYGLFSIPDLRGLASLFPLVAHLTIWLSIFEPAIRR

SEQ ID NO: 950567 - protein, 64 aa, Homo sapiens
MLLPCACPKEPPKELDTASSEENNEDGDFTVYECPGLAPTSANGWCATPLFDHAALSARNRLMR

SEQ ID NO: 950568 - protein, 62 aa, Homo sapiens
AAVSRSLTTGEPSEHNPLPPWLVVFAEAVLGISPHRGCKVLVVGDAAVGKTSLVHEYSQDSL

SEQ ID NO: 950569 - protein, 41 aa, Homo sapiens
  misc_feature (19)..(19): Xaa can be any naturally occurring amino acid
  misc_feature (36)..(36): Xaa can be any naturally occurring amino acid
VPCARLHQRTTDNEGRACXSHLSIYLAGREGKNCMXVMEAS

SEQ ID NO: 950570 - protein, 72 aa, Homo sapiens
TANTSHIHFFISSALVFCVSSASLQVLLQALLPPLHQGSQFKLRRSILSILSPYALVSDKTVWDLAVVWFET

SEQ ID NO: 950571 - protein, 78 aa, Homo sapiens
DEDLMENLAQDETSRRDLGLEEWDVAGLPGWFLGNWRSNYTPRSKGSTDLQTNQDVGTAMVSDTTDDWGFWNESVSEQ

SEQ ID NO: 950572 - protein, 46 aa, Homo sapiens
VDPRCCCVHAFRMVLEHLRTLNDGCGELGLGHDGWALAIGGLVNAS

SEQ ID NO: 950573 - protein, 148 aa, Homo sapiens
MDTICGTSQDMSDVPVRDDAGSGYDDTAFYVNLGFHIDKSELAVKFLNTFDCVMLNMIGSILHASPSSYVLDNKRIATESNSEQISQSQVTRSLNHRTSGEGYGFDFHRQPVRPLDTYGSEHLLVLDVAHMMNASSYICTEVLTDVTA

SEQ ID NO: 950574 - protein, 73 aa, Homo sapiens
RASHDKTTHGYAWISLTKTQDSILSSFCVDLIFMPWSLYWIISGVVLLVRAMILIRVFWLIITITDFRPICSC

SEQ ID NO: 950575 - protein, 67 aa, Homo sapiens
YWSTAVVSARSPRPDLRLTAWVLGEPFHNRMLRFQYMAYSDNSLGLHSFKFAHRTCTMYTKPGIHAR

SEQ ID NO: 950576 - protein, 75 aa, Homo sapiens
AGPEQVVAEYWYGIAKLRSLRRAQKWMYNRISKLIWAQPSKANPFGGASHAKGIVLHKVGVEANQPNTAIRTCVR

SEQ ID NO: 950577 - protein, 46 aa, Homo sapiens
IVSDDLDFETHEPAKRLSLKRTLYNLKSYIAQMDQELAHASISKSF

SEQ ID NO: 950578 - protein, 55 aa, Homo sapiens
SAVRKHETGRSWSAFRTIWILGGECRDIVGNLTEFESEDIQTRSLADREPVSPII

SEQ ID NO: 950579 - protein, 70 aa, Homo sapiens
MTRKMGLSRYLTKGDNNAVDDRGLYKQGQQFGYEETTDVVGRARGFGPYIGIVTILMSDYSRFPYAVLFL

SEQ ID NO: 950580 - protein, 75 aa, Homo sapiens
REGHRHITLNAIYRRLVRGGCLNMALCSRFKRSCEVFIKMNNIDGKELLNLTKESLANDLNIESLGLRSKSAEEN

SEQ ID NO: 950581 - protein, 36 aa, Homo sapiens
WKWLETAKRCILRARDTVHLSFLSKVHPYPGWQSYP

SEQ ID NO: 950582 - protein, 78 aa, Homo sapiens
KYADQTDPYIMLTLLQDETAKWRYYADELAIRGAEMDKNKFKIAEDVKLELALSTGPIIQELKQESQKIQQQMENGMV

SEQ ID NO: 950583 - protein, 70 aa, Homo sapiens
YGKYIRVSISVVSRDLISNRCLLTTIVVCRDVLAGMVRLFAFMILSILPAHPYWLATKAHGDSSTGAETP

SEQ ID NO: 950584 - protein, 42 aa, Homo sapiens
IFFLRSSVRLSRAFTIAAIDYGEGAYKFLVCSSYRNSIEDQS

SEQ ID NO: 950585 - protein, 36 aa, Homo sapiens
VWHCKYYQRSQTCVVDEMGRLAKEEAERGGGHSMVG

SEQ ID NO: 950586 - protein, 42 aa, Homo sapiens
MGRMPRQFEYELEQAWKPSRSTLCLEPTRIGDETARWITVGK

SEQ ID NO: 950587 - protein, 55 aa, Homo sapiens
NYKAALNNYGWGDLGAEPNSEQYMLRLHQSKRITILNRSNNLTNGTSYPWVLRFG

SEQ ID NO: 950588 - protein, 104 aa, Homo sapiens
QTSRAQYDELARKNTRRSYDKYWSTADCMESTTVVTTTVCWGWSRLKRRYTELRRTVQSLEIELDSMRNLQASLENSLREVEARYALQMEQLNRDLLHLESELA

SEQ ID NO: 950589 - protein, 41 aa, Homo sapiens
TLPTHVPPSSTSLVTPNTHTVITHTHAQMSSRRGREFSSSR

SEQ ID NO: 950590 - protein, 180 aa, Homo sapiens
PAKDSLSFEDFLDLISVFSDTATPDIKSHYAFRIFDFDDDWNLDREDLSRLVNCLTGEGEDTRLSASEMKQLIDNILEESDIDRDGTINLSEFQHVISRSPDFASSFKIVLDSSPSVCPGTLSKNLFTGELWPRSSLCCQCGPSWSRVEMDLFSLTQGRGGPDGQGLLFVCVVIARFVLY

SEQ ID NO: 950591 - protein, 44 aa, Homo sapiens
GWSDLETVRQACLPPGTPCLAQRLTTESTRLPRLRVVPPPFEQE

SEQ ID NO: 950592 - protein, 66 aa, Homo sapiens
RSSRWLIIRKPVTVHSRARCRKNTLCRREGQAHGHRLAEGYSHIARIATRRSHGLARMTDFVAGLL

SEQ ID NO: 950593 - protein, 38 aa, Homo sapiens
NTRGHVMYVGLTDFKPGYWIGVRYDEPLGKNDGSVNRK

SEQ ID NO: 950594 - protein, 116 aa, Homo sapiens
  misc_feature (104)..(104): Xaa can be any naturally occurring amino acid
MVIRCQGPDELLTILADIGVDLIEGTQHVELHGVQAGLLGEVGLHVLVTDGWGLGDVCVVSLHPALVAWDVLGKSSLLEGESLPSRCSDVEQESMKVWATTERXASVMLPLWIFNT

SEQ ID NO: 950595 - protein, 37 aa, Homo sapiens
EDKKETEDKKTDVKEEDKSRDNSGEKTDTKGTKSEQL

SEQ ID NO: 950596 - protein, 134 aa, Homo sapiens
RRLILGWSLLRACDCLRAPRPSTMPSETLWEIANADVEKEGNKVEVKVMEREYCRKMCSLLCGSKIGGRDYIYISRGVLTRDEPPKPTLVWDIYLLARRAQGHNTPKEISHTLWRTSGGRNLFIWGLNQIYPIT

SEQ ID NO: 950597 - protein, 65 aa, Homo sapiens
IKDSTELRKSIGQQKVGESGSEGSCTYDRYPGDLSREAAGKDLKRTKGLLGVCQLMLDDVKNSAP

SEQ ID NO: 950598 - protein, 54 aa, Homo sapiens
MSFQREFDQCRTPTSTYQGQQRAACGREPLTDSSLQLLEPFDKWDVKDLGGPAD

SEQ ID NO: 950599 - protein, 47 aa, Homo sapiens
CDTFLGLLDSHLIRGPVDAESRVSYLKMNGDYYRYLAEVATGDDLKR

SEQ ID NO: 950600 - protein, 42 aa, Homo sapiens
DDPQPTEARAIRTISTAIYPWRKGELTLSEVVEIREKDVCVV

SEQ ID NO: 950601 - protein, 70 aa, Homo sapiens
WIADRVMIGHTDSVRLPRNIRGDFSVHISRNVIHTSDSVEGCQRKIQLWFQSSELVSWADGGQHSSTHPA

SEQ ID NO: 950602 - protein, 113 aa, Homo sapiens
DKRIGAGVRLETAFPAKGSWSKPQQRCSVWCPGTCSAGSGEEGREEKGESQRRLQMSTSLLDSGPRAACLMKLMSPLVEGGRERSLEHWPSSSGSIFLASCFPSSTPHWSKAC

SEQ ID NO: 950603 - protein, 68 aa, Homo sapiens
ETDVGSGASQHGEAGGAGGQDAEAAVACVPLELGDKTVLLQVRSLESVVGAIFPLPNLQLSQHCSEPN

SEQ ID NO: 950604 - protein, 118 aa, Homo sapiens
MRMRVVYDIAPPPKCYNILVRSDTHTQIMINQEIVNAKDQEAIYTLRVGGGRGEERDGVIREGSMKEVTLRKFSKPGEDLGKEETAFQVGRAAWNIGKKVAMRKGIVTDNRWTLILLF

SEQ ID NO: 950605 - protein, 156 aa, Homo sapiens
  misc_feature (47)..(47): Xaa can be any naturally occurring amino acid
MRIGRGVHLRATPFQAVGKESSRLSLQRGQYQDLVLHPLLKDRISPXLTDDQVVPLHHHDTDEEGCVAGELHDFPLLIGPLLPVAVFHIVDPAVIPVHSEAQQVNWEEAVLSQNHKVSKEASQGLDHSNLAIGHADQPLIHKFVCFGISRLSLHDV

SEQ ID NO: 950606 - protein, 110 aa, Homo sapiens
  misc_feature (60)..(60): Xaa can be any naturally occurring amino acid
LTLEDSLDERIAAKYVIDVDTAFSCTSLDAVVNYFVSHTKKALVPFLVRPRTARTVLGYXGTPIRENGETCVGGALRSGPRSCTLHRWPQAAVTCSRQDKLPPLPLIAYS

SEQ ID NO: 950607 - protein, 31 aa, Homo sapiens
MGWLHWERFMCTLACQEAPASCISEKLFMDA

SEQ ID NO: 950608 - protein, 32 aa, Homo sapiens
CDVIIVEWGLQSGVLPVVNVKESRSPGSRNNG

SEQ ID NO: 950609 - protein, 32 aa, Homo sapiens
VSEIGTTGDTTAQAPCCTGWGPEQHMQWLPPP

SEQ ID NO: 950610 - protein, 90 aa, Homo sapiens
MGMDIPPPSGPLWILGDVFIGRYYTVLTVTTTGWALPRLPASISQGVRALSTETEESSIAGGPWPGGPFRTHPHTCPPTVLGALEAGGPS

SEQ ID NO: 950611 - protein, 34 aa, Homo sapiens
MGGDSLGLFDPVSCKKGGGVLLGCHNEGQDEVKG

SEQ ID NO: 950612 - protein, 45 aa, Homo sapiens
QNRKQKENDYEGVIMKVISSSMMGKKRLVDLLALHVPSELLLPSH

SEQ ID NO: 950613 - protein, 92 aa, Homo sapiens
MVADSRPRSRKYRWEERGRAWDPSLRKYDVIFLSPSCFLDAEFSHITSSASFSMMVWAERQLNLTIWWKPNTCFTFFFNHTFVLRYMCILNH

SEQ ID NO: 950614 - protein, 58 aa, Homo sapiens
MDICFIRTSRPENAIIYNNNEDFQVGQAKVVLKSKDDQVTVFGAGVTLHDALVAADTY

SEQ ID NO: 950615 - protein, 82 aa, Homo sapiens
MHTDACGRYESPDEGFLLCPQMIFLTLHNLYLGLLRCNTMYSIATLGVIYLTCILSRLVNADDIHESSRLGYISSDLAIDSK

SEQ ID NO: 950616 - protein, 140 aa, Homo sapiens
MITMVKSFHEYSPTPTPRGTIDVMREAVLFYATCCAIRNVKGILRRTPRGSPALSPCLLGDNVITCIQLVVKNGPGFFYMICTMWFLSSFLMAAISIGIKFLLKIHISPGSGVRGSERDNVTLQGGSSLDRKVIHVPCQV

SEQ ID NO: 950617 - protein, 42 aa, Homo sapiens
CVVWRCVVCFLDVYIHAIVGYSGYDVLVSRPRYEERYGVEVI

SEQ ID NO: 950618 - protein, 119 aa, Homo sapiens
NQQPSPVQAWHGGPSICIPYVQPGTSQAQGTSPFSQLCIWVVQLGMALPKCMATSKGQISCYAPPSCRLLIIKNPAWKFRSKRLLGANIPWMSHPKKFKPSGVNEIDITVIHGYIDGYR

SEQ ID NO: 950619 - protein, 75 aa, Homo sapiens
RLECCHELSSPCSPETRVYTHALSSFNLRAILHPLFWFYCMRFWRTSPLGPVCALRRPSRLHVTKKDIQEFGDPN

SEQ ID NO: 950620 - protein, 44 aa, Homo sapiens
LADILGVGAVGQLYDQIRELHALERHGTVYSLECEVHAPKRCSD

SEQ ID NO: 950621 - protein, 67 aa, Homo sapiens
MMLPSARRVGHLLVGTVRNTCRMKSVELHCTLTGMACLLTLSARFHSTTSPDSDSINSLYMPGSTEP

SEQ ID NO: 950622 - protein, 44 aa, Homo sapiens
LQAVGHTSGGHVRKLEDKSVSCMHLKAWPVSSLECNVHSTKALF

SEQ ID NO: 950623 - protein, 41 aa, Homo sapiens
VCLASCPDILLVGTVRKLEDKSVSCMHFIQAWPWSPSLEMQ

SEQ ID NO: 950624 - protein, 51 aa, Homo sapiens
ELVPNSRSRWGQGMPRSTISKPKKLKVRSKAGSVLAVLVEANEDIPTVTGD

SEQ ID NO: 950625 - protein, 131 aa, Homo sapiens
MLFNECFIYFTEIRKYLCTRFKCAQDLGFFLLDYVHHSAHNSKASRRQEITKIRAELKEIETQKTLQKINESRSWFFERINKIDRPLARLRKKKREKNQIDTIKNDKGDITTDPTEIQTTIREYYKHLYAN

SEQ ID NO: 950626 - protein, 44 aa, Homo sapiens
MCGSMQEAEGGGRPVGLERICPPYSGKSRKPEKTLSEPWTCEPM

SEQ ID NO: 950627 - protein, 132 aa, Homo sapiens
MHGHNTRIDSGSYVKDNDLVLGLSHLNNSYNFSFPRCDRDSPGGRPVQPELPQLQQFSAKEQEPPFDVTVMIREKNPDGFLSAAEMPLFKLYMVMSACFLAAGIFWVSILCRNTYSVFKIHWLMAALALPYA

SEQ ID NO: 950628 - protein, 36 aa, Homo sapiens
LISHASMANPILPGVVFTSVLILIRAVRPGPSSMDA

SEQ ID NO: 950629 - protein, 55 aa, Homo sapiens
RNNIQRQTLHPLADCKRLDPLVNVLIVLQPALRRTGLTDDTQHVGAPCGTTAIGS

SEQ ID NO: 950630 - protein, 62 aa, Homo sapiens
MMKASQQAIERGVKVLPDLSDIISGEADIIDVTTVASIKEITEKNRHCLPDIAPHAIERLHH

SEQ ID NO: 950631 - protein, 54 aa, Homo sapiens
HATRWNYEHLPIIMQAITTFVGIPTMPNGETSPFISPSSTIFLGTTYDALSPEL

SEQ ID NO: 950632 - protein, 116 aa, Homo sapiens
YEVLYYMVVTLVHQWNSETSPEYHRSGAKDHHAVWVMSKVSLRGGLGDSDGDEVLDALKQALDSSMLPNNCTRIPSIWIPCFCSCSLHVVHKLVVYLDLCLIFLLLRFSLRIRFLH

SEQ ID NO: 950633 - protein, 147 aa, Homo sapiens
EDPVMYANTTFPSLQPVQNDGLRTARVDAVGEIGGLSQGKLNYKFLQARLRSTTRTSDSPSQPSPGAAWGGKSCSLRRHSWLGLFRGMEDSQSPTHSESRESSDTLLVRGPGGGFEPSELDFSDFPSKDLPTSCSLCSHPPVLGDNI

SEQ ID NO: 950634 - protein, 178 aa, Homo sapiens
MLSQHKHRSLDERISEAESEIDNVRNSAQSAERIAMRAGCGAGPQRMPGNKLGELEEALQKGKQDIGRLLLRYQELMNTKLVPGRGESPLYRKLLEGEELQTQWRKELDQVNISVGHKAVFPLDMAVAVAYWGWPPVEVLRAASVEVLPEVAVEATTPAAGGGVGLSGGLRVGGVGDT

SEQ ID NO: 950635 - protein, 137 aa, Homo sapiens
  misc_feature (17)..(18): Xaa can be any naturally occurring amino acid
  misc_feature (87)..(87): Xaa can be any naturally occurring amino acid
  misc_feature (120)..(120): Xaa can be any naturally occurring amino acid
PTQHIWFICDVVNLISXXYTILHVTYEIKQVGNMSSANRGLTPVHRQHHPLIVAAVHGVTKPAPPTCCPQERYQALRATGLSSTACXRRAGRSQGSMMVGELKGNGGKPSKVPSSVGDVXLIVLYHVVGPAPVAEEA

SEQ ID NO: 950636 - protein, 33 aa, Homo sapiens
TAVIEPVPLQDYSEHCKHNDSGKRDVGINQATP

SEQ ID NO: 950637 - protein, 58 aa, Homo sapiens
MLDLDVTMIDVIHCLIVYPERTIRVLQAGVGDEDGVVRLNYRCGKQRRRLTRELQIVF

SEQ ID NO: 950638 - protein, 36 aa, Homo sapiens
LLHCSIWKLEHNAAVWAQCYVLFLVPYWTAVASVDP

SEQ ID NO: 950639 - protein, 46 aa, Homo sapiens
AYVCDPPLLHDRPLCFGRPFTCLLTLNFIRFESLISPRPLLTRLLG

SEQ ID NO: 950640 - protein, 35 aa, Homo sapiens
RHLSLPRMRVRRGRGEIRLSKLIKFNVREQVQVRP

SEQ ID NO: 950641 - protein, 52 aa, Homo sapiens
RAEVLETVELADQLKNYDPQKDTRFSGTVIYKDHSPPIRYSVIVSVGGHQQH

SEQ ID NO: 950642 - protein, 36 aa, Homo sapiens
WPVKSCSETLLSAHDLEPCAGDSLCHAGPFTASSPA

SEQ ID NO: 950643 - protein, 35 aa, Homo sapiens
MVGEETPFYTNTYSDFSGHPEVYILILPGHGYLSS

SEQ ID NO: 950644 - protein, 41 aa, Homo sapiens
KVKQITEAKAQQHQDLAVAGPEMQVKLLQSLGLISTLFTGH

SEQ ID NO: 950645 - protein, 98 aa, Homo sapiens
MGEPSLTVRPGVFRDTRDFIPSMLTLTHHQVHDDDLLSSSEEECKDRERPMYGRDSAYQSITHQRPVAASRSSLDLSYYPTSSSTSFMSSSSSSSSPA

SEQ ID NO: 950646 - protein, 40 aa, Homo sapiens
ELQAQFSSPMQLPLSSEALEGWCCCVAAIATADTRAQAPG

SEQ ID NO: 950647 - protein, 42 aa, Homo sapiens
RSEWGLHVQPGSTESTKMLLDLIRRQRIYGMEIAGIGENPYL

SEQ ID NO: 950648 - protein, 37 aa, Homo sapiens
TLAGEEERCPSSSSPLAAQCKAFLHAAKEKHSSLPGI

SEQ ID NO: 950649 - protein, 34 aa, Homo sapiens
MKSVCYYENDCAGEASGGSDENGCYYEGYVADEE

SEQ ID NO: 950650 - protein, 155 aa, Homo sapiens
ERIRRGAMVRLCRHADYDAYNDGYGFGSDRYVRDLNNCLAGMSDHRYGDCVSTFQSTTGTVYTMRGLPYRAAESDIYNFFSPLNPVRVHIEIGPDGRVTGEADVEFATHEDAVAAMSKDKAHIRHRYVELFIEFYSRSKRWVLTNTDMYELFLNS

SEQ ID NO: 950651 - protein, 38 aa, Homo sapiens
SVCDDCLRTEQEDACCRQEQTGELNKEMAAEKAKAVVE

SEQ ID NO: 950652 - protein, 38 aa, Homo sapiens
RSRVVLTSAQWQHRRLATVLEEIAAFPEREFVILAKQS

SEQ ID NO: 950653 - protein, 40 aa, Homo sapiens
LSSIATLGLIYLLYLKTPGDNADDIHESSRVGYISNGPCH

SEQ ID NO: 950654 - protein, 39 aa, Homo sapiens
  misc_feature (27)..(27): Xaa can be any naturally occurring amino acid
  misc_feature (32)..(32): Xaa can be any naturally occurring amino acid
  misc_feature (37)..(37): Xaa can be any naturally occurring amino acid
GSDFLPPILEILFKSRSVGPIYQENQXFRSLXKKDRXPI

SEQ ID NO: 950655 - protein, 50 aa, Homo sapiens
  misc_feature (2)..(2): Xaa can be any naturally occurring amino acid
GXLPCYKVMNIHLFVYPLYFTFVRPTEIIAFSNRAEDIRKLRCEVLDCVE

SEQ ID NO: 950656 - protein, 57 aa, Homo sapiens
  misc_feature (1)..(2): Xaa can be any naturally occurring amino acid
XXCRLLTHVPMWSARLLTCPCGVPACSHVPMRGARLLTRAHAEGPPDHTLPMRSALL

SEQ ID NO: 950657 - protein, 72 aa, Homo sapiens
RSPGADQFDVQFSISVAVSSFLNIHDRIKHLEDGVQDSAGTRCVASFFPSGLVADLLNWPLFDTKYLSPHSF

SEQ ID NO: 950658 - protein, 80 aa, Homo sapiens
PTVIGFRVFPVMLLGSVGLGGKRAICLNVTCCPPKALAGLACVSVWTVVAALCLLCVAYMSLAVEALLQPAPLPCLIDAP

SEQ ID NO: 950659 - protein, 34 aa, Homo sapiens
QAKWNIELMDPLIKKSLACGSGWKSNRKATILCT

SEQ ID NO: 950660 - protein, 33 aa, Homo sapiens
MALIVLTNSAGIMDHEEARRKHTGGNILGFFFQ

SEQ ID NO: 950661 - protein, 121 aa, Homo sapiens
MDPCSLLWGAVALTETWAAPLHEVFPHLRVPARPGEPRFITVCYVDGTLFVRFDSDAASPREEPRGAVDRAGGAGVLGPGDTDLQAQRHRLTERTCGPCSVITNQSEGRVSHPPGICLVAE

SEQ ID NO: 950662 - protein, 60 aa, Homo sapiens
TRHRTHDTYYVVAHFHYVLSIGAVFAIIRKLAFTDFPIFSVLHPYIKPTLKIHFTYHIHP

SEQ ID NO: 950663 - protein, 58 aa, Homo sapiens
MAVSACSSHISIRAPAFVYAMFAVSLLWSLESTPVRPGLPANARLPMVRAVAVRGMVG

SEQ ID NO: 950664 - protein, 36 aa, Homo sapiens
AAFCEAARTHQKAISGSRVEVLREDYDATDSDHANW

SEQ ID NO: 950665 - protein, 34 aa, Homo sapiens
GDNTTVAVTEGPGVGVSTGPVPYCTTASATLPQP

SEQ ID NO: 950666 - protein, 51 aa, Homo sapiens
TEKTSEKAIVGLNSDVIAGVMGKFHVCDLQNNGRYIIYVYTLAEIRLLHNL

SEQ ID NO: 950667 - protein, 64 aa, Homo sapiens
WSGLWFMDMQRSRSTLRYSPIIEELTSPFTDHGLIIIWLYLLSSPVCPFPTITTNLTHTNIIRR

SEQ ID NO: 950668 - protein, 39 aa, Homo sapiens
PEYLQAASSDSAQALMCLSHLVKCETAALCGTERQELFL

SEQ ID NO: 950669 - protein, 76 aa, Homo sapiens
MSTGLRMCGRWGAPYCHSRFMEGTSTIRTFRFEAKASQIMKIIHITAVREMNEPTDYRMFHVVYASGSIRVTSGHT

SEQ ID NO: 950670 - protein, 43 aa, Homo sapiens
RHFVFLSRAGRLLGCAQWLVCGLLVNPPPPPLLQPLLPPPPPP

SEQ ID NO: 950671 - protein, 84 aa, Homo sapiens
LSRMKVKEHQVVRNEEQKAEQEEGKVAQREEQLEETGNQHNDVEIEEARQQAAGKRQHRDCSSVMQQKAHRQEAQQQQTGKSQR

SEQ ID NO: 950672 - protein, 52 aa, Homo sapiens
MVNPKPHQLMLQVCSCAQYAPELRTTHIDQSMCSYSSIGACSVIDKPRSTSA

SEQ ID NO: 950673 - protein, 54 aa, Homo sapiens
MVAFLPRCATEKATRAGCHAQYRHLAQASGVLRSASVVHQLVTPFSLALVTPMT

SEQ ID NO: 950674 - protein, 36 aa, Homo sapiens
SARSTIFTFHFILPFIIAALAALHLLFLHDEVIFCT

SEQ ID NO: 950675 - protein, 83 aa, Homo sapiens
LTTGSSSSRDSLEILVPRLLVSGTSVPLGNDTAAVADAPIALKWQISSRISSHLGLNEPGENRKDVARPLPGTWSVLSVELPG

SEQ ID NO: 950676 - protein, 38 aa, Homo sapiens
MNPRRSEYSRSVLSTSLFLLRTKVTMRNNAYFTKRLPP

SEQ ID NO: 950677 - protein, 114 aa, Homo sapiens
MCGIYMKIQGYVPEALYRVSGEIKLTKDNIQKQFDQDHNINSSVNGSNSKCCRWGPLKLTLQIVPDSFTSICSSSRTIGSKRKSRSKTERLHALKGNGREMTIRVNYDVFRIRE

SEQ ID NO: 950678 - protein, 42 aa, Homo sapiens
  misc_feature (1)..(1): Xaa can be any naturally occurring amino acid
XTVGSKLNHLQMQPLFLLNPIHPPQHIDTSSSSRQTNSQHAG

SEQ ID NO: 950679 - protein, 35 aa, Homo sapiens
MGFSGVMPVGGQCPPIWGEGAKLDVVQRLMKTSCR

SEQ ID NO: 950680 - protein, 77 aa, Homo sapiens
SADYFVGRRDAVPDRSLTRLFHEMCRTSGSVYITLKKYDGRTKPIPKKGTVGGFEPGDNKCLFAAHRMGKHRSISTV

SEQ ID NO: 950681 - protein, 77 aa, Homo sapiens
LLDIFVIWYLDRPMCVESFSDYPPLDRIAVRDMRQTVAVGVIKAVDKKAAGAGKVTKSAQQAQKANMHYSSLHHCPP

SEQ ID NO: 950682 - protein, 41 aa, Homo sapiens
MSTSIPSVYICCAHTINPKYANLYVHYLFPLVKISKWFFFF

SEQ ID NO: 950683 - protein, 80 aa, Homo sapiens
MREHLKLYWSRVNIPKVLELQNKLYLWAELVFAYDTYEEYDIAIITMMNHPIDAWNEGQSKDIITKVANGGTLTTRAITV

SEQ ID NO: 950684 - protein, 57 aa, Homo sapiens
MYEYTNELEGYNVTVLVTKYVVSSTGDQCVFTFSRCKNVVVRVYIIIMFVYSAMKNR

SEQ ID NO: 950685 - protein, 44 aa, Homo sapiens
MTLVDLVGPPESRRLISSPRQTVNPMGHLPESLTKPDQVAPVHL

SEQ ID NO: 950686 - protein, 56 aa, Homo sapiens
EDPGVAGSDQPALRLFTVQIPHKRCAAPSLLLTGRDGSNFLPLRTKSCGHAALLPQ

SEQ ID NO: 950687 - protein, 183 aa, Homo sapiens
LLDYSWTEGATPVPRALSSPSQCSPSDSRSGHDLEAGLHIMESDALLLTIYWIIARSSVRSVGKSSQRSFTIITQLRSTHTGPSRRSYLIWWNGAPKHIISYVSKKIQNVQIAQVIRESMCKAQGGYKTFFNTLYHNKIPLSIFSAGMDDILAEIIRQMKVYHPNIHIVSNYMALMKMVPPGI

SEQ ID NO: 950688 - protein, 36 aa, Homo sapiens
AVTEGDAGVCILLLASNSTPTVQRGHGLVVVCACMP

SEQ ID NO: 950689 - protein, 132 aa, Homo sapiens
MTDRAIGKKRGFALVAFDDHNSVHKIVIQRYHTVNGHNCEVRKALSKQEMASASSSQRGRSGSGHLGGGRDGGSGGNDNFGREANFSGRGGFGGSRGVGEYGGSGDGYHGFGNDGSNFGGGGSYNDMGNNNK

SEQ ID NO: 950690 - protein, 38 aa, Homo sapiens
AGSRNNGEKYVGVEDEPAIILVLIALPSLRILYITDEV

SEQ ID NO: 950691 - protein, 77 aa, Homo sapiens
VTIVGIGTDEEVDERYREAPMDKKGNSITSSHTHPETVEPKTKMTERTLAKIFQLHGLTLFYFSDTSPTLIEPVACN

SEQ ID NO: 950692 - protein, 31 aa, Homo sapiens
MDKRCTLTVPGSTSYPSPATASYPSPVPTAT

SEQ ID NO: 950693 - protein, 35 aa, Homo sapiens
DLEDPCCLTICGALDHLRRHRAGTHVKHVVVDFVT

SEQ ID NO: 950694 - protein, 68 aa, Homo sapiens
LEQLVQMAGGVLPLFDMWSSTEDMLKNTKCIALCSSRDRTFCYKSSMDKTVSILSSDFTSRVVGLGTR

SEQ ID NO: 950695 - protein, 53 aa, Homo sapiens
ADYCGKNSRLYTTTQRPNVVGPYGYYNPSADAIKLFTSYPFVFLHIFNKLVSS

SEQ ID NO: 950696 - protein, 75 aa, Homo sapiens
MRSLYWWSSRGIAYPSGLPAEAENVSWAASSLYADDSASAMDFGVGLVSGVPETRGNQCLKPPMLATTDPIAEAH

SEQ ID NO: 950697 - protein, 114 aa, Homo sapiens
CVCVGGSQYGWSGNMAENHESTSVPNGQGTSLQITMRVRSKTFEINPRHPRIRDMLRRIKDDEDDENSLGSGRGLVCNSNASAGYVLPDTKAYGDRIERMLRLRRKMDPDGVPS

SEQ ID NO: 950698 - protein, 75 aa, Homo sapiens
MPNLEIQLHIHQHQQQQSGQHSQTEMSLIIMFSDKVICVLWASHDSHISTLLVSQFPAREISIGDTTVHATAITV

SEQ ID NO: 950699 - protein, 167 aa, Homo sapiens
LRTDRVAAVAAPLLLSRAYKLVMLGAGWCREECHDHAGASANDIPEDHDPTIEDAYKIRIRIDDEPANLNIKDTAGQAEVYSHAEPVYERQAERVYHLLLYHGSSKYTMKYVSSQQLINRVRRTDDTAVVRVRNKSDLKQIRQVTKDEGLALAREYSCPFLETSDAY

SEQ ID NO: 950700 - protein, 129 aa, Homo sapiens
MATSEGPKRTHGILELAQYESLLYAARWDLTVRTTLVMLGAGDVGQSAMNMQYITTDTQKINDPTIEDAYKLRIRLDAEPANLDIRDTSWTGRSSRPAGPVSAGRRRVSHLFLLSRLVAVPMTFVRSNP

SEQ ID NO: 950701 - protein, 103 aa, Homo sapiens
MVYLRSLIGFGSSGPQAGADSNVTGMVISSDCVASLAMGASTVSVPSAHREEETWVGSTPGGSVYCRVKHREMEPCSSCRSSCLPVISTRPSLVLTVSSSGAV

SEQ ID NO: 950702 - protein, 65 aa, Homo sapiens
LEDPVPHLHGVHYLHLTGVKVFELTCSTPRKLYEMICCSALSPRIHLTFHRRWTEWHCISKLITG

SEQ ID NO: 950703 - protein, 62 aa, Homo sapiens
MDLRLNRCPECPGWSRTQISKMVSAAKLRTDEAKQSAEANPVDDKCYQKENWATSNEELSNL

SEQ ID NO: 950704 - protein, 30 aa, Homo sapiens
MLLESDDELLVNEEEAAALLDSGSSVGALA

SEQ ID NO: 950705 - protein, 102 aa, Homo sapiens
DGLLYFIRRVCYPPGTLKVWHSRLECIGPIHFSPSRCARASIRSEPNNYVGLAIHMGHGKMGSPKAPYLAGCLSALLELVLTPIGVALFSRSPWACSARHNS

SEQ ID NO: 950706 - protein, 122 aa, Homo sapiens
LIGPEVSFFLLWRIINKAGQNILCSLGHLPPQDTLNGKWTHMMTGNSIDRYCQGKPAHLPKSLTSIHSQHLITEYLSSSPWRTTKMIMYILLSQPDVRKIRYIMATLIISETAISGQSLLTF

SEQ ID NO: 950707 - protein, 48 aa, Homo sapiens
MTSGLVIPKEAYLRVRMSCNGYSLHVLTHVFHDFVYWICLYLVMKFII

SEQ ID NO: 950708 - protein, 61 aa, Homo sapiens
MIPQYQCHAVEPDSSSGSYDWFSSVLAVGKSLALPGRTQMMTGLPDELPIKTGETGVMRMM

SEQ ID NO: 950709 - protein, 56 aa, Homo sapiens
MAHRDEYKEGVGYVFVRRLTNECEAYYTIAAGSRVLRQVLLTQRKRHLHRRKRLFI

SEQ ID NO: 950710 - protein, 54 aa, Homo sapiens
RFHFLLEMLDNAFLSALGKFLRDFCLFPFSHERDILSRAGLKPLFGFPKTASSS

SEQ ID NO: 950711 - protein, 86 aa, Homo sapiens
MPFSYTADVSAPVDDDALHGDTEALIQAPDAVGFTKSSLPGLGNSRSVPDFPKYDSKAGSGKIQRVHEAEGGRAGRTAEARLPEST

SEQ ID NO: 950712 - protein, 117 aa, Homo sapiens
  misc_feature (92)..(92): Xaa can be any naturally occurring amino acid
TCRVLLKLGGYGIIRLTLILKPLTKQHSLPLPCTIPMRHNYNNAPSCLRQSRPKHRSVAYSINTATIALGSNMPFYIQKPPVSFTARSHSHXSPTDLYILSYYSGLANSNYENGIFI

SEQ ID NO: 950713 - protein, 45 aa, Homo sapiens
PPKVCSPPLLTDGEPCYYSVILNDPGGQLILLTLKRGFRYGFRCI

SEQ ID NO: 950714 - protein, 113 aa, Homo sapiens
DRLPLPCTIPMRHNYNKLHLPTTKRPKIAACILFNTATSALRSNRPFYIQNAPDSFTARQSFYIMRPRDLLSTITILAYATLNTTKHGIFTRRTTASFIAQTASSSAKTASSS

SEQ ID NO: 950715 - protein, 47 aa, Homo sapiens
VDRERSSDRNKDSQSTQEKKAEIVEGNESGKERERENESENENGIFI

SEQ ID NO: 950716 - protein, 48 aa, Homo sapiens
  misc_feature (1)..(1): Xaa can be any naturally occurring amino acid
XRVSPDVAADDPGAKAQVVPEHEVPLQVYYIVLHLRATRTLGRRGTEL

SEQ ID NO: 950717 - protein, 45 aa, Homo sapiens
QDRHLEDPSTVLRIGGMLYEFIRTGRLEVGSMETQYVVVEYQGTS

SEQ ID NO: 950718 - protein, 45 aa, Homo sapiens
SEVDLRIPEAHKDGWYRSLYGHPGLDAGKTPWARRKGRHMGIGER

SEQ ID NO: 950719 - protein, 59 aa, Homo sapiens
NLATSSTIELRVAPEEHPVLLTEAPREPLGQPRGKMTLRSGLSTYRHPCRMYRCLSMAR

SEQ ID NO: 950720 - protein, 163 aa, Homo sapiens
MPVHEQVRRPPAAGESPELAPWYLSRWQNDGERQLVEEVGLEGSRQRKSVDLPQALPPQGQEHRATEQIHERKRIGIESVQIAHSDLTVAPDGTHYRYSKLPLSPQKDTPMYCPSTMKLKVPSYMSRTTRKESGTMNVSSGSREAEYVIARLVLAIVVEPVAP

SEQ ID NO: 950721 - protein, 51 aa, Homo sapiens
LEQSTPVCRRQTRKKTLETRLISETTSVCKTEQVGKQIVYDSHTREISPES

SEQ ID NO: 950722 - protein, 111 aa, Homo sapiens
MADDLNFETGDAGASATFPMQCSALRKNGLVVLKGRTCEIVEMSTSKTGKTRTDQGSIWLVLTSNNGDDICRYLPVNSYIWMSPTSKKEMTSSCFGIPGWVPNHCSRTSGE

SEQ ID NO: 950723 - protein, 48 aa, Homo sapiens
LIRVYRVESKRGGIVYMTAAGSLSVCSEDLRIFRIFEGTNDILRLVCG

SEQ ID NO: 950724 - protein, 67 aa, Homo sapiens
YLYPSSSLHASGRTAIFQLQGQTGFSHTDHFTSSEQLYLNVLLCTASNFLIHFSHSTFYIHNALFVD

SEQ ID NO: 950725 - protein, 117 aa, Homo sapiens
SLYMTTYKSMEKQEGGSGIYLLGPQSLRHLKSKMIYSQLQGRHQEEADRDHSMNSKQNCYEKVTDRCNLAEKLGGSAVISLEGTLCEPLLDPCLEHLADPHLPLAVAGCHLTDRAEG

SEQ ID NO: 950726 - protein, 36 aa, Homo sapiens
MGLSTLTVLYGAPSCPSRAQACPHEASLTEQEHVDF

SEQ ID NO: 950727 - protein, 67 aa, Homo sapiens
RLNDDRLAVSRTIGETGRGDVCICVFGDIGQGVSQSDVLLLLEKKGSHTGDAALEEEGGDVVSILCR

SEQ ID NO: 950728 - protein, 39 aa, Homo sapiens
VTLRFRHSLGLLSTFTQPLAPHPISGQSQKTHGSQKPGE

SEQ ID NO: 950729 - protein, 35 aa, Homo sapiens
SEFPHSLGLQYCTRTSSKYLSHGDRLYIGLAGLAS

SEQ ID NO: 950730 - protein, 70 aa, Homo sapiens
VPFSARVIDSLDLSFLVSEGTKELDFLRVWGLGCGLRFRACCLQALLEGLVRGPAPRRFPYQTPSENSTV

SEQ ID NO: 950731 - protein, 56 aa, Homo sapiens
EDPCTVLSRRTTVTRGVILTTRDFFWPLVLFFVSPFSLEPVSTKPSFSFRGSTYGC

SEQ ID NO: 950732 - protein, 112 aa, Homo sapiens
HEVNGLHNDMTQDMKFIIKHWCSLCRRCGATNKGAIIGLMVGGVVIAIDHRHHLGDAEEETVHIHSSWCGGGRRRCHPRGAPTVQDAAERLRKSNLQVLRADAELDPRHSSL

SEQ ID NO: 950733 - protein, 36 aa, Homo sapiens
DGVLAAASAFFWHLVLFLVSPFSLEPVSTKTSFSFG

SEQ ID NO: 950734 - protein, 98 aa, Homo sapiens
RYSDMTQDMKVISQKSVFYAEGVGSNKGASHGLMVGGVVIAIVRVITLVTLNKKQYTSIHHGVVEVDAAVTAEERHLSKMQRNGYENPTYKFFEQMQN

SEQ ID NO: 950735 - protein, 34 aa, Homo sapiens
RTIRVISQEGFDLDVDQDIPMVQPLLKVRCSPIK

SEQ ID NO: 950736 - protein, 108 aa, Homo sapiens
FDISEVKMWVESDIDSGYEGSSVKNRCSMHKMCVQRKVQVIGLMVGGVVIAVVRVVTLVMLKKKQYTSIHHGVVEVDAAVTPEERHLSKMQQNGYENPTYKFFEQMQN

SEQ ID NO: 950737 - protein, 192 aa, Homo sapiens
VYDAQKSAQEEKGHKWSPCARIFSSELCEVGAQEIDGLIREEHVIIQAEFYLNPDQSGEFMYDFDGDEICHVDMAKKETVWRLEEFGRFASLEAQGALANIAVDKANLEIMTKRSDYTPITNVPPEVTVLTNSPVELREPNVLICFIDKFTPPVVNVTWLRNGKPVTTGVSETVFLPREDHLFRKSHYLPFL

SEQ ID NO: 950738 - protein, 53 aa, Homo sapiens
GIPGLKVLWRALAMLESEVFPDPLALSVLAGKDGEARAQVPPGPAGPAGERGA

SEQ ID NO: 950739 - protein, 60 aa, Homo sapiens
ASQFPLSFSLHVCLLPGLSAHLLVGTVRKLEDYISDCCMHFKGMACLLTSVHGPSTKALF

SEQ ID NO: 950740 - protein, 66 aa, Homo sapiens
ADSLAVIQFDPAPALVAWHLPPVRRQAMPFQCMRSLISSCSFRTVPTRRMSDTPGRRQTSILTVQP

SEQ ID NO: 950741 - protein, 49 aa, Homo sapiens
MSATDRLCSDILLVGTVRKLEDKSVSCMHLKGMAVSSLECKVHRPKPCS

SEQ ID NO: 950742 - protein, 49 aa, Homo sapiens
MVTPTLRDEDCRIALLPRNHKKNRCTDILPQNRCLPFLITIDGKSSIYI

SEQ ID NO: 950743 - protein, 52 aa, Homo sapiens
ARTYFWLGTVRKLEDKSVELHAFYKAWPVSSLKCKVLIDQSPDSDQLLIFMP

SEQ ID NO: 950744 - protein, 136 aa, Homo sapiens
CHISRLIQDWLCFYMLPTSKWSPRVMCEYDLVFFVTTSYGCFVTMLEAALYEDLDYHSQGAVERLLDSTQCQQMSQAPTKYNHVLGKSFHYSGFQNILTCCKIPEFFDHLVSLHRKLPGSQLAFSEDRRRAIMLLG

SEQ ID NO: 950745 - protein, 106 aa, Homo sapiens
FSRVERELMDVAYTGPSAGLSGGCCMSWLPNGQGDLGFIAEEARSDEAQYPCDDLGVVASLNKDNTRGDSGEYCRYKGSEEITPGPVDEWYLGVQVTHFEHKSSAA

SEQ ID NO: 950746 - protein, 77 aa, Homo sapiens
SRRKLISDTSSSARVLVGHEESELMDQNNSLHLTLRLGSPQAAMTLGIPIFSPMMPYGTGLTPQPIQNTNSLSISEE

SEQ ID NO: 950747 - protein, 39 aa, Homo sapiens
MAQYPCDDLGVDSSLNKDNNGGDQVEIAAIGSEEYPAVI

SEQ ID NO: 950748 - protein, 108 aa, Homo sapiens
RYLLCIPVLVHTASYTDVLISLHHMYVNSYPAHSLSITRITLTFLVPLLFHSKLYIQPSGARKKPVSHVSLALTWQSSGILKKQHIFMAVFLFIKIVCLHFTYVFTCI

SEQ ID NO: 950749 - protein, 32 aa, Homo sapiens
MADANQAQLAMNHLSGQRLYGKVLRATLCKHQ

SEQ ID NO: 950750 - protein, 52 aa, Homo sapiens
MLAGLGLCCHVPQILSGGCSTCKPMAALPGCCCKWDVIVVTICVDLGIAQIM

SEQ ID NO: 950751 - protein, 106 aa, Homo sapiens
MSGTQSMQVMLNTGPLFSWALSLPGPSLGHCFASGIWRSLVHSSGVPTRTQETALPADIPITTFLRQACKLKSVTILMAQKDLNSHLYTSPLDMERKVIAGAKIDG

SEQ ID NO: 950752 - protein, 35 aa, Homo sapiens
MRVPGMAGESWGPPTPPSRARAPVVAPGVSSERAV

SEQ ID NO: 950753 - protein, 125 aa, Homo sapiens
MIFTCISKYGPRVTKLHLTWETCHISKEVIPTVVGADTHKPKRWDSQDELKGFFSQFMNIEWSETSRLTRTTEMQIRLIGNCPFHYLLALASSPMQHCATDRNKLYDYWAPVSQIHGSETLHNAG

SEQ ID NO: 950754 - protein, 73 aa, Homo sapiens
NSRCDVDKIPGLLGVLQKLMASKANDHQRLCIFYNCIIRAHASVNQLTNNRKQIFILLIQSTQNTKTTKCIKS

SEQ ID NO: 950755 - protein, 137 aa, Homo sapiens
HADRYQNGFGFLILKLEHQSLSCLDLRSTIQLSNEPGNQNNLKLINAVVLYVGTQAIAHIPKQGQHTLQVSTTHSLSTQWISSRTVAVDLDSEARYISSGMQLKLSSGPQIATLNTSVAPVLYLIAEDNTEASKNRS

SEQ ID NO: 950756 - protein, 38 aa, Homo sapiens
TLDDSLTTTVLMYGEVGGCSSAWFSPGVQQKRRRRSVV

SEQ ID NO: 950757 - protein, 57 aa, Homo sapiens
SGLSRGSRPAVSLAPLAFINVEEAHHIEYEVKGEQGLRKLPEKNYQVLSFPDCFPGA

SEQ ID NO: 950758 - protein, 120 aa, Homo sapiens
AHRGQMQAIPENAYPEESGDEDEDEPGQGASQICSSDKRIACEEEFSDSEEEGEGVSKNSSNFKKAKRVKTEDATEKDPEAQTEVTEEEKTKEGGKPEAKGGTEEVKVGLNGTSPALASC

SEQ ID NO: 950759 - protein, 32 aa, Homo sapiens
MSHSKGEGVDEDKNTLRKYFTCTRLYERIGEH

SEQ ID NO: 950760 - protein, 37 aa, Homo sapiens
RTCLDVQQKTDRLAEVKLRFKDCLGEKAQEEKRLSLA

SEQ ID NO: 950761 - protein, 41 aa, Homo sapiens
QIIQTQVVIDAGVSRLSQPAHQPQNSHSEGSYVNECQPSQP

SEQ ID NO: 950762 - protein, 61 aa, Homo sapiens
LPAHIRTSVILMISFDWTSATHESPMNNSTEHLLEQEIHTGQVMSGGVTTVLQRPGAFSGL

SEQ ID NO: 950763 - protein, 59 aa, Homo sapiens
MLHILASKIPLTDPFYSLKLMSKPPYAVSIVLAAVIFKLGGYCIIRLTLLLKPHIKHMA

SEQ ID NO: 950764 - protein, 84 aa, Homo sapiens
VHGPRCWCKNDGQVACSLLFVHKEWPVHRALVFESKEGVCACPPSYFETTDWWVDYVLQQILYEREMLASFLSLVSGAETFYMG

SEQ ID NO: 950765 - protein, 70 aa, Homo sapiens
MGRLGVCQGVEKECERVLYHSRLVIRVLRQVLLTQRWGLRDGPSLESIKWQSRKAGYLSLYKAHLSPAQS

SEQ ID NO: 950766 - protein, 81 aa, Homo sapiens
MSRCFLAMAESVACGAHIRTMARGLASMVLSRLLRLPKEESPLDVPSCLKWGSRDSRGCGAAVYLYWGMACISRMLPNPVV

SEQ ID NO: 950767 - protein, 39 aa, Homo sapiens
MGIPKLHLGTLAEALMGIEVLPDLEKFIACQVYICTVAQ

SEQ ID NO: 950768 - protein, 66 aa, Homo sapiens
NAFFHDRQRLILSLEFLSVCHWASTIECVWSYQSGLHEDLHPTSETEHQVRCRLFLDVVVRQVQRI

SEQ ID NO: 950769 - protein, 107 aa, Homo sapiens
MAIGGRHPPEWIQTQRADLEKLTSLFCRYVSHYETEGPQVLLYFDFNPTSRECVGFEAVQEVPGGAGAAGQRNLYDYYNPERRCSVFYVAPSLSRLLATLCSAEVCQ

SEQ ID NO: 950770 - protein, 153 aa, Homo sapiens
DVFMYRAVPGAEEGRLCSWMRSSPPRTLSPRAVRMFADYLAHESRRDSIVAELGREMNRSVDVTTTTFLVMDASIYLHDQNPDAALRALHQGDSLECKDMTVQILLKLERLDLARKELKRMHELDEDATLNQLDNAWVSLAKGGEKLQDAYLH

SEQ ID NO: 950771 - protein, 52 aa, Homo sapiens
QHIQKRDLEAEHVEVEDTNLNRWTCSFRILVVSAKFEGKPCFTDTARILDDY

SEQ ID NO: 950772 - protein, 43 aa, Homo sapiens
GQEGGLYGRLNGGDRWRIASRHHMVRLYSKPLLEKMPDHGKKL

SEQ ID NO: 950773 - protein, 178 aa, Homo sapiens
GPDGDWACSQSMRYIYTRESRAGRGEPRFITVGYVDDTQFVQFDSDAAKSRCEPRSPWVEQEVPEYWYRETQKYKRHAETDRVSLRNLRGYYKQSEAVSHTLQRMYWCDVGPDGRLLRGYNQFGYEGNDYFALNWNLAPGPPRNKAVQITERKWEAGREAEQRRAYLEGTCEKWSADT

SEQ ID NO: 950774 - protein, 122 aa, Homo sapiens
MPLEPGDFLGNWSSPDSYPDQPSAQCGSSAHRGEGAWGQVPVICEARALPPQTEWPRGAPLLEEHHLQLCHSPSTWLHGCPAGLAEAWCQPAAFESSRLLCSHNSDLTWEGPEILKTSRCLL

SEQ ID NO: 950775 - protein, 103 aa, Homo sapiens
MTQMWGSFTWRAKNGTKISMPARWASCTAFSMAAGVAPCELASENIGSLFLAAPDEVSRLQAGSLAHGIADVGGVVGKVLGSTALAMPCILRNGATPVWRCGL

SEQ ID NO: 950776 - protein, 51 aa, Homo sapiens
LCRIASRSFYDSPPGSAGGYSGAPCSEGRCSMGMLSQRRLFAQYVLICCRA

SEQ ID NO: 950777 - protein, 118 aa, Homo sapiens
MQKGSRATSSNTDLMPGSPSPESQPNSPWQSDLCSTIPGKRTIIERSTGSSSIAEVQSEIERIFKLAKSLLLVVLDADTINHPAQLAQRPHMAPNIVFVKVSSPKVLQRLIRSRGNSH

SEQ ID NO: 950778 - protein, 47 aa, Homo sapiens
GCVPVSSSASPKVTTNHLSLITTPPTMSPLIAPLFEQQRFIAKARQY

SEQ ID NO: 950779 - protein, 33 aa, Homo sapiens
RLVSVFSCSQDLDRYMLLEDYTSDDNPPSHCTD

SEQ ID NO: 950780 - protein, 68 aa, Homo sapiens
ETNLPLVLAAGRTSEEQWDMSSLYMRHLLKGSLRNQHLDARITKPWVSERLENTVSSPSGLLPNHVPL

SEQ ID NO: 950781 - protein, 67 aa, Homo sapiens
EVPNMALGISVVPSQRLRSALGVPSYVSVPNDSSETSRNGANLLQRSSQKSSERLKYWLFLQKKSTR

SEQ ID NO: 950782 - protein, 93 aa, Homo sapiens
MRSSEISHSIIFEELPCVDRILKPCKDIFLVRDTRELQLEEELYAKLIFFYRSPRTMIKCTREKERSCCCRPEREGAVLLGVVATKEEHSLVL

SEQ ID NO: 950783 - protein, 154 aa, Homo sapiens
VDDHMRGQQHMGYAKMKASVEDFEEKLRKSPEEADRDERLQREKQERAEREKKGRGKGKTDKGTGEGTTADRERERARDRDRRQRSRPEVHVRRTSAKTRSLGPTRSEVRRGDRRMARAKPIVEGNVQWVRNKTMSHDGKGPWGRATRGTGEGP

SEQ ID NO: 950784 - protein, 129 aa, Homo sapiens
MIGTRCPLRQDNRSRRRRSARALRYILTLGGGTRAAGRCLRVLAAVTHVATQSCALVVSVSATLAVLKIRFKKGYRGTLPVSYITQYLLVWGNDRFFRTNIWGINQISGPGVSSSVLEDATPNVTKDEH

SEQ ID NO: 950785 - protein, 48 aa, Homo sapiens
GKSEEVEVNVRSTSRQINDIQLSRDMTMSVTASKDNTAKLFDSTTLEH

SEQ ID NO: 950786 - protein, 202 aa, Homo sapiens
QQESTTLPLPFTLTKQDKTHVIVFARVLLWRIFTVTSFINNVPYVLTAIIQELNPQPPMTLPVCTQLFNQLIAIISAGRLLAGHPVNHHTTSIISRALPTASLQSSSSREDFPRLSLLLSNDPLFAAVRPSRPGVITNILTFLHHLLIRSLPRLLLPSWGPPAVMDVGGGPPLEFRCMLLVGAAVVYIVVGDSPGGRLWAGG

SEQ ID NO: 950787 - protein, 38 aa, Homo sapiens
ILIRKKTGKVSHKQVAAELLDREDARNEMLEGEMICWK

SEQ ID NO: 950788 - protein, 79 aa, Homo sapiens
PVREALTGFIRSSGLNPSYTIVWLKIGMEGYPTAQVIWRVILLVSGNVVHIHKQNILDYPLSSDISFHTLHPDMHYSSN

SEQ ID NO: 950789 - protein, 103 aa, Homo sapiens
KKHSISNLINAHSATDEAGLAANTGLCIKFLSSVAGCNLGKSKLKFSSLPNIYLLNGCKGFTKIACKALKSGQCRQQVHNEINLKYRVQIIMISTVLQPQSTQ

SEQ ID NO: 950790 - protein, 96 aa, Homo sapiens
VESKGSNQPFGFLTLVGQAAWACCNRLSVISLGPGLSPTWWHQMQPHYGMVARTLSLGVAGTQQPPSTKAVSLRTSSEAGPLGWDQGLGDGPGFTQ

SEQ ID NO: 950791 - protein, 57 aa, Homo sapiens
KVNRARRGVVDLQDNPGVSMVAQEFGPQVLDGRVVSGCESREGPGPFFWYQSRIFTS

SEQ ID NO: 950792 - protein, 68 aa, Homo sapiens
TKQDHNWLIDSNNQYTHREEDKLGQGQQLECQEPSPQTQHKKLVAQLLNYESFLSPTTSGTQKSIDKR

SEQ ID NO: 950793 - protein, 76 aa, Homo sapiens
SDPDSRLSSCATVRYRLVEGLRSDQRTSSWASSSDAASEGLAPKLPLLPFPQLSRPPGAQSWLIESMEPSLVDLDA

SEQ ID NO: 950794 - protein, 39 aa, Homo sapiens
WRNGNVGLSGMAIADVTLLNGFHALALLTYEKLTSLSDR

SEQ ID NO: 950795 - protein, 54 aa, Homo sapiens
MSPVGCTESELNGLVTSAELCPQHPDPSMAACMQVPFLAAQASPETERLRAAST

SEQ ID NO: 950796 - protein, 96 aa, Homo sapiens
MFDDSVDHGCSCLSVSNRTHQIAMMLLSGASGLCRVHREARVPWRCAQVYLAEIPEDPKFFRDHNKLRLCFKDFCKTMEDALRNSKALIGPDQKEY

SEQ ID NO: 950797 - protein, 43 aa, Homo sapiens
FWFLVDEYSTPSSLFWLHPRSAANVWLKKTLFFGLTHLGKVRK

SEQ ID NO: 950798 - protein, 57 aa, Homo sapiens
THGASGATGRTKRQLTRIHRRNGKVGLSDMAIADVTLLSGFHALLTNLEKLTSLSNR

SEQ ID NO: 950799 - protein, 102 aa, Homo sapiens
DPDAAKSCCLEGTDEGPPEVFLAGICLPLWVSSTQHIGGDYRAVVVGLLTLPVENQLHNSHLQLLLIEIGGRILFSNASDLTGCAKLRIVIHLGQADGLYTP

SEQ ID NO: 950800 - protein, 146 aa, Homo sapiens
KVYHPDSRGDEFEVENLILHKDHSADTLAHHKDIALLKIPSKEGRCAQPSRTIQTICLPSMYNDPQLGPSCEITGFGKENSTDYLYPEQLKMTGGEADFPPGVVSSPTTTALKSPPKCCVLLTHSGKQIPARETQGEPSSVPSKAA

SEQ ID NO: 950801 - protein, 79 aa, Homo sapiens
SASHHNPDVGPKYLDLLYQNLLQVNLVYEMIQSNLKSIEYKGSFTSVYIQFYHHEMNEHNSREITRQDTTVGLLRLPHI

SEQ ID NO: 950802 - protein, 118 aa, Homo sapiens
SGIIQITGFHSVGNGRLAGWSRCRGELIEQAAQYTNAVRDRELDLRGYKIPVIENLGATEDQFDAIDFSDNEIRKLDGFPLLRRLKTLLVNNNRICRIGEGLDQALPCLTELILTNNS

SEQ ID NO: 950803 - protein, 45 aa, Homo sapiens
ARVISSATRLPTLLSRVGELCLVEFRDLNASVSAFQRRFVVDVRR

SEQ ID NO: 950804 - protein, 123 aa, Homo sapiens
YTSESRFSGWCRLSRDLSACKVFWGGRVSSGLGAPSQVRKCSRWDLSLGCTSGSDARCPPSSAGFRALLSYLLASSRLTLFALLKHCSCGLQWLPSPSLLPSAFSEIIWLKLLLLQVLRRADR

SEQ ID NO: 950805 - protein, 53 aa, Homo sapiens
SNATSNLALPLLVLCPLQSQFHCHLHSPSLSAPHFLPQPRLHSPSPSEPVDNR

SEQ ID NO: 950806 - protein, 237 aa, Homo sapiens
AFINCPPWCLAVHRSFDLPPMPCRPTSIELAGQHALSNPGIVLTFVLTTEQLHLGKIEELLSGENRGPILLPYQFRMEEIEGFRYRCRDAMRSVTKQAIREARLKEIKEEFCILRKLKTYFEDNPRDLQLLRHDLPLHPAVVKPNLGHVPDYLVLLLSVAWYSPHKKRKKLSSSCRKAKRAKSQNPLGSFKHKGKKIQTHSQALLRLLGLSGAEPLWRQATPSWTARSVLLTAERRL

SEQ ID NO: 950807 - protein, 98 aa, Homo sapiens
GAFGGTYILDVHNTIMDTTLPLTLQEEKEWGNPSSDDKHKNYIKRYCPYQNINPQHYPSIHITAYDNDERVPLKGIVSYSEKLKDAIAELAKDTGQGQ

SEQ ID NO: 950808 - protein, 42 aa, Homo sapiens
ISGTAPMGFCKLAHLIHRAQHEGSACVPNGLTALLGKGQAAG

SEQ ID NO: 950809 - protein, 92 aa, Homo sapiens
PKAGMIGVSYTPGYCFLKDLAKRSTLKMPGCYDVMADARNNLIPGDLREKDDIVTFHELCKSSMRHNLACNAIRQEAPKELLATSPCYPRGT

SEQ ID NO: 950810 - protein, 57 aa, Homo sapiens
TGQVTCYCITYRDYFIGLNSRVHCQSPANRFKCLSKLLNSILFNSTTCLSLCSDLFG

SEQ ID NO: 950811 - protein, 62 aa, Homo sapiens
IPKVLAANGHNSDCASSPVAHEDVEMRAALQFLMQHMVKRPVMLVTHKHNIGIMLIWNERKP

SEQ ID NO: 950812 - protein, 71 aa, Homo sapiens
MLVLSHCARPGVGFSGSQMTPFCQSWCFQEALGLDMETVGCSRALQEQGPFYSASVLGQFPGNRQFCSFHL

SEQ ID NO: 950813 - protein, 118 aa, Homo sapiens
VDQRIPRYGSGVILAMTGPFGPCTSWPGMLYTGSSCLQFPHHGSVELDEDVLLGVNHNGVKGLSHHDLDGSLVVLGHWLGFDDWLQFSFFESSDKLAEGVRVKLLWLHGELLPTPVPG

SEQ ID NO: 950814 - protein, 84 aa, Homo sapiens
MAILGLTERNNSMAIYIYAKAPTRCMPLTVYYNPSSDALRYSSPNEPRTSRHIFYHHYYIIGLDLSYSPSLFSYYLTPLPVPKG

SEQ ID NO: 950815 - protein, 33 aa, Homo sapiens
MAGLPVGLPDNSLDALFKIRSCMLAHPVTDNGE

SEQ ID NO: 950816 - protein, 85 aa, Homo sapiens
PDPDISTTRASRLHDYEFGFHLRQRISDAGGPGVTVTHLSPCGPGSCRHHFQSQKGCQLGSHCPHGTWPQAVTLHRATQCLELTD

SEQ ID NO: 950817 - protein, 97 aa, Homo sapiens
MTELLIGAARSNEAGTWSSIRAGGRMAYRVWDRNATAVDVCFMADEGLSAHGIPHVPQLDRGITGASHKRAAIGGQGQGHHIPTVSSKTHCPLAYST

SEQ ID NO: 950818 - protein, 38 aa, Homo sapiens
YASEYCNSLNEVYFDPLIPEVYIIHVVLPLYRQTPTGI

SEQ ID NO: 950819 - protein, 61 aa, Homo sapiens
MWKNDSKGCNYCGTFGHPVSLASEASELSEMSFKSTGGSEGRAIICCETKTNVTYMAMNPH

SEQ ID NO: 950820 - protein, 100 aa, Homo sapiens
IGRTRDERVELGLSLGDGKPDAKGLASGEGWWIPVNSQVDLFAIAWVGFIHGALKDLWRWIPWVPTQLWGERTKIEGMPPAPLGPLALDLCWSLFNAAQE

SEQ ID NO: 950821 - protein, 33 aa, Homo sapiens
ENMRGVRFDVHDVTLHADAIHRGGGQIIPTTRL

SEQ ID NO: 950822 - protein, 46 aa, Homo sapiens
RFWHVEIGENANTAQHPAESSVAEPTVTNILKTMDADHSNVTGVDC

SEQ ID NO: 950823 - protein, 81 aa, Homo sapiens
LNACELHPIRISGNASLYVGNLVTLPTCNALSSSRGSAFSHCDDIIDLDDPEAGGQVYRHVLVAPLESVVLADVVHIVQRL

SEQ ID NO: 950824 - protein, 45 aa, Homo sapiens
MACMKESQISSEIDLPPTNDEKKWARPPISMNFEVPFAPAGLRHM

SEQ ID NO: 950825 - protein, 70 aa, Homo sapiens
MCIRLIKWEEPCCDGGSYMKQTVPTSKPNSWSGAPTSNVANRSLAGGGLGGFVFNHCLAPGSGVTRGNVH

SEQ ID NO: 950826 - protein, 71 aa, Homo sapiens
CVVSRSLGHAHFLVYSDFGYSNRLVNLMAQDCLQGVRPLEHASPRNEHNEDERDPHCWGVPCHLNHTTPHI

SEQ ID NO: 950827 - protein, 165 aa, Homo sapiens
WSNQSSVAFTHRKVFKRKVSNNPNQRQLYRDQCVGPAIPISLCLTLKRLRVTTQKIGAPEAGPGVRAEKSSRAAKVPAAPCPVWRGRRLAKTPPGTESSPLAQNRSRNSPLWERASLGQASIQNGKDSLTMPGSRASTASASAAVSADRPRQHQRSMSASVHPNI

SEQ ID NO: 950828 - protein, 79 aa, Homo sapiens
CEVIIVSVEVQRHAVLLNLDSEHTGPYVLSRTLKHANMSNTLDPIHPPLPEEACPRINTAFGPNGPIIEKYTKTNSRHH

SEQ ID NO: 950829 - protein, 73 aa, Homo sapiens
RYPFVPDRPAWYDSRNHAELLRHLSAHHMRLDVDHSLTAGHLNLVDPRQADHQEGALPPWIPDDSMLCCCPWF

SEQ ID NO: 950830 - protein, 89 aa, Homo sapiens
  misc_feature (63)..(63): Xaa can be any naturally occurring amino acid
  misc_feature (82)..(82): Xaa can be any naturally occurring amino acid
  misc_feature (86)..(86): Xaa can be any naturally occurring amino acid
MLGRVQEIDAHSIGFGNRFGYPRSSAELLAMRYGMLVISRKCAHYDSRCPILVHCYMPVEAYXLQAYGCYKLTTADTPDHSXEWRXMAH

SEQ ID NO: 950831 - protein, 69 aa, Homo sapiens
MPIQSAVTPLLVLLTLIDEVVHCCSHSSVNSIYVHALACVPPGRQGLPGGYMACATAPKIRLVQLLAWL

SEQ ID NO: 950832 - protein, 98 aa, Homo sapiens
SRACCTCLHKAADTEVVLQCRDALICEDGRVPEYWTGYRLVLGRCIVMETSFTEGVQARHRTLGHWYRSRQMLHTRNCLSIGWTSGPGLSSLFAMAPT

SEQ ID NO: 950833 - protein, 49 aa, Homo sapiens
MQRTDQTKRGVWYCGYGRRFYIEYLSVIKLILPKIEETSARCWDQSVRM

SEQ ID NO: 950834 - protein, 69 aa, Homo sapiens
QFGLYGAASWGWSPVRYGRRLVTVRDLEAEQRDWYPSLATMQESLRVKQLAEEQKRREREQHIAERIVH

SEQ ID NO: 950835 - protein, 85 aa, Homo sapiens
VLQRSMDMRYASWLMTLFLSAKLLALFAPRVPYSIPATPCRKCHMKNSQQINLIVALRPSIREFEDPRAAPPPTRAETREERMDQ

SEQ ID NO: 950836 - protein, 114 aa, Homo sapiens
MCNTFDKVRTPQTLSGAWITVVSYFTLATKGSLEEIPLEHWDHCEGSNILSSDSTSCCTDAQIFTRLFLSMRSSRVQEQVADGPLRRALKPRMYGQCHNKVDVCLHVAFSGVDV

SEQ ID NO: 950837 - protein, 76 aa, Homo sapiens
VSEKVGQGNKYSELSLTEVIRKVEIRERLQYELRISSAFTSITKPSTSIRSASPETPSSIPLTDSSRTLKYTILID

SEQ ID NO: 950838 - protein, 91 aa, Homo sapiens
PVKYLRINRSLASPDDAENLSGLRGPPQNPIRGTEQRLPSIGGSNANSSSYEQALCRHLQIWKVLRKSMQLKEPQTWSDLNLKWKKGMENS

SEQ ID NO: 950839 - protein, 59 aa, Homo sapiens
LTSPVCRAFFHRPPSFPLRTSLCRQHYSIIAPGMRFHPPFQQASSPEQFRLRASSVCLY

SEQ ID NO: 950840 - protein, 109 aa, Homo sapiens
MFRAAILQGSVREPAIALCPDLHVIGALDEQGLLEVASCFVQIGNAVLAEVGDVLGAFRGQQAEEGHLDVGSVGSQIVISIAEMEATIDGFSKPDVFLLLALETPTGSE

SEQ ID NO: 950841 - protein, 34 aa, Homo sapiens
PLKEDQSFCPTVNLHKLWTLLQETDMGECVRRTC

SEQ ID NO: 950842 - protein, 78 aa, Homo sapiens
SLGIIIVSRVLRVPASSMESQQVGYKTRIIEVCYVLKAEGRCRRGLGGMSRRLLHYSSVAMTHSFLSSDIKHTDWYNE

SEQ ID NO: 950843 - protein, 109 aa, Homo sapiens
DISLAKVQTEMWTDFLEACGTLGVLEEKLCLPHDIREEKGLVKVGISDSSITRHHRNEGSVQMKLPLLHGGLRICSHPRILNSAPGTCANLVSHPLRVSSVSPVTLKQF

SEQ ID NO: 950844 - protein, 54 aa, Homo sapiens
IALAVRLTANMTAGHYSALIGSATLAISTINLPSTVIIFTILIVMTILEMVANP

SEQ ID NO: 950845 - protein, 164 aa, Homo sapiens
YTYQGYNEIESDPVILITGSHLTTCNTGCVKVDITYMRLSAVIVQDVSFSRNTEKGRAAGEAILRAENPFPSTKTASFNPASSCASEGGGSVFMLETKLLSQLPAKSPRLTDKQRRTIQSDYWALKSSVQLLPGNGGQTVCVPFYRGWTECGLPGELGKPGPNA

SEQ ID NO: 950846 - protein, 94 aa, Homo sapiens
VVRFRVFVIVTVSTRLIYQWQSVNTGTPGLVTLLCLWSGLSWERLTGNKSPPWVYRSESEKEEGLVHLHTSMSSPATGCDSVWDPGFVGGQELH

SEQ ID NO: 950847 - protein, 30 aa, Homo sapiens
MGVERAVPKENLDSIYEKFLKTSRSKAVFK

SEQ ID NO: 950848 - protein, 82 aa, Homo sapiens
MVSLRILVVGLASISNGTGFTPGLRQLSQRQHRWPPKHVQEQNGTEIFLLPLFSYVVCLPIIITRCLMRVTLEFSFSVPKTC

SEQ ID NO: 950849 - protein, 83 aa, Homo sapiens
RVSLRQICRSAISGIRSTRRFEKHHRKINEMEAIKQGHKNAYEQTQEFQTVLPFRRLFLGKLSFGNRGLKNYNSSGLLIGRQN

SEQ ID NO: 950850 - protein, 37 aa, Homo sapiens
TCHQSSSSFIVYDAPDKRTWERARSLKSWGAVEQGYR

SEQ ID NO: 950851 - protein, 36 aa, Homo sapiens
WCSSNSPSPPTSTTGCTLKARPFPDGLAEDIDKGEV

SEQ ID NO: 950852 - protein, 70 aa, Homo sapiens
TGSSRTALPYFIPRVSRNTNPQDSLVQKTVVPGFPLDPFLRCVDCIPQETVTGHLQSHHSSTHRSCVDAN

SEQ ID NO: 950853 - protein, 31 aa, Homo sapiens
MRAVKSVPVGYAVVFGFSLFLYKKFNRAAPL

SEQ ID NO: 950854 - protein, 47 aa, Homo sapiens
VDSRDPAQSPGKGGCISRPDVVQVKLVALLGALQVHFVARSGSEESQ

SEQ ID NO: 950855 - protein, 108 aa, Homo sapiens
WCNLEDPSDVCNDNNDLRLFLPLLCHKVHLEGTKKGHKLQLDYIGPCTSIPPCLDSELTEYPLRMRNLALRTPGHPCNERDEDNKPSELRSKKLRGEEDSMRIEKAAW

SEQ ID NO: 950856 - protein, 38 aa, Homo sapiens
TVSHVVTATLHWQKNRRLLVCDNVDMDSERTPQGVVTT

SEQ ID NO: 950857 - protein, 157 aa, Homo sapiens
SQSKLISCTKFKQCIKLPASYVYEVCVKNEMSFVFRLTVTSQAVSYMYIAHMSNTTENKIQQSDNISWPSRIFGYWDTQACTEILGHDIRGSQLDVYLQNLPKPRPCFPMSWVTSRHAAPPVQMQAIPEEAIPEESGDEDEDDPDRSISICSSEKRI

SEQ ID NO: 950858 - protein, 97 aa, Homo sapiens
QAVNIDSTVKAMLTPNDGCYREEVALEGYYKDKLFDQRIAPFGELAREKNLDLPNGRERAIQRYGEGRPIPWGTSEPELMLRGPCRKGKCSNIPPKC

SEQ ID NO: 950859 - protein, 34 aa, Homo sapiens
KQLIQTQTNQQGYISGKTQYKTKMPLVSLIGLRS

SEQ ID NO: 950860 - protein, 76 aa, Homo sapiens
RDRVYDPLRTDEIKGMYKRNAEQDWTFHDVPASWDLTAAEAERQQHNQQLGCRSATYAHVAAGVGNYLVRRILHAK

SEQ ID NO: 950861 - protein, 30 aa, Homo sapiens
MQALAINSCGGFSAKQQRADGSHKGTTYFC

SEQ ID NO: 950862 - protein, 35 aa, Homo sapiens
MDTSRVPIKLASVTKVLGRTGSQAQCTQVRVEFMD

SEQ ID NO: 950863 - protein, 54 aa, Homo sapiens
SIGSEPSALTPSLVVLSYGNAKVLNIQFHKLYLTFFIPLIKLLALGSKAMVHRN

SEQ ID NO: 950864 - protein, 37 aa, Homo sapiens
GDNAAPDDSILQMLPVSMALLDPRRYETALSAYSPWK

SEQ ID NO: 950865 - protein, 49 aa, Homo sapiens
LAVTLSARVLTANPGPFLVSEGKKELDFLRALGPGLWLEVPRLMNPMHA

SEQ ID NO: 950866 - protein, 85 aa, Homo sapiens
ILRSILAGMSMAVILALCSLVVDSFSRVVDDVGQICILEIIYADTSEINISHKILIAVSNLQLVLRAKDGLFFSSYRQHDRPRIH

SEQ ID NO: 950867 - protein, 53 aa, Homo sapiens
MRQSLPLNELNTGYELDEGSIIFNKFRPVISYTTEEKPIFTLNTVASADSVSI

SEQ ID NO: 950868 - protein, 39 aa, Homo sapiens
PVLLALLLLILVLLASLGVQSTQLLEAFLVFEDGWQYLL

SEQ ID NO: 950869 - protein, 39 aa, Homo sapiens
SVIWRDTGLAEGAASSFARSCEGLLPPHAHPLRPPCQMR

SEQ ID NO: 950870 - protein, 114 aa, Homo sapiens
QVDLEVPARSVEGREKFGAVYLWDSGSSVGESTGHNKVINSVYIKQSRPYRLATGSDENCAAFYEVPPFKFTFTVGDHSRLVNCVRYSPDGNRFATAQCYGQIYIYDGKTGQKV

SEQ ID NO: 950871 - protein, 44 aa, Homo sapiens
SLGDAGPVVPPASCTSWSPCPPSTGFDFSFLPLATSREGSRMVA

SEQ ID NO: 950872 - protein, 61 aa, Homo sapiens
MLAHVCDDTETTESGVGERCHTPARVVHVQLTGGSGTAMRSRELGLGEATDLGDILLRGKA

SEQ ID NO: 950873 - protein, 129 aa, Homo sapiens
SRDPPFDRTVVLHGYVPCSSCDRTSPGSEPCDRSHSFTRRQERLSACSVSAELNAYRKHEKRSPCCHLLLSSENQLYEQEGAVEFQHGRRDLVVALRMPMVLPFQGDFAGIEAFDQAGSGFLVLGRLIP

SEQ ID NO: 950874 - protein, 54 aa, Homo sapiens
DERVVNNQIGFTTDPRMARSSPEPTDVPEWCMPPFSSELRMTPKAVHVRFANVV

SEQ ID NO: 950875 - protein, 86 aa, Homo sapiens
  misc_feature (39)..(39): Xaa can be any naturally occurring amino acid
MFGRWYNWLRCWALGMHSPTVLVVALARACLPQYKRPRXGWEEGTPVGETWRWWTSLFIPDVNMDSKGVFKLCADPSRLGSPLGGP

SEQ ID NO: 950876 - protein, 69 aa, Homo sapiens
EDPPHVSDKRVGQVSSPSRATGRRDTQAERGRCTSMSTSLPKASTVVTTFCLGMECADSCRLSLPVTPS

SEQ ID NO: 950877 - protein, 199 aa, Homo sapiens
MYTCGTCQCILVPTAHPGAGARGPSHSFTRRQGEALLRVVVVQSLSITEHEKTCPCCHLLLSTVSLLQRKKEPSEFQHGRRGLVVVLRLPIALPLHGDIAGIEAFDQAGQADLVLGQLIPGWGQGAHLLFSGLPFGFGDGFLDGGWEGSVGDLALVLLAIQPVLVQDGEDADHTVRAVVLFLPRVCLGIIHLHAEHVRA

SEQ ID NO: 950878 - protein, 160 aa, Homo sapiens
MTCLLVPMGFKLDVPRSSWATLWLECGYTQGSHRVSMFAELTLSGIQCLQPLVGVNPSTLHFFQSGVAHLRGHGRSRAGFLRLPSGPRMYSDLLTQALEGGVHLEVTVTNHIGIVSPVVAGTIVSLLLRCLGQEAEVETSAGGPGGPGGPGGPVDQQDRI

SEQ ID NO: 950879 - protein, 81 aa, Homo sapiens
KHSFQMPNHISNDSTAGLSAAILAGSCGEGRQHPKAAITGKQLEFDYVSICVCVCVCSVCVSSIMWGVNCHLQCGQQSKWD

SEQ ID NO: 950880 - protein, 102 aa, Homo sapiens
DSELRMTILGSPFVDRTPGSPAHPGRREDADLKHVNSDSRHRLTIRYSRLAKSECNLAPFCCDTSWYTLASLILLEWVLVLVVLPLEPRPVVRLFLASAPPA

SEQ ID NO: 950881 - protein, 33 aa, Homo sapiens
SRVSVGGELEKHRSDSTVVWLVYLGPKGAGGSM

SEQ ID NO: 950882 - protein, 149 aa, Homo sapiens
GARAGHLHLSPKNSYHGDPPTVAGHGGGLLQAHGNLVNFHRMIKLTTGKEAALSYGFYGCHCGVGGRGSPKDATDRCCVTHDCCYKRLEKRGCGTKFLSYKFSNSGSRITCAKQDSCRSHLCEGDKAAATCFARNKTTYNKKYQYYSNK

SEQ ID NO: 950883 - protein, 143 aa, Homo sapiens
MRPSWRPAGEYHADGGGLDDVLVVVIFQKGYTIGFMGHDRRTRVAAVRLGLILVVGPASRERVDFVNSATSRHHSNAQLCLAEEITFMEPEGRFYTVFCIAFSGIVGSIERWHRSLDVRGHLAKCRQDSPPGSRGWYRIGMVP

SEQ ID NO: 950884 - protein, 32 aa, Homo sapiens
MLSAIHIHEVGIGALQHAFLLVFPLLLFWRGM

SEQ ID NO: 950885 - protein, 52 aa, Homo sapiens
GTLRIPESTVSLLLRPGFGLSDSCSVPMTGARGQVLEVVRSPSPPLPLMLQQ

SEQ ID NO: 950886 - protein, 58 aa, Homo sapiens
RTARDIVRKGKMKNYAKHNIARTKPVYLLHNELARNNFAWRARAKTPVQQTSYLRTAT

SEQ ID NO: 950887 - protein, 53 aa, Homo sapiens
MTLAFPFGGSGSALRRNVSLPRLSEGRTFALSDFIVDPWDAELWWHLLSGGRP

SEQ ID NO: 950888 - protein, 63 aa, Homo sapiens
VQSVPRHEEVENPALNRQKPGASCKVGLATDEPGYRRTVEELQTPDELAALTMADGITYLELL

SEQ ID NO: 950889 - protein, 97 aa, Homo sapiens
ACQLRRFLPLADVPSRDNDQLGVCRYILVFCQRQSLVSKEKAAMLEIIISPFNLSSMTLYQSKFICQVLHEDTDGTGHDNSTKPDNCNLILGGLFFL

SEQ ID NO: 950890 - protein, 53 aa, Homo sapiens
ERLLSAFGEREYTIKKETERREKVRREQREKGVNRKGRSVQGSTGRGGGTAEP

SEQ ID NO: 950891 - protein, 43 aa, Homo sapiens
AAAQCTAASEGGVDGELRVAPGFLVYVRAGRAKTCSRNSRFSV

SEQ ID NO: 950892 - protein, 162 aa, Homo sapiens
PVYLWSPGRLLRAPPVDIESSRRIPDLPSAGSPGVPPRTRSRLVCNPFYTYWGPAPLMLAAHPGGVRKHTGSPPLNWGCSSPLRPQRLLEGSKAGVPSRGGPPPGVKSRPVNPWGTRNIFPARVYPSRCFTRLFLHCPLLQQRGVCTAGLNQEIPVLSPLSL

SEQ ID NO: 950893 - protein, 37 aa, Homo sapiens
FNDKAHIYPIMAHISYYLNTISLHIQPIALDVRLSAE

SEQ ID NO: 950894 - protein, 56 aa, Homo sapiens
PGNRAYAKNGAEINSRTMGMKHVGMLHRLQSIDRQYTPVALQRMQQWFGLDVRRMA

SEQ ID NO: 950895 - protein, 34 aa, Homo sapiens
MAQGWRWHLLGALHTQSDVYIVVRDSNKCRASLR

SEQ ID NO: 950896 - protein, 98 aa, Homo sapiens
VHTPRTHAELIELQRSETYGFLFRLTVVGKTGIVFANSSLDIVLHDTYSVVSPTSHYVLINRQLYLPIIGGFISTRFPLILRATPLTQQGASSRSQHL

SEQ ID NO: 950897 - protein, 48 aa, Homo sapiens
MLSKWYLYTGVSKFTIMGDYSDAWSDMNLALQGDLKNQNRCRNRMGSP

SEQ ID NO: 950898 - protein, 33 aa, Homo sapiens
AEVSVDYSVQANWIGSTAPGKREAWAPEHPHCL

SEQ ID NO: 950899 - protein, 74 aa, Homo sapiens
MSKPPSQGQSYSAAVLLKLGGYVYHTPSHSFSTPRPNTQPPPYLKYPYEASFIHKLTICRLHNTDLNICTYAYS

SEQ ID NO: 950900 - protein, 69 aa, Homo sapiens
PYEDDGACVFKEGKYKQLYYSIRSSCLGWRYESSFSNEEAQKALALRLAAVLHMGMCHMKLQAFSAVIP

SEQ ID NO: 950901 - protein, 47 aa, Homo sapiens
APAYLWSFQRHLLAVLGCAQPFDVATTPVKFCHSLDMMLRTLGFNTE

SEQ ID NO: 950902 - protein, 73 aa, Homo sapiens
EILRLENAVQEESTQKLVFRTELARDNGFYAWYMLSRKSAVAEQSLRIQPCFVPPGSEDSAQFTGREANSRIA

SEQ ID NO: 950903 - protein, 59 aa, Homo sapiens
VCQGPFYFISRVDTVGQADRSASIGVCAAKQDGSASLQRAKLCALVQMVRDNITVILLE

SEQ ID NO: 950904 - protein, 55 aa, Homo sapiens
GFSYGLLVLFPRLRGKRWLGREESQVGDGKEFTEKQTEPTSKPNTWSGAPTKLPI

SEQ ID NO: 950905 - protein, 47 aa, Homo sapiens
MDYAIAALVVDNGSVMCKALLRGRRCPPAAVFPSIVGAPQCTSDVTG

SEQ ID NO: 950906 - protein, 197 aa, Homo sapiens
WRGGPCRRHGTHPDRVDAICQDAQHSQDQHQQQGPATRRRSKINSRLKHRATPSATRIQYQDWAKSSKILTLMSRALRLSIRPLIPCCMVVSLVIPVERRWSNVGPWTAASQSWSSVGGGHWGRVPVCRLVITVIFQGTPGRQKFRVYCNRRLPQQSCENSYLPTVHGSSGQEDTHTWCVGHCRPFSANEMMELDRM

SEQ ID NO: 950907 - protein, 36 aa, Homo sapiens
MEHLQVVKIMALPAGEDLNAGQVCREVVSEQVSVCD

SEQ ID NO: 950908 - protein, 105 aa, Homo sapiens
RYRKAFSRSPLNSVRDAFPTCHQGCNSCAYQILSGGGATLRSVMMLIHLWHTSSSFPLPLQRHSASRASWSIQFQIKDRDHPLLYLTFGQGHTHQLAKVNDVGPE

SEQ ID NO: 950909 - protein, 63 aa, Homo sapiens
MCMTLCPYIFLFTFCQGVELYPLLSLQVSWSFLRFVGLVAAGPLDLLAKKCARCPPSGAPLRV

SEQ ID NO: 950910 - protein, 137 aa, Homo sapiens
LIGEARLRRYSLANVLPSSYSADFLVLIYGGMPYTRHLEASAVCIPYTSLPLSRNQKKWNLVSQTTSSSESTESTSTYMHLIEELATLPRRSYPDLFFKKVAATDYRPHPPPTSRRAYTRILLINLQHLHPQHCSGF

SEQ ID NO: 950911 - protein, 143 aa, Homo sapiens
LAAGCPVHHGQSDMRWCKEKYYKNDGIRELFYKGTAAIYERLPKNVEHSTNTLALLPLPLTPQRATDTPTQSLLHLSAHVTCSVHFVKPCCATECSQVPLQLVLVNLTPRPCMGQPLHLYLANCNSSSVTGYHTIAGPFGPCM

SEQ ID NO: 950912 - protein, 40 aa, Homo sapiens
MTKTSGLMLIGNTQPRCNEVTEVIVTSVPGQELQVEVFDK

SEQ ID NO: 950913 - protein, 66 aa, Homo sapiens
SAITGKAVINRKLLICAFTLHYVTEWRKPKRGEHVAKPQKDRCLKRKNFKVFLNRYEKGKGDVKLM

SEQ ID NO: 950914 - protein, 138 aa, Homo sapiens
NQVKIKRSFDRNIQNNTRMRIQKKALLGDNSLSTMFYKMLIRKGWGINPLDTSSKNSGSNGHLNSYKIMGLLGQMYRGRDRKAACLAPLQLTGYNLRQESISSVTRVLSQCVIVILNALQFKEVLATYTLLTGGQVCH

SEQ ID NO: 950915 - protein, 42 aa, Homo sapiens
LACCCRLCPGSPWRERRVWPNLDPCGACWCSRLFLQRELKHS

SEQ ID NO: 950916 - protein, 61 aa, Homo sapiens
RCAPDILTAHHSGTASRRSLTLSSLSSRRTHLHSSGVRTTTNEEEHDPEKALQLKYLLSAF

SEQ ID NO: 950917 - protein, 104 aa, Homo sapiens
ASSTVSPPMPLFPITSSLSNTSAWPGEFHLRRPVAAHAPRGVHVLSCGRPCAAFSSIVSRLQRYCNCNSQPPTPVKIAVRKAARNELRAILRLYVKQLSQQRHP

SEQ ID NO: 950918 - protein, 39 aa, Homo sapiens
PAADERPRRAGVGRHQDDPQAGLTNLTRNLLPLVHQPMQ

SEQ ID NO: 950919 - protein, 45 aa, Homo sapiens
VAKVKIVACDGNHTDSNTTECIDNIDLYTPISVQHKLKKQNLSKQ

SEQ ID NO: 950920 - protein, 82 aa, Homo sapiens
NPSIRNEPSLIGDGECVLVECPGLRTSLKQRATQQLRPVLPGPSTYALRVRWQRKHHDQWYPFVQAVAITGPALPDGRSPSP

SEQ ID NO: 950921 - protein, 77 aa, Homo sapiens
IPAVKQVETSEDVYSCAIFASHAGMCQGHASKNGRMVLALLDAVATFRIRHRARDQLKRRIRVHTGEADCHSLVPSL

SEQ ID NO: 950922 - protein, 44 aa, Homo sapiens
MLTFVVLWPTQDREWSSASAPIKLLRMAPCHYQHAAFLPYRHAA

SEQ ID NO: 950923 - protein, 129 aa, Homo sapiens
QDAEIDHNAGSFYYIVEVINVRKKPSLVCVVVAESVAFLTVFLSGQAGGPAFLEEERQPSISVFHWDNKLDVAGKAESAKVPLLYPKLGGTQPGMALGYQAGDMARHLPVQALWAPGPGSLEGLLCWIP

SEQ ID NO: 950924 - protein, 48 aa, Homo sapiens
MRSVPDPSTRALLLLALLILYALLSRLTGSRASGAQLEAKVRGLERQV

SEQ ID NO: 950925 - protein, 62 aa, Homo sapiens
MVGYEVLYYPKPVISQLVAKHGDRYTSRAEQMCLYSPGWLRTPALLGTDLQQGNVVLLMQRC

SEQ ID NO: 950926 - protein, 191 aa, Homo sapiens
QRAIKTKCGTVSLKNLLFSYHCCFWLAGLAVMTVSILALALKSDYISLLASGTYLATAYILVVAGTVVMVTGVLGCCATFKERRNLLRLYFILLLIIFLLEIIAGILAYAYYQQLNTELKENLKDTMTKRYHQPGHEAVTSAVDQLQQEFHCCGSNNSQDWRDSEWIRSQEAGGRVVPDSCCKTVVALCGQ

SEQ ID NO: 950927 - protein, 153 aa, Homo sapiens
  misc_feature (1)..(1): Xaa can be any naturally occurring amino acid
  misc_feature (105)..(105): Xaa can be any naturally occurring amino acid
XLLLNESFWCDSSEIVDQLEVVIRNITLLLQTLDTLVLKQCRDYGSRPSRALKTKLKECEASKDQNTPVVHPPPTPGSCGHGGVVNISKPSVVQLNWRGFSYLYXAWGRDYSPQHPNKGLYWVAPLNTDGRLLEYYRLYNTLDDLLLYINARE

SEQ ID NO: 950928 - protein, 69 aa, Homo sapiens
IGTNPVYLLRIELTRNTLQGEPQLRPPKPDELPMNSYNSTPVYVDNMCEESMGGGDNPTEPALFLVSCL

SEQ ID NO: 950929 - protein, 200 aa, Homo sapiens
SPLMGSRGSPREGSPEHHELRPSELRLFEQSATRKTSSDGTWLTHARELLILFAVLKGPGHPVDHEPPVIAQGGKQPRVSRGPVHGIDAVLVLLVGGDHVVLQGLLALLFRTVVLLVTDVIVVYQVAEGLRRDGHHVGKDDSAVTAAREDQLVMRVVVADVPHPVGVLLQGLHGFGDISGVPELHLTVVSAAGQVVLLIG

SEQ ID NO: 950930 - protein, 39 aa, Homo sapiens
GGRRTSSLTYDSSLRSLQILLLRKKSNFLAGPNLKLLLT

SEQ ID NO: 950931 - protein, 59 aa, Homo sapiens
LGWSGGGCEQPVGTPAAGGCGDWGQLVVRKGSSAAAAHVSLGYPLLATSSATSTRAGHS

SEQ ID NO: 950932 - protein, 103 aa, Homo sapiens
GRAGLTAHRRRARGSPSVSASNTMRLSALSLLLTLETRGRRGSRCDPRGGAVEGGGGQAEPAGCPQPPASPAAAAPGAPPYPPPHAAAAARVLGPLHAGRARS

SEQ ID NO: 950933 - protein, 128 aa, Homo sapiens
MACEIIILGARVSGDEHQWSTLLYSLDHSVVYSLIYLVSWMMSMLQPKTSVKSVRGSSFEQHGTSNRLLFESLILSRFPEPHTRGRTCAAVIPRDGTMGDAQLVLGLLTQIAQTVDFTDILTLGPKAC

SEQ ID NO: 950934 - protein, 52 aa, Homo sapiens
PSLDYVMAAVNLFALYLTCLTGSQDRAAVVTIPAGLVHVPRIRPTKSGDLRS

SEQ ID NO: 950935 - protein, 72 aa, Homo sapiens
MRKTVTAAADMSYGIIFFLGKGYMKLGNRTNIFTVILEISRISPIRVYFNLFSNLKIMYFNHSPIVYAEDIT

SEQ ID NO: 950936 - protein, 122 aa, Homo sapiens
PKTEWLSLDCLQLEVVHGFYKDHMREASDVCYADVHRDGTGLLDFERPEDMTYAVRKLDNTKFRSHEGETAYIRVKVDGPRSPSYGRSRSRSRVVAEAVAEATAGVAVTPQGEAEDHHAILP

SEQ ID NO: 950937 - protein, 37 aa, Homo sapiens
MRHREVGEVEERHHRGMGLVGLHQAEAIGSTSSHSMK

SEQ ID NO: 950938 - protein, 91 aa, Homo sapiens
MTWPKSHEEWPPGMIKSSARRNVSSHSIQLQNWSKFTHFLRVLLKAVGLVLLLRLLWLLFQLPQLQNEKDLAVLSSIQWVLDGLPDHVKGS

SEQ ID NO: 950939 - protein, 111 aa, Homo sapiens
INWKNLPRFTNHITYLFQITHGTPGLHQQDAISEFSPLKLYIRSLVSVSFSIEITASSTPAQHPWAWRATPSPLISASDLYTPHVLLNSDQDVPRALPLWSSGESISHTGH

SEQ ID NO: 950940 - protein, 123 aa, Homo sapiens
NEKTRDIKIPPLLAEQKCRGVYLALMIIAEMNVEPALYVYQVALIRRGLYLPICCLTYAFRHGHMAYQAHPWLLQLGRAEKERSRGYRCTRFGYDLKTVLVSPYTEYSGRGYECKSELPVHQL

SEQ ID NO: 950941 - protein, 49 aa, Homo sapiens
YRIQHVPLSGGEHDSDYDPISLTVALHGVIQPIRKIQGLVMNALNHAQE

SEQ ID NO: 950942 - protein, 65 aa, Homo sapiens
VIVVSMGIYVASTYHVACALFTQWPCTVDYASACSYLYDTQKVIRRAEVSTMYGVQNICIPITRM

SEQ ID NO: 950943 - protein, 56 aa, Homo sapiens
MTQQALTGHVTGHDILVVTATLPQHLLVGMLDGLNWFLCKYFCIFLRNLLPPLLTL

SEQ ID NO: 950944 - protein, 161 aa, Homo sapiens
YTYRGYLWSSLEACIWGCWHFYTQSVVSLGQEGFCPPLMSQPCQPRVPNLVKVLDDMNSSAVSPYLHLWTSLSPRSLCSRHTGLSAVPTTVCYRCGFFSLQRSSPKYLCDSLPSGLGSDGTIRMRPSLTPPLKLLPMSTGHGKENKQKNEKEKKEEKFLLT

SEQ ID NO: 950945 - protein, 47 aa, Homo sapiens
MAPLTIHSIGHQWCCTYEYADYGGLICNSYVLPPIIRYNHGGLCNQV

SEQ ID NO: 950946 - protein, 97 aa, Homo sapiens
IIKVTQKLQSPEGNAPLADSSLSLSRGIGRYTRSAMYSRWDMYTRKYSAAKSNVDKKTKAQVLATVTHTVGGDKNGGTRMIQLRTMPRYYPTEDVPR

SEQ ID NO: 950947 - protein, 145 aa, Homo sapiens
FNSLPISITGRRPTGNRKPTLKKKLQFAKRLPEAESEVERTSVVLVILVEVIVLLVVLPDVGHRSLHPGAAVLRPIEACGQHPICTVGQVTCAVRRETCRRDEHGLQQFPEAISVTYGSRALGTRLLAIYTVFGKSKFPKSSVLI

SEQ ID NO: 950948 - protein, 67 aa, Homo sapiens
WTISHQTSVNADPVSHEIWTSETLLQVLVELWLHHYSYGDVSTQCSTLHAKAGRYCNYTDSGDSQRC

SEQ ID NO: 950949 - protein, 58 aa, Homo sapiens
VWYGAGHPYSHSRFLADSSTIRTFRFEAKLQIMNIINITAVREMTEPTDDRIEHVVYA

SEQ ID NO: 950950 - protein, 119 aa, Homo sapiens
  misc_feature (13)..(13): Xaa can be any naturally occurring amino acid
MKSQALLEVSEDXKKLEAFLEFERKASDPNRFTNRGGNLLKEEKQRAKLQKMLPKLEEELKARIELWEQEHSKAFMVNGQKFMEYVASTMGDASIGERETHAGKTPDEPKTDETEMLYG

SEQ ID NO: 950951 - protein, 75 aa, Homo sapiens
MAPLSATHELLHERLRIGKAYAQQLTDVGRRWRQLVETGPEYGTVEKAWIAFMSEAERVIELHLKVKRSLMNDDF

SEQ ID NO: 950952 - protein, 70 aa, Homo sapiens
RIVTNPRRNEYHAGAVAGLSAAVRLAMAPPMECARRQQGSPMYVFLHGIHMLPHIPDEHVDVRHYHPLPF

SEQ ID NO: 950953 - protein, 139 aa, Homo sapiens
MHDMLLIRKGTTPVFFVSEYVCSRTTRAWVTNPKWMGLNHCALEALNSTTNPLTATALIYAFGAGITAGAGTRLVLQLLLDFGWVKYPPLKTTMKSTAALIFSLPHYNLHWAICRLSLRKVYYTSSSRMNLTPSVGMSH

SEQ ID NO: 950954 - protein, 67 aa, Homo sapiens
DHQNGNLYIRTNGEPLLYLSRHTVKPRDLSTFLFGSIEVQPPMAVDTRGRSALTSLSRTPDPSDACA

SEQ ID NO: 950955 - protein, 148 aa, Homo sapiens
MTPAPREACCATSSSAHQSPWSIRNPEGWGPGGSQMLGHLNPREPLEKFLFCSVHLLLVTGWSWDRYIVCVWVELELPLRVGSRGLVALLLLLLLLPLLHVQHSLLQLSFLGLQAALGPPRASVSWLRRLALAFSSASRAGSSSSKRL

SEQ ID NO: 950956 - protein, 113 aa, Homo sapiens
LQSATISPRSNSNTHTKTPVSYHAAQIILTTSPTALTSYITHSASANSNTTQRTPQSPSITPTLQGLQNSHSPLHQLLRCTSQQASLTPSLHPHSFNLTGQHTLCASNHVLLI

SEQ ID NO: 950957 - protein, 45 aa, Homo sapiens
NQIKTRDALSYAPTEFSDPSLTNEEASLNVLLYILILGNTPHPPY

SEQ ID NO: 950958 - protein, 44 aa, Homo sapiens
MLLSLALPPSQIPIPRIKQLLVILQQYKTQIVFLFNPPTPNTTE

SEQ ID NO: 950959 - protein, 72 aa, Homo sapiens
LYIARAGIRIICFLLSSVDSYARADANTAAIQAILINNAYRENIEFHTSPSAMHFSSHSQVMRPTTTSPSKR

SEQ ID NO: 950960 - protein, 157 aa, Homo sapiens
MTKVHALNDVTAVYEHTADILSVHRAGEMRVAVVTPISTGSADPQKLISNEVLGPGHAWVLSGLGSSILRSSVASKFWKVVLNLRFPSKDFLSEQILLVEEQDHRDGAQPSVVPDALEEVQSLLQAVGLVVLPDDHVVAAGAPRRYGATRDVRSLAG

SEQ ID NO: 950961 - protein, 72 aa, Homo sapiens
MAGQLHHWGWPTKQYQHIIPWSGQVFPDHVGSHKALAVGPIFWGMIQSEPELTAIGIAGLQFLYSPPGDDIF

SEQ ID NO: 950962 - protein, 38 aa, Homo sapiens
IIGIALQGPRLGRDEKVNGMEISLDCDGSLGMEGLQGQ

SEQ ID NO: 950963 - protein, 54 aa, Homo sapiens
AGPCITADKSTRTIQETSTQPWAEQLWDESTDRQLGELEIHSLKDRIIPNMPHR

SEQ ID NO: 950964 - protein, 41 aa, Homo sapiens
RVTTHHLSEYRPSIRDNPSLLPQNVFCFAVIFRDAFLPSPC

SEQ ID NO: 950965 - protein, 158 aa, Homo sapiens
MDMSIQHTMDESGTSTGTGVSLGGVILQSGAHDRIKATQSATPKCNIPPAPRHAFEIYRRFYLAKHSGRQLTLQHHMGSADLNATFYGPVKKEDGSEVGVGGAQVTGSNTRKHILQVSTFQMTILMLFNNREKYTFEEIQQETDIPERELVRALQSLA

SEQ ID NO: 950966 - protein, 67 aa, Homo sapiens
PSSDDNCCITVAQRLMIVTVHHDICSAFVNFGTFYCDHRLLYLRYVIYYKHIMESLDELRCCMTLIS

SEQ ID NO: 950967 - protein, 32 aa, Homo sapiens; identical to SEQ ID NO: 875313

SEQ ID NO: 950968 - protein, 50 aa, Homo sapiens
  misc_feature (20)..(20): Xaa can be any naturally occurring amino acid
  misc_feature (26)..(26): Xaa can be any naturally occurring amino acid
NQKYSSTALYNFTGVLFYPXYKLRDXGVSLHHFRGIYGSTFFVATGFHGL

SEQ ID NO: 950969 - protein, 110 aa, Homo sapiens
  misc_feature (54)..(54): Xaa can be any naturally occurring amino acid
  misc_feature (93)..(93): Xaa can be any naturally occurring amino acid
  misc_feature (108)..(108): Xaa can be any naturally occurring amino acid
FNEPPSGQKIPKIILVILEPIPKIFPGLLKNQGETEKPKKMIKEIGGLDKFEAXQTHENESVKRLSLSLIEKDFSVEEQKDQNVVPETTSEGXTFQVQDGAPGTFNFXVM

SEQ ID NO: 950970 - protein, 34 aa, Homo sapiens
MWSRRVSQSCPQRSERDIGLKSFSEKAKGYRVHL

SEQ ID NO: 950971 - protein, 35 aa, Homo sapiens
PPIPLMPYTPSDATVYAKPYAAGLHPRGWPMIVPL

SEQ ID NO: 950972 - protein, 54 aa, Homo sapiens
  misc_feature (54)..(54): Xaa can be any naturally occurring amino acid
DAPFEETCPGDFIYRSYTQAPSFLGRKKTQNSQGLLKAKDYLGKKEFCNQKIAX

SEQ ID NO: 950973 - protein, 30 aa, Homo sapiens
MRTLCSETIFVLLTNLLKETRIFHDDLLLT

SEQ ID NO: 950974 - protein, 64 aa, Homo sapiens
GGPPWREPGLVTKQKGRKFASKQNRGTKVGKARRSARPNIPRLELTFESGERPNTALQPLAAQF

SEQ ID NO: 950975 - protein, 31 aa, Homo sapiens
GGLNLMKLYVHALDDGDPHAGFGLRLAKHQN

SEQ ID NO: 950976 - protein, 78 aa, Homo sapiens
IWLPDVSSQPILRLGPFDASLGLGTHPADTVGVPWAGRRQAEGGEWMLGRQKGCGRQKVETGSNENPCLALRVWVEQT

SEQ ID NO: 950977 - protein, 60 aa, Homo sapiens
RSVPELVPCHSGTFFGDIFESTTRVTLQWPHPQAPVPAALLVPETPGLLGGSNKANPDQK

SEQ ID NO: 950978 - protein, 60 aa, Homo sapiens
GFIVQGTIVRSLLTAFFVSIVSDAVEPTCVHTVRPERNSVFQQGDEEQDLAIMASLKTTA

SEQ ID NO: 950979 - protein, 155 aa, Homo sapiens
DAAWCLMFVSISWVAWRPLVDPQVCWAEGGGQYAVNASPFLALSTDTSRSELAFLRKRMNTKPSRGTYHFRAPSRIFWRNVRGMLTHKTKRGQAALDRLKVFDGIPPPYDQNTRMVLPAALKVVRLTPTRKFAYLGRLDHEVGWKYQAVTSGYRA

SEQ ID NO: 950980 - protein, 77 aa, Homo sapiens
VQLNLLSLAPASSPCIIGIVHLGFLLTVLQGSVSRHGTSRRVLLDQSPPESVHLDTSDNIPYGSIEAESHKWEIKSS

SEQ ID NO: 950981 - protein, 65 aa, Homo sapiens
MCLLIFIAGAFYVFWTYWCRFSPIGQVAGRCGEVSKPSDRRLRCTKETCDESSSEVYTAVANIPV

SEQ ID NO: 950982 - protein, 31 aa, Homo sapiens
MDITMIRRAVHDDHRGCTQTCLSLHQQHHSP

SEQ ID NO: 950983 - protein, 71 aa, Homo sapiens
PKEQKDSRDYVYYLAGENITRLKEYEKAFKYVRKLMQTEPQNNQAKELERLIDKAMTKDGLVRIGNRDICH

SEQ ID NO: 950984 - protein, 37 aa, Homo sapiens
EAKDLPLDTSESSSDTESFYGAVKRPVNLSLSPYALL

SEQ ID NO: 950985 - protein, 53 aa, Homo sapiens
TGRTSLRLLASMLRHPAPCVAPSECIIEPSLRQIARTSYCDTMICRMYYAHLQ

SEQ ID NO: 950986 - protein, 70 aa, Homo sapiens
SHGLRCFAQTAGEGNSAAVTGVGEGGPQCRWVPRVAHMESLVSMLGTDLARDRGHSASGPKANADTDTRA

SEQ ID NO: 950987 - protein, 98 aa, Homo sapiens
SSRQHCSTVTFCQPQQCPETVFAFAYQRTDQYRNSASALLSALSGRLDDGDFGPIEDCLLSMPLLRLRASMKGLRTDKDPLDEDHLSQNQPGCDGNAD

SEQ ID NO: 950988 - protein, 33 aa, Homo sapiens
TVAHLSKVIMTNFGIVEGLMTTVHAITAIPERL

SEQ ID NO: 950989 - protein, 77 aa, Homo sapiens
AVPRGFHSSRVNGNKYKPERVPSQDGRRLSRALARHLFSLLLVPAHLGRVQLLLAQPLAQWGQVCLGNLLAELQSCS

SEQ ID NO: 950990 - protein, 63 aa, Homo sapiens
SIDVASAGFVDILLVSTVRKLSDEISKLHASKGIAFSSLKCMSIDQSPVLINTHLQTREYRAR

SEQ ID NO: 950991 - protein, 44 aa, Homo sapiens
MTRVTLAVHSLDQYTGLWSMDLATQVRRQAMPFKCMQLTDFILK

SEQ ID NO: 950992 - protein, 40 aa, Homo sapiens
FWCSLCGNLGCLSELHHLKGMPVSSLSAMSIDQSPVLINT

SEQ ID NO: 950993 - protein, 62 aa, Homo sapiens
MSLTRLTTVGFPSAGKMVVLPGMPPGRGVLPVPPSRRDYYDLSPRREPSPPPPGLVGRDGSR

SEQ ID NO: 950994 - protein, 45 aa, Homo sapiens
GRLTSAGQLGDRPCLQVRLVTDFLAQFPHSAHHKYVQQAWQKADI

SEQ ID NO: 950995 - protein, 36 aa, Homo sapiens
MLGDRPRLAMCISSLISSSSFRHSGHHKYVNKPRRR

SEQ ID NO: 950996 - protein, 52 aa, Homo sapiens
VLMSASAGLSDILLVGTVRELEDWNSVTLHALETAWPVSSLECKVHRPKPCS

SEQ ID NO: 950997 - protein, 161 aa, Homo sapiens
MRAECVEKSFACAIIVVTELERMSCMCSKNLIIHIFDDQRTGLSSDADYLVERHKAGPVLYRAIGQSPWIPLHPCRKASGQLLDVHILQERAVRPEDRQHLFVLVFIVAACDLPALSLFTSDNLHKRIYVRSGTIENLDFPLKWKTGTNTNRTWPTTPGDK

SEQ ID NO: 950998 - protein, 58 aa, Homo sapiens
LFIVQVVHLDPAHIDMSGFADGVGQLCRTARCGWLMPIVLYEILVDLKWRRLRIFYAC

SEQ ID NO: 950999 - protein, 52 aa, Homo sapiens
MTTARREDPLELSLNKCQQYLTNPQVLNSQSCIRNYGWGDLRAETNLRAVNA

SEQ ID NO: 951000 - protein, 41 aa, Homo sapiens
MDCRPVKETGHAFQCMRSLISSSSFRTVPTISLCDKPGRRQ

SEQ ID NO: 951001 - protein, 57 aa, Homo sapiens
QRIPDGKRCQRHTILIQQVRDFLTEPETICRHYPGGQQGRTGHENTHRHQLVYCRNM

SEQ ID NO: 951002 - protein, 44 aa, Homo sapiens
ALVDGPLSSVGEGPAFHVHLLTAFLLSFRTVPPKYVRQAWQKAD

SEQ ID NO: 951003 - protein, 56 aa, Homo sapiens
PRIPWLYIVRSEQALVDGPALHSRRQAIAFKCMQLTDFILKFPHSAHQKYVRQAWQ

SEQ ID NO: 951004 - protein, 68 aa, Homo sapiens
IFIIVMLLLVSPEGLCILTLVTHCQIETLTGLCRLTPAYNARISGNPVTDQKLTCINKQNIYLLTRIS

SEQ ID NO: 951005 - protein, 128 aa, Homo sapiens
MCSCCGLQMIRVHVHLFPDVSTESLVNRCFCPEGTMNYAPGFDVCVKTCGCVGPDNVPREFGEHFEFDCKNCVCLEGGSGIICQPKRCSQKPVTHCVKDGTYLATRGQPCRHLLKHYRLQVLVLELQI

SEQ ID NO: 951006 - protein, 86 aa, Homo sapiens
HYRPGIREVLFRRTPYSHHPVTGPQRAAPLTTDPIQSSPPSMVHRRSDVTLLAEALVTVTNIEVINCSITEIETTTSSIPWAIETR

SEQ ID NO: 951007 - protein, 80 aa, Homo sapiens
MALADSCRSWRRSMVSGGSWSSCSIQCLGVAYRVLRGVLIPFLSDIEAWPNCTYRGERVGIEEVPTMQILSRERTSGTEK

SEQ ID NO: 951008 - protein, 50 aa, Homo sapiens
MKQANNDYTPLTPSTLLTLGEPCPRIHRLYAPNGPLSKNSQKNNSHNTPV

SEQ ID NO: 951009 - protein, 126 aa, Homo sapiens
DASLKDSGCRCQHRRACDAALKVDVKSPKTKTTLFGQLYFPDVSVCTIKSTTFKAECPLPQPQHWRVTLPAPDLATFFASAFTSKVLKSRRRSPRSRMPHVAPSQCHTIWVTLKGPKVQANLGAPE

SEQ ID NO: 951010 - protein, 57 aa, Homo sapiens
RAHVARIGEEYEEQGVFVQSVLPYFVATKRAKIRKPTVDKPSPETFVKSAIKTVGLQ

SEQ ID NO: 951011 - protein, 106 aa, Homo sapiens
MRAEAILEWTWVPGPGYSLWYQAGLVIPEALARHPMGDCPPPGLAQSQGAKSSLQDTGQDHSREGAPMPAPPHAIGGQACGSKPLSWACPESLGPSRGCMFILSPA

SEQ ID NO: 951012 - protein, 87 aa, Homo sapiens
MDHYNFKTQFKLPRNALQPFSHFYIQIRANPNMFLNDHLWSFKWSMEILQQRTAVLFKRTSTLALKESNELIYTPGHIFKGHYLPYV

SEQ ID NO: 951013 - protein, 74 aa, Homo sapiens
VEDKPTPRNLSCELTIMSDVCMKKGDYVRGGIYRNCCINCLDLNSFMKVWGMFMHKVIALADLKLPHTMVHINP

SEQ ID NO: 951014 - protein, 63 aa, Homo sapiens
GAERRRGKYELVVVVSVRKKGIKDKAADKENENEGVIRKGDKRDEDRGSSVGESHVQIDKGIH

SEQ ID NO: 951015 - protein, 118 aa, Homo sapiens
KLVIYHGNCSSYLVLSTCKDLGLGLPFMLYLCLAILLKHRDHIMRNGLDYHELEMHFDRLVRKHTPGARTDAGLRALFADNLQSEVWDSEEGAEAQSRIYDQAISSPQYGPTRSPYFD

SEQ ID NO: 951016 - protein, 98 aa, Homo sapiens
  misc_feature (40)..(40): Xaa can be any naturally occurring amino acid
ARYRAEDHSQKITPYYAMKQLEKRKEKKSGMALLRVSHVXRLECSGMIPGHCKLRLPDSKDFSTSASHVAEITGTLEIHGWGYTVQLGGIVNFRKMCL

SEQ ID NO: 951017 - protein, 43 aa, Homo sapiens
MRAANTEESIAHQFATVFMATAATAVILFQPNEDKCWQEHHQY

SEQ ID NO: 951018 - protein, 56 aa, Homo sapiens
YVRTVVSVLSRSEVFYSKRSSASSCSIFTGHVFKVLEVGVPSSWTSSTEMYASVGS

SEQ ID NO: 951019 - protein, 50 aa, Homo sapiens
DVTAVYSAVCVISVVRELCCCEETQPYGHILLAVLQPSVNSLPVPCPPLS

SEQ ID NO: 951020 - protein, 78 aa, Homo sapiens
YEGERCAGTDPDGCEFATAFACFAEAASGYIPADHLRALLTTLGARFTDEEVAEMYREAPHLIRKATSHYVEIQPQSQ

SEQ ID NO: 951021 - protein, 53 aa, Homo sapiens
VRWPTVLCKETADFTDVHKRALADEVELKVTDETGPKGEERVKQKALGGLRQM

SEQ ID NO: 951022 - protein, 38 aa, Homo sapiens
MVVTQENQREQEGRMDGSELSQQLNEKAHIEATHVGSP

SEQ ID NO: 951023 - protein, 213 aa, Homo sapiens
MPVSSRVGTFGCSDSGQSGPCGGLFTLPFVAGSSSRGVYYLMALTPQNIQHCVVAHEMTSSKGKEEAFVRELLQKGLHPLPYSLTPLVDQLPAEVAVNLLSSDALLGAVMAEDDGAEVPAVIVFDEILRRVGDLKTACSQGFPAAGGVWFKAKMTCEKFNPFNGWHCSSTFSTAPVCFLSRSGSWGTAQVKTGTPRNLLSTSVKELTMSINQK

SEQ ID NO: 951024 - protein, 85 aa, Homo sapiens
LAAALGAMLEREPEKAQTRLIEQRRLSERGARQARAELSLAVHHCPPLSFAAIGDLLLTSIPLDPGKVCAVLLIQQGAHCQSRLG

SEQ ID NO: 951025 - protein, 75 aa, Homo sapiens
APVQLVRQCTGTSCEHNTWRDLTQLHPEGLRKPCVLHNAEVVVLIATFDCEVDDEAVKDPSLLGPKSPWPVAQRQ

SEQ ID NO: 951026 - protein, 183 aa, Homo sapiens
IEIPVDSSPRTKVVSLSGKCLVVMLEPGTGVVGQNSSTRPEVVERAEMCVVGIELGLPWEVVDGSTKADVVVGGAGLVSFELGQLWNVVDSPCRVVEPAVDSVVCGDLLLLWTGVDPSRSPEAVVFVTVKSVVSVEPGLLWKVVYSGPRDGAVVLPGDNVVSVGPGLLWEAGRFLTEAWHGGT

SEQ ID NO: 951027 - protein, 56 aa, Homo sapiens
NRHGSRILYGDDLVRYRELECNAAEIPLIRQEYCGAGLEAEWQDRLRFAPDRYDAH

SEQ ID NO: 951028 - protein, 76 aa, Homo sapiens
MHIILSRAETVIIFKCVNQLFKFFIIHVFYTFFICIPYSYLYNSNFFIIPVEKHFIHWYLAFFFSKELLTVHRKMT

SEQ ID NO: 951029 - protein, 44 aa, Homo sapiens
MTPVGIAMILVAAVQYARVSTSIPHCKSSWCAHTHHTPLGTPIA

SEQ ID NO: 951030 - protein, 65 aa, Homo sapiens
HNRGGSEYFLFGDRILRSVPSRRGGVLARLVCILILSNNAPSSIYPNKRAIGRPKGGGPRKVRRG

SEQ ID NO: 951031 - protein, 35 aa, Homo sapiens
QRVPVREVSSIVMRAARTGRDSRSRIAVIRTDQTK

SEQ ID NO: 951032 - protein, 36 aa, Homo sapiens
MSVSTFSTLCKHAKCQQGTGHGCIIAQGGAHAKSQQ

SEQ ID NO: 951033 - protein, 45 aa, Homo sapiens
MFCGSHRISEHLYTLDSGDIINALCFSPNRYWLCAATGPSIHDLG

SEQ ID NO: 951034 - protein, 55 aa, Homo sapiens
GLSNVRYGRGFILIIVVMKLMAPKIEERPARCKEKMVGLQSEFQATRKPQAGYRA

SEQ ID NO: 951035 - protein, 41 aa, Homo sapiens
MTQSNSSTAYYNFSVSSICTLLQASEYFESPFTISENGFFI

SEQ ID NO: 951036 - protein, 118 aa, Homo sapiens
MSRFNICSQHAMGHIDAYLVLPTKSFIIYFVSHSASLLLSHNSSPQLFAICPALSTILMDPVVSTCHLVQRPLLHSNLAGVERCHAKREQRMPGRQENRGLWAEPAQRLLCSFPVRSG

SEQ ID NO: 951037 - protein, 63 aa, Homo sapiens
TRCPEMSIRTVFRQSKFRHVSVQPVTNEQCYKDIRVIRVTWDSTFCAVKPKLLAVIVERVPSS

SEQ ID NO: 951038 - protein, 144 aa, Homo sapiens
WMLEKMLTPHAQMDTTEGTQEESGHAQTRETHRVTRGTCVKELPQHHKWLIVWSLETLCPSCNWAPASPHAISTIQAAGCEKNFSLPELKCFISDSQLTRDAALHLRLEDRALRCSGSGGLWRDSTLARRRGVKRVTWAPALQL

SEQ ID NO: 951039 - protein, 41 aa, Homo sapiens
RRGQTQDTELVQTAQQETEPSEVGSCGGASGEEQRYTCHVL

SEQ ID NO: 951040 - protein, 69 aa, Homo sapiens
RVKICWDTGMMVDVGGSSSSSVWVVGVGEPGDSAVDTVGDWDKEDDVVSREAQRLGEADNVPLKYRKSA

SEQ ID NO: 951041 - protein, 84 aa, Homo sapiens
PWSSSSLFAECDALAGLPLVALLQVRAESAVAISCSKSKDDVTQYLLTVTHGFPDRDRDDEAIDLSSVKIYHEVVSQVPDSQVP

SEQ ID NO: 951042 - protein, 86 aa, Homo sapiens
RRIQQGMRATQDTELVVTDQQEIETFQKWAAVVVLLEKSRDTHAMYSMRGWPKPLNLRWEPSSQSTVPIAGIVAGLAVLAVVVIGA

SEQ ID NO: 951043 - protein, 92 aa, Homo sapiens
SSAGPVASSRGTVRRPMLEGRQQNATMGTVEPGKTAPISGVEGLREALMAGNGMCISALLQKAPPKVPTSGRFYLLVGWSPQAQCPEFGPRH

SEQ ID NO: 951044 - protein, 88 aa, Homo sapiens
DCQNQQGCRVKLRTLELVETDQQEKNSQKCAAVVVLLEKSRDYTCRVQHEGLAKPLTLRWEPSSQSTVPIVGIGAGLAVLAVVVIGAV

SEQ ID NO: 951045 - protein, 95 aa, Homo sapiens
ISGRSDSAGQSPIQTGLDKPGNKNAHDGTVDWKMVHLRVRGSEPLMPDMACVSLLFSRRHHHRCPLLERSVSCCSGLHKAGVLSLVLGIPLAGNG

SEQ ID NO: 951046 - protein, 69 aa, Homo sapiens
RFINIRSFTRVVELVDEQDGQVIDGFPQLDYLHVTDAHREAEEDPSKEKLSAITFSAQRRSPSVTLLHP

SEQ ID NO: 951047 - protein, 120 aa, Homo sapiens
MSAVDPAELHSFYWFFGLAVLEEDEHFLLPDLTPGSLEVRSKGVGKHILLMTYPGCYGTEDPPFVRNSSGSRYITAMIVDQFGEIVGGTKMLDYSNNFCLLISAIFTIIECTPEFSNSAS

SEQ ID NO: 951048 - protein, 37 aa, Homo sapiens
QQRRRGQSQDTELVETDQQEIELPEVGSCGGAFWRRA

SEQ ID NO: 951049 - protein, 105 aa, Homo sapiens
MRMLALTIGYTSRKVVDVGGFMESSETSGIVQASLGIIGTGLVLVPLAEFLNGLLDVPRVNRNGGSPTLSPGYGAKNGVHQNMIPVEQILHEGSWCNFLPVLSQW

SEQ ID NO: 951050 - protein, 35 aa, Homo sapiens
MNAFHSKILTPGTIKAVALVGLEEVLTPRLAGKWL

SEQ ID NO: 951051 - protein, 62 aa, Homo sapiens
FSYTAHKREGFGIRILWDKQTRPSFINRWNPGSTTCPMPLSQNIRWLAQTEKTASSAAQLGK

SEQ ID NO: 951052 - protein, 54 aa, Homo sapiens
EVIASRILRNRLVQCSNAAERRTFVLAAHIPYVELDIFVSHRLHVETHSVNGAH

SEQ ID NO: 951053 - protein, 88 aa, Homo sapiens
SRPCTFQQRKSSITTAGRQAAQCHDGTVDGRRSISCEGSGAPHAVHVMCISALLQKATTQLATSWNVLSPAGSGLHKLSVLSLVLAIP

SEQ ID NO: 951054 - protein, 50 aa, Homo sapiens
QALCPVLPIGAIRYCPCSRTWIQTLLCSTPCRRLGKRQRIPFTLVLLLHS

SEQ ID NO: 951055 - protein, 61 aa, Homo sapiens
MAVCACVRVSRFTPGASHESQKRIRANLCEQDSCSLSAHRDLGSRRTPGISTGVNLADSRT

SEQ ID NO: 951056 - protein, 72 aa, Homo sapiens
AEEGTAVVSVLPSKRAVSKHCDLATALGIPGFIGNLPVSLSQKERCTFWLSLRVKIPVFIPQHSRGDCSVMK

SEQ ID NO: 951057 - protein, 42 aa, Homo sapiens
LAALEIPAAVGANPEAEVLWEDVTRRSRGRFTGINLRVEEQS

SEQ ID NO: 951058 - protein, 48 aa, Homo sapiens
MLVRLDRICSHGNASKLEWSSSLHGIHMLLALVPDLEEAIPGPCRHSH

SEQ ID NO: 951059 - protein, 166 aa, Homo sapiens
VRGGKRGEALPRSSQRWRFGRSFGGSRFGGTLGAGSAALSTSSEPGAKPEVDPVENEAVGPEIHQPEPPETELLSVARKERGWRTVFPSREFWHRLRVIRAQHHVEALVEHQNGKVVVSASTREWAIKKHLYNTRNVVACESIGRVVAQRCLEAGINFMDYQPTPW

SEQ ID NO: 951060 - protein, 102 aa, Homo sapiens
TRSIPSLLGLALEQLQLEGGVESLPQACMWRRSADSTSALCGRGHCTPGFLLGGSVMGNQLGPYGIQNLVAMRDNVQEDQIRHKLSGNYNYPTNRPQTGSKR

SEQ ID NO: 951061 - protein, 140 aa, Homo sapiens
MALRSQLRGTRFAGTLGAVFAAQSTSSEPAAKPEVDPVENEAVGTEFTNRNPRNLELESVARKEWGWRKVYHSREFWHRLRVIRAQHHVEAIVEHQNGKVVVSASTREWAIKKHLYSTRNVVACESIGRVVAQRYLEAGI

SEQ ID NO: 951062 - protein, 32 aa, Homo sapiens
RDRSTTAHVLRILKRHLETVPIQRRSPEKFLG

SEQ ID NO: 951063 - protein, 38 aa, Homo sapiens
APCILLPQACESTTLNEPSFSWGFDQDPALKGWGPLPQ

SEQ ID NO: 951064 - protein, 79 aa, Homo sapiens
GSGEGGWSYIIAIWEDGIQKRVIQEGRGELPDTYNDGTKATYHYRTLHSDDEGTVLDDSRARGKPMELIIWQEVSSCLV

SEQ ID NO: 951065 - protein, 94 aa, Homo sapiens
QDVHLGDTEVMPRSSAQMKNHCLNEVHCCVCNGYRESFPTIQNLSDFILSDTSDAVKQGQSGSWIVTTHADIKQTLPSRTEGTTVTRNCCPFIP

SEQ ID NO: 951066 - protein, 214 aa, Homo sapiens
YRKHNQPSDVWTSLIGSMLGGHRNYLNGVRGWCCTRRNLCALPVIPGRLYKEDDVVFKKAQKFGEADEVLLELRNQLLGTPVEGDLEVLPVLRNFLEEQHNMLVIISAHHSDEITRKSRVNPYVAQHKLTGLATWNKSPDPVITLLLPKQDGGEIVALILFQLIDSDIIFSESLSSQRIASLQAYHIPIPLELVVLKSAVKYNGTNSIELATEK

SEQ ID NO: 951067 - protein, 40 aa, Homo sapiens
MSVASALRLQPFCHSCRAAGCWLPLVVQRRIFTVVPGPWV

SEQ ID NO: 951068 - protein, 47 aa, Homo sapiens
SSTTPLASFTTVASEPPVKLEPPPVESVSQATIVMMPAPPAPPIQGT

SEQ ID NO: 951069 - protein, 68 aa, Homo sapiens
FERERRLRNPKCSGKRRLAAVVVVGSCREWSSIARTPIQGQRRERTAKVVRDDIEDEVLPTFLISSVN

SEQ ID NO: 951070 - protein, 36 aa, Homo sapiens
KDVNTNQMDLGVAVLANLRRRHLDDLNMAAFEHHQY

SEQ ID NO: 951071 - protein, 112 aa, Homo sapiens
GHCQIPPSKAGISPLFNCALWGCGSLGSEYSYMFCTPTPIAPSCLQDFVRSCQNPADSRCTVLHVFPGHSRLIILLQREMLVHFEHHQYKYIRPDIICNWWFWPLGLHRGLF

SEQ ID NO: 951072 - protein, 86 aa, Homo sapiens
KQHEAHGLEITWGGSHSNKKLLASLGIDTRNILFTGNKKQPVIVAMYAAGLGMLEPTKESLKPLSAAEKIASIGQTATMCFMLVGY

SEQ ID NO: 951073 - protein, 86 aa, Homo sapiens
PAVAPAFRLHDSFPLAVDLAAWIGLMEGDETFPPSVSSQWTQHPILSQVQQACADDRTQITDSTVVAVFFNTQQAVILSKKHLGDV

SEQ ID NO: 951074 - protein, 82 aa, Homo sapiens
LEHKGIASALSHSGWHINELGCQASTELCCTEHAMHSTQSPFRYAWGTLAYQKHGLPRLQGKQVPEVDGKADDITWVLLVQL

SEQ ID NO: 951075 - protein, 78 aa, Homo sapiens
NCDISHYWNCTKLATDKNDPHLGDFIETHNLHEQVKAIKELGEHVINLRKMESALNLTWRNISLRSTPWKNTISSGYR

SEQ ID NO: 951076 - protein, 119 aa, Homo sapiens
PGGTQREPSGSQSRVWLSRRAARESRKARMDSSELSPASDKQAHLDSTLVGGPPQPIVNGRPEPVRVGNSQSGQVLHDSDVDETPGIVHHLEYTLQVWNAATRTQSPEPTHHIQHNKTT

SEQ ID NO: 951077 - protein, 68 aa, Homo sapiens
ILEFYGDYIARLKLAQKVKMSTHARPICLPCTMEANLALRRTSKQHLRDHENELLNKQKCTCSFRPHE

SEQ ID NO: 951078 - protein, 92 aa, Homo sapiens
SGAAGTCCLIGLMEARNLPPSVSPGIRTILAGEEAVLVDRAQITDSTVVFYAFYTQQAVILSKKHLCDVGDDSAGYSDSCSPGDPLVLERPH

SEQ ID NO: 951079 - protein, 145 aa, Homo sapiens
MGLEKKCVARPPLHFPQCSVAHCSSISSEGTELLVQFFSDLIVTDDGFSASYKTLPRATAKEGQGPGPKRGTDPKVQLPPKSQPPEKPEDSPSAPDAPPCPKQCRRTATCRAALCPRLWYFNVPPVRTRYSCRIALLGLTAVTAF

SEQ ID NO: 951080 - protein, 64 aa, Homo sapiens
DPVIYALKGIPERYKSITNGYYNKYINAKQGSITGITMVQACYMLFTYSFTYKHLKHERLRKYH

SEQ ID NO: 951081 - protein, 214 aa, Homo sapiens
MIPEWGPARVALDVLSPEEALKQYRNERTFVATKPLYVALAQRKEERQAHLTNQYMQRMAVYEAVPNPVINPYQPAPPSGYFMAAITQTQNRAEYYPPSQVAQLRPCPRWTAQGARPHPFQNMPGAIRPAAPRPPFSTMRPASSQVPRVMSTQRVANTSTQTMGPRPAAGAAAATPAVRTVPQYKYAAGVRNPQQHLNAQPQVTWHSWCHVQVR

SEQ ID NO: 951082 - protein, 61 aa, Homo sapiens
GAVRNTAGPDYITDKSTGLRVEQQPFDGARASRTNDKPGGPHYILRWTFAQVIMENSTSKV

SEQ ID NO: 951083 - protein, 70 aa, Homo sapiens
MMPMVHSSPSADKPAKLKAVPVIVDRTDKIIQVIIGVQDRKACQEHKQAQGQLLHVRALACVVHQAGAEV

SEQ ID NO: 951084 - protein, 82 aa, Homo sapiens
YGQNKLCTERKRCLENVSILKMFAEVARAEGDCVSRSEMAPAPAGEVLLGAPPCTRMAGFMAAAIGPRVLRTLPLHQCWFPD

SEQ ID NO: 951085 - protein, 37 aa, Homo sapiens
ALGTGVSCTIRSPLLGLAKTGSIPIRDPFFRSAQRWI

SEQ ID NO: 951086 - protein, 81 aa, Homo sapiens
LRTPGTSQDRNELLQKYKSLWMFEIPKEESEADFLRKRGKPMACLPTTIPKRSLGLWFLWTPAQLVKLQGRGSCACTAVMG

SEQ ID NO: 951087 - protein, 43 aa, Homo sapiens
SDSGPFFMMPLKRVAQAMDWKPPDFFFFLFLGTHQSPGGPAVM

SEQ ID NO: 951088 - protein, 45 aa, Homo sapiens
LGDLFGLQYLSSQGPALVPMSLLGAMETLRQYGGASVLKKGVRLS

SEQ ID NO: 951089 - protein, 54 aa, Homo sapiens
TSYSGPQVPIRGAPCSGLQYLSSQVAPYVPMSLARGHGDTACQYGGASCLKRGG

SEQ ID NO: 951090 - protein, 38 aa, Homo sapiens
  misc_feature (36)..(36): Xaa can be any naturally occurring amino acid
WCNPQITIYGDLEEQCLMGRGIGVSLLQLVVERYEXSC

SEQ ID NO: 951091 - protein, 62 aa, Homo sapiens
MGDEDDEEQSDAVVPQVLDELGLSLTDELSEPPLNWGLLSVAAGGKKAEAAASALADADADL

SEQ ID NO: 951092 - protein, 58 aa, Homo sapiens
MQLLTSGPRYDYSSSFSIAEGLQDELSWFPLRPSTLSSMISFGEEHRREKGNGLLQDG

SEQ ID NO: 951093 - protein, 61 aa, Homo sapiens
VVNDGVRHLDCNYISLIYTNYRRARMTIKGSSRALKPFETLLSQNQGGQTFIVDTTVSFAD

SEQ ID NO: 951094 - protein, 40 aa, Homo sapiens
GSYLGWHEVVDEAIPATKPLSIYDEQLHYRPPPYCTSSTS

SEQ ID NO: 951095 - protein, 40 aa, Homo sapiens
MSSSMLPGLPRTPMPFKKKDELYGVAQSKLLIFPAATVVS

SEQ ID NO: 951096 - protein, 49 aa, Homo sapiens
MCTGSFLVWGPHVPESAFATCLAGHNTYLHGMYMAMRDAHCIMLNIPLT

SEQ ID NO: 951097 - protein, 54 aa, Homo sapiens
REQSPEMHNAEIYEAAGETLELLKDSDKIPFIREAEEVRLKHMVTTPIQYGQEK

SEQ ID NO: 951098 - protein, 47 aa, Homo sapiens
MPATMKGLTEMAEELRNAPLSFRRAMMFYLRNYRKDLANLHREGETP

SEQ ID NO: 951099 - protein, 86 aa, Homo sapiens
DLEIPPQAGKDKGCYTETTVLPADPAVLPTGSLMRSIGVGLAALNEYCGLRLHEFSFSLGMPFNQLGTLAGSKYYNVEAMYCYLRW

SEQ ID NO: 951100 - protein, 88 aa, Homo sapiens
AGYLETHPKSPRSQTNTLNHCSLDVGCIVMYTTLESWLPEQKGSPKPPGSQYPQDEWQRLWLKVGARCSFPVHSLLKIIHEEREKSMS

SEQ ID NO: 951101 - protein, 62 aa, Homo sapiens
GRLDWVERSQVGSGGMFTGMQSRTIVAAGFLVWGTNVQGGHIDDGQAGGLGGFVFNHCLAPG

SEQ ID NO: 951102 - protein, 66 aa, Homo sapiens
SCVVPQYRPQCEPEDMLHQQEPTRTRGIVRYGESMTDGYQNEYGGQGLTNTADVDIQLNIYCALIV

SEQ ID NO: 951103 - protein, 208 aa, Homo sapiens
LVMDGQACRGDVTSLVLEQCGDPSPPDTARQPALRRRASISASLEISVPTSLSSNTDVSSWIEYPSGQVYVAAVRLQRVVPTCELCRTWAEVRWTTDGEEVVESAALLLQKGRHCPTTDADRWSARGTPGKYLCKIDDESDSFTVTVHKSLNKSGTVQIKFREVCVLLKKPENREIWSRFPQGPLIFWPLVPCLLEEARGSCDSQCRL

SEQ ID NO: 951104 - protein, 43 aa, Homo sapiens
SVDGGSVCTKDAFFKLLSRRWLGSSGPGLGNSTCSMLLSEPEG

SEQ ID NO: 951105 - protein, 213 aa, Homo sapiens
MCITVSSSKDASSYPEKLSRNYIDSELASQAHSEFEKAMKELAYRKKPHLVKQFQKLSEAAGRVGSDMTSQQEFTSCLKETLSGLAKNATDLQNSSMSEEELTKGIGGARHGRRGMGKGTSSPSCRVLCRTYSPRDVLYPSLKEITEKYPEWLQSHRESLPPEQFEKYQEQHSVMCEICEQFEAETPTESETLKRSFEMGWSYEQYKILAPPK

SEQ ID NO: 951106 - protein, 174 aa, Homo sapiens
SGPDSSAQKNQLVRESWRVVSVYLQPILNFLKMSLDVQLAFLRLLTSRATQEHHIITAKIALHTWIRASGNVKNPLKLWGPNEGEFKAEGNSKYTYTVLEDGCTKHTGKCSKTVFEYRTRKAVRLPIEDIAPYDIGGPDQEFGVDVAPGCFLYTKLYLKSQKKIILLHMCSSST

SEQ ID NO: 951107 - protein, 117 aa, Homo sapiens
STLAWFPKALNSKSETQGIPHTELIKQYTTMNRPVKYHPSLAVCLKNTPKITRGRVDLTVGSNPYHFPRVDCWLVQRCSPYEGSGETRRWYLLVSTTSAGGNSTSRSCMVDCRSVSH

SEQ ID NO: 951108 - protein, 84 aa, Homo sapiens
NDGQCSYPLDSIIPNTEPKKCKTNPKNLAEAYPNNGVQNLVCAEMFPLDLYSTLPKKEARARNKGHPLDIFATLQWITIDGRLS

SEQ ID NO: 951109 - protein, 61 aa, Homo sapiens
SGAGGKTVMNTKHQDLPPAIIDVAPLDVGAPDQEFGFEVGLSASCKLPPSQPGSLPPNQLS

SEQ ID NO: 951110 - protein, 57 aa, Homo sapiens
SPIEPLQHQTDGNVVIACLGTGLLPPGAIQCDLELNADEGVDRQKLPNQPWMPPGTC

SEQ ID NO: 951111 - protein, 56 aa, Homo sapiens
GGVPPYAFAEVIDLIVGRLTHCMMMHGRNSVTKLMTVRIVKQSFKIIHLLTGENPL

SEQ ID NO: 951112 - protein, 78 aa, Homo sapiens
CQILSMMKTCVSPVRFLLHLPTILGRWQNLTYTGSYDEPENIHKPPEIILSFLRHNKITHIIFVKGVNISFITPIKFW

SEQ ID NO: 951113 - protein, 127 aa, Homo sapiens
  misc_feature (45)..(45): Xaa can be any naturally occurring amino acid
  misc_feature (77)..(77): Xaa can be any naturally occurring amino acid
  misc_feature (88)..(88): Xaa can be any naturally occurring amino acid
PKKMKHELVEDSPTPANVQLFTQFLSLCSAGKWGQMAVSVGAVLXTWDLCGTPGPHPPECQEHPTPCDNQKMPAVTXLSVPWGGPLPXDPGQQRAYDIDVASPGSTETATTFGRTRVSRAVQQDCQN

SEQ ID NO: 951114 - protein, 42 aa, Homo sapiens
  misc_feature (20)..(21): Xaa can be any naturally occurring amino acid
MVILWQLAKITESSSTRRTXXRLKNNERYFFVENLSTLPAQR

SEQ ID NO: 951115 - protein, 42 aa, Homo sapiens
MASQCFTLKYGQPKTTMQLRKPPTWERPRKTNKQKIMLEETD

SEQ ID NO: 951116 - protein, 131 aa, Homo sapiens
  misc_feature (23)..(23): Xaa can be any naturally occurring amino acid
  misc_feature (45)..(45): Xaa can be any naturally occurring amino acid
  misc_feature (78)..(78): Xaa can be any naturally occurring amino acid
  misc_feature (129)..(130): Xaa can be any naturally occurring amino acid
EVPAEGASRPCAAVPGGQRGCPXCPLARERELTHLLLPASESDTXPQVTPHHQRRCLCLSNKYSQTCHPLSSKVQRCXKPGPRDKQLTRVDKSPKIWCIILFSLLTWVYAEPTIYREILSPNYPQAYPXXV

SEQ ID NO: 951117 - protein, 161 aa, Homo sapiens
GCCRRRRSERACGAGDSGVGSASLQAAGSGGGGTMSGGTPYISNKINLISKAEIRYKGILYTINTKNSTVALAKVQSFGTKNKPTNHPIPPQNKVFKYIIFHGSNIKDLTVCKPPKPQYSLPQNPAIVQSSLSSSTSSFQSMDSYRPFHKIPTYNQFSPSS

SEQ ID NO: 951118 - protein, 34 aa, Homo sapiens
NLQPEDFATYHCQQTENAPNTFGQGTNLHIKRTV

SEQ ID NO: 951119 - protein, 69 aa, Homo sapiens
TRGFLSRSEKRNIRVGVTRFSRYVLTPFFDSERELPDPLRFPGGGNASPCFGSRTVRAPTGLRPLSGTP

SEQ ID NO: 951120 - protein, 80 aa, Homo sapiens
EEKSQPHDKRRPKGPTKKGRVHPAYEADIEDSQFKNVTLQVIMMKKKWVFTGTMQNLPVKIPVASNSVWKLRLQCGCTDS

SEQ ID NO: 951121 - protein, 148 aa, Homo sapiens
LLSSGENAFELISKSWFSTLEVSDGYCEKKAMSRKQWYRLAATAEMQNVEECVCWNSWTDTALKEKPSGFGSLAGQGRRRSWRGRRDGILGAADCAARHWRGHWDASCNIQPEHTHEDKHGPTYLPSEKQNHALSLERRGKLESYYLK

SEQ ID NO: 951122 - protein, 109 aa, Homo sapiens
TLDDPLLQTIRSTVRLAILEFGIYRCVTRGISGSCEILGKLTVIEHGKSSAGPGEIGENTELLRRVNFIAGHADELEELINYYQDRGYFEELITMLEAALGLERAHMGY

SEQ ID NO: 951123 - protein, 85 aa, Homo sapiens
MLNSPSCSNESRITNISGPVVSAHSRKSLSFFANENNHLSWRDVDERPPGDGGPDGGRVLVAHDGRVLRGPGRHEVVDVGVPRRP

SEQ ID NO: 951124 - protein, 73 aa, Homo sapiens
KGKVCADTCGAMELSGPALETQGSPGARLSESPQSSSVSHFHQKGNALSFLHTNWLAVQLDTTVCEQRCWEIA

SEQ ID NO: 951125 - protein, 66 aa, Homo sapiens
  misc_feature (7)..(7): Xaa can be any naturally occurring amino acid
LWRSETXSYVPPSDGDDPRWSSSVTHTRKVLLSLCQIPRTSGQSRAMPEASSSHDTGLSEEEVVVD

SEQ ID NO: 951126 - protein, 69 aa, Homo sapiens
RVGEDEIGGPLMRLCSNEVRDERDGLDGLHQAHLVGQDARSGLLLYRDTSHSKPLIWYCLRTPLTISAD

SEQ ID NO: 951127 - protein, 124 aa, Homo sapiens
MATICVFTINIGGCQTALSSPNEIFGSTFFFIKRESWGWTDFLMNPMVLMMVLPLLIFVLLPKVVNTSDPDMRREMEQSMNMLNSNHELPDVSEFMTRLFSSKSSGQSSSRSRKTGKSGAGQRR

SEQ ID NO: 951128 - protein, 195 aa, Homo sapiens
RGPCNDAVQTDGNVYIASVNDRHVTRSDSENDEYCNPTACVKPTVMEQIAGMYGAGLLSHRGGNPFEPGNILLTENNWYLARKSQVASGAGRNSKALDAWINVGGVFAPRACTGPHKVRECLTLNILQRNRFNYAPNGDYVKKICMQRFIKIDGEVRTDKTYPAGFMDIISIDMTGEKSRLIYDTDGRLAAHRNT

SEQ ID NO: 951129 - protein, 130 aa, Homo sapiens
LAPDFPDHLLFLSSAKFKLARLFVYGREEMLALFLKDNKIPSDLLDKEFLPILQEEPLPTIGFLVPFTEEEQRNFSMSVNSAAVLRLKDEEEEEQWWGLLEVEVLQEGEAEAEVNVVSNQRSFDEVEGVF

SEQ ID NO: 951130 - protein, 101 aa, Homo sapiens
LQEEASEQNSLHDVGELVDKQLKDLTSKGMYGQRTGYWADLERVQIALNHAVDHLSLQTDILQPIVICIDAMVEQITECHRADFAFILSIEQVLSAMSTQP

SEQ ID NO: 951131 - protein, 49 aa, Homo sapiens
MAVPKNELSYTVYHATSGLVGDYGASYQYEVHKLAILSAPRPERKRRVL

SEQ ID NO: 951132 - protein, 60 aa, Homo sapiens
YLTKDSKAILPVSTLNLFFPSSKPLSSAVLGIGVPDWQKLISSQMVHKETKVGTQGKKTG

SEQ ID NO: 951133 - protein, 56 aa, Homo sapiens
GRKNAGRERAGLWGKAPCGWRRLYEQGWTLGCVGFHDILKTNPSFSLCSPELLAPP

SEQ ID NO: 951134 - protein, 95 aa, Homo sapiens
KEERQKHLNNQYMQRMAVFELDQNPVIKPYKPAPPTGYFMAAIQQTQNRAALYPPSQICKIRPSPRWTGQGARPHPFQNIAGTIRPVGPRPPYSY

SEQ ID NO: 951135 - protein, 94 aa, Homo sapiens
IFLGCQHLTSLCEICFFPDRDIPSTSRQPHEDQRLLTAVSLLTCGAGTQQQVFGAHWERAWAPAPAPQREQTTDLLMEAVNPHGLSADVTGHLL

SEQ ID NO: 951136 - protein, 167 aa, Homo sapiens
LPPKNGHVNLCTFPVLYVSDVYCGSCKLLYQYREHGSSATLEHFYPHSKSSNVCCTDYTTPTVSRLYFMAPPNTVLCVDAGKCNPYPNHHIDKKTHSSCAEPQTGRVMFTHPHYHSSLECQYGGLQGSWSIFRRLTLSQLGLQSHDFSVNAKDLGRGLVSQASLPRE

SEQ ID NO: 951137 - protein, 47 aa, Homo sapiens
MALTPCVLTQYCTRDLSQKAGGAIADLPGCLLPPSSCEGPRRFYPWL

SEQ ID NO: 951138 - protein, 68 aa, Homo sapiens
  misc_feature (7)..(7): Xaa can be any naturally occurring amino acid
  misc_feature (19)..(19): Xaa can be any naturally occurring amino acid
  misc_feature (31)..(31): Xaa can be any naturally occurring amino acid
SVQTKFXDDELSFQQDNKXPLAQKKCWENIXIARSYLGLVVGGSLLIILIEQLAIFLPQSDTSNAPQT

SEQ ID NO: 951139 - protein, 121 aa, Homo sapiens
  misc_feature (17)..(17): Xaa can be any naturally occurring amino acid
  misc_feature (26)..(26): Xaa can be any naturally occurring amino acid
  misc_feature (32)..(32): Xaa can be any naturally occurring amino acid
ELSKKPHFKRKREKRPXKSVSSGPPXSLFHPXGQHPSRPSALTLVRVHQGSFLPPQPPPAPAGLLTRSRFGKGNVANISSSCQRRDLPSKGLDRDPPQVLHELAGQQFDKEPGPPLQVATQ

SEQ ID NO: 951140 - protein, 83 aa, Homo sapiens
MGALEMQDEEDRIEALKQVADKLPRPNLLLFKPLVYVMPLISKNFEVNRMGSSHMAICSGPNMLTMENDQSLFPILKSPDNQG

SEQ ID NO: 951141 - protein, 140 aa, Homo sapiens
ARLSDSSITSKLSHKQNLFHETKKPQAYTSSNQQEELKMQSAAFSIAADVKDVKAGQSNENLSDSQQEPPKGKVPEGPESPLIGNQNVQSMETQIDKAQAGYSACTPLRISLYLLQSTFPSKTGGMEGGNSSSNIIINSR

SEQ ID NO: 951142 - protein, 93 aa, Homo sapiens
  misc_feature (4)..(4): Xaa can be any naturally occurring amino acid
STRXVPMLWECRWGVTTANRSVAILPEMPEDLLFLDAAAQRPVFQARACSMKKTRRGGEKIPVPRAMKNIVLNSHWVLDMQSVPFIAFLENNN

SEQ ID NO: 951143 - protein, 117 aa, Homo sapiens
CCRNMGKGLRHLLGGKTLYRGPLVTVWKVYLRVILQVGILTPTGMAWVFDGAVLALRSSVFSAGCPAGSTDSPFIVGTIMPCVELCFGGADVNSHLLLLEVSPCFLHSGPAICVRLI

SEQ ID NO: 951144 - protein, 104 aa, Homo sapiens
MGNGSLNHCSKVLHLLKMVDSRKLSNAQSSGSLCCNGVPVSGRRQGGHIVRVEPLCQLACAVLHAVNRRPQSYTSNGSWRGCAESLMMYTYVRQQDVELPNSET

SEQ ID NO: 951145 - protein, 150 aa, Homo sapiens
TTARKCCSTCKMVDIRKLSNAQSSGKVVLQRCTRQQQAAGCHIVRVEPLRQIAVVILDSVNFVHNHITTNLDLGDDVLVSDDIHERRQQYVELPTPELREQRPDKQLGIPCKNTFSKEGAHLSNSYAQLDNDDIGTDDDEGAIYAFVVHE

SEQ ID NO: 951146 - protein, 69 aa, Homo sapiens
IFAGIMNNAEITFVLQLVGLLELGLWVPCVLHLPSPRQLLIGGFEGTSTPLSSTGQNCPWGPCWLSQLT

SEQ ID NO: 951147 - protein, 34 aa, Homo sapiens
RTKRLSPTSGEIASGGGHVTHPASLLDALTEGTI

SEQ ID NO: 951148 - protein, 66 aa, Homo sapiens
MGPRPCSPASTLIEKPSRPPGILALLDRGVLVSPKATDKSFVETVIAGAGHLPQVPEAKPAEDKLF

SEQ ID NO: 951149 - protein, 194 aa, Homo sapiens
SEYDLQRLNTCPNSEVDSHPELLAHINGIVTGTPSAEGLGDSGWTAKLLRSCVKESITVGHQCGTKGKIMYVGNVRGATQKHIQEVGPNQNLMIGGSPCNDRLYCQPYSAGISNKEPGRRFQKGLAAPGDNALANGGRIKRVLLDHRGMWWPCGESDQGGHLHEYRASYPLMLKMQKKVSSRKQARNLWVNFQD

SEQ ID NO: 951150 - protein, 88 aa, Homo sapiens
MDCPYSFPRYRNLMVQASHRAETLTTALERYRSAVYAPGVLPSPGVQSMGHMVSRASRMRTLANSPNNLALSVHLERGPLQNYKHALN

SEQ ID NO: 951151 - protein, 78 aa, Homo sapiens
MSHLSLTHNGTTILKEPEDGAIISLLGPRFIKEAVKLKEEPASALVEALASRVDDGEVIAGTTPNHQIEWAPLLDMLL

SEQ ID NO: 951152 - protein, 148 aa, Homo sapiens
PGTYPEVAGPMCNCHLFGVNHHRVGLDKSRDVPHVTNAHGHHILKEPKAGAIISLLGPRIMQEAVELKEEPDSALVEALASRVDEGEVIAGTAPNHQIEWAPLLDMLLCNAADVPEVHELPLVPHHAQRDGVLTHLRGNVAVHLNAQS

SEQ ID NO: 951153 - protein, 255 aa, Homo sapiens
GKGYWRLIPRENGVNHDPKSSSTAPTSRGSPYKIRVGEPGHGGDPGLVSAYGAGLEGGVTGNPAELVVNTSNAGAGALLETIDCPSKVKMGCQECPEGYRVHYTPMAPGSYLISIKYGGPNYIGGSPFKAKVTGPRLVSKHSLNEKSSVEVDSPDKGHCAPQHGAPGPGPAGASKVVAMAWGWTGLRRAEEHFTVTEHACTTCGGGGLARTLERLVKPGGRQGSTLSKGDLWSAIVCYARKTTTEKETKKKGWQK

SEQ ID NO: 951154 - protein, 218 aa, Homo sapiens
TDSLCDGIYPPKVTTVQLRRGSHRVPSLLDGIDTGLLVLKDLGIQVDRYIATEVCEDSKGWALYGNKGKIIYIGEVRSVTQKHIQEWGPFDQVIEGSPCNDLSIVKPDRKGLYYGTGQSLKEFYRLLHDARPKEGDDRPFFWIFENVVDMGVSDKKDISRLLEYNPVMIDAKKVSEAHKARNYRGEPSQYEQGDESTSNDKLELKNDKTGRNQNKKET

SEQ ID NO: 951155 - protein, 202 aa, Homo sapiens
HRIYCRIDPQRLTYLVPAEKRKPILVLSLFDGIATGLVVVKYLGIQVDRYIASEVCDDSIRVSMVDTRGKIMYVGDVRRVTQKHIHEWGPFDLVIGGSPCSDLSIVKPARKGLHEGTGRLFIEFYRLLRDARLKEGDDRPFFWLFENVVGIGVSDKREISRFLESNPVMIDAKEVSDAHRARLFWGNLPGMNRPLASTVNDK

SEQ ID NO: 951156 - protein, 217 aa, Homo sapiens
FAMKLPSKGLPPVPEKMNLIRVLSLFDGISTGLLVLKDLGIQVDRYIASEVCEDSITVGMVGTKGKIMYVRNIRSVTQNHIQEWGPFDLVIGGNPCEYLSIVNPARKGLYEGTGRLFYEFYRLLNDARPKEGDDRPFFWLFENVVAMGVSDKRDISRFLESNPVMIDAKEVSAAHRARYFWGNLPGMNRPLASTVNDKLELKSVWSMQDTNLANEDI

SEQ ID NO: 951157 - protein, 78 aa, Homo sapiens
MAFELQQMGTKLTKTMGSGVFQNGEALITREGTGFRLEADSVLKPCSVLHEYIVSATKRKKKFRGKLPKLELVVTQLL

SEQ ID NO: 951158 - protein, 167 aa, Homo sapiens
SGCYLSLMYSLQASWLVKDLGIQVDRYIGLEVCEDSITVVMVRHQEKIMYVGNIRSVTQKHIQEWAHSIRLIGGKPCNELYIVNPARKGLYEGTGRLFYEFYRLLHDARPKEGNDRPFFWLLENVVAMGVSDKRDISRFLESNPVMIDAKEVSAAQQGPDTSEVTFP

SEQ ID NO: 951159 - protein, 73 aa, Homo sapiens
WLPVLLPTVLKLDVQVSHWQTRSIHSPGQLYKRCIGAWAYLPSPGVQFWATLPPGWSSPTLQLPTLAVAIQRT

SEQ ID NO: 951160 - protein, 183 aa, Homo sapiens
KVTLYRYDLQMNHLFQTQKRKPIRVLSLFDGISTGLLVLKDLGLQVDRYIASEVCEDSITVGMVRHQGKIMYVGDVRSVTQNHIQEWGPFDLVIGGSPCNDLSIVNPARKGLYEGTWRLFKEFYRLLAYARPKEGDYRPFFWLFKNVVAMDVSEKRDITRFLESNPMMIDAKEVSAAHRARYL

SEQ ID NO: 951161 - protein, 228 aa, Homo sapiens
QRLFERDMTSKVSTCPTEKSEAIRVLALFDGIATGLLELKDLGYSVDRYIASKVCDDSITVGMVRHQGKIMYLEHFRSAQRSIILKWGPFDLVIEGQSLKDLSIVKPTRKALYKGPCRLFQEFYRLLHDARPKEGDDRPLFCLIENVVTMGLSDHEVHLRDSESKPVMIDAKEVSSFNRARYLWGNLPYEKALIHCNLREAQMLRLKDTIPKVDILQVIHEGTVIDLT

SEQ ID NO: 951162 - protein, 38 aa, Homo sapiens
MPHFAEPWLSCHAPDTPCSFQLIIHSGCQRPVPYRGRL

SEQ ID NO: 951163 - protein, 224 aa, Homo sapiens
PPKVTNCPAEKRKPIRVLSLFEGIATGALGAEILGDSGGPLNCLGKVCEDSITVGMVRHQGEIMYVGDVRSVTQKHIQEWGPFDLVIGGSPCNDLSIVNPDSKGLYEGIGRLFKEFYRLLHDARPKEGDDRPFFWLFENVVAMGVSDKRDISRFLEFNPVMIDDKERSAAHRARYFWGNLPGMNRPMAYNGNDKLELQECWNKGGKQIHKGDIIRGIPCKEQVI

SEQ ID NO: 951164 - protein, 216 aa, Homo sapiens
LQINQCPNKKRTPYWCCLLFEGISTGLLMLTDLGIQMDRNIATEVYGDSITGGMVRHHGNIMYVRDIRNVTQNHIQDWGPFDLVIGGSPCNDLSIVNPARKGLYEGTGRLFSEFYRLLHDARPKEGDDRPFFWLFENVVAMGVSDKRDISRFLESNPVMIDAKKVSAAHRAATSGVTSRYEQAVDTTVNIAGAAEFVSMQDASSQVRHYRVNSLKV

SEQ ID NO: 951165 - protein, 170 aa, Homo sapiens
MLRHQGKIMYVGEVRSVTQKHIQEWGPFDLVIGGKPCNDLSIVKPALQGLYRELAVVFKEFYRLLHDARPKEGDDRPFILVFENVLAMGVSGQRDISRFLESNPVMIDAKEVSAAQRARYYWGNLPGITGVGFPVNDKLELRMSGAGGYQVTSRPYTVIPRRDESSTSIS

SEQ ID NO: 951166 - protein, 138 aa, Homo sapiens
MNPSGWVMVRHQGKIMYVGDVRSVTQNHILELGPFDLLIEGHPLYDLSIVNPARKGLYEGTGRLFQEFYRLLHDARPKEGDDRPFFWLFENVVAMGVSDKRDISRFLESNRVMIDAQDVSAAHRARYFWGNLPGLDRP

SEQ ID NO: 951167 - protein, 34 aa, Homo sapiens
LVLSLFDGIATVLLVLKGLGIQVDRYIASEVCED

SEQ ID NO: 951168 - protein, 170 aa, Homo sapiens
KRKPSRVLSLFDGIATGLLVPQDLGIQVDRYIASEVCEDSITVGIVRHQGEDHLRRGLPQRPLRHIQEWCPFDLVIGGSPCDDLSFFNPARKGLYVGTGRLFSEFYRLLHDTLPKEGDNRPFFWLLENVVTMGISDKRDISRFLESNPMMIDAKKCRCKRDRNFWGTFPV

SEQ ID NO: 951169 - protein, 198 aa, Homo sapiens
KLIAMELTSKGEPTVPAEKMTPIRVLSLYDGIATGLLCAEGLGALQVDRYFASEVCEDSITVGIVQHQWKIMYVGDLRSLTQKPIQEWGPFDLEIEGNPCHDLSIVYPALQGPLLGPWPSFLRFLPVSCIMRGPRPEIISPSSGSLTNVVSIADTDNRDISRYLESNPMMNDAKEIFNRHMARYFCGNLPCINRAFAS

SEQ ID NO: 951170 - protein, 67 aa, Homo sapiens
MEYDLIVLGLTLLELGYTAMLQTLLQLQLIINSWIPTGLYIPGKVEPTEVAGPLVCKIDTISWHTII

SEQ ID NO: 951171 - protein, 120 aa, Homo sapiens
MLLLHAKPSLLDTHHVHYPLTGVPQVLSADLRLYLKTSHNTSLLGSLRKVSRNMAAGTRYMSLLEPSDCKVLEPSKFHSGNSSTHLGSLFRPPLGSEAPMSHWCRLLSFSMASSMYFRPP

SEQ ID NO: 951172 - protein, 68 aa, Homo sapiens
PETESMSGVCSCAWIRVCVCVWYMCAQSASFSDSTISVKFLYDLDHLRIGFCFRVSLGPDPGPCPPLH

SEQ ID NO: 951173 - protein, 52 aa, Homo sapiens
MQNCMAEKRENRVDRDSAESMCLFYTNQGFASLYPTSANIRCFGEELRDSPG

SEQ ID NO: 951174 - protein, 80 aa, Homo sapiens
SVTKEGLELPEEGGGEEEDGREQGKVRNLCKLMKEPEIRRFTTSNLQYTVSSLADCDQHYGGQHTERSEAGTRTLTGLCG

SEQ ID NO: 951175 - protein, 39 aa, Homo sapiens
MTGRIVATKPSYVALAQRKEERQGHLTNQYMQRMARERA

SEQ ID NO: 951176 - protein, 85 aa, Homo sapiens
TDRRRVVTDGHTCSPFPDHPLLQERDKIAAPISDSQKPRQQRVTLTLPVLNGARPVIFVATGHRKQLFVKRISEDQEENALTTSS

SEQ ID NO: 951177 - protein, 33 aa, Homo sapiens
MPEDSVEDQESQHTRRDSSPVLHNIILLFRGDS

SEQ ID NO: 951178 - protein, 71 aa, Homo sapiens
RKRRAVSECRSSGLPALGSGQDAVVWAEAPGVLQRSLSSARPLWHFSWERVRPQVGEAHSVYLVRAVQNVL

SEQ ID NO: 951179 - protein, 57 aa, Homo sapiens
MLSQSCGCREKACSFGHTAAPVSSSSVKVHCMKLDERGGHQSDGELRSSFTLQLSYN

SEQ ID NO: 951180 - protein, 129 aa, Homo sapiens
MMSDTLVAVQDRGLGLSSQFGYEVYVLAARFYEFCGITAMKNPERSAVCYGLITGLVYQTLYTCPFSRIFRFVRSAWCSSLRYPTDTYPGFVAYSYRSFLFCSKVASSGDGETYKINPFVGTILFFRGD

SEQ ID NO: 951181 - protein, 32 aa, Homo sapiens
MTSVDFCHCFRVFFWGGEIYKTEPFATIILLF

SEQ ID NO: 951182 - protein, 98 aa, Homo sapiens
MTQTNSARLISLTSIRREWYVYELFPSLLSTPTIQDLLRGYFMAGIPHTQNRAAYYSPSYIAQLRASPRWTGQDARAHPFHNMPGAIRPVAPRAPSSF

SEQ ID NO: 951183 - protein, 76 aa, Homo sapiens
LERDVATNERYWTQWTRSELKQRFSVFGETEECIIHFRVQGDQYGFSHYIRYAARRHLAAIDEWAQCCGRKIEQPR

SEQ ID NO: 951184 - protein, 46 aa, Homo sapiens
MGHGLRSRRGLYLSQVWALAVWASDRARDREGEAAVVSAQSKGFRV

SEQ ID NO: 951185 - protein, 90 aa, Homo sapiens
MTSDQNSSSMRNVHFVPLSRNHEGCSSALPQLVASLIMAANASSAVATSDEAVDVPLDTEVDGCTPQISPKMENLCVSSDRVMRPGYLSN

SEQ ID NO: 951186 - protein, 80 aa, Homo sapiens
  misc_feature (51)..(51): Xaa can be any naturally occurring amino acid
ADFRLITFCRYNKDTFLVTDSVDADVIRMSGTASSPRLVASPSSVSCNEPXWTCWPSSRLVSYQHAFLYIRQSRHTPAQR

SEQ ID NO: 951187 - protein, 49 aa, Homo sapiens
NYTSQSSTAIEKLTTHRVEPGKNVREIGNNTCWELTGGAETSLVIVRVH

SEQ ID NO: 951188 - protein, 49 aa, Homo sapiens
MQSHRIPNGQDVMNRAAHLAHVKIKSNSHLTSRERKANFAEKPLICGLY

SEQ ID NO: 951189 - protein, 87 aa, Homo sapiens
MLFMTLLRAVYTFPGRQKIHISNTCAFYRVQCSLYYEDVLAESRCIPDSCGLTYIPRRGSWTIVAPCTHEGFQCAAPLLILTNKFYF

SEQ ID NO: 951190 - protein, 61 aa, Homo sapiens
MVVHVIMFIRTMLQQQGCMLFMTHVQGCVRCFLAARRSTSQRSVASLEVSVLINMKTSCSE

SEQ ID NO: 951191 - protein, 133 aa, Homo sapiens
PSCSSRSGSRFIGEYMMWGRSVEVLYACSHCYVVLSSGDALAHVHLTPIVIWNDLLFSHHVFKFISIELGEAPLLLDVDLLAARKLELGPAQGLNHMLLVLQLGADGHDNLANVNPGHSALGLSKGTSHACLE

SEQ ID NO: 951192 - protein, 74 aa, Homo sapiens
MSSNSSALNLVKPHFFEMWIFWRPGNLNLALLQGLNHMLLVLQLGADGHDNLANVNPGHSALGLSKGTSHACLE

SEQ ID NO: 951193 - protein, 116 aa, Homo sapiens
RADSAPNTRIRMVDLWNRPQGTVARIHIGHIIIVHPHQCCSNMRIMLFMTHVHGCVHVSWSPEDPHLKPSVAFTKSNDSSTMKTILPESTLSSLMAVGSTTSPVVIIRTVRGALHS

SEQ ID NO: 951194 - protein, 64 aa, Homo sapiens
HVPTQIQENFEAFMKAMVCRDELIQIEVKDIKGVSEIVQNGMHFKYTTHRWVQSDPKRTHCGGG

SEQ ID NO: 951195 - protein, 31 aa, Homo sapiens
MRYFIIPCQSGEGSRRSDHSPHLGVVAAVPR

SEQ ID NO: 951196 - protein, 77 aa, Homo sapiens
MPGGIKGATQGNLLSVICTAELPKPSISSNNSKPVEDKDAVCFTCEPETQDASYLWWVNNQSLPVSPRLQLSNGNRT

SEQ ID NO: 951197 - protein, 34 aa, Homo sapiens
ILCTVVSRCLWKRCTEQGFVVVEKEELNMIDNFF

SEQ ID NO: 951198 - protein, 62 aa, Homo sapiens
PGTDLAKILSDMRSQYDELGYQNRNDSEAWFTSRTDELNRESAGHTEQLQNKVVRGELTCEF

SEQ ID NO: 951199 - protein, 75 aa, Homo sapiens
PEHTGVVYCAACSTPISPCSTVGQWKIWIMRQTRITCLHNSSHVFRLWTEPQICTSNICFSGPCFSCSTIANNSL

SEQ ID NO: 951200 - protein, 144 aa, Homo sapiens
HSNRDLNIFCVNKRCGISRFDEDLLAVPHGLPDAIRIGFRRWGNLEDVSGPESLKSRDAEEESETTKRLAVDCRAPPAALVVALVGFGANPELEVLWEELLEVPVVVSLEEICVGRSSASSSSPSPSLATIALPMSPPSVRGAS

SEQ ID NO: 951201 - protein, 47 aa, Homo sapiens
MAGPRTCGAPAAHERRRKALIEFHQLLPERSYEFLLASNTHHTNGRH

SEQ ID NO: 951202 - protein, 41 aa, Homo sapiens
KGEHQWVQLYKVQDQDGKSGMNSSLAANESVIHEPGRGSGT

SEQ ID NO: 951203 - protein, 105 aa, Homo sapiens
DPNGDEGGCLVVSVSVACAETRSVPISMTGITYIGLGQHLGVEADELKGFVLVTSVLSTLDMLGKEYRYVGAPLPGLLAVGTEERPCRISASTRFISTRNCLKVK

SEQ ID NO: 951204 - protein, 47 aa, Homo sapiens
MTETFIPMAKSTSAALGALVLGQLWLHAVIIPSHLWAALRAWACAFA

SEQ ID NO: 951205 - protein, 36 aa, Homo sapiens
LAKEYRYMGAHAGAACREHRRGHAESVPALGSLAPG

SEQ ID NO: 951206 - protein, 74 aa, Homo sapiens
LPISIQGSLRGLGQQLGGEADELKGFGIGTSCYSTLDMLAKEYRYMGAPFRGLLAENTGEARHNQCQQLGSLAP

SEQ ID NO: 951207 - protein, 67 aa, Homo sapiens
  misc_feature (33)..(33): Xaa can be any naturally occurring amino acid
  misc_feature (64)..(64): Xaa can be any naturally occurring amino acid
MDNYITIVDVMARRYVLKGEYGTNPEDIYPEEXLTDDDVSSGSSSEEEQHFQAVTVFYSRFLLXPDL

SEQ ID NO: 951208 - protein, 36 aa, Homo sapiens
MLLTHPESSPPFPPELFLLHIIAVPELQGQLGQPGQ

SEQ ID NO: 951209 - protein, 173 aa, Homo sapiens
EGGVVCDHYDDIDGIPDDKDNCRLVPFPDQKDSDGDGRGDACKDDFDHDSVPDIDDICPENVDISETDFRRFQMIPLDPKGTSQNDPNWVVRHQGKELVQTVNCDPGLAVGYDEFNAVDFSGTFFINTERDDDYAGFVFGYQSTSRFYVVMWKQVTQSYWDTNPTRAQGYSGL

SEQ ID NO: 951210 - protein, 90 aa, Homo sapiens
ETTTGGKQTRTEQCMLDFDYVCSRDNLCVAVMIYPFTVNHKHKFYWGHTVTLMPVFKNMADAMRNHPEVDVLINFASLRSAYDSTMETMN

SEQ ID NO: 951211 - protein, 56 aa, Homo sapiens
QQIFNQFPRIEDGWASLAHPQRMFSSMKRLCLLEHELGSPPFASNLEIHLVQYPVG

SEQ ID NO: 951212 - protein, 108 aa, Homo sapiens
GLEDSPATFAVGAASLKKVYISTRRSNILVSSSSTTDIKLYDQGVLMLLTWKNLKPHIQGIIQDVIFPLMCYTDADEELWQEDPYEYLRMKLDVFEDFISPTTAAQTL

SEQ ID NO: 951213 - protein, 114 aa, Homo sapiens
GGVGGALRAPCGVVGEGQRSCASCSYCWWYEAERGPSKDGSLRSGAVLGREARLLSCIILRTPADVWLLEALWAEAQRTGEFAGVAYQLRFSEPSLAPLTGQKLQHSSLKETLP

SEQ ID NO: 951214 - protein, 59 aa, Homo sapiens
MVLAVSIEETSDITPGPRQELYSLLILRGVVGASWLCKVVSAYLIFFSLTPILDTSREK

SEQ ID NO: 951215 - protein, 87 aa, Homo sapiens
RGVGCALPAALGVVGEEAEELCYMPVLLVVLGRERSGKEGLCIRGSSGSEARLLSVIILRTPADGMILEALAEAARELGICRVGLTS

SEQ ID NO: 951216 - protein, 74 aa, Homo sapiens
VIKAISISQYFRLCSISNIAYTSTCGSCSSSSKSNLFIHCESFQVDLLYVKLFINRQRLPITPSVELIYKPLNS

SEQ ID NO: 951217 - protein, 192 aa, Homo sapiens
GSGPSLYKSVTVTDLVDWVHALHVDHGQHTGKVVLSWLHAEQQAEKEVKRDPINPPNVDGATEMGVIQAMTPRSFSPKVTATALDANRGPVGDIAVTYSDIGKEIHKCDQWDGDEDGSGKVLVGSQQAPQSRNSGKFQPPYGKGALKEIQCDEADVRFAGNSQMHTLAPAEKYSPLHICTIPMMIIRAKGRS

SEQ ID NO: 951218 - protein, 42 aa, Homo sapiens
IEDYHTLVSIVDVKANKTHITQAVTNLYDIDVTQSVNTLNIG

SEQ ID NO: 951219 - protein, 92 aa, Homo sapiens
HVIYVKHTFYKSLKNLKLPLLAINMKDRPSSSRYYRPPLVLYDLSNPISESSHSCIWHVLHQVVLCLCLTQKVDIFFGRFFGGVSKRQQPPF

SEQ ID NO: 951220 - protein, 82 aa, Homo sapiens
MTKLHDEDIRGAALLRLQAQLVPCRVCMLPSLILRLPCVTYVCDDESVAVKNLQEAKDCYKSKFAEFSEVAKRNNDALGQDH

SEQ ID NO: 951221 - protein, 89 aa, Homo sapiens
MWILLIAANYNDINDVKRLTPDYLEATVDDIQGIRFLMDNQKLRLRLMQTLQIRHFALDIIKSTHDHWHASVTKKTNGPGLRSMKTTLS

SEQ ID NO: 951222 - protein, 79 aa, Homo sapiens
LVLSVDWYMPGPLVTFVLLWPGFVFGRGLNPERDPDISNGFRLISVTQFLRLCILLRDNNIAAMHLFPGSNLGIVAFSK

SEQ ID NO: 951223 - protein, 33 aa, Homo sapiens
RSARGSLSSAAEIVHEDFKMGSDGESGQASATS

SEQ ID NO: 951224 - protein, 34 aa, Homo sapiens
IGAIASASKIPPFIGPKFEDDGFTSQNHCIFRQH

SEQ ID NO: 951225 - protein, 52 aa, Homo sapiens
MGWNSVCSDKDLCSMAGEHLNDFPEMPSSDVTQTLEKCLCARMAGRGKLLVE

SEQ ID NO: 951226 - protein, 96 aa, Homo sapiens
KIEHPPHQVKQLHVRQGVLMHVTLQRFAALLHNTGPQLCPQTKLGPLSKNISASWYGGIMCDGMGPRIFSIITRCSRYFVGLEEWGAPVVLKEDAA

SEQ ID NO: 951227 - protein, 187 aa, Homo sapiens
MIMCSHTEYLSLSPHRLVIICNPPSRQNQWKEERPPDNRTRVRVRKSSRRGAEDYQKCGIHPYCKTGLSNLGQNGGRGAIDIRLRIALLALPQSCNLKSSVVHTSYLPRAHKNSMTEYLPGTQDTSRVFGHTPGRRERIKSQESPECVAGPFHPQLDDNLRHSRSVPLPFNLKDEISDTLSVAHPFT

SEQ ID NO: 951228 - protein, 85 aa, Homo sapiens
VDRQIIINSLSVQMSSYDSSSSSWLFTNGSTGITEGQRAAGTELNTAEGKILKLQKPPGERNQYSFVYVVMVRADSVAEMKIQDS

SEQ ID NO: 951229 - protein, 46 aa, Homo sapiens
DQFTADMLGSAEVAEEVNLNGSGKLLQITGCASPGKTGTIVVRGSN

SEQ ID NO: 951230 - protein, 156 aa, Homo sapiens
HWQSFLRLVKIMMCCTGIPGHYPVHETTSSRNPHLIWYTRQDDILSFEAEKQAVYHQVDRPVYFQLLNVLLHKAPFPSDEDYGYWSSDENEQFRIEGWNISDTLMYVYEMSGAELLSNLYGKLGRLLTSSEEPYSWQHTEALLYGFNAIAETIDVT

SEQ ID NO: 951231 - protein, 78 aa, Homo sapiens
SLEQKPTDCSIDMSHWIWRTCLLVLGVDQLYLGPVPMLEHQMRSSTSCQAHTAAVFLAPFSPHPLPYLPPCTSYYDTL

SEQ ID NO: 951232 - protein, 39 aa, Homo sapiens
ARYRHFAVYVLGYVTPGNSHRYNVTMIFGSIFTRSHPSG

SEQ ID NO: 951233 - protein, 49 aa, Homo sapiens
MCHIFLIFHLGLNHSSVSSPESSLLSLAFPYPDLAFLLHPLQVGFSLYK

SEQ ID NO: 951234 - protein, 175 aa, Homo sapiens
QELARSSQEHLQRKQIWGRGNDTPGEMNGFLKGQAIRLLLIHLPRGVDYRGNIQTFRVAAEVREELCRQMGITEPQEVQEFALILIKEKRQLVRALEPGEYLNSVLVGQDESLHSRRLHWETPLHFDNSTYISTHYSQVLWDYLQGKLPVSAKADAQFARVGGLQHLSKAKRNTP

SEQ ID NO: 951235 - protein, 223 aa, Homo sapiens
LVDSSMIPLTGGCAANGSTNGSHPASLGERRESISQGTGGSAASCTGATSNRLRRENAALRRRLEALLAENSELKLGSGNRKVVCIMVFLLFIAYNFGPVSISEPPSAPISPRMNKGEPQPRRHLLGFSEQEPVQGVEPLQGSSQGPKEPQPSPTDQPSFSNLTAFPGGAKELLLRDLDQLFLSSDVTDFNRTESLRLADELSGWVQRHQRGRRKIPQRGQER

SEQ ID NO: 951236 - protein, 75 aa, Homo sapiens
QGSWCTQDGFMGVEVYRYQTQTALDLGTLRMGNSSCQPVFEAQSQGLVRFHIPLNGCGTRYKVSTGRWHEVKSHL

SEQ ID NO: 951237 - protein, 112 aa, Homo sapiens
LSSYRRLRTIGSSRLTCSRLLTSLKGKTWQQLQTTLMALGSLAVTKNDGHYRGDPNWFMKKAQEHKRLFTESQLQEGTHFIGLQMGSNRWASQAGMTGYGRTRQIISYTGEG

SEQ ID NO: 951238 - protein, 47 aa, Homo sapiens
GYFSRARTITRPARQIWRVPPSELQIPPLKHPPGLGTPCFGRDLRAF

SEQ ID NO: 951239 - protein, 107 aa, Homo sapiens
TAPGLIIFYIFFESTLIPTMTVINQEGEPPDRLNAGSYFLFYILVGSLPLIIALIYTHNTLGSLNILLLTLSAQDTIKLLRPTNRSMTSIRNSFDSKDTSLRTPLIT

SEQ ID NO: 951240 - protein, 154 aa, Homo sapiens
EGTMARHCCLYFIPARPLPQALDIEFMERLSQGGQHRPFIAKEDTLTLEERVHFKQRITVDLLSNVIDVYPAEEFDEDSEDRLLNEKFREMIPFAVVGSDPKYQVNGQRDPLGGRPKWGTIEKFENTTHCEFAYLRDLLIRTHIRNIKDAPSCG

SEQ ID NO: 951241 - protein, 102 aa, Homo sapiens
MGDPEAHLFRLPSGLEVRKSRALQFENRFFYEPSRTRYLKSKLFQKLRISDHFKKPQKIHPSALSTPEIRVAPRAGPTLRRRAADAVVLPSALVYRGRANVG

SEQ ID NO: 951242 - protein, 71 aa, Homo sapiens
FKSWGTSCGPDNELQTDGNVQCGDTRALWSQDLAGHEMEFLKRVKQDCMDQFVPYRPSQDKQYPKHAWMEP

SEQ ID NO: 951243 - protein, 115 aa, Homo sapiens
KSFRVREEDGEGCRMTLFQLQKSQESQNRGGDKRTTQRSTKEVTEEEKTKEGAARSQRGQGGGQVGLNGPLQLWLPDEIPQVSSPNPQILYLLFRCVFISEFIRYKYPQGTETKA

SEQ ID NO: 951244 - protein, 103 aa, Homo sapiens
MATLQAVLSDHVQSGSVPPTRGTSFSEEAWPRWNKYPDVEKCLKIPQTEFSKRGETSRGREAARLRTREQALWTDSCMKKSSWFQETAPQAGLLENDPFPKPK

SEQ ID NO: 951245 - protein, 116 aa, Homo sapiens
MSTTTFPSWGVLSRLSGKTLGLVGDSEETVTVVPWAQISKASSCLSGLDILRAQKYRAVSSVVRLFICRYSNFFESSLEMGDLGFTDAGILSGNYYLCFYYGQPTPVPGVRGRIRI

SEQ ID NO: 951246 - protein, 68 aa, Homo sapiens
LKTEGHQNEDKLEKLEELTMDGAKVKGYTRMPHGPPWAWTYLAIDLINIRELTPVRSGDYIYKYPGYR

SEQ ID NO: 951247 - protein, 115 aa, Homo sapiens
NIMGAIYEKSGAKWTKVHELKGAQGQVTGIDQGPRRVTCIVTCGTDRNAYVWTLKGRTWKPTLVILRINRAARCVRWAPNENKFAVGSGSRVISICYFEQENDWWVCKHIKKPIH

SEQ ID NO: 951248 - protein, 68 aa, Homo sapiens
MVFRNAKYERRERRANSLPSIPKPFPELCSPPSQSPISRGAPPVKGGCSPENAAAPMVLKVYSEDGPA

SEQ ID NO: 951249 - protein, 60 aa, Homo sapiens
RVGKGSPQYAVLTTQPRVLTLTSLCSERNDSWLILGDQTHISILALKYALLTFLLRTPSK

SEQ ID NO: 951250 - protein, 94 aa, Homo sapiens
QERLQRSVPTVQWENRFVSVYSKDNPNLLYQQCVASQCRILPQVPHQLMRRSPTRHGVWNLPHEVTKERTDQCFLRVDDESMQRFHNRAASDSH

SEQ ID NO: 951251 - protein, 34 aa, Homo sapiens
PGDSRACWLLSVAAMKKVFNSSGWSRTNRVKVPR

SEQ ID NO: 951252 - protein, 117 aa, Homo sapiens
CVCEEKQVKEERSAGQTVQVYSSHRVSSDSAVWTEMQDSSHSRCDFKSSASLSARHLNVSAVLLAECEEVERQPTPVSTVTPVPTLTCVPSPIIFPVPEKWAGCLHLCLNYMARDIA

SEQ ID NO: 951253 - protein, 85 aa, Homo sapiens
RGSSIIMSIECSVAQSWSTKSNFTWLLLQDQPLDGDEAIGLGVSNHQPPALFTSLREERRHDRACDFLLSLQLHQHHRWPAHLRM

SEQ ID NO: 951254 - protein, 45 aa, Homo sapiens
MVDMGVGWSGGLSLFSRWSTREAIFILMVLFGPELLSWKRWPTAH

SEQ ID NO: 951255 - protein, 94 aa, Homo sapiens
MEDGEEDEEMIESIENLEDLKGHSVREWVSMGGPRLKIHHRFKNFLRTHVDSHGHKRLQGAHQRTCAKSNRESPGGELMRNLAARGARGWLTAH

SEQ ID NO: 951256 - protein, 44 aa, Homo sapiens
NGIDVKCRYTADEKEGAEYLRNPTNYPVFIRFGRPRLNLNEKAY

SEQ ID NO: 951257 - protein, 189 aa, Homo sapiens
ELGSTEPCRFGNGEALLSAALHLDELVDRGWPTLHALLQIDSGPRFAIMCPHVIIKKPRLLKSSTAHVTPVSDRIFVCSHVDLNIKSDSKCLPTYLTAKFICLAILFLGRFCSHLTFIKRTEILCFNPKNCWFTEEVGRCRIRTCGFRSSECVQVWHAEHAIQGHIPLEWDDILFLCRSEWNNSGPFHG

SEQ ID NO: 951258 - protein, 108 aa, Homo sapiens
VISQKPETKKTRVTLPYGTKRVLSSANRAVVGVVEAGGRIDDPFVKGGRAIHKYKAKRNGWPQDTGCGHKVLVTHPLGGGKHQHIGEPSIIRREFRCRPQSGCQCCPP

SEQ ID NO: 951259 - protein, 87 aa, Homo sapiens
MRAKNPVPQLRKFTTNVSPFFDKMIQSSHSQKSGSPISSEERRRRDQQHLDDFTAARASTNFTIAQADALHKKNPGHFTDTGQTRIM

SEQ ID NO: 951260 - protein, 116 aa, Homo sapiens
CCLHVLRDLCCPLCLVDHDRWSPLLDQTMIVVPGVACVMPVALDVVLRTIGSLRREADDDRPSWRNTDDDRSPRRPCRLRRGKLAVMRKMTRPPKRELDKARRKLANSYMSTEDQD

SEQ ID NO: 951261 - protein, 48 aa, Homo sapiens
WVARENSSEDVRPWRAYDNDCADEAGRGLDENGCDYEGYGGDGGKRRA

SEQ ID NO: 951262 - protein, 64 aa, Homo sapiens
RSRTVTVYRAHCVHDIFSGSSIRCDPYAKKKLQEFGDDSPYPYDHRLSLRTLRAPLTLQLWCIP

SEQ ID NO: 951263 - protein, 108 aa, Homo sapiens
SKDKLLVSPSTGLFDNHDGDDDDDFFSATHSKPSKTGKVQSTADIFGDEEGDLFNEKASSIASQPLCVRQMKIKQEQNNRLLHLPAKISKPSSETTTQKGLFSDEAAL

SEQ ID NO: 951264 - protein, 89 aa, Homo sapiens
HPCLGELVSSTWFVVLVAFYLQSKGYFRCKNCKNPKAKESLVDSGRDADVSFLTTTFPRRHTTHVCDDGRWYVTVCNVFFLDWHASRLG

SEQ ID NO: 951265 - protein, 124 aa, Homo sapiens
MALWKSRIRPENTKKRTFVAADGKSYQVPMLAQLSVFRCGSTSAPNDLWYNFIELPYHGDSLSMLMALPSESSNPLSAIIPHISTKTIDSWLSIMVPKRVQVILPKFTAVAQTDLMEASRMGTE

SEQ ID NO: 951266 - protein, 46 aa, Homo sapiens
CREDAPWLKPLEGRRCKPGAAAAGEGSAAAGSAAPEYAMVAVDPEG

SEQ ID NO: 951267 - protein, 42 aa, Homo sapiens
PLKPNDISYFAYPILRIVPNKLVVFLALLLSILILSIIAGPR

SEQ ID NO: 951268 - protein, 42 aa, Homo sapiens
GASHVTLYLWELYIFPNIVFLCLGCFLVDFECRIRPCDVAIS

SEQ ID NO: 951269 - protein, 74 aa, Homo sapiens
DATMGMVGWEDGSHLSVRGLGQTLMLHMAGVSLILSRSDHHRRPLLEGSIPCRPGLHKLRVLGLVLPIPLPGQL

SEQ ID NO: 951270 - protein, 60 aa, Homo sapiens
QQLNHSQDVHEITYSISSAEPCTTDKRGSSCFMLTDIGWPSLYGSDDKNQEQNRASGELS

SEQ ID NO: 951271 - protein, 50 aa, Homo sapiens
TRTQEVEVGGGDRGDVAGGLPQSLLPIRAAPQVQDGDLTRYQSNTILRTY

SEQ ID NO: 951272 - protein, 42 aa, Homo sapiens
MRVPTVLRARYFSEQQKCLGDFPTLNFGHIISKHLHLGLAIC

SEQ ID NO: 951273 - protein, 42 aa, Homo sapiens
NRGRYDNPTPIFWDFLEIDPTLHSNNISIPQELYERCWSHSN

SEQ ID NO: 951274 - protein, 113 aa, Homo sapiens
SFLDGHDWTAAHPSASGSVAVHGRMRVDQTLDLLNAVDHEHILQILHSALHPIVERSSPLGKLQVKLINGFSNFSILSKGFSPLLSKRSQSVPLVHKFSGTIIDIHRGVTELE

SEQ ID NO: 951275 - protein, 75 aa, Homo sapiens
KWCTQHLRAMIILPEMVGSMVGVYNGKNFKQVEIKPEMIGHYLGEFSIIYKPVKLGLAICKGTALAIVNQVVAVS

SEQ ID NO: 951276 - protein, 40 aa, Homo sapiens
MSASELLELLLGAGQPLVTLSTLKRTVLLRGPALAQCDDA

SEQ ID NO: 951277 - protein, 36 aa, Homo sapiens
LSRQIHPYNNGMPQALHALGVALFLRHRDVLGLGYH

SEQ ID NO: 951278 - protein, 43 aa, Homo sapiens
EIFYTPETERDYLGAAIRKVIQSHMCEEEEGDLLLFLTGQEEI

SEQ ID NO: 951279 - protein, 109 aa, Homo sapiens
MANNLQKGSAGPMRLYVGSLHFNITEDMLRGIFEPFGRIESIQLMMYSETGRAKLYGFITFSDSECAKKALEQLNGFELAGRPMKVGHVTERTDATRASSFLVGMMKDA

SEQ ID NO: 951280 - protein, 137 aa, Homo sapiens
TVLYTYPTVFAPYPKFFFRVWVNILKSPQFGFDIDTTDHIDACLSVIAQPFIDACSISDLQLVKYSPTNKLLYAKKIPEHRKIVPRCYKQIQDMTPLSEHDMNAHLAEQSRKYQNEFTTNLAMAESYKHAKRNPPQI

SEQ ID NO: 951281 - protein, 146 aa, Homo sapiens
QGFVPAAYVKKLDPVLAASRENLLEEQGFIALRQEQIDNQTRITKEAGSVSLRMKQVEELYHSLLELGEKRKGMLEKSCKKFMLFREANELQQWINEKEAALTSEEVGADLEQVEVLQKKFDDFQKDLKANESRLKDINKVGMMKD

SEQ ID NO: 951282 - protein, 56 aa, Homo sapiens
DLIDDSKLKDIEMGLEHELMVADRRQKAREFGSWNRNCISGRCQWTGITWHELSGL

SEQ ID NO: 951283 - protein, 47 aa, Homo sapiens
VIYREKEEKYAEGVFDKCSNGRKVILYGIGTVIPKGVCIDTQYSEQR

SEQ ID NO: 951284 - protein, 78 aa, Homo sapiens
CIGSLTAISQGLKAFVQLSSPFILQNKGTLLSSVPSQYWHAPGIVLPGLDTLASSIDNPAQSLLVQVNPFSDMAHGLH

SEQ ID NO: 951285 - protein, 55 aa, Homo sapiens
LPVVLGCGWPAGRDGVCLEPPPLTNYDAHVFTGITSIRETKELPTNSFLGCLKNF

SEQ ID NO: 951286 - protein, 72 aa, Homo sapiens
SWTTVEWSGDEPDMGRSPSSAGLGSEVQVHGRAGLQLERPGLELASSVFVAVLVFCFFIIKSKNIFLTTKGI

SEQ ID NO: 951287 - protein, 96 aa, Homo sapiens
TKYTTTDLVIDLQSKRGLDNLLQADIWQQVADVLQLVATLMVAGQHACGDFFQVAPDIQKLEYSPFKPWTWKVIRWDRVPTDVSLISRNKMSTPTG

SEQ ID NO: 951288 - protein, 38 aa, Homo sapiens
MGFRELTVQTAIHCWLATQLNCFVREMPSVLYKQNRLK

SEQ ID NO: 951289 - protein, 117 aa, Homo sapiens
MQWWNSRKDATFGCNVIATRAGEQMAPFLPQLVPRLYVNQFDPNLGIRQAMTKYLGMRWSLTNPWWIHILNEILQDLVQNLTSNMWRVRESSCIALNDLLRGRPLDDIIDKLPGYRA

SEQ ID NO: 951290 - protein, 35 aa, Homo sapiens
MGQVDSGAEARVRLFKMVMLHTKFRKVSLKGPVEV

SEQ ID NO: 951291 - protein, 123 aa, Homo sapiens
MGQRYQHIAKPSVKPNVGVIGVSLEHNITSIRMGTYTPDRYSFWRLMSVARIRTPICVSISSQLSKADVRISTDSLNKPTVDLAVVISQYWVFLYKVATKGKVLNKERLINTWMIQIMSGSCN

SEQ ID NO: 951292 - protein, 134 aa, Homo sapiens
  misc_feature (5)..(5): Xaa can be any naturally occurring amino acid
MRSYXYRKMLTGNCTKVCIVATVDSTVRALWVRPLQVSICTSHAKPIEAVIQPVLVPSPQSIHTDRVQIHSFSKVSFELTSHIAFIQFSSSPPVFSICHYVSFMPNTLFTHSLPFNTHLSIQPSHFQHPWVIQQ

SEQ ID NO: 951293 - protein, 73 aa, Homo sapiens
GCKMTPTMLALLLSNGSNRRLRVWSMWVQGSVRVRILLSKGARGNGKEKEGLVSLLYGNLGHAYITWPLNTFS

SEQ ID NO: 951294 - protein, 104 aa, Homo sapiens
MLPRSKGTSINAQQPMQLKTLRLATPPTGNQQCIQPFSTYTLKVSTHMLILTPRVWSHFCAQPTVVPTTIHTPQSTSTASAVKAVFSAPPHSRNQQLNKLHLQV

SEQ ID NO: 951295 - protein, 162 aa, Homo sapiens
ILKVSDVDKRTGQENTILITNDTGRWSKADIARMVQEAEKYKADDEKQRDQVSSQEFHLQSSCLPTCTATARSMRHFQGQDEPMQDNTDRFCDKVYMNIINFGLIKNQTAEREEFEHQQNELETVRKPIITTLYQSAGGMPGGNAGGYPGGGATPSGGVPQS

SEQ ID NO: 951296 - protein, 166 aa, Homo sapiens
PCRFQTGYCNGFPAGVLGHQQAVAITTPEYFYIPLRLGLTDINEAYVETLKHCFNVPQSLGVIGGKPNSAHYFIGYVGEELIYLEPHTRQPAVEPTDGLLHPGRELPTASTRPCRMSIGGSLTRPSLWGFTVRLKMTSMIGASKSKSCLCLEVPCHFELVSSAFTS

SEQ ID NO: 951297 - protein, 93 aa, Homo sapiens
AETLSRLIASIVLYHTRISTLSQDRQRTGNISSIPRLPRSNQSRKADASYRTGPLLFTTQQRLDYTHILCVDFTKKWRLNGIRPSQILSFQSI

SEQ ID NO: 951298 - protein, 189 aa, Homo sapiens
MGLTRNESTDDDFLQNLDGVSSALVQRGCPMFMDRRCGIYRKPLLESGTLGTKGNVQVVIPFLTESYSSSQEAPEKSIPICTLKNFPNAIEHTLQWARDEFEGLFKQPAENVNQYLTDPKFVERTLRLAGTQPLEVLEAVQRTLVLQRPQTWADCVTWACHKWHTQYSNNIGQLLTISLLTAQSSERRL

SEQ ID NO: 951299 - protein, 121 aa, Homo sapiens
MMFDNGSIYKPEVLDITEETLHSRVLEGVRNVASVCLQMGYPTVASEPHSIINGYKRVLAQCVETDDTFPLAEKVKAFLADPSAFVAAAPVAAATTAAPAASAAPAKVEAKEESEESDEDM

SEQ ID NO: 951300 - protein, 109 aa, Homo sapiens
MNYCFIPCFSSSFDYLLTPMSIYEPLHFYASSSSHWPLAACTQEMHLLHELHLDEEEKQLDVARDEYGIAICAECPLLAIFYDLNCFLYAIYFLLKRKRSQDAFSLATF

SEQ ID NO: 951301 - protein, 73 aa, Homo sapiens
PLSQLQTLADSDPATPRAVGMPFTPGPYSGVSTLALVARASAFSVGVVYGSIKLSILKATKPKKEEAHAHAHH

SEQ ID NO: 951302 - protein, 86 aa, Homo sapiens
EIHIQLYQSLVKLIHLDILYEVPAQYSNLVQTLLIQLQLLLPPPGLALLQTPQFLLPAFLVSTSEVSSSCPGACWNIGSCIYVALL

SEQ ID NO: 951303 - protein, 81 aa, Homo sapiens
AGLVQLVVSRGVREVCSRPPVSKWTWTSLTILLMPPRPKFGCHLSYDRSNFPVIVSGRWMSFKGYTSSSPKPFRLGVGQLD

SEQ ID NO: 951304 - protein, 193 aa, Homo sapiens
TLGSSELGRAGDMLAGVLAVCVDRCMKPSVQRSPLHLLAAADELGPVGWGFSTELTASRGKQSPHPAEPRKRQGCAQAHTGTVRVTQRCTAGGKPSSEKHLLLESCNSAVGVDLQGTVCRGRGGCGRGSVFKCDLQPDGARWEAGLLKLNTQGHTMLGQDGCHLELPLLVSPAIAGPAPASSLSRQFQAPRKS

SEQ ID NO: 951305 - protein, 95 aa, Homo sapiens
ALNLHSQARLRNENKSGGITLPDFKLYYKAIVSKTARYWYKNRHTDQWNRIENPEINPNTYSQWIFDKANKNIKWGKDTLFNNSTGIIGWPYVGQ

SEQ ID NO: 951306 - protein, 34 aa, Homo sapiens
MELRSMTKPFRRRGTCETEELYGGTFQLYKSADR

SEQ ID NO: 951307 - protein, 81 aa, Homo sapiens
RILTASRCHTEGDRNGVTAVNVTPYEENLNYMSLGHVLPHEHWPPLDKNVYQALTIGISSSDVEIKLKKERFYVLEDSGLH

SEQ ID NO: 951308 - protein, 75 aa, Homo sapiens
HCSASVITFQCPVVLGPSEFTQTCARVHDCYHPVDHSCHSEEKCPPMRFPNYYTWCMARALAVPLLAVEHKEKKS

SEQ ID NO: 951309 - protein, 35 aa, Homo sapiens
MGACHTCNDMNYDVARITPWLQRVTQNRKQMNERE

SEQ ID NO: 951310 - protein, 176 aa, Homo sapiens
MYGQREIMPALLMDMSSAAQALDSLPKGTQVIARNQVRLAEVWMDEYKEIFYRRNTDAAKIVKQKAFGDLSKRFDITTPPSVYKFYMVSRTTFIQRCMCQTLILLYLDTLKSVGQPLCLDVGENNQGGKPLIMYTYHGLGGNQYFEYSAQHEIRHNIQKAFVYMLLKGLVPAKGMY

SEQ ID NO: 951311 - protein, 114 aa, Homo sapiens
  misc_feature (11)..(11): Xaa can be any naturally occurring amino acid
CLRRIPFGSMXVWHILCFLANRCSSTNSNQALWTHTEKSVTRRMESANPFIRNCSINQHETDYKLKTRDGKKNTGIISHSLRRIVFTDDFILNVDSWPWSWAKSLPQINILSEG

SEQ ID NO: 951312 - protein, 179 aa, Homo sapiens
VESGLLNIMDFVPKKFYVLCGVGLTEIGARLSTTTAVPLTLACGVPYTCCIRNTTEVVNTMFGYTTIDKERFSVQEMSSTYGGCTNAVIIWFMDNYTIMAGILLGILLPQFLEGASLTAAVPLDRVENIIMEHSVTDGSWGPVPSPAEDRRHGMLLSANPIRAQTAMEAPTKTVWDSNS

SEQ ID NO: 951313 - protein, 34 aa, Homo sapiens
LNVSDGQVDLMSSWTRSCRVSTRGEPSARWLEHY

SEQ ID NO: 951314 - protein, 33 aa, Homo sapiens
SVTEALPVYEPWRCFPVLLSLLSHNAKNLDTGH

SEQ ID NO: 951315 - protein, 111 aa, Homo sapiens
MGASKSSWHERAKSTFTLEVGARPAGLPGFEMKSPTCSSGRPPDPAWHVSEFHVIQRKLGSLRKDASVHGDHGTAVVVQAVHVATLLVGQQVNPTVLAGDKSRDHPGVGYE

SEQ ID NO: 951316 - protein, 122 aa, Homo sapiens
TSQAVIALSVCEPGIAIAVHSQDVSIPHCPAEWRSWWIGYSFLMHMVAGDEGGAHSLVSPGSCLEDFLRQPIHRMQWRPGTLAILRPNKYSFGVTTIPRAALPGARPRLTCLKGPVSSRTHI

SEQ ID NO: 951317 - protein, 135 aa, Homo sapiens
  misc_feature (69)..(69): Xaa can be any naturally occurring amino acid
  misc_feature (132)..(132): Xaa can be any naturally occurring amino acid
GRTEASEVDSEGYRYRHCCGRGVEEQRAAEAAVANMAQSRDSRNPFTKPSKLNNPFQDPAIIQHQPSQXYTTLNIYNPFKTQKPPPAYKPPAPTPLPPPSAPSLQPSRKLSPTEPKNYNSYSTLNLSYSNHXVSY

SEQ ID NO: 951318 - protein, 68 aa, Homo sapiens
RVENGFEYNQLGPVQAAEHSESEGGVCAVRQERSALGALGLRLDARALQQSTLIGLSPDRIPLKGLAK

SEQ ID NO: 951319 - protein, 34 aa, Homo sapiens
CCQVFNALDNYKHHYHTLHRNVCSFCNQTFPSRH

SEQ ID NO: 951320 - protein, 41 aa, Homo sapiens
EQVEEYGGCASSAAGSVRVRVAGTAVLGVGPAWSPAVKYPQ

SEQ ID NO: 951321 - protein, 42 aa, Homo sapiens
MVLIRTVFRLWLSWGGSTSGTVVLLLREAKEWTGTEIRLSSP

SEQ ID NO: 951322 - protein, 54 aa, Homo sapiens
HEVSRTCVAWLCELLDYQMTLKGNYMSYSNISSFLWQLLIEMSIFRGQKSVMAL

SEQ ID NO: 951323 - protein, 54 aa, Homo sapiens
LPVSVTVLAWLCSELASTMTLKGNYMSYSNISSFLWQLLITMSIFRGQQSVLAL

SEQ ID NO: 951324 - protein, 43 aa, Homo sapiens
MCLIYWSDCFKEIHVVQNACSQLLHTKWLLNPNIYEQQIELIL

SEQ ID NO: 951325 - protein, 55 aa, Homo sapiens
PEEVMVASLTTSFPSSRGHHVGSLFLDADHLGGAMESLVSVLTDDDGAEEVFHSF

SEQ ID NO: 951326 - protein, 36 aa, Homo sapiens
RSVNVTGQKCEACCASRSTRRRAMCVSSRKEQNTVD

SEQ ID NO: 951327 - protein, 68 aa, Homo sapiens
GQSYCVLECFPTLQRELLLVLWSSGLDLIEHWFLALLLLRVFLDSLNPLLCSTWVQVINQCKSSGFTK

SEQ ID NO: 951328 - protein, 96 aa, Homo sapiens
DLRSWQSVHSALVRNLATTVTEELLEQAFSQFGKLARVKQIKAYAFIHFDERDGAVTAMADMTGHDLEGETSCNIVFAKPPDQQTATKATSSEAIT

SEQ ID NO: 951329 - protein, 37 aa, Homo sapiens
RILLTSGVTFHPDQYKGEKGSEGEPGIRGIFLMGEDC

SEQ ID NO: 951330 - protein, 38 aa, Homo sapiens
LQDAYSSLIASSSCRTVPTKSMCDKPGRRQTSILMYSQ

SEQ ID NO: 951331 - protein, 43 aa, Homo sapiens
QGHALQVLQLTDFILRYRPVPTTKYVRQAWQKADINTHVTAWC

SEQ ID NO: 951332 - protein, 149 aa, Homo sapiens
MLERLVESCALSFCVGCVGVVFGKHYHPMVPQSVCLISSVPSMSEHACYVPVYTSLELHMRRRVIVQENVHMVIVVPCHYNAKGPRPMSTHTDPCSHYGTLLGSWHCSRVRMTTVPVKFANAYCTTSSGVDGAGDSDVMLKRPVNQVGT

SEQ ID NO: 951333 - protein, 67 aa, Homo sapiens
RLLSQLVMHVSHGYTTEQWMTTSLSSLSDDHQRVAPEWYLPIIPMVSINGAEGIGTGWACTLPTHAC

SEQ ID NO: 951334 - protein, 69 aa, Homo sapiens
MEEPQPKRSGILGRPYAACGQNIVRSCSLTAGNIRDQVQQQVGVRVHDFKVRIVRAPKMITEKAKARAR

SEQ ID NO: 951335 - protein, 53 aa, Homo sapiens
MAEGTGSELYVERNWESEIKVQGVNPLKLGCPVHFNTISTLTAFNRASRIFTG

SEQ ID NO: 951336 - protein, 193 aa, Homo sapiens
YQNGPIVIMIDGVEWNHQMESNGIIIEYEFNGITEMNLNGMIIKWNRREGSNGIERSHRMKSSGIIKWIRMKSSSNGIEWNHRMDSNGIIIEWNEMESSNVIKWNHHGMNIDMETSNGPECKNHRMESNAIIEWTRMESSWDGIKRTHGMDQNGIIMELDQTESLNGPEWNHRLDLNGIIKWTRMESSLNGIN

SEQ ID NO: 951337 - protein, 80 aa, Homo sapiens
  misc_feature (32)..(32): Xaa can be any naturally occurring amino acid
  misc_feature (66)..(66): Xaa can be any naturally occurring amino acid
QSLMAAEDKSSQKEDRFEEEIKVLSDKLKEAXTRAEFAERSVSKLEKSIVDLEEKVALAKEENLSXHQMLDQTLLEFNNM

SEQ ID NO: 951338 - protein, 48 aa, Homo sapiens
STRSYGHTCNGRTSVTHQDIVSDEIKLHLFFHSIGKSQYALGVIINNL

SEQ ID NO: 951339 - protein, 43 aa, Homo sapiens
PGTTTRRDDRLVLPYLMHRVVSHGQSCSSNEKENLQGPDIWCM

SEQ ID NO: 951340 - protein, 106 aa, Homo sapiens
  misc_feature (13)..(13): Xaa can be any naturally occurring amino acid
  misc_feature (38)..(38): Xaa can be any naturally occurring amino acid
  misc_feature (50)..(50): Xaa can be any naturally occurring amino acid
SGSVDGEFEIQAXDDARARSWDLEDPCPPSPPRFAPRXWSLFSGGMVRAXNKMKMKSGGFQSMGLGFPVFNGLMKNGFKVPTPIPWKTIPVILGGLGVVALARSVS

SEQ ID NO: 951341 - protein, 51 aa, Homo sapiens
  misc_feature (24)..(24): Xaa can be any naturally occurring amino acid
AGIWAGRQAGARRAGTPQQVGGVXVGGGGLGPGGLPALRFRGRAARRAVPG

SEQ ID NO: 951342 - protein, 106 aa, Homo sapiens
AYEIRTVTSEQKEMILFTPKCVRETHDSMPSHGHILLQETASLPAPAPVLRSVVIYMGNGLQHLVSFSIRINFEAGLVNKPINPIYAVIYTISIAAVVPHFAFSAR

SEQ ID NO: 951343 - protein, 50 aa, Homo sapiens
ITAAIPTQRSWRVEQDNKMTPGKPGHRVRAHAASATATEATVSLSSLVDY

SEQ ID NO: 951344 - protein, 143 aa, Homo sapiens
  misc_feature (33)..(33): Xaa can be any naturally occurring amino acid
  misc_feature (49)..(49): Xaa can be any naturally occurring amino acid
  misc_feature (57)..(58): Xaa can be any naturally occurring amino acid
  misc_feature (60)..(61): Xaa can be any naturally occurring amino acid
  misc_feature (70)..(70): Xaa can be any naturally occurring amino acid
  misc_feature (96)..(96): Xaa can be any naturally occurring amino acid
  misc_feature (115)..(115): Xaa can be any naturally occurring amino acid
  misc_feature (118)..(118): Xaa can be any naturally occurring amino acid
  misc_feature (127)..(127): Xaa can be any naturally occurring amino acid
SEVQLGSALAAMDRQLMRLADTPWLCQSAEPGXEESVMLVLAKRSRSGXFRLVTKFXXGXXSVNKEAHSXLGAPVHLWGTEEVAAWLEHLSLCEFXDIFTRSDFRGSELLLLDRXDLXDLGVTKVGXLKRILCGFLVLCRCAP

SEQ ID NO: 951345 - protein, 139 aa, Homo sapiens
  misc_feature (117)..(117): Xaa can be any naturally occurring amino acid
  misc_feature (125)..(125): Xaa can be any naturally occurring amino acid
  misc_feature (136)..(136): Xaa can be any naturally occurring amino acid
CGASPPEAAAQVVQWVSFAASALVPPASAWVFPTLGVMRHIKQATAHAKEEVRRILGLLAAHLQTRTFVVGERVALAGITAACALLWLSEQALEPCFREALPNANRWVLTCLNQPQXRAASGEAXLSEKMAHRAAXKPA

SEQ ID NO: 951346 - protein, 38 aa, Homo sapiens
DREVEQETRYPRELGIVSGPRCFGHGHEAPCPLLPGGL

SEQ ID NO: 951347 - protein, 111 aa, Homo sapiens
  misc_feature (83)..(83): Xaa can be any naturally occurring amino acid
  misc_feature (106)..(106): Xaa can be any naturally occurring amino acid
GDTCGGHFPWAPETRQEGGSAAGRPLTAHGELGPWRGQESLSLLSPEAVHGPRHKETHAAQAAGAPGSAQVLEAKGMASGSGXGGECEKKIQTAPANSGDSTPEKXNVRTA

SEQ ID NO: 951348 - protein, 46 aa, Homo sapiens
INSLTSTYLPRINIVRHSPTNSTQHILSVKTRTSNLPVLMNSNSIP

SEQ ID NO: 951349 - protein, 62 aa, Homo sapiens
SNSSITTTHTSATEPFQVDGPTLGAQHLEAGGSPTRHVTQEFVSRTLTTSGTLSTTWTNSSS

SEQ ID NO: 951350 - protein, 73 aa, Homo sapiens
  misc_feature (2)..(2): Xaa can be any naturally occurring amino acid
  misc_feature (8)..(9): Xaa can be any naturally occurring amino acid
  misc_feature (13)..(13): Xaa can be any naturally occurring amino acid
  misc_feature (69)..(70): Xaa can be any naturally occurring amino acid
LXNGRPTXXSPLXFSVRTFGRKLSLKPGADSHYPHPVLTPAYPSVWRLFHQLTIDLAGPLNPWDFSSSXXLFI

SEQ ID NO: 951351 - protein, 115 aa, Homo sapiens
MVWSLQTVGSHFELNCGETYKDHENIVIAKMDSTAKEMKAVKVHSYPTLKYYPASADRTVIDYNGKRTLNGKQEIPEERWPGWGRGIDDDLEDLKEADGAQNIEEDDTQDGFWVP

SEQ ID NO: 951352 - protein, 72 aa, Homo sapiens
NIIVTLRLVLFGLSVDLLFFVLCGYLRRLLSFCVAGFGLVHLNCLLMMDNDLRRRDGRQAYRLREGETLVYD

SEQ ID NO: 951353 - protein, 82 aa, Homo sapiens
DNWDTGDELAWDEELRGAPAAGQSSPLHFSTGKTHRRFHVRRPVRMRASVTEKGSAVGRGATIFKVTLLLLANSPGNAYAGA

SEQ ID NO: 951354 - protein, 47 aa, Homo sapiens
MLEEDQAGLRIPSAVWESLMQNWMPVDKDVTVYDVPVYSDFYRRIAE

SEQ ID NO: 951355 - protein, 57 aa, Homo sapiens
QWLLREHSDSVEDLTGNRWSNDLDTCPMTLYVPSWLGHLELMLDNDGLLGNEWGSRN

SEQ ID NO: 951356 - protein, 65 aa, Homo sapiens
GDGVNFVGNQSIKHAISGSSNKNFRHQKSERSWWTSAYATSYRGTMPTPWKETEIHKPPNSPHGS

SEQ ID NO: 951357 - protein, 32 aa, Homo sapiens
MLMNNGGNNDNSDGDGGGDDDDDEGGDGGGDE

SEQ ID NO: 951358 - protein, 77 aa, Homo sapiens
ILLEILDEAWCVEAQEKSALLNEFVSTWTEGSWTTLVVDTPPGTSDEHIGTIEALRTYQTLWGLVVNTPQAVSREGT

SEQ ID NO: 951359 - protein, 37 aa, Homo sapiens
IGDVAKNMGEMWNNTAEQIDKQPYEKKAAKIKEKYEK

SEQ ID NO: 951360 - protein, 44 aa, Homo sapiens
ILSETPPSMRRSNSTPHYDMISRLYAHPPPAHMVLVTPPRLLLP

SEQ ID NO: 951361 - protein, 89 aa, Homo sapiens
MQVHCGGGGVFAHTLVWVGLVRVVPAYVLDHLELWLGLVVAEAAKEGVAVGVGEGMMAQASSPAESTVAHIAHIGFGLTVLAKVGAQQE

SEQ ID NO: 951362 - protein, 49 aa, Homo sapiens
MTLGLGYRSVAYSMRLVSGKQRLTVARLSISEPISLHNPVLQSSPVLQQ

SEQ ID NO: 951363 - protein, 36 aa, Homo sapiens
RSHTLRMTVYLTKFDQYFNVELIQPGAVNGYAYYKP

SEQ ID NO: 951364 - protein, 72 aa, Homo sapiens
AKATCSVVTMYPAKGQDQLTCYKFVPQRVPYTQHLETDKRAQDGTEHYFILRSVTRYRGSAGCPYVNIGTYL

SEQ ID NO: 951365 - protein, 108 aa, Homo sapiens
MYLSTPLARCYQVICVRSKASHHGFVLYSLSFVRVSPVPGTDLKDHSVLGILRPLFCFRCWFYGDLEVEFITGELIFGLSMIHCHHREGALAFSFSCDCKTLIFLGLF

SEQ ID NO: 951366 - protein, 35 aa, Homo sapiens
LSAHHLMLLMMVVLTAGLEGHEIRGQFPIRSFFLV

SEQ ID NO: 951367 - protein, 77 aa, Homo sapiens
LDAAIIEVFTSSAYIKVCGNGAEPCELIDCYSMTVTLVARGPHRVNDSFVAETYTKRKRNEAGRPVPNHTLFGLQKN

SEQ ID NO: 951368 - protein, 74 aa, Homo sapiens
FSYYIGRTPKIEQLSTMIVQSCPCRSYSSKSVKTKDDSDDDNDDDDNKDDACNRKTVTEPWSITVKKYEKDERY

SEQ ID NO: 951369 - protein, 122 aa, Homo sapiens
SLLVVRPHSFWNWTSVWFSRHLWVVEDRVGVQDRSPSRGRSGIRKGKEVVHGDNDGAEFVTEVVHQEQLQLLAAHLGHGEEAVEDSGLTGGKAEPGRAAVPVSLQSVGQGDVSPVVRVPGTL

SEQ ID NO: 951370 - protein, 38 aa, Homo sapiens
QVHTPTLQVRESRVTLKVLVGKAGSRYRKLETELLTLI

SEQ ID NO: 951371 - protein, 46 aa, Homo sapiens
YRERMQDRHLPWITRSKARLDPYLHVRIQTVIRGAFTILLTLWVTT

SEQ ID NO: 951372 - protein, 47 aa, Homo sapiens
QVSSLNIGLESGCQKGAGAPQTGGKKASELLDVVFQIGAGTGFEAVR

SEQ ID NO: 951373 - protein, 50 aa, Homo sapiens
MSWAPIIRGTSQIAKASDYDRVLLVKKIITNAWAATITLVDVVLTLKIVG

SEQ ID NO: 951374 - protein, 128 aa, Homo sapiens
RGTGEQLFARERSKRESDTSAKKEESITSSEIEAVINILPTKESAGPDGFTAKFYQRYKEELVPFLLKAFRTIEDEGLLLTSFYEARLILIPRPGRDTTKKGHFRPVSLTNIYVKTLRQILANRIQQH

SEQ ID NO: 951375 - protein, 49 aa, Homo sapiens
PRHHFLHGKVLALMSLMDGSHCEPHTNAHVGCGGQTISRDSLKLSNTPR

SEQ ID NO: 951376 - protein, 76 aa, Homo sapiens
SLNGVSRETECPHPILTAGSCCWAERQNCVTLGQSLEAFCPLAEKGGLLLESHWDSNGKRKTGQSPPSMMFLLPLG

SEQ ID NO: 951377 - protein, 39 aa, Homo sapiens
RCNTSPVLLGQPWALNEAQVQAQWVQVLTELLEQERRVP

SEQ ID NO: 951378 - protein, 40 aa, Homo sapiens
EQKHWNAKTLRMLVQVVGLQCYCLKLVSMDLKLHRPLARV

SEQ ID NO: 951379 - protein, 52 aa, Homo sapiens
KVPIHRDWEDGEDTGGTLMRGGATSLRVTSGRASRPLCSWLKSKSWSSCRRS

SEQ ID NO: 951380 - protein, 78 aa, Homo sapiens
MLVGALEEQGLLEVARLLVHVGHAVLAVVCDVLGGLGGHQAQAGQLDGHIGRVGALAAILELESIGHALAEPDIPLAA

SEQ ID NO: 951381 - protein, 39 aa, Homo sapiens
LAVSWLRRRGSKQEAGKMWSDVGMRKGATCEREVGLRQV

SEQ ID NO: 951382 - protein, 93 aa, Homo sapiens
LLWLSHLMRHRKRQVPNHLLTGVGKLDATRVDQIVVLHLHCGLVPKLKIKVLVNRHRRWRAFQRGQHDHDVLDEAERKLLSRVKHVTNCIGVE

SEQ ID NO: 951383 - protein, 101 aa, Homo sapiens
SWELVQKAQAHSAGPACPRAVWSGGAGCGEGPLTWQGLRGLALALGTVGGKGLCHHALHRCEEEAGGGAALRQLLAHSTSQVPPLVLEVPQVSVVLDRERP

SEQ ID NO: 951384 - protein, 148 aa, Homo sapiens
LKRKEARISVRISKKQIRRKVVGKRISRKVAKKVARKAKRFAQMNKSFRKKQMKKLRKAGASDRILIKINNINKVMKKNDKVLIVLSKKLKTAPKVKRAPIVKQIKVIKRVIRHQQHKERRTVRRVVRASIRITTRRRRETVNSNYFP

SEQ ID NO: 951385 - protein, 40 aa, Homo sapiens
  misc_feature (23)..(23): Xaa can be any naturally occurring amino acid
SRPRPQKYGKNELDYPTQMNPLXCWQVEQSPRTGTETPPS

SEQ ID NO: 951386 - protein, 104 aa, Homo sapiens
RGQTSEPDTLDHTHVSTTQSKECVSVLQCADGLHTCEGQGVGGRGPSLHWTELSPSLGTTLYFHTGGGQSQAGGLKRGHRPSISCPFPVCNKVSGPPFPTTWFI

SEQ ID NO: 951387 - protein, 560 aa, Homo sapiens
WRGGALSDQPLPAWIPQSSRRVACLPHPVRCPCLPRHAVPLVAWLSVHAVAADPSCSVGCVLLDSGLVCLLLLVPDVIVLLVLWLLIAQWRAFVRLLWSGCLEMPVADLLLLLLCAPLWLAAVLTPAPVVARGDACVAAEGPVGLGSALPLDCVPLPAMWMADVRPAHLCQWQSPTLHRRPGLWVGFRGAPFPGCGPAARGPARHDLHVLSERCFGHCGLACGVGHLGALAVGAPFACSDRAFTVALGPGKPYAFGAALARYSPIGLCTEEHSPGPTAVPNVDIRVLMDRKDPETGAQLNAESMCAAPGGKHFVSDAMAPAGIPRCLFPRGEQLGQPLGEVGSVGLPPSKGFPKRRPRFAKILHNTELTASHSKFRTAPHVWFLFACKRGDTVSQRRLYTKQVYERFAARFLQRMAHREITPRTAYTFLSGQFQRTGAMRQRQAKLRSPVAPDSRQHLVTATALWNLQALKDITFHMVGFVIPPTGGFHQYSPQLWCTNESRRTSCSARKQKTRCFETLYQKGDSGTDDETPVIELSGQNDVMCEDLPSHLMTKPQREQI

SEQ ID NO: 951388 - protein, 57 aa, Homo sapiens
IRMYGKSLKTYGPRLMIICYYLSYVLFYVFRDGVSHIVPQAGDAVAAISDSLAHLRP

SEQ ID NO: 951389 - protein, 36 aa, Homo sapiens
CTLTCVSIMMNVIMYVEAQITVRINVKRDTLGRRDH

SEQ ID NO: 951390 - protein, 42 aa, Homo sapiens
AELVWTLPLRTPPRDLPGLSLRTWGLNGIFSLISVLVLMVLC

SEQ ID NO: 951391 - protein, 47 aa, Homo sapiens
SRHWIDDRQCMEPDKMRNIDYSDDLHKSQTLQVVGETRYTDSEICHI

SEQ ID NO: 951392 - protein, 41 aa, Homo sapiens
MSVCGHVLSMFLQVFFITADLDRQGNNSSLQDLVSSGFATI

SEQ ID NO: 951393 - protein, 58 aa, Homo sapiens
RIFHCSLLAADRFWCPESNIELVNPIVDSDSRHMDCAVIPRVTCSVGQVIGSIEYSSS

SEQ ID NO: 951394 - protein, 209 aa, Homo sapiens
PGARQGQQQAGGRRSRKAAKAAVAPGLRRRVSAALYVARGGRPARGGDRAPGLPEPRRGREHRAGGRRGEGGGGGAGNPRLAERPRARGVCVRARACVCVCVCVGGGSASIMWLESRGELQLPLQGEEPRAGGGREPGRPAVAPSRCVRAVRAHVSGGGERPQVPGRARFGGSSPLYCARSAGARRDVTSGGRSRAGRGGGRKISTMRP

SEQ ID NO: 951395 - protein, 33 aa, Homo sapiens
MYDMAWLLSTTARDSLGCNLFYVTGCLFVAVQN

SEQ ID NO: 951396 - protein, 39 aa, Homo sapiens
MAYAHVSSIMEAKEVRSSVASWVARLQWRVARLQWPESG

SEQ ID NO: 951397 - protein, 64 aa, Homo sapiens
CSSIAAALRDVCSNIEVVYPIVDMDSRIGLRRYPLGTLFPLVTVIAINSSICRSLFDDARWGYS

SEQ ID NO: 951398 - protein, 91 aa, Homo sapiens
MVLWRSVILRRFQKSTELLIRKLPFQRLVREITQDFKTDLRFQSAAIGALQEASEAYLVGLFEDTYLCAIHAKRVTIMPKDIQLARRIRGE

SEQ ID NO: 951399 - protein, 34 aa, Homo sapiens
VSFFFREGNQIYNEGPQVKHASFLVLGDLAIRPM

SEQ ID NO: 951400 - protein, 37 aa, Homo sapiens
DLLLSKLYKALSVVTFPVSNLGHAGDSLIQSPTSVSM

SEQ ID NO: 951401 - protein, 95 aa, Homo sapiens
MTEGGDSLVATLPAPQGRFLANLRRVGRYRDAACNTGRISRGLYRHHVYKRGYVHHKRVLWAIKSGETRNSSAWVACLDDGKHERDAGRVTEPEI

SEQ ID NO: 951402 - protein, 38 aa, Homo sapiens
REFIYSLDLDQLFIWVLREYNEVEPIILSVGEEDEVSI

SEQ ID NO: 951403 - protein, 47 aa, Homo sapiens
TQCHLISRPLPYTLYINKAPSVTPYFNATHCSTTVSNFPLSSPHSNR

SEQ ID NO: 951404 - protein, 45 aa, Homo sapiens
HGDYQGGSQGGYEGGGYRGGYQCHPAGRHEKGRYASMYGGYGSGQ

SEQ ID NO: 951405 - protein, 48 aa, Homo sapiens
VNSYRPCTGRRLTQTVITMHGPSLTANSYDYALAVSYQYTGYDHALAC

SEQ ID NO: 951406 - protein, 48 aa, Homo sapiens
SHGRCPVPSTSVCLVVIAVLVGRMCLGGVVRCGVSFPFSRYLRRRTTR

SEQ ID NO: 951407 - protein, 42 aa, Homo sapiens
LTCYKHALGRRCTFNSYDACTGRRCRLDRYDHALAVVFHKRP

SEQ ID NO: 951408 - protein, 74 aa, Homo sapiens
  misc_feature (60)..(60): Xaa can be any naturally occurring amino acid
RGSHAIISDVYIDAYTDDLILSTAKLVLDRRTSNLIVNGILFLVMNFILEVPSYNSELIXCDYLKKITAGYTRE

SEQ ID NO: 951409 - protein, 34 aa, Homo sapiens
KCRVIGCFSGSNSFSSTSFISTSVSWLMVDMKEE

SEQ ID NO: 951410 - protein, 53 aa, Homo sapiens
MATVYTYMYYTSCTRCLDYRSSHIYPALPPENGIRRPSRIPSCVTPFLQTLNK

SEQ ID NO: 951411 - protein, 46 aa, Homo sapiens
HRSPSLRILYIQTRLYDPSLTIKIKLATNGTEPTDIHLTYGVTKSY

SEQ ID NO: 951412 - protein, 37 aa, Homo sapiens
RIAMTMHWTTFYTQSYDHALAVLNTNSYDHCMGRRLT

SEQ ID NO: 951413 - protein, 67 aa, Homo sapiens
SRRTRIAGKYVRGPAEKISILAVNYSMSTENLDVLLVVFSLQKFIFIVGISLIIQFAICVKVGVLVW

SEQ ID NO: 951414 - protein, 51 aa, Homo sapiens
IYALSTLNDSYGMEPLEAMSHRPAGGRQFAGVLRLMLQYLSAGKDALILQD

SEQ ID NO: 951415 - protein, 70 aa, Homo sapiens
ALTGQDGEVLLTLSQQLHELDEVADDRVRKVVSHKSRHTTAAGKELTPSQLLEKLGFAAATLQTPVKDLS

SEQ ID NO: 951416 - protein, 35 aa, Homo sapiens
MDKDGIPPDQAQVDLMPGKQLEHGRTLSDYNTPGD

SEQ ID NO: 951417 - protein, 170 aa, Homo sapiens
EDHAGLPLHEVLLEQAKVVWQFRVTEDEDKWPVTSDKTIGGRSAVYLKMGKNNQSALLYGTLSSEAPQDGESTRSGYCAMISRIPRGAFERKMSYDWSQFNTLYLRVRGDGRPWMVNIKEDTDFFQRTNQMYSYFMFTRGEPYCQEVKIPFSKYYFSNRGRIRDVQMSSG

SEQ ID NO: 951418 - protein, 67 aa, Homo sapiens
  misc_feature (16)..(16): Xaa can be any naturally occurring amino acid
  misc_feature (22)..(22): Xaa can be any naturally occurring amino acid
KVMTSPYRKPNGEELXASGQQXMCMTLETNPPVPVKSSEAVALSDSLTKTSGETLSQNHSDKLVSDS

SEQ ID NO: 951419 - protein, 57 aa, Homo sapiens
LRHTGRIRVHGIWLVATSNRDLKIDLLAYPGLSETKSATLLSETGYPMSCYCSLGYL

SEQ ID NO: 951420 - protein, 106 aa, Homo sapiens
AGFGVGFDQHGAGGGEGLQVLDQVFVVAARAIGDGGHADQLVAAEERQAHEGIQRRMAGRQAAAARVVGWIVRQHRLPAVQDMAEQRLQVTEFEAADDIAPMASAR

SEQ ID NO: 951421 - protein, 61 aa, Homo sapiens
STAIHHWPSCTDNSYNQAQAVDSTVNSYNHALAVICDSYIAMTMHCPSLPTIGNNHEWLGM

SEQ ID NO: 951422 - protein, 34 aa, Homo sapiens
MEQHPVVGDDLLGLVVLARAALRIAAAQVPRRQH

SEQ ID NO: 951423 - protein, 51 aa, Homo sapiens
LFAQMAHVRRLHKNNNSLIIPTIISRTITLLKLYYYLRLIYSTSITAISPS

SEQ ID NO: 951424 - protein, 37 aa, Homo sapiens
MLFLSSPPLSPHALQLKPIQYLEVLERWDPKTDSETE

SEQ ID NO: 951425 - protein, 48 aa, Homo sapiens
LAVSAFALKMVIKGETYENGPRSQRVRDAVVATIATLYGIWLVVAAGA

SEQ ID NO: 951426 - protein, 66 aa, Homo sapiens
GIISSTCDLGPEAPLRVYNQLAYDGKDYIALNEDLISWTAADTAAQITQRKVGGGPVMAKQDMSLR

SEQ ID NO: 951427 - protein, 47 aa, Homo sapiens
RLPAGPASSPGKGIRLTPVYCGGSSSGYAAVEEVGHGACGWDPTRRK

SEQ ID NO: 951428 - protein, 40 aa, Homo sapiens
MTGGVYSVNALKSVRANHSFMPIVLELLPLKIFEIGPVHA

SEQ ID NO: 951429 - protein, 56 aa, Homo sapiens
KPYQQPPGNESGYINQDCSFLNPFGKTTDADSSSAGTPYNHLSTHSNSITWIGYLS

SEQ ID NO: 951430 - protein, 47 aa, Homo sapiens
FTLTAFYILLPLITTYYSYYALITAFYVLLLLITAFYVPLRLITAFY

SEQ ID NO: 951431 - protein, 32 aa, Homo sapiens
MAASMHFSTRDAMYTGLAGGHDPAVDKHTLER

SEQ ID NO: 951432 - protein, 74 aa, Homo sapiens
GVVYTNSNNHKMTCMLPSNSSYRSCDVHRIAKQYLHKRTQVEDYLLNFKTYYEASEKLRHRSTSKRLDTKINGT

SEQ ID NO: 951433 - protein, 68 aa, Homo sapiens
  misc_feature (48)..(48): Xaa can be any naturally occurring amino acid
QRIPTKQLIQVSYQSKDLLITAQELDRWGTQPLELGRPVFPGPRISVXGISVFCKGCDLKLFKTNHLW

SEQ ID NO: 951434 - protein, 53 aa, Homo sapiens
ALWLLPNTSAAAPYWGCGIHAPVQGCPCSQYSARTLEPDGRITTRGKGTPLEV

SEQ ID NO: 951435 - protein, 151 aa, Homo sapiens
  misc_feature (98)..(98): Xaa can be any naturally occurring amino acid
  misc_feature (110)..(110): Xaa can be any naturally occurring amino acid
  misc_feature (130)..(130): Xaa can be any naturally occurring amino acid
MYRYELGLSTCSFEQLQRKLAESKATYFCSGGVSMVRTLMVTVVILLTILASLVVTMVTKPAYSSSGQRIPSDCCIAISCLRSCTESIKSYTITMDHXWEGYQDLTFPSXPTRSMEEYFRAHLKIATNVXHHMGWYVFSLNNRAPINWDSS

SEQ ID NO: 951436 - protein, 31 aa, Homo sapiens
MTVGTGWNGTTTLGRTGDGVGWQQGGEWIAW

SEQ ID NO: 951437 - protein, 53 aa, Homo sapiens
FPNIIHCHIIPLTNPCKSLSMSNQQNVFDHLCDRLFHSGLKPPDLKLHSHQLG

SEQ ID NO: 951438 - protein, 48 aa, Homo sapiens
YHRLALLVLSREPSLPGMYFLGWVSANFIASNWAIFSHSFTSPKTARK

SEQ ID NO: 951439 - protein, 51 aa, Homo sapiens
MLDYPPPEQWLLVPPPVLTALKALSVVDNSQSPSWATAGDLLIHIAHQRFH

SEQ ID NO: 951440 - protein, 48 aa, Homo sapiens
MARISTSSLNQQESSVPEVPDVMHIMPLENAGTLSPSMTYSLWFSKLH

SEQ ID NO: 951441 - protein, 45 aa, Homo sapiens
KKARAQQTVKSVERWALPQREHGRFSTAEMSAVTQNDTGTEPTHI

SEQ ID NO: 951442 - protein, 38 aa, Homo sapiens
VVIWSRQQLHYVNKIRTKVDELTQIIRDASKARAPLSG

SEQ ID NO: 951443 - protein, 55 aa, Homo sapiens
DQLSSYPRYRRCQNCDRMEMEKLHSMSAEPMVSRSEYHGVSPKVESVQLLRFVKS

SEQ ID NO: 951444 - protein, 50 aa, Homo sapiens
MMSKNQLLDLGFKLGNVRDPLSTKIQKLARRCGRHLYSQLLRRLRREEII

SEQ ID NO: 951445 - protein, 58 aa, Homo sapiens
PHKFSHQLKQLAHAPTTHGNRSKAAHQSSRILSCVRAWVQCIRVLCGPTFKPARRTAP

SEQ ID NO: 951446 - protein, 95 aa, Homo sapiens
  misc_feature (77)..(77): Xaa can be any naturally occurring amino acid
MCRRHELLILSLIGEDKGFGISVDIRAQSVGSGVQAAEADRSHVCVHVCVCVCVYSLVVDTYVFSNPGLRELPPELXQVGNLWQLDTEDLTISNV

SEQ ID NO: 951447 - protein, 60 aa, Homo sapiens
WCYSCLACLTVDTAGADAPHCLWLGDTRPRFLEEVKFECHFFNGTERVRLLERRVHNQEE

SEQ ID NO: 951448 - protein, 62 aa, Homo sapiens
AYNVHSSDRGAVAYSLPSFFLPRTVVLNGLSTKNYYYDYVATLRLEATCQCMALGWSTTHEA

SEQ ID NO: 951449 - protein, 204 aa, Homo sapiens
VPELNPNQENSDILVLDDLFENKLPENYDPHIVQVYRFMNPEMYDTCIDLVAVGDRTESSFRSLHSRDNPFENSPHDYTKSYSISTDFFATKETAMQFVQQGMNLLNAKDLSDVSQAKSGIERWYTLAKKEEIFKMNSIDDIKQQLIMSSDWSALNAYEMTKRACAELTKHGHRVPSWNVIRDIIGKGSAGDINRGKDDFRKEH

SEQ ID NO: 951450 - protein, 41 aa, Homo sapiens
RGHIWSRQGSDLRPLLAAGACPEEEKAAVAVRLSHRSGEEY

SEQ ID NO: 951451 - protein, 66 aa, Homo sapiens
WVVRKLLKVYVPLLNGALRREKVMYVVAVAMLVVAGLVYTQVGKTFLPTMDEGDLIVGIEKLPSVS

SEQ ID NO: 951452 - protein, 107 aa, Homo sapiens
RNVKAAVVDVGWRVRMVVGGRQVVRCWAHTAVQAEGRSNEGRRQRYTAPTDGVRTCAVVVEWTKNMHVTCIVIASGWRLHSFDRLCFQSHMAGNQALKRYSRRMHKR

SEQ ID NO: 951453 - protein, 46 aa, Homo sapiens
AVPLHISHLGSYPGPHTIALSTTITRTTAIVATITSKSIISTITSS

SEQ ID NO: 951454 - protein, 120 aa, Homo sapiens
SGDGMLEAFKQVSLTKKVTVEVAKQYGSFDEEDPDAALEIDDDGLVEISQWRHAIVNFPHPLLKEGLIIDDTPGLNAIGTEPELTLNLIPNAHAVLFILAAYTVVSMSDIDVWRNHVGSG

SEQ ID NO: 951455 - protein, 41 aa, Homo sapiens
ALKCLDAPCLPVSCITYWRLSHHNLTLPSPGLRFSDTSQPP

SEQ ID NO: 951456 - protein, 97 aa, Homo sapiens
  misc_feature (46)..(46): Xaa can be any naturally occurring amino acid
HGRKLKGAFKPASLPRRMTDLRQEGLSIQSVTINFMELTPSLHSLXLDKQVDRPVSGRHSEIAMTQIARISDTGNERRLQAERLVGARLCRKPRRFR

SEQ ID NO: 951457 - protein, 102 aa, Homo sapiens
MLQDSRWYALPNFPACVYYPTLSQSLLPHPAASPSRVPEPFQMGGKGHTKGTKVIIGTQENFLPIYLLNYKAWGQRKLTEQAAEGQDKLCLIQRLAVVHPEA

SEQ ID NO: 951458 - protein, 200 aa, Homo sapiens
VASSESMNKIWPTRNHYLIAIFQFKCRQFIKILIICRQTERNTTRRFQLTHFCQHVSTCFLFRLQFERNYLCIYCTGLIGCGFSIFCTTLRFQSAYCFLQVELLLLAGLLTIKLSTKQISIRSCAARFRDERLYRFSWPHLIHTGNIHLSLNARKNLTFRNWHLNIVLRKNRHGITCLQTQIIFAFGIIHCPTKIKRQRG

SEQ ID NO: 951459 - protein, 105 aa, Homo sapiens
PRGSPDMLITEDCAHLFSEKLWPLDGPFFVYRPFGVHSMGDAGQLPAERNGYVTFGCLSRSIRINHKVIRIWAAILDAMPTARLIIDSGDFKDPQICEEMAARFA

SEQ ID NO: 951460 - protein, 97 aa, Homo sapiens
  misc_feature (26)..(26): Xaa can be any naturally occurring amino acid
NIDCSVVSPIAAAGGDQMSGWAMLPXRTAQVWLLGMRGAAIQYLEILNEEGGESWWPPTPGRAVRKSMICVGPSGLIIGQVDDVVLDALVLQLENGG

SEQ ID NO: 951461 - protein, 72 aa, Homo sapiens
RRAGLHLLEHRKQLVDEIGHLGRRTLGGRTNQQVLFHRQAREDLAALRHIGEPLRDTLVRGQFLDGAPFPID

SEQ ID NO: 951462 - protein, 36 aa, Homo sapiens
KVSSGRVSSSSTLRRPLMLASTLMRVSTLSHTCVLE

SEQ ID NO: 951463 - protein, 41 aa, Homo sapiens
  misc_feature (1)..(1): Xaa can be any naturally occurring amino acid
XALVVSSLFQCSNASVNSTSIACTVSSTSSRVMWLHCLGTV

SEQ ID NO: 951464 - protein, 72 aa, Homo sapiens
MGGRQHRAVDHDGVVQPGYLDAEVSRIESLEYLDKMELLEHLMRHYCLCWATTGGKMRLGCKEKLIKSVTHK

SEQ ID NO: 951465 - protein, 41 aa, Homo sapiens
PPAPPSCGCYYLHVHYWAGQEHRNIAKKSPELTFSECPVLR

SEQ ID NO: 951466 - protein, 112 aa, Homo sapiens
VVVFLVSIGLLPDMLPIDDFWYVSGLVPTHEASWAVTEGLAPFWTTRDAPTASAQAFPSSRVRLVSALSAESIDNCRCLLGSQLVPLLACRSLSQLSSYLFIHQLNFQFSQK

SEQ ID NO: 951467 - protein, 45 aa, Homo sapiens
THGNGSQINFLMRKNRADPWQAAERCVWHTWSRNPSIQVSFPTFF

SEQ ID NO: 951468 - protein, 79 aa, Homo sapiens
MKEIKGIHISKEEVKLLLFADMIVYLENPKASSRKLLELIKEFSKVPGHKIIDTNQHLFCTPTVTKLRIKSRINPFYNS

SEQ ID NO: 951469 - protein, 175 aa, Homo sapiens
  misc_feature (158)..(158): Xaa can be any naturally occurring amino acid
GPHEFIAKFYHTYKEELAPTLLKLYQKIKAVATPPRLILGSQYHSIPKSAKEITTTTTTTKLRVNIPIEAKIINKILANQIQKHMKKLFHHIQVGFIPGMQNGFNTCKSINVIQDVKIIENKNHMIMSIDVEKAFSKIQYPFMIKTLNKLGIKGTYRXTIRAIYGKLTANIILNE

SEQ ID NO: 951470 - protein, 47 aa, Homo sapiens
SSWHTLQCIAYSCAAMVNSGVNMVKPVHHTHVFVNWSLILQQARGIL

SEQ ID NO: 951471 - protein, 100 aa, Homo sapiens
VNLEVPGDIVDRRLHKYFLIQGNFHAVYRDALKKLLETAVYSDIRKKGADVWFTELDINTDGAVNFQEFLILVIKMGVAAHKKSHEESHKEELSYWAQMI

SEQ ID NO: 951472 - protein, 48 aa, Homo sapiens
MTSRRDSQANVIHKLIVCHLRVSNSYSQTNSFFIWHLIVDFTSSTMIS

SEQ ID NO: 951473 - protein, 58 aa, Homo sapiens
EVRGDIVGYRYPYMGQTYFNESEYRYSVDSPTLTRFFTFHFILPFTIAALSRVPELDI

SEQ ID NO: 951474 - protein, 41 aa, Homo sapiens
WSGDEMSLMGAENLARGTLWHDCIGLPQSRMWELLGGGYES

SEQ ID NO: 951475 - protein, 32 aa, Homo sapiens
PELRRLATPIFYLSGWQGRKELAVLLKEVARG

SEQ ID NO: 951476 - protein, 30 aa, Homo sapiens
MRLRSQAPSLPPETVWPPRLPIYLLPLTCI

SEQ ID NO: 951477 - protein, 34 aa, Homo sapiens
QNTELQFRVIAAAQVGNFAFSRPQLLAIEMGQLL

SEQ ID NO: 951478 - protein, 62 aa, Homo sapiens
GLSSLKSHPGIRARPHASQPGLEGLKLGLVQASASSLVHFGHLLILCLDLSDDAVQVQVGVP

SEQ ID NO: 951479 - protein, 53 aa, Homo sapiens
  misc_feature (17)..(17): Xaa can be any naturally occurring amino acid
PPTLPAVPTLVTLHVEXFVQGDHSHSRISASSGMGLRADGAPRGVLLVVVGDT

SEQ ID NO: 951480 - protein, 33 aa, Homo sapiens
SPIQTGVDGCFPTTVEFNSKTEVHKEGCEWDAW

SEQ ID NO: 951481 - protein, 43 aa, Homo sapiens
PPPPSNFHVNLCSYHDAIMTFETYKGAKAADIFSCISPGWKLL

SEQ ID NO: 951482 - protein, 34 aa, Homo sapiens
GASRRNRQPREVWADPSDDWTSSVTPFFARIVLY

SEQ ID NO: 951483 - protein, 34 aa, Homo sapiens
APYQTGAGDIESIEQHTRIVDITRTSPAAKSPSA

SEQ ID NO: 951484 - protein, 92 aa, Homo sapiens
ENPLALPWIIGIKLTYSGKGDANWTQTITVAQDGKVTERRVDSGPTYYNSSDFSAYPQIQNGRVFTDAPGMNPISGLSKTYELSLIVRSGSA

SEQ ID NO: 951485 - protein, 73 aa, Homo sapiens
LILVISHFSDCCHEVFLYYKNHDQHELQNYTCFSDKPFLRSAPLNAIQKASQLASELYITNAVVSGTCDGFSV

SEQ ID NO: 951486 - protein, 49 aa, Homo sapiens
RSLLARVVFPEIGILTKQGDHVRANWPITKPALPLPPPPAKLGDEAHDI

SEQ ID NO: 951487 - protein, 108 aa, Homo sapiens
  misc_feature (75)..(75): Xaa can be any naturally occurring amino acid
SRGSARFFVTSAAIDERLQCAYGPYAARVQQWTDRPVLSFEEPMIRGETGINEITRSLKYNCCEPGQQKGRDARXSAGNDDGDLVLDPEEGKGGPGKGNRGLVTWKLL

SEQ ID NO: 951488 - protein, 81 aa, Homo sapiens
GAYTSLCRRRSVRPNETMKSQCDSVMQIGKLIKDADHRKRVTVHSRARCRKNTLGRRKGRHIAHRVSGKFAEGGTEARNSV

SEQ ID NO: 951489 - protein, 120 aa, Homo sapiens
TGADFPASDPGLFVRNGHGDVPGQRLGVVLRLVTLCALASRVYCRLLLTGRLHRQRPHSISRVQFQRAHIDQVTKFFADHLGPVPAQAIHHDIDRQQVVFALHVHLARNQELQGKIVEHP

SEQ ID NO: 951490 - protein, 33 aa, Homo sapiens
YYPRNTRYYPRTHTLLPTEHHSYYPRNTSYYPR

SEQ ID NO: 951491 - protein, 57 aa, Homo sapiens
SDLTYQDRFQSLEHTFNAPAAGIQFGDLLRTDALRQVAPEHQAAVAGVRWRMKRQFD

SEQ ID NO: 951492 - protein, 54 aa, Homo sapiens
METSSPTSLEQGEMTSAETQVSMGTGVTVDTGIGWLSSSSHYANRYADTFRCLI

SEQ ID NO: 951493 - protein, 104 aa, Homo sapiens
SFVFSDKSFAVSPRLECSGTISAHSSLHFLGSNSSYCLSLPSGGIKGASHHTRLILIFLLFLVKTGFHHVGQVGLNLLASSDPPALDSQSVHVTMPGLEFCFKK

SEQ ID NO: 951494 - protein, 108 aa, Homo sapiens
MPIRSTVARFYYVYAPTSRTSFYLDSHHQIFNAPSFFLPSFTKSHWLLNSYPIFTTNSCLLTCSSILASSNTGSWNPVCICLPRFTESNICVAPEISIRLMLVLRISR

SEQ ID NO: 951495 - protein, 50 aa, Homo sapiens
MECGRFVISWKKTDQVPEINDWTLCRNKSKPKSYTWLSRKIIAWEVARAG

SEQ ID NO: 951496 - protein, 83 aa, Homo sapiens
DEGPRCRSLPRLFLLTRKSLGFHNVNSLIVSMLRGVFLAGDLSGPSMLQMCIYAQWYAYLCVTVSVASWLDPTISSEIMHPKG

SEQ ID NO: 951497 - protein, 41 aa, Homo sapiens
SLPSASSVWCDTLLSYFITDQCSLSATIGAMEDARYANLVG

SEQ ID NO: 951498 - protein, 53 aa, Homo sapiens
IRCNSRGVPYRTGSSEQLSCRTCSKEKWQRIVIRDKYWSKGGRSSRAARTELE

SEQ ID NO: 951499 - protein, 57 aa, Homo sapiens
DEQILRARITQVEASNDDEALALVRDELISIHNEQAESLEKTRGELVNVSAKLQDTQ

SEQ ID NO: 951500 - protein, 33 aa, Homo sapiens
MDPPVVPPPLSSVRADLGILALSASTAGGAWVD

SEQ ID NO: 951501 - protein, 57 aa, Homo sapiens
  misc_feature (53)..(53): Xaa can be any naturally occurring amino acid
PGLFAIRWGFIPLVIYPGCIRGADPGKPEPTVLSLFGDKWIILVFLDLGGNQXDSLE

SEQ ID NO: 951502 - protein, 45 aa, Homo sapiens
PQSYRVLLSGFAVTPEQCLVMINISISCDHNAFLNSCFRNSTFYS

SEQ ID NO: 951503 - protein, 49 aa, Homo sapiens
MRFQIFFILFIFLLFFFILPSEGVGLVPCRWCIQSIISLLLWALSEGSD

SEQ ID NO: 951504 - protein, 47 aa, Homo sapiens
YSYDITQLFSLLLKLELDVRVALLPDPVNSAVGVDTQAEALVLAVQP

SEQ ID NO: 951505 - protein, 40 aa, Homo sapiens
SQYDAQMGTVKTVTKNTPHIEKSLSLNTVDQQRQLSQCLK

SEQ ID NO: 951506 - protein, 69 aa, Homo sapiens
ELTRGEIHAWGITELSPLGTLSKLKAKHRDLPVEQQRHILEKQGKVIYGIDMKIVDDAGRELPWGVPEA

SEQ ID NO: 951507 - protein, 92 aa, Homo sapiens
  misc_feature (21)..(21): Xaa can be any naturally occurring amino acid
RGTLSGDHSGACLTRRRLSRXSAASRDRSLYALDASGPSPPLRIGDLNPTPFRSAEVNGGHRPSLRKRRSSNSLRTDLTYVQLLVHMEPFST

SEQ ID NO: 951508 - protein, 52 aa, Homo sapiens
MDVEAALVHFRAADKDIPETGKKKRVNGLAVPHGLGEASQSWWKARKSKSHL

SEQ ID NO: 951509 - protein, 76 aa, Homo sapiens
YRKIRRSSRNKKRSTKKLEELKAKAAVTGALSHRWELRKSGKKKAVPCALSEMVTPLFHLVFKASLFPAITSFATY

SEQ ID NO: 951510 - protein, 70 aa, Homo sapiens
SRNAEQEREKELAKCHYQERRSRMTNNDEMDICRAAEEGRGRKHSGQCDRGANCPKQLMRAFSNIPVRTG

SEQ ID NO: 951511 - protein, 53 aa, Homo sapiens
MLADKQIVRKVEPHNVLLKSVEACVLQTNVDAVAYRSEHGDRETRQYSVGLYG

SEQ ID NO: 951512 - protein, 56 aa, Homo sapiens
QDTVISCANETLVMLVLEGLIGSRTHPSPESLCYLSSFLTFFHFTAYPVDYLLELA

SEQ ID NO: 951513 - protein, 53 aa, Homo sapiens
QPGNREYLPHRFYSKDHIIETAYISYTDAWALSITLIATSLTSAYCTRNNSSP

SEQ ID NO: 951514 - protein, 43 aa, Homo sapiens
PSNQDHKKELSILKVDLLECSVTPGKDYSVLIPCIHYYLLELA

SEQ ID NO: 951515 - protein, 52 aa, Homo sapiens
STDFGLVASGERVSNISEHTQQWGITIRKDSYYRIRSVDESRGSSDLVLLEL

SEQ ID NO: 951516 - protein, 73 aa, Homo sapiens
ASSLIRKYTNSTSVILFAARMVCLVNSVNPVGALQDECNVQLNTATSGNTNLKPEKSKQYSLGLVFQPTYRTG

SEQ ID NO: 951517 - protein, 54 aa, Homo sapiens
MNCSRARNVKGYLLTLLDQLNERFPNCMAYCQFIEHVWIAFCQISNDKLILKSR

SEQ ID NO: 951518 - protein, 41 aa, Homo sapiens
MAEDADPAYGIQLLVWPSQFQKPMHFLWDFFSYTLNDPLES

SEQ ID NO: 951519 - protein, 70 aa, Homo sapiens
LGSLEKLSTEVVLGVVHQLVVGRTEFRVPGIFAQARAVDQRLRVFDTETHRERLGFHVHATAVEHAEGIL

SEQ ID NO: 951520 - protein, 38 aa, Homo sapiens
VLLFDERIPLNKLWSGAQLVVLSKSSVKIQSTLVKQSG

SEQ ID NO: 951521 - protein, 112 aa, Homo sapiens
MEGRVHCEPQRCVQPANYSWYQAGSARPGPVTVYPYMHALDTLYVPLLVDTGVPLVTGATVLGHHQLLLHEEASKKGDSFTPQVLQVSSVYRPSYKPSSGGLDTLSLRPLFL

SEQ ID NO: 951522 - protein, 84 aa, Homo sapiens
PRRVLQEYGRDMRKKIQKITDFISFFRDNDTCPTCTQPITEDFKAQVIEAKANNRTELQSSLENLNALLQKTESEIEKLDEGYR

SEQ ID NO: 951523 - protein, 72 aa, Homo sapiens
MSVPPRGGVSGEVDEQPGGGCELEVADGRARIEQHGWGVGPLAQHGMQVERLLEVGHHAYALDVGPRGGPEA

SEQ ID NO: 951524 - protein, 168 aa, Homo sapiens
EHGAETRARAASSVSPSHYDYIRSDALMEKVDTMQKQMDNLNRKIPIIRKNKQEMIETKTNNPLRNEESFGWTHEYTANGLETQTPLLSVEDYVNHETFDKPDKLTTTNRLEPDGERLSNYKKYTIGIMRIPEEDREKGTTETFEAIMPENLTKLVPDTKPQIRKLRN

SEQ ID NO: 951525 - protein, 51 aa, Homo sapiens
LVSRAQFIRMIPVEKDLYDIKAAQISAQGNWDLFSENKSFYASQVVIQSAN

SEQ ID NO: 951526 - protein, 50 aa, Homo sapiens
YCIGKYQNRGYHAKPPSSQIQSTSDKYRRIAYPVHCEYVGRRPNLDRSLH

SEQ ID NO: 951527 - protein, 41 aa, Homo sapiens
GKGMKQVAEAGEAGECVGRWVRLPPCLLGGLAWGSVSPQLG

SEQ ID NO: 951528 - protein, 65 aa, Homo sapiens
GARSLYGGFFGAGMGNGTISAHCNFRLPGSSDSPASSLLSSWDYRHPPPRMANFFVFLVEMGFHQ

SEQ ID NO: 951529 - protein, 51 aa, Homo sapiens
MGRLIPHPIDPCILGNETMCLCLGIRPTELRVDEEGMDVIGLASHRKRGNR

SEQ ID NO: 951530 - protein, 45 aa, Homo sapiens
KYYYSDAKWDIKWKGKTPELLVLYAEYFKRSPKLKQVGFWKRWDE

SEQ ID NO: 951531 - protein, 58 aa, Homo sapiens
LQRQVSNPAVVFVTRKNRHVCATPEKKWVRAYINSLEMSWDEESLNLNLHKFASGGYR

SEQ ID NO: 951532 - protein, 103 aa, Homo sapiens
ARVYDSRRIPPLVWRRKITKTTCKVEKLKPLEVELRRLSRPFRIYVHDFAYMRKREEEMRDTNESPNTRVLYFSIFSLFCLIGLATWQVFYLRPLFKAKNSIE

SEQ ID NO: 951533 - protein, 42 aa, Homo sapiens
RQSQNRIYLTADNLVLNLQDASYTRGSASLINGYRNCAYVTK

SEQ ID NO: 951534 - protein, 35 aa, Homo sapiens
TYAECYAGLSFGITCYTFGMASTQVGVFKKANQIG

SEQ ID NO: 951535 - protein, 45 aa, Homo sapiens
PLDGLPRVPVYQLTSFVLAVGVVCCRAVCGHLVAGQQQGRALSKD

SEQ ID NO: 951536 - protein, 118 aa, Homo sapiens
PTVCSPALIQALNRRTPFFKFFLKKELIWVPFLGLAWWALDYPFMKRYTKAFLAKHPELAGQDLKITKEACELFKRQPVTVVNYLEGTRFTPAKRKQQDSPFERLLKPKAGGVAFVLA

SEQ ID NO: 951537 - protein, 33 aa, Homo sapiens
MTWTRLPCGAPALEVRGRQQSASGHTMEVERDH

SEQ ID NO: 951538 - protein, 36 aa, Homo sapiens
MTTEHRGMVHLLVGSLMRASSRVTPEFATRQTRGDI

SEQ ID NO: 951539 - protein, 82 aa, Homo sapiens
STGALREGILLKWRCSQMPWMQLEDDSLYISQAKFPVLAPYTGYRPDVVPSLNRRPLGQSCALAHDEDVCHFVLANSPYCSV

SEQ ID NO: 951540 - protein, 45 aa, Homo sapiens
SVLVQEEAMKENTAAVLVQVPVEVTSFLLNEKRTEITKIELKQRV

SEQ ID NO: 951541 - protein, 58 aa, Homo sapiens
MPSTPHGEADGLDVLLASPSALDTRWLSDWYPDKGVTLAATLGYAGGPKVASGEMGVP

SEQ ID NO: 951542 - protein, 34 aa, Homo sapiens
PPTLTQIQRCHRAVRSLLPRMMRPVPAPIGDIVV

SEQ ID NO: 951543 - protein, 42 aa, Homo sapiens
ARDHSGTGAMEDRQAKWTSRIGLASLEEMVHLGEHRSQSAAS

SEQ ID NO: 951544 - protein, 43 aa, Homo sapiens
KSALFYIYKSKENILACPLVMLRKKLGEMSEEHMLAECTSSLM

SEQ ID NO: 951545 - protein, 73 aa, Homo sapiens
MATSVLGVKCSKEVATAIRGAIYPCDKLSIVPVRRGYWGNKIGKPPTLVPCKVTGRCGSVLGTPSSLHPGHWH

SEQ ID NO: 951546 - protein, 41 aa, Homo sapiens
EHNTEQSSNPAVVFVTRKNRQVCATREKKWVREYINSYGDR

SEQ ID NO: 951547 - protein, 60 aa, Homo sapiens
MACTSRGAWWDSYHCRYGVLSSGHDAILHQCLGTNPLVIRCIVDNIDDPCITAVNTLSPN

SEQ ID NO: 951548 - protein, 103 aa, Homo sapiens
YACARSALVQASQLSYQNILSNKNVGIANRISISSLMQARHFPQITGYMRLPGRGSSHRERRLNIELDLDTDALSQVVFRCNLTQQLQQLNLGSTISTLLASC

SEQ ID NO: 951549 - protein, 37 aa, Homo sapiens
  misc_feature (14)..(14): Xaa can be any naturally occurring amino acid
SWGYYGHALKSVEXTQFLAIVLELIPLKIFEIGAVIY

SEQ ID NO: 951550 - protein, 147 aa, Homo sapiens
VSSLNPRVAAASSYPRMYLTRSEIRQGLEYFFSLKKDYFNVEYAIVGYHSLVLPAIGIQTSEGVCLAVEKSISFPKLMEPEVAIGENGRALMLTEVVPMSGLMADAKTLIDQRQELETQNHWFTYNETMTVESVPKLCPIWLCSWDT

SEQ ID NO: 951551 - protein, 47 aa, Homo sapiens
SASFNQAAEKECDQLGLEFQHWTLSQADNAKQARTHHPAQAQISLHD

SEQ ID NO: 951552 - protein, 55 aa, Homo sapiens
KTGLLPAHSTPDGLSLTRLTEPRDPQIKLQLQAEARGVVSIKGVCATLLPGYDRQ

SEQ ID NO: 951553 - protein, 45 aa, Homo sapiens
RWGRDWGDITLRFNWNFQRDLATGGTVEYAKRKAHAGPGTPNSNC

SEQ ID NO: 951554 - protein, 45 aa, Homo sapiens
PWRGIDSIYPYELLQKNILPAENLLYLLKSGSFHRCRTMTDFTFT

SEQ ID NO: 951555 - protein, 111 aa, Homo sapiens
DVLASCPPILEPERTMILHSQVPRKVLAWFYSPSPKSYCKSISVTKITKPDGIVAARRTVVNSERRNKKTTVTREEADSSPRGDPDITRPPALDDAFSILDLYLERRFRTR

SEQ ID NO: 951556 - protein, 65 aa, Homo sapiens
YFGGLFAWLLVWRIVGLVVWLFGGLLVGQVQLPWRLKQEDHLSLEFKTSMGNIARPCLYKKIQKI

SEQ ID NO: 951557 - protein, 33 aa, Homo sapiens
DVGSRAAGDENLPESGQLVVVPIWEKQQKIHMA

SEQ ID NO: 951558 - protein, 46 aa, Homo sapiens
MRTDYYIYFMFIAYIHSSQKVEHNPMCPALAAWTKKEMLTHAATQM

SEQ ID NO: 951559 - protein, 92 aa, Homo sapiens
MEMGRRIHLELRNRTPSDVKELVLEQQSVHEGKLEGLTDELEDLEFLSTIKVGIQLNLTTYQKLNKLKKLELSNNRVSGGLDISEKKCPNIK

SEQ ID NO: 951560 - protein, 41 aa, Homo sapiens
SFYPSSRISETRSLVVNLNLPQEKCPVTSYFYVAGEVVEAE

SEQ ID NO: 951561 - protein, 37 aa, Homo sapiens
SLEDPLAKMCMNMRLEALLHFQAASEIHSLDMAINTK

SEQ ID NO: 951562 - protein, 43 aa, Homo sapiens
NCTSAPQPHDTLGCYPFYKTDPFIIPRVPACLLLWQKPKSPQC

SEQ ID NO: 951563 - protein, 62 aa, Homo sapiens
RPGLGAQEDSLAGVWGKGAAPLHVCCGSCSSVPRRIMYSFQLKAGPTSVSSTLRWSVFLYTT

SEQ ID NO: 951564 - protein, 67 aa, Homo sapiens
SFNSKQSTPGPTERVTSTPQRRAHLAVRGVVFRVRRYTCVSAERVWGDEQNDFVLPHQAARLLGSQG

SEQ ID NO: 951565 - protein, 40 aa, Homo sapiens
MSTPRATPLGALLSPTSSAVPPGSSYPPCCDPLASWADAG

SEQ ID NO: 951566 - protein, 74 aa, Homo sapiens
QLGPPFIQAVVGSLVIRGGGARRAQVAAIHPLYDVRPGLALVVVAAQFPQVHSVSLCLALVVLCLPVPDCLDYK

SEQ ID NO: 951567 - protein, 73 aa, Homo sapiens
MVLNSITPKLDQFYHLYSTELDVRYTVTVKHFSIRNVAPTSPTQGHVRADFSDRRQSSSRRKLASIPALRAQD

SEQ ID NO: 951568 - protein, 32 aa, Homo sapiens
SYLPEGVKAVDHKTGREIHFTFEDRINYCRVS

SEQ ID NO: 951569 - protein, 34 aa, Homo sapiens
QTYGRLPVWGYWDPESQSWKHLITVVVLNDLHNE

SEQ ID NO: 951570 - protein, 36 aa, Homo sapiens
DYRDTGQETYYLKLQYSKNFRLVGHVVSASTAPLRS

SEQ ID NO: 951571 - protein, 98 aa, Homo sapiens
RYRILVFSITHEDDAIKKVRRAKLLLLLTKLTTERTSGRKDGLEPLTTEKPETREASSRNANENALDGRHKIKHSDYYVNYRKLRQNGNNYRHQRPGT

SEQ ID NO: 951572 - protein, 43 aa, Homo sapiens
ELGPAFGVAKVNFFMCHIEVPTQHKEPRSRRNKSLKPSEFPNE

SEQ ID NO: 951573 - protein, 73 aa, Homo sapiens
LSPVTDNFVPVRFRKGTRRDIMDLHTLQPSWDELPDQEGSAATAQCFIVKSHIAQRCIGLLQGAPVNIEKCTL

SEQ ID NO: 951574 - protein, 60 aa, Homo sapiens
IGSARLFGWLLVGGEIMLEMDAAPGVDLSRIDLTTHLASQGGSSPPRAPTEEATPSAATK

SEQ ID NO: 951575 - protein, 40 aa, Homo sapiens
HRARSRLSGGAWGGEGDLGERTPHRCRNSQQVTESGRHKE

SEQ ID NO: 951576 - protein, 35 aa, Homo sapiens
YISSAVFSSVSTQHLSCRIGPLLSVEDPPCPRHNE

SEQ ID NO: 951577 - protein, 83 aa, Homo sapiens
DTRLVTLSRRCIADAYAGGLCASIRYRMRLRLCSSLVLTALLAACSSAPPAVDVAAQTGTAASPEAAEAYQEARERRLPGGSV

SEQ ID NO: 951578 - protein, 53 aa, Homo sapiens
GGGSQRRGVAVSAGGLGGLLAAKGVWISSVPPVSLLYVVLVQCGSLHGCLLCA

SEQ ID NO: 951579 - protein, 69 aa, Homo sapiens
MLFDIRWNTFRFRREGNLVIRNSVKKPGRYYVKQNKPGTERQIPHDLTYVESEKVEFLEAEGRLLGLQG

SEQ ID NO: 951580 - protein, 36 aa, Homo sapiens
MLCYMTPGRGVTQVSLLSFHGGRPKSPCAVHLLCAI

SEQ ID NO: 951581 - protein, 30 aa, Homo sapiens
MAWICTQVGVFKKANQIGLTCLLQNPDSCP

SEQ ID NO: 951582 - protein, 48 aa, Homo sapiens
MLQESEEVSLRFSCSMVVLGRQGCSIILTLSVCFSVAVSKLAISPMSG

SEQ ID NO: 951583 - protein, 76 aa, Homo sapiens
KLHSSISTLLEFALLFSMLALELPPAHMTFCSSCVSARAPDVTYEDLHAPTSHDVVKTLPESVKARAAHRDSCFYR

SEQ ID NO: 951584 - protein, 33 aa, Homo sapiens
VQLDVFWHNCYTYGMDMHTGWCLQITANLDMAS

SEQ ID NO: 951585 - protein, 45 aa, Homo sapiens
LFYIYSTVRHPLNGNQKLSTPPHIYTSHIDLEADEILQNAVDREL

SEQ ID NO: 951586 - protein, 53 aa, Homo sapiens
RIPLEAVYTGYRSGFFIDNLAVLALVYAADQLAVSLFTCYSRFSCTIPAIYEE

SEQ ID NO: 951587 - protein, 92 aa, Homo sapiens
CAYRRVAGCLLAIIVTRLAWICTHGCVSSNKANQIGLTCLLHTHDSCALEPNFCFNVLSNYSHQTLKGKLANQRYRDLLITVYIKGAPHYQG

SEQ ID NO: 951588 - protein, 44 aa, Homo sapiens
DSQRRVTADSTEEMTAQRRWKARFGMSQQPNREEPLGGYLLHTH

SEQ ID NO: 951589 - protein, 51 aa, Homo sapiens
LKSHEVLGSAYVLVAGWTQLNRLSGSPCNSLSPFPFSTQRYLSADIGCRLP

SEQ ID NO: 951590 - protein, 55 aa, Homo sapiens
VLEKRRFFLRIHPDVRVDGSGRSATLTSMLQLQAEERGVVSIKGVCANRYLAIKE

SEQ ID NO: 951591 - protein, 34 aa, Homo sapiens
FKASLCSSVLSTSSVLSTSSVLATPLCCPLLCAV

SEQ ID NO: 951592 - protein, 38 aa, Homo sapiens
MRQNTSRQKASERFRFTRVVRLRTFRPADKILHSLNHN

SEQ ID NO: 951593 - protein, 43 aa, Homo sapiens
YVSRSPVCSSSCSVDILAIAVCMAYFSPFNVDNVSTSFHFHMV

SEQ ID NO: 951594 - protein, 68 aa, Homo sapiens
CALSYIYSLVVILPTPAEGAHLPAFSEELLRVCGLLALLNLLQGMGRVLLCFDIIEGLCCVDIEECTL

SEQ ID NO: 951595 - protein, 35 aa, Homo sapiens
DQYDSTEEVVSTEEGDVSITPNLILVPKHCLASSV

SEQ ID NO: 951596 - protein, 45 aa, Homo sapiens
VPAVCQVSASVCPVCCQCLPGVCSQTCQVSAHRPLTDLHLRVRVN

SEQ ID NO: 951597 - protein, 48 aa, Homo sapiens
SRGSFAGRGAVQVVSRLCWLTMTCLHLALLQFILTKTLDPDTYCDQHK

SEQ ID NO: 951598 - protein, 41 aa, Homo sapiens
MRISLTKTLAEAGMQQKQEALTIEPYQVDLSFDGVHEDRKR

SEQ ID NO: 951599 - protein, 56 aa, Homo sapiens
SLGTGDTEEVEFTWLSYRGGSNKFNADEFEDMVAVKRLIPDGCGVKYVPSRGPPLL

SEQ ID NO: 951600 - protein, 49 aa, Homo sapiens
EEVGLAGRNYTVNTTWCGPCSQAAKPAILLPGLPVLSTSSVLSSPRVLS

SEQ ID NO: 951601 - protein, 65 aa, Homo sapiens
WCKSCVGGSVMAQQVTESVQKHSEAAPISHICFQAERGDRDSRCINSAHLKLCAAVEKQEAVPSS

SEQ ID NO: 951602 - protein, 43 aa, Homo sapiens
LKDPYKTLTGKLGWQKQEAGRAGQKQEASRKRRSRKRQKQEAE

SEQ ID NO: 951603 - protein, 35 aa, Homo sapiens
MWRSLGACRLILCGHSPTQHRGVAHPRLLLLRPSS

SEQ ID NO: 951604 - protein, 67 aa, Homo sapiens
LLLAEQSHPPLDIGAGTAVPGVVVAWAAGFCWPGWLNPDFGLCPHRCWPLSPFTFSPLCLPASPLLR

SEQ ID NO: 951605 - protein, 38 aa, Homo sapiens
LLEDPLQDPDEMAAAEEKVVERTRGAEDLKKPEGQKQE

SEQ ID NO: 951606 - protein, 35 aa, Homo sapiens
MSISLLNLLINSCLASNFSSVRVVLNSVVQSNTLG

SEQ ID NO: 951607 - protein, 67 aa, Homo sapiens
  misc_feature (63)..(63): Xaa can be any naturally occurring amino acid
RIPVRSDHLGSLNLCLSSSSSSPASAFDVAGITGIYHNTRLIFVSLVEMGFCHVGPRRTRGPXLEIR

SEQ ID NO: 951608 - protein, 61 aa, Homo sapiens
RLPTAKEAGKPDLDRHSPLGCLARWASVPTASLCCPPPLCCPVLSTSSVLSTSSVLSTSSG

SEQ ID NO: 951609 - protein, 65 aa, Homo sapiens
GGLQRTPRGDIKAYPTTEETARQTAWGNCEMGTVANTDAGSIPKVQGFKPILAQQQAQLPTPTTT

SEQ ID NO: 951610 - protein, 60 aa, Homo sapiens
PGDLSRRRHQHDVDFKVIVIYELAGMHLIAALVHLTKYYPDLRDDTVPIEYTLSRTDRVD

SEQ ID NO: 951611 - protein, 63 aa, Homo sapiens
ADNQEYKLLLHVNTPLQQKTGHTNGALLDGEDDHLIQFIKEPVYHPQVRTIVEEVQDGKVISS

SEQ ID NO: 951612 - protein, 73 aa, Homo sapiens
VCDIGEGLAVTRCGDGVGLLASAGQDGLTLTLGSACMVLATVPIYIFPTLICPHLLCRGYGLDITSGWSERTG

SEQ ID NO: 951613 - protein, 38 aa, Homo sapiens
VIEQRRLPDILADEGPLWDGLQGADPPAPLAVQLSTSS

SEQ ID NO: 951614 - protein, 120 aa, Homo sapiens
  misc_feature (76)..(76): Xaa can be any naturally occurring amino acid
  misc_feature (83)..(83): Xaa can be any naturally occurring amino acid
  misc_feature (88)..(88): Xaa can be any naturally occurring amino acid
DPCRSDKITSGLRTDNSDNNTIFVQGLGENVTIESVADYFKQIGILQTNKENGTAHRLIVYTEQGKLCKAERETAXWSLLDDXHLSAXKQLIDVGIDGKENSPEILIKRSHLHTRLRADR

SEQ ID NO: 951615 - protein, 55 aa, Homo sapiens
CEQHREAIQKKLTGIKHELDAKLLQSSVKGPLKPGQRILPVHCRHLAWSAKLFVG

SEQ ID NO: 951616 - protein, 49 aa, Homo sapiens
NTESSTYEVDRQRRQCTTALSEQSEDGLAVRIPGFHPGGPGSTPASSVL

SEQ ID NO: 951617 - protein, 237 aa, Homo sapiens
GSCRSDEIFDLARKLSPKTAYSPAAELESRVQLSDQVHQIISHALAERKLEPAPPTKAEATGNIRENRAEERLRERENAVVPEGVRAEPASLQSELTPKAHDSYAGERTAQVIDLLKRIRPGQAKMKGAQTFANYVRQDISEYAGNPLIEALPPILSEAAAVELISNFPQPVDPKELTLEGATRIHCIDRLRTVVQPFLLHLELEALFSLLIRRGYVGRTRCRRYRRHCILIWGQGT

SEQ ID NO: 951618 - protein, 68 aa, Homo sapiens
MSFWFFVKAASSVFMKYRNSVYGESVVITILSSILLEDSNQGTRCTDQISDRAGRFLAMLGDRDDRGT

SEQ ID NO: 951619 - protein, 53 aa, Homo sapiens
SYTVCQLYVSNEEFLNGLVLGSRILQQVSAANRLHVAAALLGTTIVPSFLCHL

SEQ ID NO: 951620 - protein, 45 aa, Homo sapiens
HKPDYKVDKTCCAQMLCRVPTCAQHQLCAVTVSLPLPPKTQGHPQ

SEQ ID NO: 951621 - protein, 38 aa, Homo sapiens
RGQLNFEPLTLVPIQTKMIDVDSLTDKECDWLNNYHHG

SEQ ID NO: 951622 - protein, 47 aa, Homo sapiens
  misc_feature (1)..(1): Xaa can be any naturally occurring amino acid
XLGVARGVLNEYFHNVCELDLVFNFHNEPRKEPHKEPRKGPHDEPHQ

SEQ ID NO: 951623 - protein, 66 aa, Homo sapiens
GRSRNNTDPYKRAVYCIIGRCDVTDNQSEVADKTEDYLWLKLNQVCFDDDGTSSPQDRLTLSQSQD

SEQ ID NO: 951624 - protein, 33 aa, Homo sapiens
ALGVDLKHKIRQRFSQTKLVTIPQTFPECPFPK

SEQ ID NO: 951625 - protein, 79 aa, Homo sapiens
EEGCSGQALLHQQALELPLAVLHALAGLRCPLPRMRPSCALNSSSRQLLTAGHFCATHHPTMFMLELLWISSGYRVSQF

SEQ ID NO: 951626 - protein, 48 aa, Homo sapiens
DTPRAPQRATQRSLTKSHTMSHPKRHTKSHTKSHTKSPATSRAKSHTK

SEQ ID NO: 951627 - protein, 50 aa, Homo sapiens
FRILRISSGSHQDLIRISSGSPQDLIRISSRDLLRISSGSPQDLLRISSG

SEQ ID NO: 951628 - protein, 69 aa, Homo sapiens
ESEETTTIVPCGPYIKTGLRRHPGREDENTFTVAVSSGLRLVMCKDALFCESSLQVANLPFTDAGYSVA

SEQ ID NO: 951629 - protein, 84 aa, Homo sapiens
KKEDEDEDWMKIRMNGTILGRIDEGTGEEILLLSDRDRLRSEVKAGMERELGIIIQDTEIELDPDRLDRRSHSCFLLCRISTSP

SEQ ID NO: 951630 - protein, 80 aa, Homo sapiens
IHLCAHEMYFFTSVSLALAAGSPAFIAVGYVDDTQFVRFDSDAARPEDGAAGCLVKEQEGPEYWGTRETRNVKAQSQSDR

SEQ ID NO: 951631 - protein, 60 aa, Homo sapiens
GILLSLPESLRAAAETIDSHRCDCQTAASFSPHLHTRICLPNGCQFGKVTLSFYSVWGIS

SEQ ID NO: 951632 - protein, 67 aa, Homo sapiens
SPPVCSLCAPVCSTSPSRLPRRAVWSKSARVRTRKMVNYARAREKTRENLWCRSVADPDVPNRSFRT

SEQ ID NO: 951633 - protein, 47 aa, Homo sapiens
ASPPGAPPLPHNSCGHQTITTLASRRVPASRLLRYRQELVCCISRYT

SEQ ID NO: 951634 - protein, 32 aa, Homo sapiens
IPIQSTDRIWYIHIERNVNKRKDAHGTLYGGS

SEQ ID NO: 951635 - protein, 47 aa, Homo sapiens
ENPHTEYTVSVSAYLDYELCYVLGHTIFKNDACTFKEADMPGEANVH

SEQ ID NO: 951636 - protein, 68 aa, Homo sapiens
HVVRGRSRGRHGLSRRGRRYRDRETQISKTNTQTYRESLRNLRGYYNQSEAGSHTWQRMYGFLTGARR

SEQ ID NO: 951637 - protein, 56 aa, Homo sapiens
NTLGVQVHSTRKMKTETADAPKAVEYLLTPLRSPSKILQFMVDPRVSCYRLLGLQG

SEQ ID NO: 951638 - protein, 45 aa, Homo sapiens
LVRVATSEPQGLSWMEEMLGLARSLKTNTLAAQSVIKKDNQTLSH

SEQ ID NO: 951639 - protein, 92 aa, Homo sapiens
LNGNYNNSSNGGRDQSIKLVEKWSTDNLQINDIYPMQDTIAMKEKYAKYLHSQSRAVCRQTLSEKLRDPIEERLTNSMMMHWTDNNGKKLMT

SEQ ID NO: 951640 - protein, 33 aa, Homo sapiens
MTDVSPWAIMTNDLLPVKLQRRIRMRMAVTPMR

SEQ ID NO: 951641 - protein, 73 aa, Homo sapiens
  misc_feature (59)..(59): Xaa can be any naturally occurring amino acid
NTSHQHLNPHTIYTTTACTSTTTACTTNKICTLTINTKTLTTIYTYHCLHSTDHRPVLXTCHQDSTGLMILFL

SEQ ID NO: 951642 - protein, 35 aa, Homo sapiens
RHQTSSNPQPLATVKGMENEKPRGPLPGKAAPGFD

SEQ ID NO: 951643 - protein, 31 aa, Homo sapiens
MTLYQPCQLRGLLGARYRAPNYPFINKVNSR

SEQ ID NO: 951644 - protein, 35 aa, Homo sapiens
MSAVDSRRTPPAGVCCVELRLLMLLLTDAPLLMLP

SEQ ID NO: 951645 - protein, 68 aa, Homo sapiens
PSRRKVMPAWRNKPQSSCSMADGSPTDKPARMPAARRSDTWAKIAARMRWRQRSITPCHGHSACYADA

SEQ ID NO: 951646 - protein, 136 aa, Homo sapiens
  misc_feature (16)..(16): Xaa can be any naturally occurring amino acid
  misc_feature (19)..(19): Xaa can be any naturally occurring amino acid
EDQERGCLKKCEHDPXSAXAVAKLFWSQRKITKAQEWFHRTVKIDSDLGDAWAFFYKFELQHGTEEQQEEVRKRCESAEPRHGELWCAVSKDIPIAHKKRGQLRRCPPPPNTFSRGFNGCHGRCRWGRVGPHVEGL

SEQ ID NO: 951647 - protein, 35 aa, Homo sapiens
QLGSIRSISSSSGVSNQCSLLTTQHTPSRRDRSAY

SEQ ID NO: 951648 - protein, 65 aa, Homo sapiens
GEGSLALWPRRECKGAIWVHGTLHLRGSSNSHASASRVSWEFTGGPTTGKSTTGRAKFWVIRQHK

SEQ ID NO: 951649 - protein, 54 aa, Homo sapiens
IERLLTRRLRNERLRNERLRNERLRNTLRNERLLNDASVTSASVTRFRNERRVK

SEQ ID NO: 951650 - protein, 32 aa, Homo sapiens
MRQYEPTSQERLPPSMISSQLSIIPTTTTTGA

SEQ ID NO: 951651 - protein, 67 aa, Homo sapiens
GRSEAPCVVNDEKRREEKRKEKKRKEKKRKEKIVSMPANTTSILQTHVVNGVILTLQDLIISKNIFL

SEQ ID NO: 951652 - protein, 44 aa, Homo sapiens
AYRHHTGPDDIMEEMWYTNSCCSNSVPLLLRHDHGEHDVKSVGF

SEQ ID NO: 951653 - protein, 34 aa, Homo sapiens
MPLICLPSPHETAPIRISTGPCPNMHLRPLPLKT

SEQ ID NO: 951654 - protein, 127 aa, Homo sapiens
TTIIVLSFSSQLYTDELLLYTYVLIVYLYVPPDWNVKPPEGREVAYYSEMGPTHHRTDPLRREGQAGLPGTLYFRLNLAHHSALGSPNIPLFVCPEHSDSASHYLRRLYLSKYLFCSYVSYFEFPGT

SEQ ID NO: 951655 - protein, 78 aa, Homo sapiens
TPSPPAPPCATVQQLERRWRLVDSIGFDDYIKELGLGIALRKMGAMAQPDCIITCDGQNLTIITESTLKTTQFSCTLG

SEQ ID NO: 951656 - protein, 102 aa, Homo sapiens
AGRLCRIPHLPPHLVKNLFVYTAGSSGYWEKTYSIVSAVHGSRWRMDGCLWFPVMTNGHCREHSSMPKWKLLDRCLGNTASPIYDLPSHYTARGGSPQIRWW

SEQ ID NO: 951657 - protein, 83 aa, Homo sapiens
MANTAPIDEDIVEVSYNVVRVVEIRCLADEFAEYNSQSGPPDGGKAKMNPRCSEALQAVSFHIRFRWMCGDVSSKYFARRWAI

SEQ ID NO: 951658 - protein, 48 aa, Homo sapiens
SLAEHHKRFSKRSISNRSISKRSGHACWGYVVLEEEEARRWHRSARLL

SEQ ID NO: 951659 - protein, 39 aa, Homo sapiens
  misc_feature (26)..(26): Xaa can be any naturally occurring amino acid
FLRSTLAGSPLSAAPPGGHAPMQQHXGSRSSHIRPSMVH

SEQ ID NO: 951660 - protein, 34 aa, Homo sapiens
MRSTVREFSKRSGHACWGYVVVGRRGGEEVCIDL

SEQ ID NO: 951661 - protein, 45 aa, Homo sapiens
FWVDLRIPSPAGVILLAEEEEEAPLTDAPLTDAPLLNAYLMLRLL

SEQ ID NO: 951662 - protein, 36 aa, Homo sapiens
  misc_feature (1)..(1): Xaa can be any naturally occurring amino acid
XEISKRSISKRSSTQHTPSRRDRSAYCCSVTDAPLT

SEQ ID NO: 951663 - protein, 30 aa, Homo sapiens
MHTNTTYPLAGVLRLLMLRLLNSVLMLRLL

SEQ ID NO: 951664 - protein, 50 aa, Homo sapiens
MRSISSGASVSGRIVAERSRLLGVCCVDRSLTDAPLTETQHSAPLLMLRL

SEQ ID NO: 951665 - protein, 73 aa, Homo sapiens
RPACNVLFPALLFRSSHSGSQQHNVSCVKPAITVQASCVFSGSFRSPLNTFVPLSADLSFILHCTVVHVSHHL

SEQ ID NO: 951666 - protein, 39 aa, Homo sapiens
MIPVKEKQKLQIYENFLEKNYLKLSDPNTTYPRRRAPLT

SEQ ID NO: 951667 - protein, 34 aa, Homo sapiens
SIAERHACWGYVVLSSLEELLVHVGAKGSAGAPL

SEQ ID NO: 951668 - protein, 50 aa, Homo sapiens
MRSKRSISKLSKRSGHACWVCCVERRGGEEVAYAPLTDARLLMLRLLTLT

SEQ ID NO: 951669 - protein, 47 aa, Homo sapiens
SSGASVRRDSDKRSISKRSISKRSSHACWGMLCCSLTDAPATDARLL

SEQ ID NO: 951670 - protein, 39 aa, Homo sapiens
AVDSRRTPSRLSAHQYAVSKRSGCWGYVVLIHLICARLL

SEQ ID NO: 951671 - protein, 50 aa, Homo sapiens
IPLHVAEQHPPAKLIFFSQYEQVSIIAESYRIGVKGYVYKRPVNEYARLL

SEQ ID NO: 951672 - protein, 35 aa, Homo sapiens
TRGSRGITGHGGLNWLFIFPLYHGSICLLVLSIRD

SEQ ID NO: 951673 - protein, 140 aa, Homo sapiens
VVQRRVATFNQICIGAKYLMNYCRLRVRRRLFAYSTRPTIKIASITSNSHASTHFNTRTVPCSLHMTKPANPAKTQQRFGPNPLKKEIKRNRKPDFPLEPHHRIGNEESSGDMSHKKFLSMENTQKNAGSRYFRRYENDL

SEQ ID NO: 951674 - protein, 115 aa, Homo sapiens
DEKKNRIPDINHSSRCTHIYTPHVHYLAFLRSMEDVTIAGCRTGAKLSLFSCTESWMLHALSQLTTENVVCALGLSCGSVVHHLLGPSSSSMDCLQALLLNAGGLCNAHGGDGVS

SEQ ID NO: 951675 - protein, 142 aa, Homo sapiens
LTKSELHLKQTNTQTNKTMLFLTVHLPTCRLSELTGPFSFSDSFSFQIHSCSYHHTYFYLCSWAELGGGLGLYLPLWCVGTAVTGGLILRMGERWRIWESVHLRFPYDILPSVFFIVTRSISILSKTPFKHNQVYLMKSKCN

SEQ ID NO: 951676 - protein, 62 aa, Homo sapiens
RRVHALTQNGNGKYVDEADMGCPGTYITEEKPQVCAAMNISQQLVLHSWCRHHTEKQCLGAN

SEQ ID NO: 951677 - protein, 44 aa, Homo sapiens
LPRLDSQINGCRKRDRLYLTSQNQESSDLLNILHDHIQIGLNAI

SEQ ID NO: 951678 - protein, 82 aa, Homo sapiens
SGSSRYDQPLVTAVLISAMILKKYCGEYFCNDPLFAKHEQIQPTDNSFYYCCFLAFPMLPILYYTYSFVSTPIPRMIRCLNA

SEQ ID NO: 951679 - protein, 152 aa, Homo sapiens
VNGLIYIATPELQGISEESDIYVLLEITSLPSNFRHRKGLILVHILNSNCKRALLAPTRLFSLSSVSTKILRDDLLTSDESCTLLKLNGEAAWAGDTGESVVVLTFAGELQEDPALLLFPSRVSEDTHTPGSDSCATSEESMLVMPWKNLFG

SEQ ID NO: 951680 - protein, 59 aa, Homo sapiens
SDLLATSSLSPYPPIRRARAPKQVVSPTKSPKSPTPKHIQYYSHQEYQSPELTIDLNAF

SEQ ID NO: 951681 - protein, 136 aa, Homo sapiens
MHHDCIRRADSNSPRKGSGTTMQAAFLGTYLTNNSGEPSVIVDNGSKVQTPSVLSSHELGSQEALALSGARTAAVAPRKQDFNNSRLVNDPGRTVSLFHNANDPRLVTLSVLGGFDFRTKASRLFSWQTNQCLNAL

SEQ ID NO: 951682 - protein, 118 aa, Homo sapiens
IAFTPLTCVIQNVTAGCMMMIWTNISSPQRRAPGKAKCKPPPIPQRRSDPDNGPWIGIHKKAPPLPIYDEALRILREENLIPPDDPDLVTWSPHDHFIPNRITVCPEPIPCFMYTVSM

SEQ ID NO: 951683 - protein, 80 aa, Homo sapiens
RYDDTLNMIIFKIFYAAAYVETRSNYPNSASNAKLIIEWSTLSFSATSFMVDKRISFCDLISRTGSVVNCCMAGHSLSFI

SEQ ID NO: 951684 - protein, 74 aa, Homo sapiens
DPLPIRFSSVCSCTPVRRVSGQDQIACDSEAELNFQWSSINEHWSPNPNLLGEAFETEPCYFSDLGTMHCIDVM

SEQ ID NO: 951685 - protein, 46 aa, Homo sapiens
TDINILGLNAISLNASALNAISLNAISLNAISLNAISLNAISLNAI

SEQ ID NO: 951686 - protein, 43 aa, Homo sapiens
HGLRLHGQAMTDKLRAVANATCEVHRTAPAGYYNQSSFLKHPR

SEQ ID NO: 951687 - protein, 84 aa, Homo sapiens
DSTYGWTATMERIMKCLRHFGSKSTMGYMSGHTEHLEIMPDHPIVETLRQKADGRHIMIRQVMESGECCLFEHTVLLIFWTFSS

SEQ ID NO: 951688 - protein, 98 aa, Homo sapiens
KLVERQSASLRNLVRWRISLGSFILVAKSDAYSAASSLFHLVRCFFSSDTPPYVLAGQVVYMQSVHIGIAIALTGWGLFMKELGVPGISLNASSLHGI

SEQ ID NO: 951689 - protein, 60 aa, Homo sapiens
AIRRCSTFELAGFPGVYWSSYEEDTKLFKLLLSMATLPSSILFEVYSIYLKVHIYVPNNK

SEQ ID NO: 951690 - protein, 43 aa, Homo sapiens
FRQKFLLRRILLERFTTPDLAPYPRNEEDTGPQAGITRAKSPS

SEQ ID NO: 951691 - protein, 55 aa, Homo sapiens
HWIHRYGLSYDITWLPQGLSCEHHIYLPVGIDVDTRAYFTSDSHNHRYPHRRQYR

SEQ ID NO: 951692 - protein, 55 aa, Homo sapiens
LRIPYTPYSTQQQQQQQQQQQHENSDLGIETAREQCDAMNGTSGVCVLLQRDGWY

SEQ ID NO: 951693 - protein, 47 aa, Homo sapiens
VITPSLDGDWTSDLVMLEMAPSVDVTLHVEHPAPEPITVEWRAVYRA

SEQ ID NO: 951694 - protein, 34 aa, Homo sapiens
QQLKVQGPIIKQVYQLAIPTGKQNSRATNQPVIT

SEQ ID NO: 951695 - protein, 43 aa, Homo sapiens
AYTTMDLQVCMGSKYWLYGTVFRNYLWDYSFGCGIEWYRVVSG

SEQ ID NO: 951696 - protein, 75 aa, Homo sapiens
RTNHLSSLLVIIENRPKPNNSSTAYNNLTRVTILPSYKPQEYFESPFTISEGIYGSTYFVSTWFHVVHVLIGPHR

SEQ ID NO: 951697 - protein, 45 aa, Homo sapiens
YTLSKLDHYTTLIIVLRETAYVHIADQIYGVKMLVYIDEWYQGGI

SEQ ID NO: 951698 - protein, 60 aa, Homo sapiens
NVNQTCKVISFIILVDISQEQFPKLYQDASSPSPTAQWALLMPRCVSNATWRVTQALQHS

SEQ ID NO: 951699 - protein, 42 aa, Homo sapiens
YLGERASHEEVAGLVEKIRFPMSYPKELFELQYNLVPDTGSH

SEQ ID NO: 951700 - protein, 32 aa, Homo sapiens
MVFSSFIHQAVVCAWHTHTGHSSHHTQATSSG

SEQ ID NO: 951701 - protein, 89 aa, Homo sapiens
LEVPELIHPKEIIVFPSFQELRQKYHVRSIPSERMMKFQVVRGHYKGPQIGQVVPVYRKTYVIYLERVPREKANGTTVHVGIHPNQGGI

SEQ ID NO: 951702 - protein, 62 aa, Homo sapiens
MVVFWRIALNNAGVVEAYKSSPSGWVPVTRAIHLPFNNGTSEIKVGDTITGASSGASGVPEL

SEQ ID NO: 951703 - protein, 37 aa, Homo sapiens
KISSQRPFAPDTGVGVDIVLGKKSISIIVQNQARYMQ

SEQ ID NO: 951704 - protein, 89 aa, Homo sapiens
DYKMRLAAYVRTCMYRGGGQRTIQLCFQSSELVELGRLGPSDSSIHPSLRLQAALYHPNPPGRTKIPPSSKNPEPTSKPACPKPFTPRY

SEQ ID NO: 951705 - protein, 87 aa, Homo sapiens
RQLRCHKKTYALSGIPSAHSEIAIRNTGDAHQCCPLLETLTDAEMEKKTPRPGQEHEANEALCKHGPGMNTSPFSTRLPRTHLRQIG

SEQ ID NO: 951706 - protein, 41 aa, Homo sapiens
YNMTQDIEHYTIIGAWAEVYSTALSLLIRAELGQPGNLLGN

SEQ ID NO: 951707 - protein, 43 aa, Homo sapiens
SSSQHVPLLMRLVKKVFGKVLQSHIIAVKVSGGVMAASESWWY

SEQ ID NO: 951708 - protein, 141 aa, Homo sapiens
MYKVSVSIEHYLPIPSTSPAPGNHCSTFCLYEFDFSRSLIQVEKYSMSFCDRLISLSIMSSRFIHAVACVRIAFLLEAADTSSCVYTVFCLITHLLVDTWVASTSWLLQITAVNMDIQISEARPGVHTCNPNTLGGRGGQI

SEQ ID NO: 951709 - protein, 40 aa, Homo sapiens
AVDAVTTLEIPDVGGSAHPCSTVTPVPMLTCVSSPVHAMG

SEQ ID NO: 951710 - protein, 105 aa, Homo sapiens
LARNIFCHHCQDLHLTPLTLRQLEQQEEIPRVPFRRNKEGVGWWKYDFCYGQHVHQYHEDQDSGKTSVVVGTWNPFFSILTWAKKNTARAISSSRRWYPDSQGGI

SEQ ID NO: 951711 - protein, 45 aa, Homo sapiens
MQARYMQDMHARYMQEYEAPEYMQVILNDEPSCPPFPLFCPRYMQ

SEQ ID NO: 951712 - protein, 48 aa, Homo sapiens
SVETSNTEHYNRYTKNEDEKLQYMTRETHFHKKEDRKNGRGDERRQYR

SEQ ID NO: 951713 - protein, 37 aa, Homo sapiens
CIVAACLYPCILPGSTYTGYVPCILVLTCTAGERFPR

SEQ ID NO: 951714 - protein, 70 aa, Homo sapiens
GTILLMRLSHCRQMGTILNQNLWNIKRSGDCQSVGCNVDGRHLMTSSMTSTSGAVELPSQLSPKETHFNK

SEQ ID NO: 951715 - protein, 32 aa, Homo sapiens
MLVCTSTAFLLLSTVMYNVYRELTRWRRAEAG

SEQ ID NO: 951716 - protein, 36 aa, Homo sapiens
  misc_feature (1)..(1): Xaa can be any naturally occurring amino acid
XYFITSAYLLCQHRQQPGKQNKCTSSILLLSARWYQ

SEQ ID NO: 951717 - protein, 42 aa, Homo sapiens
MNDTDTSFALPCHLRTHPDHSLSCPVPLPSPLHSRVHAMGYR

SEQ ID NO: 951718 - protein, 63 aa, Homo sapiens
CPLPLYRACPRETTKGWFWGRLLVKLCPIFQLPRVVHVLDIPFARFDEDSGPSCFLTPVTCKV

SEQ ID NO: 951719 - protein, 46 aa, Homo sapiens
DYRYTAKRRSKWKCYRARYSSKKSNKAGRDGSHLKYQHFERLRWYS

SEQ ID NO: 951720 - protein, 40 aa, Homo sapiens
MTSTDSPADYIQLELNPIFSCELSRGPPESPHASIGVSID

SEQ ID NO: 951721 - protein, 38 aa, Homo sapiens
MTCGRRNGERDKGDECGEEWGGLLYVQTVILFLPRYMQ

SEQ ID NO: 951722 - protein, 43 aa, Homo sapiens
GHIPLHLPGLALYLGSNNPLGITSHSDKITFHPYMHARYPVHA

SEQ ID NO: 951723 - protein, 89 aa, Homo sapiens
DTPQITTTTRFVEQAEALKAKGSQVVCCLSVNDAFVTGEWGRAHKAEGKVRVLCDPPVGLGKETEFITDDSLVSIFGNRRFQEVLHGGI

SEQ ID NO: 951724 - protein, 42 aa, Homo sapiens
SYEVVLSYTEGGIASYTSSAFLYTVNLWSLAGSEYKGGISAY

SEQ ID NO: 951725 - protein, 74 aa, Homo sapiens
LISINYYMHKLLQHNYYSINYYSINYYSINYYMHKLYMHNLLQHKLLQHKLLQHKLFPHKLLHDINLEHFWTSI

SEQ ID NO: 951726 - protein, 61 aa, Homo sapiens
MQLVGSTGHNLGLLRLKWEQSYGTEPFTCRICCFLWVDSVRTELIPNWCLLEDLWGTPTPT

SEQ ID NO: 951727 - protein, 74 aa, Homo sapiens; identical to SEQ ID NO: 951725

SEQ ID NO: 951728 - protein, 44 aa, Homo sapiens
  misc_feature (18)..(18): Xaa can be any naturally occurring amino acid
CARGRDIEGVIKQYNKVXSALPPTTHARTFHAPTTHAPTTHAPT

SEQ ID NO: 951729 - protein, 85 aa, Homo sapiens
PASSSASKSTWTGLHYLCKHTSTGESMKIKVLNASKKDLVRDFKTAIDFDQSTLFKKVYEEEFGTFGGSPIGALIGDYEIGRHPE

SEQ ID NO: 951730 - protein, 61 aa, Homo sapiens
LWARLQRDKPNELTSLWRPAPFTSPARAIGICPSHAMSYGNSLSACYLTHLTGFLQVPRAH

SEQ ID NO: 951731 - protein, 105 aa, Homo sapiens
ATAYVTSASVTERFLERRASVTEPCLHSTFFPDPAGRQDQNECQQTPTSSIFLTDMAKQIKTKVNKHAFTGGRDTIEEHSHVGGNLYDVDVSFMYLTFFLENDDK

SEQ ID NO: 951732 - protein, 79 aa, Homo sapiens
AEVISEDPYTPTPAEFSPLSDPGGYRCCCLYILPPSGGLYLSTLPQKEKGTLDYSLEITPWWYQAIPPLVSHEPWVTEG

SEQ ID NO: 951733 - protein, 47 aa, Homo sapiens
MRSLRRRSLRRRYYGGARYGGLLRRAVTEGARYRGARYGRLRRRSLG

SEQ ID NO: 951734 - protein, 62 aa, Homo sapiens
  misc_feature (33)..(33): Xaa can be any naturally occurring amino acid
IIQSLSWLLSSELSSPELADEELSSREYSASLXQLAVRSTLERQLRCCSESSRLYTLSAVYS

SEQ ID NO: 951735 - protein, 42 aa, Homo sapiens
EDTRNSAPMKMKNCDPDKTILERSLLEGARYCEGARYGRRVT

SEQ ID NO: 951736 - protein, 68 aa, Homo sapiens
RGSPIPPRNRPALLLSGNHHLSLVHCTLHNCFLSRGLPLIDSLVCSYVPNAIWIDLESVTERNLTLTI

SEQ ID NO: 951737 - protein, 81 aa, Homo sapiens
SRGYRNSSFVTSASNTLRNSASVTSASVTSASVTALRNERFRNERLRNSASLTSAYQRLRNERLLTRLTSASVTSASVTSP

SEQ ID NO: 951738 - protein, 50 aa, Homo sapiens
LGVYGGCRTACTDRVIRVRRRSLRRRLHNDASVTRLRNERLRNSPILPLH

SEQ ID NO: 951739 - protein, 39 aa, Homo sapiens
MPDGVISQRSGCTEPATVRALRSTPAARLRWSYDTATPG

SEQ ID NO: 951740 - protein, 72 aa, Homo sapiens
  misc_feature (72)..(72): Xaa can be any naturally occurring amino acid
RNDASPMFRQDYTCPPTQVDNFTFAYGAVTRYGRSFQHRSANSLVGTGLVRVRSPLLTESRLALVTEDPSSX

SEQ ID NO: 951741 - protein, 62 aa, Homo sapiens
SPNGGTQLCQLEHRLARDQQAEGVLRGMVGGGDRPLPQQGTDRKDVARLVLEAGSRHFRQAG

SEQ ID NO: 951742 - protein, 47 aa, Homo sapiens
  misc_feature (11)..(11): Xaa can be any naturally occurring amino acid
AIHHSAEDSEXKKKILKCAQHGRRHLKQLLNRREMLMEDVGSEEEQE

SEQ ID NO: 951743 - protein, 59 aa, Homo sapiens
MSSTAPDSRWDQQAECVSCVAGTVAGDLPAAPDTAPDLERRRPPRTGSRQPAIILTGLG

SEQ ID NO: 951744 - protein, 59 aa, Homo sapiens
IAMITSLYQRNDMANVSTILFFCYLVNRIEHLSNRLRQVFGGNMHRLPPSAAVRMLRTG

SEQ ID NO: 951745 - protein, 44 aa, Homo sapiens
MHRNDRRMRFDNERSVTDALECVYIWDRDFLFLVALYGGLYGGV

SEQ ID NO: 951746 - protein, 31 aa, Homo sapiens
MRIYHMFKKELIQRHRKEPKYTTTENNQGTE

SEQ ID NO: 951747 - protein, 34 aa, Homo sapiens
MHFPGARYGGARYGGARYGSLRRAREALVRRSLR

SEQ ID NO: 951748 - protein, 95 aa, Homo sapiens
ALAIIEASAGSAEKVISDAIYETGAQNLNVPAVAIVATLRGESVPRFALGGQHAGGIRLVGENGPELEVTGPARYWSYEQTRRLMGGAFEAGVPE

SEQ ID NO: 951749 - protein, 56 aa, Homo sapiens
MSDPGAVTEALLRRRVRYGGRSLRRALVTDGARYGGAVTEPLVTEALVRALVTGVS

SEQ ID NO: 951750 - protein, 57 aa, Homo sapiens
MRTLTLRFLFGVNPVAEFCQPRIVSILIFCKPSAKIMHPVWMTHDSIFIRNLLDPKA

SEQ ID NO: 951751 - protein, 108 aa, Homo sapiens
PYERSVRTSVTAFLYRAPPNTLTSASVTALRNERLRNTSVVVVVGVVSEVVLVSLVGAVISELGAGVSVVGVVALVGAGVSVVGTVVSELGAGVSVVGVVVSGGRCYG

SEQ ID NO: 951752 - protein, 102 aa, Homo sapiens
MIARNEPPNAEISSACLSSCELYLGRSHFLWKEPRHELAGGERPRSSCKQVDAGDPAVEACENRRKVLYQRAPRNIHRHVILSEIKEAVGARYGTAPPNTPP

SEQ ID NO: 951753 - protein, 54 aa, Homo sapiens
LLEDPYERWDSSYQHEETNKLRAKLGLKPLEFNAIKKEAGTKEEAVTADVINPM

SEQ ID NO: 951754 - protein, 82 aa, Homo sapiens
  misc_feature (18)..(18): Xaa can be any naturally occurring amino acid
  misc_feature (58)..(58): Xaa can be any naturally occurring amino acid
ISYERHQEYGLRDSGSRXAEHRVETGQARQEDSEMQPLSVSWLRSLQIDLAQQSMSPXVRTQVMLHDVMPRVIFFMACIERS

SEQ ID NO: 951755 - protein, 60 aa, Homo sapiens
MSVTSAFCNERLRNVLQLMRLLTPNERLRNDASVTSASVTAPLTDPERLLEGTYARTSYI

SEQ ID NO: 951756 - protein, 51 aa, Homo sapiens
  misc_feature (2)..(2): Xaa can be any naturally occurring amino acid
SXSVTCHVTLGNTDACAQLLATTVHTAHTMPCACSVGKKLAVTSRRMSFFP

SEQ ID NO: 951757 - protein, 36 aa, Homo sapiens
PCNERILDIKGGSVGDYWNLGVTEGARKGGARYGCV

SEQ ID NO: 951758 - protein, 32 aa, Homo sapiens
RNSAIERVMLLWGAVAASRSLQIAIQRHYKTA

SEQ ID NO: 951759 - protein, 88 aa, Homo sapiens
  misc_feature (40)..(40): Xaa can be any naturally occurring amino acid
MQMKTCCAAQQSGWAQQEAGSPGDNSTWILQETWAGFHPXAGSSWADISTLQIGKGATYEVGAGRSYWKTRLVSIVTLYFPRVYAFRN

SEQ ID NO: 951760 - protein, 114 aa, Homo sapiens
RLRRDDERIASLLLQAVMQKCWPVSSVPTLEWAPQGRDRRACHCDPSRGVSLHLPRGKGLRPVLPGVVYGIKHGIGLKSRGTETSADPVLEGEETVKELAILEEGREPFRGHPR

SEQ ID NO: 951761 - protein, 162 aa, Homo sapiens
SWPADEDYWNSQNDILEAGSGQSRDRMCRHNYELDEAVTLQRKSQPRVNVSPSKKGALASHHKAACMPRRRISTQAAFKSDGPWMARRKQLGVRVHPNLDPVMEDWTFQILVMLENDPPAGEMSTPARVEHTSLGIVLSRGSGRPSLDPARYMQGVRYPGTM

SEQ ID NO: 951762 - protein, 45 aa, Homo sapiens
TRTDLSDRLDVADRLDLLLIDEYGDALKHVLLIHLIGALVDDDRL

SEQ ID NO: 951763 - protein, 44 aa, Homo sapiens
SVSAPRVSSGERSLPASMAVIACPSRRFRRWLMWWLQRQAVALK

SEQ ID NO: 951764 - protein, 81 aa, Homo sapiens
DPPVRLSSALNGNDVVSGTMAGQHTGLPAEKGIGRLEELLRRAQDDIAVTVSAEEAADQCPSICHANAHSLAERARQQLEA

SEQ ID NO: 951765 - protein, 71 aa, Homo sapiens
VVSVVILRGSRRITLSQSHSSESCSSDLRSSLHSLARRHHRQECTGGRELLYGSAFLSKHVKVKKNPLAVH

SEQ ID NO: 951766 - protein, 54 aa, Homo sapiens
SNLRISYSSYLRTSYERLAARGGDRAQLGPKDVTMLAVRRRETLVKGRSGLTCK

SEQ ID NO: 951767 - protein, 74 aa, Homo sapiens
LSHYRNTEEKKYEMLVAGHVGQQWLYQAMKQRRPRGAELAERPFPRLHQQSCVLYPAVDISVIVRRYNDFLYVT

SEQ ID NO: 951768 - protein, 48 aa, Homo sapiens
IKDLVRALYSARTASYERFVQRSYELRTSSTSFVQPSNILVDPVHKWV

SEQ ID NO: 951769 - protein, 49 aa, Homo sapiens
DVYGGSLRKGCYGGAVTEELVKRARYGTEAVWRSVTDGCYGGARYGKRS

SEQ ID NO: 951770 - protein, 62 aa, Homo sapiens
IVVSEQHCRHERGQAIVLAQWCQHLVQSIDFTQTREQYQARGWIAEPTQGIEISKGDDHLGL

SEQ ID NO: 951771 - protein, 37 aa, Homo sapiens
NELHLVQSGAVTEGLYGGVVGRVVRRRCYGRVREGVT

SEQ ID NO: 951772 - protein, 51 aa, Homo sapiens
PSHRRLLSCLALSMSLVGSYFALVEPLVAIFPVLLLAWLRFGIGAIAMLRW

SEQ ID NO: 951773 - protein, 42 aa, Homo sapiens
MTGCCAYQRCVFRQVERFLLSSAVTACCPRVSESLTRSLPYI

SEQ ID NO: 951774 - protein, 38 aa, Homo sapiens
SQVTNYLTPTPHNHGKPRHLSSEPLSRKKLTTWVRSTW

SEQ ID NO: 951775 - protein, 43 aa, Homo sapiens
LAVLAVLAGLGAVEAAVMCRRNAVSWKRRELLSGCVQQQCPGL

SEQ ID NO: 951776 - protein, 49 aa, Homo sapiens
SVTSPRNVRNSAFLQRLLTAPPNTRCLLKLRSLGARYGRYGGSLRRVPS

SEQ ID NO: 951777 - protein, 59 aa, Homo sapiens
MVTDLIKTWTLLEDLSQTPSLHLRPGEKLKHNSLKVSKPDGDACGTIWGTCFHPSLCPP

SEQ ID NO: 951778 - protein, 107 aa, Homo sapiens
LCSDLDIHCGIGTYATLVVGGCLSAAPGGHSLVLEGDHQWTQDRKPRMVSATRDEVQEKRVLCSGRIGPDAEAEALSCYVRAFRSVSARHSLTRARAWMIPLLRGTE

SEQ ID NO: 951779 - protein, 63 aa, Homo sapiens
MEQEGPEYWDRTTQIYKAQAQIDRESLRNLRGYYNQSEAGSHIIQRMYGCEVGPYVSGHGYRA

SEQ ID NO: 951780 - protein, 57 aa, Homo sapiens
VPFDRSDQAHDGNADHRAAAAEQAVDGVVGGAHVDGRGSGQQIGLDPGLVGHERAGQ

SEQ ID NO: 951781 - protein, 68 aa, Homo sapiens
PRYPNDAYKAQEKRAKGALLAYSLGATVLDSGVVGDVIWDSPAFNAGLAPGMKVIAVGGREYSSQGYR

SEQ ID NO: 951782 - protein, 86 aa, Homo sapiens
SNNLTIVNKVTLSGITDAMPILEIHISKRALRARCRDQDIPYGAAAIKGFVCCNDLKSYVICVQTGVIQVGFYLASNCSLYDRTRM

SEQ ID NO: 951783 - protein, 56 aa, Homo sapiens
EHSCQKQGVEYVPACLVHLEEEEGGPLFLFFSEADPWMAGRPQQLGTCLWLEDTNV

SEQ ID NO: 951784 - protein, 64 aa, Homo sapiens
DSRASTNIVSLESSSHGPTLPYVPWASTRCHKVTKNCEQAQCTADAAVRLTNTHQCSVRGHDMF

SEQ ID NO: 951785 - protein, 104 aa, Homo sapiens
STFVSLPITERKYIIFSLLPRLGGIVQAMVLAIPYKGHDLTMIVSLPNDIDGLPKLDENLTAEDIDGMDKLAQYERRHVSISLVTSDLKRRKRAMTSRTRDRNV

SEQ ID NO: 951786 - protein, 52 aa, Homo sapiens
EHSFPVVLVIHQVLLHDLVILIKEQIADGTGWLRLSSARRGRCFGSTGTRMF

SEQ ID NO: 951787 - protein, 87 aa, Homo sapiens
VQYDSTHGKFHGTVKAEKREAVMKWKSASRIFQERDPAPNIKWGDAGAEYVVDVTGVFATMEKAGVSAGGPAGGEADSALQRQDTNV

SEQ ID NO: 951788 - protein, 45 aa, Homo sapiens
MGMVLGRAHTDDMDYEKGLRAPLVVSSCMGSTGYVQGATYGYRRS

SEQ ID NO: 951789 - protein, 64 aa, Homo sapiens
NIVSVRDALKTEFKANAEKTSLLSQFLRCCQKSSQHLLLNSVSGGSRSSIRNSGPWLFQGAKAC

SEQ ID NO: 951790 - protein, 56 aa, Homo sapiens
SLNTVLRCLPAGPVLAGTASRVGAVGSTPHPERHERSWKTHASTSATAVYSSPGIS

SEQ ID NO: 951791 - protein, 57 aa, Homo sapiens
DPASTRTVMPPSREFDSVAKQVHKNLAKFALIGIDVLRSVRCNINDEFQPLVIGAHL

SEQ ID NO: 951792 - protein, 103 aa, Homo sapiens
SYPTGEREQEAEGLAVRGQRLLDRVLPGELLQFLGTVLGSTPGPTQPRGDLSVLRGWTSIFLQCHRWDTAIHLSRDPLLGDAAAPLLTPVQQPDPDDYLPAER

SEQ ID NO: 951793 - protein, 82 aa, Homo sapiens
SYPTTTWADVQNIRLSEISRFRKTGNAESPFYVESKKYNSQKQRVEWRLPCGVGENEKQLVKGYKVSVTQDKEDLDFQGTTR

SEQ ID NO: 951794 - protein, 136 aa, Homo sapiens
GGNFEKLKVAGNGATTTINDTIDKVDVVLTATTTVGEGGNIVYTASLVDKNGAPVTNITNPLTVTLDNGKTITIGVNQSSGSVSVLAPDDVYKGDQTVTTAIKGVTGGEHFENLVPGTTPVNTTVTDTPGTDNTTT

SEQ ID NO: 951795 - protein, 106 aa, Homo sapiens
YFFGFSFLLPGEKYMVGKPLTSYGEGTSLAVASILAMTIFGSLLSCSPSSLYLGSRFLQLTTPRGIKFNQHIFIFIIHYFIKILCYHYLHRPIIALWDRFRLQVSL

SEQ ID NO: 951796 - protein, 93 aa, Homo sapiens
LHLKPILKFHRDFWIGRGGKFVLRIIGPVAQPARGGAARVAPNWASWRSTDCPAGRKLMFRERESLNAMSFAASSLLQFDKAIPCSGQGVAIQ

SEQ ID NO: 951797 - protein, 69 aa, Homo sapiens
RAAVDRKEYQIHIPWPPRIDPPVTMRQGEEKPDATYSDVAAWKDQIENRREEVETPLLNPESFVNLGME

SEQ ID NO: 951798 - protein, 112 aa, Homo sapiens
SRESPRETDFDKGHVTVQGENKHIKGNVTISADGKFGADNTNGVNKLEGNANTNGTATVKGQNSIVNGEVTLNANSNVSAGKGKKTTAGIDAEGKGHVTVQGENKHIKGNVT

SEQ ID NO: 951799 - protein, 98 aa, Homo sapiens
FSLIERLDSEPVEVDELCRAIGRGSESPNKRSQWNDGGAVIGRQGESRVFQRVAKDDGVGVMHIVFQQQHAVNQRHCGSRRVSGVLVVGVQGRGREFD

SEQ ID NO: 951800 - protein, 108 aa, Homo sapiens
APNPKRVKGPKKEGKKQPKGAKANPEAPKDLSRGSLKENRNSLSQFSGPVGPLRLSSGNAPSFLQGPVAYGKEGETPKQIPGTGFQWKRGLPLGAIFNYSLLKPAPSA

SEQ ID NO: 951801 - protein, 86 aa, Homo sapiens
MPRTEGQEKKGFFEDRRPSANCDPFPVTEAFIRTCLLKETGDEPFQYKNKRPRPPVVEPFLVFNPTPTLPLLPVVPIVIQRVEYHG

SEQ ID NO: 951802 - protein, 69 aa, Homo sapiens
YKIPEIGEVLGTRLAERGFDKAYEVPGQVLVLKKDEDLFREWLKDTCGANAKQSRDCFGCLREWCDAFL

SEQ ID NO: 951803 - protein, 126 aa, Homo sapiens
KNSIAFTPSEDGQYEYFLDRPAVRNEIRLNIIGHGDKGGVTFKSELKNAQSYSPEAFVGLIAPMLEKTSASQIRMISSKSGSTGFAEELSKRLNVPVKAPVGTVTQFEVMKDRYWILEKLPTHVDP

SEQ ID NO: 951804 - protein, 34 aa, Homo sapiens
MLDSIEKIYSYYEISYRSDRRFKLLVLYTGVSAI

SEQ ID NO: 951805 - protein, 107 aa, Homo sapiens
MALEIILLLIEWQISRPSGYEDSANEAGAAMAWKAKQLIRTQFHLPLSTSLLAKELHCNADYLGRVFRRTFHLTLTEAIHRQGVRAAEKLLLNEAASLTEVATRCGF

SEQ ID NO: 951806 - protein, 137 aa, Homo sapiens
IATPYTVLHQPQDQLNPALPADQGRTKSTIPSLSLRSDEEKSSATQTSNLARTAGQRNRRGEAMAEEEQQPTAEALKQRRKREKAAAKDAALGVEKFTVEVAGIFKGDLRKVMKAHGINNQQDIHQRLIINLIAADF

SEQ ID NO: 951807 - protein, 56 aa, Homo sapiens
RHRTATQPRRITQADRMHEMIRETLGSRDSLLLLRNAREMALGALFATLSSSYHLL

SEQ ID NO: 951808 - protein, 141 aa, Homo sapiens
ATPYVQEMSLEDELQALLKCLRHKGTSKPQTAAGEGLPSVLQQLRQIGGMMRIRTGRLSVFNAFEPADTRDIFDFHHWAQTNLSPVQGAVISILVPAEGSLMERFFSWRNLEHCPSHGSIETLVLCYKRCQLTEGNVSADV

SEQ ID NO: 951809 - protein, 141 aa, Homo sapiens
IATPYPRNEVWTSVQRSNTQLSSAMRDRSTPLKSTPIKRKGPLCRSIKSCSSSRCKALSATSVYCIGASGEAEKRGGDSNLPYPQKTRQGAGFSARGKVLLQNRTRCAKADRAVRLFLIQYTHCHERYPHRDRIYRHLNPR

SEQ ID NO: 951810 - protein, 127 aa, Homo sapiens
SDTVQNITAYYRQRLDEILEDRPDLARASSGRTAHFFLPDPEKTFHRGSTDYFVSDRKIDIGAFDTPTFTGLPVGTVEKAGKRDLQVVTHEPLSNGDGLNVLIKREVVGFRANIAEPKGEFEEDGEK

SEQ ID NO: 951811 - protein, 95 aa, Homo sapiens
SDTVPKRSHYACGACGTVQDVLTTVKATGKTGPMAAYAVQGYAPKRGASGKPYNGRFFAAYGTAQAQQHDTALAEWEARKDADLKEYWPRSELPY

SEQ ID NO: 951812 - protein, 93 aa, Homo sapiens
IATPYINEGLTQEQVLAAALSHNPNDRKTAQMNQVKHLFTRYKMLALVIAVAFIWLFFSWQTEGGFLTPRNLSNLLRQMSITGILACGMVLVI

SEQ ID NO: 951813 - protein, 119 aa, Homo sapiens
QSECEVYSMAILLREEGLLERTIGYATDINPASLDKAKQGIFSLENVRAYTANYQQAGGQRSFADYYTAAYDYAIFDKTLRENVTFADHSLATDSVFSETQLISCRNVLIYFNKKLQDR

SEQ ID NO: 951814 - protein, 79 aa, Homo sapiens
DVIVEEFFHAPAVAKSACNATAFAPSASIAATVAFASAWLEAAVVVHDHSLGAMLGQIAGDQPAEVLRTTRDQCNLAVD

SEQ ID NO: 951815 - protein, 84 aa, Homo sapiens
QSEWPIKDFSAICPELKAIFSELRAGFSFQKPWGLLHFDPVDYPIAKEELAGFQKAAMQSGVSFCFLSTWEQRHEDKDLLEMFK

SEQ ID NO: 951816 - protein, 113 aa, Homo sapiens
YRVNVSSRHLAIWSYRLLNTLAKRQGADLVASVIYIEIKRAAAVRRLANSPVSWAKGQDSGGGDLAFPFTTDECSAKVLVKRRIASWSSFDIARKLPNTFSSIFAQLSSWIGV

SEQ ID NO: 951817 - protein, 95 aa, Homo sapiens
YRVKVVSILGITGRQSECDELRRGGIQMVAADLVNDSIDQLAKVFARFDTVIGCAGMIAGRETPMKLATAALKSGVKRYFPWQFGVDFEVIGRGS

SEQ ID NO: 951818 - protein, 84 aa, Homo sapiens
QSEGVHHRGFPFKEGFAVEGQGRAAEHQAGDEGEPLSFFQLALRDEDGAVHYDRADEQYGSGTVDAPERQLVAGDFDDPEVEFG

SEQ ID NO: 951819 - protein, 95 aa, Homo sapiens
YRVNVSFCVDAVDEYSVTSVKLTLVIASVILCWAYSPIGVHMGLHCYSPGQLALLRFLIASVFMGGVASVLEIGRPPLRDLPWLFVLGFFGVFLH

SEQ ID NO: 951820 - protein, 90 aa, Homo sapiens
MNVNSTNTCQTSAVNNGAPWGSTAQRGDQIGQPRLGVSFRGDAFAGVQAQHRLHFADAQFGEQFAHLFTAATEGIAIAGVAQADDRSRQA

SEQ ID NO: 951821 - protein, 78 aa, Homo sapiens
QSECAFVLFAFVSSITPGPNNTMLVASGVNFGFRRSMPHALWISIGFMLMVICVGLGLAEVFKLFPWAYTLLRYDGAA

SEQ ID NO: 951822 - protein, 99 aa, Homo sapiens
YRVNVKINAINSHKLANLSPLSRRGVWLKRSKMALTNDDETWPGLRRRRNPDTQTRAVHPHLPATYSLVRSPLAPAVPPLPMLVLVLVLVLVLVGVSRH

SEQ ID NO: 951823 - protein, 45 aa, Homo sapiens
YLAVTSSVGTVIYFFPTESTLHSEKLHRAHRIAGSDSRSIVQYSP

SEQ ID NO: 951824 - protein, 41 aa, Homo sapiens
GTRLLIQSPPQTTHHSLQLLRRCRFHSHRLARHQHHPLDQS

SEQ ID NO: 951825 - protein, 69 aa, Homo sapiens
RSLPSTMSSDSVRMYCPLQYDVQNVDCRVKMTSSFLMLVISLISLMVICGLSPLSDFSPIRISRMVWDQ

SEQ ID NO: 951826 - protein, 100 aa, Homo sapiens
GPCASVCLCSSPGGTTTVPHFWKVPSAAGLHYTGSILCHWSYPSRQHPSHINAEAQHTAQHLRVASWSEMGGGQRVPLEDLRACYVSFPFSKYLRSNSRH

SEQ ID NO: 951827 - protein, 103 aa, Homo sapiens
FELGPVCVGVCEYDSTVDELVLLLQQVQVGGVVHEAAGILIQGTEVRPQPTRQLNGYAPDLLHLGLDPGPHNIGRADELPAQELRAVASASHSPRICGAARDT

SEQ ID NO: 951828 - protein, 67 aa, Homo sapiens
TSSLDPSACLRFQRSSTDGLRCNTPDTDLRSGSAQSGGVHWDRGHSESGGSSNASFPDRDPHAGQNS

SEQ ID NO: 951829 - protein, 133 aa, Homo sapiens
MSVKYSLLLTTVEQTDRRAFHQVQDQLGNGAGAADTRRVQTVQARAHPVEWTEQGELQALVAVGPDHAVQQLLGDGVDPALLVDRAHHQVGGVFVEILVLAHAIDFGGRRENHALVVLDAVAHQLEVSSKPVR

SEQ ID NO: 951830 - protein, 124 aa, Homo sapiens
  misc_feature (99)..(99): Xaa can be any naturally occurring amino acid
MANFSTFYYRAYDSTLSLCLAAEACWQEERAQWDKHFIQTQHWTHQHRGFSAGEALKQNLLSMSNAYVTHNERLLEITKTVSLRHLHSQDPMATRDMPXAALKADLVKTGTLTFELTLKLFDDD

SEQ ID NO: 951831 - protein, 39 aa, Homo sapiens
MTERRLILHRGWLLLLRTIYRGLTWYEVFSQEPDIGSPK

SEQ ID NO: 951832 - protein, 138 aa, Homo sapiens
HSAIGAVRESEHRLSDYWCGSSWPSSVGPWSTAMEKDVLALRMHPKGSATRERGCTCSNLYFSSRFYKIKSLKIEPWVMWWWKNTLGCFILQAGCLPRENGRTSRGTSAPWSVSRHLENQSVIITRKSQLTEDDMDKR

SEQ ID NO: 951833 - protein, 129 aa, Homo sapiens
PTYRYLEQTDITVPAMHSLLSALSIGQRWTTSRVRSQNKSIPSSTKAHAIDMRVRALLNIKVTQPVLFSIPDMTIYKHQYCFTDLHPLCNPMRRSVTAAWILQPTLPRFTRDAFSQVLWSKKSEGFQEP

SEQ ID NO: 951834 - protein, 137 aa, Homo sapiens
TYRSGLSVFDDQRLPVSIQVVARRRRHAQGLGAIVKKGVAGRFEYCRAPAHGYARQALYGSKLGRIKCQPIEKACDETGLDQYVPGFAPHVGQGQAVFTAQPGEACEQLIFAASVQLPAAQGVEGLSDGYLHVHACL

SEQ ID NO: 951835 - protein, 105 aa, Homo sapiens
MPLSVSNFTVDVQRMRPARGTRETILKSKATGLPCQIEKYNQVKHNHAPVHVHPLPTYSDETQHPGGERKLREPGAARECGQRHPLQQTPAKVGATGGEGLNGSA

SEQ ID NO: 951836 - protein, 158 aa, Homo sapiens
PCELSYGSYDTAGMAFGLNHALTEPGAEVQHYARLDVSRNTNHSYIDRDQRDAWSVAFSLLSDLTPNLSHTLALEYQDEHEDSPYWGTPVLNPKAGELKIDKHNRFNNYNVADGRYEQRTIWARSIIDYRINDNTTLNPLSYSNMFTMLPICNLCFNS

SEQ ID NO: 951837 - protein, 45 aa, Homo sapiens
YRDAGLTPIPGQVLRIQQVRSCDLDHNCGWDLIAGRELHMPRDRQ

SEQ ID NO: 951838 - protein, 103 aa, Homo sapiens
RLFTDGLPHIRVTGLADALQVVSRDVTTTFERIAWYAHDIAWIIALLLCNGVALWMGFCLFDIAVPLLFSVLLARLYRLSINELYRTRVESVKGFDSLLRSAH

SEQ ID NO: 951839 - protein, 135 aa, Homo sapiens
YPVFGKNSAHSAHIIFVGQFYRVVLRELHSLTGIIHGNSLKGGWFRPAHSDHGRTPPSPPFPLVSEQHNAIDHSAAVFEVHHFERQFRNRPVECQNPRLHQLTLRGVLATSVELDGVQLGIRAGFADDVAKLGDQ

SEQ ID NO: 951840 - protein, 52 aa, Homo sapiens
  misc_feature (47)..(47): Xaa can be any naturally occurring amino acid
MGLNNQWMQRDLAVLWHPCTQMKDHQQLPLVPIKRGEGVWLEDFEGXRYLDA

SEQ ID NO: 951841 - protein, 50 aa, Homo sapiens
DVYLRTSNLQEADVIFLDTCSIREKAEQTIWNRLHQLKACDKLKEVKEKS

SEQ ID NO: 951842 - protein, 43 aa, Homo sapiens
DPASIPSEFVKCKHHGFYGVFHLEGILVWSDEALDEARRTLGE

SEQ ID NO: 951843 - protein, 35 aa, Homo sapiens
NRNFSFTDFMHPEELEFMKEIVVLETLEDIDKNGE

SEQ ID NO: 951844 - protein, 61 aa, Homo sapiens
MKLTHNHCTDWHLSTVGREEQATMRQYEPASKPRFYCSGCTIDFLHHSDLLSTLGSVLCKL

SEQ ID NO: 951845 - protein, 87 aa, Homo sapiens
PGPCLVQALSPRRCVKDLLLSIAGGRSQEKRALALVVEEKTARRSGPEHRYRNGGSLKVRSLRELQTIALGAQQIDGADANLQVLGD

SEQ ID NO: 951846 - protein, 119 aa, Homo sapiens
  misc_feature (1)..(1): Xaa can be any naturally occurring amino acid
XGLALINGPAFDIPTLAFLQYTPLSKTLRLSRTPGNRIVYLYTKKSWESTKICMLCVPRHTSMGSCCMTYSSYEIVHQQRNMSAGSYGGSSVCYNVFVTRINLFVLIEEQKIVVKVLKP

SEQ ID NO: 951847 - protein, 38 aa, Homo sapiens
DVMNVHINAAHNWKSLGSSLLLAGFNSDHALESPQHLL

SEQ ID NO: 951848 - protein, 38 aa, Homo sapiens
LAVSWQLGIISEADQSRLTSLLEETLNKFNFARNSTAP

SEQ ID NO: 951849 - protein, 110 aa, Homo sapiens
YPTIRLENDVFALCSRDRRDTYRVRPVTMRKDDEVEVYVDTIRVSHIGNNSPTFTGQKYFIYFERVQREKANGTTVHDGVHPSIGSLNAESLTEGNSAIIVDMIVYRARP

SEQ ID NO: 951850 - protein, 74 aa, Homo sapiens
GDVAVAPKLAIFSPEWQQAILSGEHFYIGGLIVASSSDRIRMKGPSFSGHKSRGICVSGATPKPASKRSFSGAS

SEQ ID NO: 951851 - protein, 72 aa, Homo sapiens
TRGLAGFDGAAGKQGASDRGNQRDVIPDLEHLFDVQRGEAPKAFGPLVKGVQAIAKVTEDALDVDRFHVHWR

SEQ ID NO: 951852 - protein, 38 aa, Homo sapiens
VTEAWDENLAGGPSSPLRKAKRARLCSSSSSDTSSRSF

SEQ ID NO: 951853 - protein, 34 aa, Homo sapiens
  misc_feature (16)..(16): Xaa can be any naturally occurring amino acid
LCACAVIIGFRSKIKXALAHFLPQGTRYTLPYEA

SEQ ID NO: 951854 - protein, 87 aa, Homo sapiens
ALHRYEAKKKNLLLQFLMDSSMSFSERSSSSNLLRAYWAASMKSLRLLAVGRHFVFLSRAGRLGLLPLHLGILLLLLFFSLFLYVRV

SEQ ID NO: 951855 - protein, 41 aa, Homo sapiens
MPQLSDQSCACSVISYFSFSVSKISPSWCLGFRSFFFLKNT

SEQ ID NO: 951856 - protein, 48 aa, Homo sapiens
QWEWNLAIKKEWTEECIQPLAPPLAPGRILSGVIQHPGPSSLVHSVGP

SEQ ID NO: 951857 - protein, 100 aa, Homo sapiens
DLADRALRISQLVCADSGILQTRIISHYERGWITGSKGGHSEEKMEGRQILAVAAEGSMDMARGVKIQDIPQVLPQPGLHAEEIDVKVIVAAGPCYAGAL

SEQ ID NO: 951858 - protein, 39 aa, Homo sapiens
MKQSLRAIIAYSRPEGRSEDALKTLVWSGVEMTARAYTV

SEQ ID NO: 951859 - protein, 66 aa, Homo sapiens
TDSLIGVNEVDPHTNCVMRVIGAEMLLMSCSCLLLRVVPPAQQVSVVTAVSSFHAAEGLPYIFLKN

SEQ ID NO: 951860 - protein, 48 aa, Homo sapiens
IIFTVTECHVIFICSIMKPGAEFGLRSPLALPCALPVPVFKISLSRES

SEQ ID NO: 951861 - protein, 71 aa, Homo sapiens
SRTRSVSKHFALLEHSREHVQGQILSSPTTPRIKLRYSGINSSQLSMMNTRRHIEFDVVLFLLVLKQVQGS

SEQ ID NO: 951862 - protein, 144 aa, Homo sapiens
SVHSTPLHSTQSTPFHSIPVHSIPFYSIPLQSITFHSIPDFTPLHSTPLTSIELHSISTSLHSTPLQSIYSIPFHSTPFHCIPFHSTALHSIPHKSSPFYSIPFHFTLFHSSPLHSIPLPYTLLHFTPLCPSPLPSIPLHSTPI

SEQ ID NO: 951863 - protein, 91 aa, Homo sapiens
PLNGRNGQTRLYHHLVMVKTSPVNRAREALLKTTQFSCTLAQQKFELKPLAAWLEHNSRLVLELVLRLVRLRFQRSRQVRDGDKKSHQVTN

SEQ ID NO: 951864 - protein, 39 aa, Homo sapiens
GNLMWGPLMSSKTSCDSNYYTNVRLQGGSTRTIVHVTAS

SEQ ID NO: 951865 - protein, 33 aa, Homo sapiens
MPRHTLDDPTVQGTHHLGVIAGQVEEGTVAQHD

SEQ ID NO: 951866 - protein, 55 aa, Homo sapiens
ARPRDDALHYTPSLVVPERAPNYISAVRRIWAGNEPGVLPSSLRRQGINPRAVLE

SEQ ID NO: 951867 - protein, 66 aa, Homo sapiens
LISSTSSLGGCCPASRLRAGGAPRRLVVERRMAFGRDYAETLRRWRQSFEERLEAVRAQGFDERFV

SEQ ID NO: 951868 - protein, 45 aa, Homo sapiens
DTSGHPSIPACQQLLAGMDTSMLAAVRHASRRNQSQAAQQSSTAV

SEQ ID NO: 951869 - protein, 67 aa, Homo sapiens
IQIVTPEVHEGHPLNYISGGSATSDIELSRVTECMGLRRLYVIVVDDRKTRPELVPRLRDRGTAVPE

SEQ ID NO: 951870 - protein, 72 aa, Homo sapiens
MAGQAYRKFLPLFDRVWVERSAAETVTKGGIMLPDKSQGTVLPAPVVAVGSGSKGQGGEIHPVSVPVGDTVL

SEQ ID NO: 951871 - protein, 78 aa, Homo sapiens
YGVQVLLPQTLSESTFDSFFSSFTKKTVSRVNLSFFLAVSSSTASSSENATLRFRLRVAGESLMGDSVFFTTGVLMTL

SEQ ID NO: 951872 - protein, 73 aa, Homo sapiens
MATASANGSAIAPLIGKRTYRLYCFAGAFENLQDHRAGLVGQLHTLGGAVAGGVHAVDGLAGFVLDHGDHAPR

SEQ ID NO: 951873 - protein, 60 aa, Homo sapiens
SPAQATITYSAPSNTYIVDCGSPVSQRALITHHEQPLKDWAQSTVHEAEEEEEGSVTIVL

SEQ ID NO: 951874 - protein, 43 aa, Homo sapiens
PSPDRCGLEAFAVDDGGARLVVLLLANPHLLVEGGCGRRLVEG

SEQ ID NO: 951875 - protein, 55 aa, Homo sapiens
KILVQGRHPPDQQRLIFAGKQLADGRTLSDYNIQKESTLDHCAPLLEVGCRSSVK

SEQ ID NO: 951876 - protein, 42 aa, Homo sapiens
MYYAVKPTGFAPFGNLWITSYVPIPTAYRILSRPSSPLRAKA

SEQ ID NO: 951877 - protein, 65 aa, Homo sapiens
TYCCVLQDFTPVPDSYDVIWILWVISATYTDQHLAEYLRRCRGGLRPGGFIVIKDTLAHEGSDFL

SEQ ID NO: 951878 - protein, 43 aa, Homo sapiens
TRSNKKSSDFEKINHIDQSLAHYVDKDTRNVTGKKDWTFTQII

SEQ ID NO: 951879 - protein, 69 aa, Homo sapiens
  misc_feature (42)..(42): Xaa can be any naturally occurring amino acid
PLHENAVLALAQIENSAAVEKAIAHYEQQMGQNGAAAHGKPXQELLGPCTGHSAETRPLNVFYERTSFK

SEQ ID NO: 951880 - protein, 43 aa, Homo sapiens
LTGCMWLPVHQTLRTDANATQAVGAGESSSPAPGSELCIRSPA

SEQ ID NO: 951881 - protein, 38 aa, Homo sapiens
MWSLLCSIVCYVLFSHLSQKPKYYTTTLPPSTTSSRTH

SEQ ID NO: 951882 - protein, 50 aa, Homo sapiens
RICKRFFILLYLFLKRNYDKIDVVFIRHHTSAREVDEEEFFYSAAKLDGT

SEQ ID NO: 951883 - protein, 193 aa, Homo sapiens
GSPASHQVRDARVGVDHDLSSQAHLAGCVGLLGTEEVFPVGPMVIAQGHAHRGIGIHHLFSGDDFHLVGISVQGIRRRDTADFPVIGLDQFEGPLGASGNGLALVLFFGGHVTNLLLEEFTEDRVDIAGRDQLLLGERVGKCFADALVFEPQGLVLTGGDFDVSVVLQNGMIWLIKMSRQIGESSFQLFASEA

SEQ ID NO: 951884 - protein, 41 aa, Homo sapiens
MGASVGFISDGATSVPMFEWTMQPGDLSCCGISRDAPGQGA

SEQ ID NO: 951885 - protein, 76 aa, Homo sapiens
SGLEPSYIPRLDCACSSKPERVIGKIKQLTSGGYFRVDQIASLVIAVFKRKLHDSTTSCNVKLKRSDLLEQQSRAK

SEQ ID NO: 951886 - protein, 39 aa, Homo sapiens
  misc_feature (22)..(22): Xaa can be any naturally occurring amino acid
SNTKLKEHDGTSNYECTARVTXPSMLFIQKTDTLDHIRT

SEQ ID NO: 951887 - protein, 112 aa, Homo sapiens
MATYKVTRQRVGHRPSVMNRAVTHCAYMDKSAALIDDEIRQPSASRYGSFAEWVLAPAVIAALLIAIIRLEATGQAARLLWSILLASFCVGLLVVAYANYTRQCRCLAIVRP

SEQ ID NO: 951888 - protein, 128 aa, Homo sapiens
MPAGVTFLSLGHRDILIYNDLKLAVSRCGEDGPWVLLVRARAIHLQHLHVEDDALVVLLQGVQLSMAHGAVFTHLCNTASVPMALQGVLAHRDVAETLGHQRVQDHMLDVTEELGIYPSSMVHTMVYH

SEQ ID NO: 951889 - protein, 162 aa, Homo sapiens
RDLLVQLDPFMGPRLFLHLQGLEAGNGIEYLAAVCFTCPWRYNRLPYWWISGTAFALSSSAMAHGSCWYVPGLCTFSICMCEDEALRVLMQGVHVSMATELCSRICATPQHEPLALHGVLAHRDVAETLEHQRVQDHMLDVTDELDNLPFSHGAHDGLPHMQ

SEQ ID NO: 951890 - protein, 38 aa, Homo sapiens
ARACYEAGERRKGTDVNVFNYHPYHQKLFTTSQSVSEI

SEQ ID NO: 951891 - protein, 58 aa, Homo sapiens
MPVSTVLPPPLLLAAAGGGGLKQSRCPPQAWKSALPMVPSARVNPRLGIQVHLVPNQK

SEQ ID NO: 951892 - protein, 68 aa, Homo sapiens
QKDFILVQNLVDLWHHILAVYQEDVFDRIRKATCSTARPSVYLIFSPLNIRSRAASTPLDSAKSTSIR

SEQ ID NO: 951893 - protein, 57 aa, Homo sapiens
DWQMGFLQKYATPLIPSRGEVNAADAFDIGSFDEEDTKGIKLLDSDQELYRNFHVTI

SEQ ID NO: 951894 - protein, 33 aa, Homo sapiens
EIKFWLCPPNGIAGANSRFTQTSTFLGLKLILC

SEQ ID NO: 951895 - protein, 31 aa, Homo sapiens
MRQGPTHPSGSLWDAGPFCPSVAVCPEWVRR

SEQ ID NO: 951896 - protein, 132 aa, Homo sapiens
MQSLSIVVITPPFSSGIILSHSHWIDFAVYKLLTGSSPRVAGWWAPNDTHAREVGILPKVVYGGTVEDLACSDPTAKELERRTQNGLLSCISVKPLSLATDWTRRECSRKEQRQANGNVAWAHCAGARRDPP

SEQ ID NO: 951897 - protein, 97 aa, Homo sapiens
GDSEDPTKCNWPSEEMTYITHDIWEMTPLEHAVYFHSLVSSPVSFHIMIVLSREAERIMLRDLRGPSDLGYPAVVALEGATKGHLLSHPRRDWDPPW

SEQ ID NO: 951898 - protein, 135 aa, Homo sapiens
NTAVHATFSCRFLRYTPLDGPWLTFDLYPHVVCFLKSVDEMPNGANDIACPLTTLPEENYQSASFPDQLFLVQISAHSDQNKMTNTNLAVVFGPNLLWAKDAAITLKAINPINTFTKFLLDHQGELFPSPDPSGL

SEQ ID NO: 951899 - protein, 138 aa, Homo sapiens
QLDELEQWSARMNVSAAVSRLRFTFSESIQAKNRRNALILFCTEKRLPPPARSSVMCSCSCVTSSKRSGKGLPSSPCAIWRPTCFTFAAAPPRNSSGRRSQGVSVAPYSSIGKVRSNSELSIVPRPSADPAKCRHEAI

SEQ ID NO: 951900 - protein, 38 aa, Homo sapiens
FLRLFQRIPVKPQACLTPGGSQSHVQVVPPDHTAVGTV

SEQ ID NO: 951901 - protein, 79 aa, Homo sapiens
PGVQPGPQRWDGSRLQLRKRPVSSDEGSKMPRAFLGEEAVRLHVQEGKLGQPMLPDEERGEIYVPVSLGFVPNHSPYRG

SEQ ID NO: 951902 - protein, 197 aa, Homo sapiens
LSPGGSGGMALEELLVVLPVEVCLFGLPRISLRDVRTDTGNELAKKPSVTKMFAAIPTTNPSTMRMSIVISYGPFSLSPADRTCEIPSNPLSSDGYPNTQIIKMPQNARRPSHFLAFDMKEEKSLCFSNEDELLSTTRMIADRTVDRIEALPATGNCERSLGNASPNLRSSDAFACVLVHTTRQFRYVTTWLRDRSS

SEQ ID NO: 951903 - protein, 42 aa, Homo sapiens
MIPDTALAGVMQAWVPRFPAWSRARTWETFSETLRAHSMNSF

SEQ ID NO: 951904 - protein, 36 aa, Homo sapiens
TTAGHPSLYCVRVIVSDVLPPSSRVCVSSVRVIVYH

SEQ ID NO: 951905 - protein, 98 aa, Homo sapiens
DDITPSGIEYLLCVVNQLTQGHKKRHCPYAGGPLKFVGYWTHDTSHAPFEVVVVVVVEVRQWVVMGVTHSIVIVRMLGKKKTLWDIFIRELGGVEKGI

SEQ ID NO: 951906 - protein, 48 aa, Homo sapiens
SSSSRSNNNNNNNIVTMLAREASRTHCSTVGKQACSKPRQATASLLNL

SEQ ID NO: 951907 - protein, 33 aa, Homo sapiens
DNPDDNNPDDNNPDDKYTRTTSNPDSTITRTYN

SEQ ID NO: 951908 - protein, 108 aa, Homo sapiens
TRTTLPGHNNPETISPDDTNPENLPHDDNHPNDNNPDDNNPNDTNPDDTNPDDNNPDDNNPDTYNPGHNNPDDNNPDDNNPDDNNPKRTITRTDNNPGRQITRDDNNH

SEQ ID NO: 951909 - protein, 70 aa, Homo sapiens
GITHVPDKIRTKVNTNQTQKWRAREGGLIQQEGGRAGGAGRTGGAMEHGLEAGLTGGSAGVRLECKDVPD

SEQ ID NO: 951910 - protein, 151 aa, Homo sapiens
RDTTVLGYCDRNVQLLFARLSGDLARRALVSIVVHVSPSLQLVPADSSQPMVLERGRAISALKRHRELGQEHRIMGEHQNLAGLSPALTKRRAMARRYPCSSDVHRIVEKYTVDTYVGQEFEARRGNHSHPQSALVALLTATMKAFARDPC

SEQ ID NO: 951911 - protein, 171 aa, Homo sapiens
DTYTDQLRHHNLTGKAASPIDHSAQILSLFATQVYSQADNGFFPLAGDRIVTVFGGQAFCIDGRVLTEEANFLGGLRLFKLLVQLRSRSQRVKKRYLQMKTKSASLNLSREKPLNVDIDQLRVRYLHLSRAVVADIRVKRLITPLRMYLRPGTSFSFSLELRHGRSGDWRP

SEQ ID NO: 951912 - protein, 64 aa, Homo sapiens
MQYLIPVWCSPGGQEENMQPYSDFGHHQRQRCPEHGDQGKLFHDMQHLVLGVVPVTDNRIVCVR

SEQ ID NO: 951913 - protein, 36 aa, Homo sapiens
TNPDDNNPDDRKPGHNNPADYNPDDNNPDEINPEDE

SEQ ID NO: 951914 - protein, 34 aa, Homo sapiens
TSSLVWVIVVRVIVLLSSGLLPSGLLSSGCISNP

SEQ ID NO: 951915 - protein, 38 aa, Homo sapiens
MDHSPTHDRSRYYDDGSGASRYYQMNAINRTVEAVARG

SEQ ID NO: 951916 - protein, 66 aa, Homo sapiens
VTTRTQTNNPDTITRYDNDPDDNNPDDDNPDDNNPDDNHPDDNHPNDNNPDDDNPDENNPGAISTR

SEQ ID NO: 951917 - protein, 38 aa, Homo sapiens
SRLTTSMVQIPILSKIGAYHILGHTLPFQPSSLTTMSS

SEQ ID NO: 951918 - protein, 108 aa, Homo sapiens
MPSRKRKDNKQTPDSFKRFDEQGKLIDGGMMALHVQQDISSIQDDVTSGSTLDRGFLALSFTLEAYWSYEPKCLEATNEYPWIADQLLKSGQDMLQNKAGGQRKSNDK

SEQ ID NO: 951919 - protein, 76 aa, Homo sapiens
YPSNWPRPTGPQPKPITQVTFYQNGIGTGYGGWYQQYIGKYVSGATGEGLAFNIREAYNFICSNYHRDDEVILLGF

SEQ ID NO: 951920 - protein, 92 aa, Homo sapiens
HTQQPSRTFILVEPLPCAWLLEILPVWVGVEGLSDVLWFSPPRVALIQQGEGATAGKGPLKALSKAPGNTRMYSEEVCALTTAIDIEECRHL

SEQ ID NO: 951921 - protein, 55 aa, Homo sapiens
TSVPRVMPEMMRLRRGKLGLRGGVAERVLTHDQPLVGQAVRERQVSLRIDAVEAN

SEQ ID NO: 951922 - protein, 33 aa, Homo sapiens
MRQCNLCCKAQSDNVLKCHVLNDVLKYTVLNVT

SEQ ID NO: 951923 - protein, 54 aa, Homo sapiens
MYTRVQRQHRHFLAERKDRNTGEFGQTTPSGTGVTFYDRLAEICRRVPEERLTR

SEQ ID NO: 951924 - protein, 43 aa, Homo sapiens
ISTLSLQHGSILRVGSIETFLALLNDLHIFWYLNVGSLIQEFN

SEQ ID NO: 951925 - protein, 106 aa, Homo sapiens
KGNPKQHTSLHALTGVGVKKVTVLIDLGFHWQPWEGGGGGYGTVKVMNTPQRRKRRPEALSWLASATVERSFCLDQYTVTLMHLTLKIGKEEAVGFTHTVKREDPK

SEQ ID NO: 951926 - protein, 87 aa, Homo sapiens
CRLWRRRLSTIVGFFLCTDPYGGCNLEACQTILVGRISEWYIGVDMIASTLGDPFYDDGPAYISVEHCDALSPWIFVEHGDDYVGCF

SEQ ID NO: 951927 - protein, 99 aa, Homo sapiens
PSTQTLGYVAHSGRKLIVSESRSLLPTRYLNEERACAGSPYLVSTGTEVKSLGEGETEDERRLCRDPHPGLQKGGVLPRTGMTGSILLTTGCAHKSLVQ

SEQ ID NO: 951928 - protein, 59 aa, Homo sapiens
LECEVEWTTTRTTVSTLARVELRLVRYSNQGSGSPSRDNCNRYAERLAVVGIVEHLLLD

SEQ ID NO: 951929 - protein, 63 aa, Homo sapiens
MMQLSVRCGWSAQTDNGSNWLRVTCACSNSNQGIVLALEVELQPRPERLDVVGIVEHLLLDMV

SEQ ID NO: 951930 - protein, 39 aa, Homo sapiens
DYIGSCAIRCLALADFAAAAPDIYSIEDLAQLIHDLKNV

SEQ ID NO: 951931 - protein, 54 aa, Homo sapiens
NRLQLRAIQWDSKLTATYSPEKPRNRARDNIAVITNNQPGSALLPGFKRHHTQP

SEQ ID NO: 951932 - protein, 63 aa, Homo sapiens
TLTDNSSVALAQRRRWQLGLTLQRFIQVRKLLPELRGLFLLVDQTRECRITSASVSTVKANVG

SEQ ID NO: 951933 - protein, 36 aa, Homo sapiens
QQEQLWGQLQDLDSRLRAGSSEFDSEHNLNNAMKGT

SEQ ID NO: 951934 - protein, 54 aa, Homo sapiens
LSTGRISCLPVSVLSKGLVFIQGQISRGSRARASVQVSSSYYKGEKCSSSVTVR

SEQ ID NO: 951935 - protein, 40 aa, Homo sapiens
MLPSRLLSRCRNHAGAPRIVPSTPMSPMRWELSSDKVRVS

SEQ ID NO: 951936 - protein, 41 aa, Homo sapiens
WLVKIVRSLQHFSAQRIRRYKWGRISLRTMFLPINIPENVH

SEQ ID NO: 951937 - protein, 46 aa, Homo sapiens
TEGCRAEDDLRFEVSGLDLDDVTGLANRHFGAHGCGQIDALPSTRG

SEQ ID NO: 951938 - protein, 58 aa, Homo sapiens
MPISLVRDTDDPNAESSVRTYIDQICLFLLSVSIRGRILSGVVTKMKMQRTIVIRRVQ

SEQ ID NO: 951939 - protein, 64 aa, Homo sapiens
NGIKAGFNANGRTKYMMQPYKVWPASGLPFPQTILWGTGMLFGGITRGLLQGSWPDSIGIGVHL

SEQ ID NO: 951940 - protein, 55 aa, Homo sapiens
MPIMGCAPADCSRLDAPCWFTVTLVNYSSRGVRSEIVPIWKRTFLSLSDLFPTRA

SEQ ID NO: 951941 - protein, 53 aa, Homo sapiens
SPEAAVFSKDAGVLESTPAPQSSPASMETPPELPILPHHTWSGSSALAILGGV

SEQ ID NO: 951942 - protein, 72 aa, Homo sapiens
FTYVTRSLAKYVSGKLKFLGDVWNIKSNIAQVKRIGICRNSTVSSGGNMQTCAIADVHLLRCRGERSRDVKA

SEQ ID NO: 951943 - protein, 38 aa, Homo sapiens
RSETHAALLWHGKAIRPSSAICPGLLGVATFLDDAARV

SEQ ID NO: 951944 - protein, 36 aa, Homo sapiens
SRCRTWWMAGDNRSKFSAFLPTSFGGYKRGRGSIVG

SEQ ID NO: 951945 - protein, 35 aa, Homo sapiens
MGGVSHGKGEVPEARPRLIMLHKGAQTGGRAQDSS

SEQ ID NO: 951946 - protein, 64 aa, Homo sapiens
MERTQAQLRDAVKSLLVYSKDAGVVGVNPEPLKAPCLTGDKPELPILPHHTWSGSREIAILGGV

SEQ ID NO: 951947 - protein, 72 aa, Homo sapiens
GITPTALFGRQPLCHSLQHMCGGYPFLGDEKSMVMLPYPVTKILAEVEWHRCCHKYLTRKPRRKIQGASLYR

SEQ ID NO: 951948 - protein, 47 aa, Homo sapiens
YTERLEEPLSLGELDTYAAVSVLPFFDPDPHIVYLCSMGDSSIRSLE

SEQ ID NO: 951949 - protein, 37 aa, Homo sapiens
LDNVLVYFSPPSIVIPRGNKRGDTYFVLNELCMVIVD

SEQ ID NO: 951950 - protein, 42 aa, Homo sapiens
GNKRISPPIRLGRNHRLISFQTKRIYNRWNPIFFHCWLFVMG

SEQ ID NO: 951951 - protein, 37 aa, Homo sapiens
MHYGSGDDSKASIAASSICIPKDILDPPCDPFNPVVT

SEQ ID NO: 951952 - protein, 90 aa, Homo sapiens
AVGARERLAHPGSGSSVLLHSPVCLSPLVLQVPSGPAAVSQDVGSGDAMSARGRSGVEPTWLLAGLGASPANLWVLLRLQYGLDGPTRAI

SEQ ID NO: 951953 - protein, 66 aa, Homo sapiens
RTDSRVLRHNDYQRDNPSVKQDKKIDRGKLLRHSHYTILCGAAAYGGVTILRMSARPVELSPSSSM

SEQ ID NO: 951954 - protein, 60 aa, Homo sapiens
LKEEQRKLREERHTEYLKMLEEREEALEEAEELDRLVTAKTESVQYDHPNHTVTVTTISD

SEQ ID NO: 951955 - protein, 52 aa, Homo sapiens
DGAEGRRRHVHSSPEKVGRGVLRGLGRGGCGVCVSIHLRLQVEEAYSAGLAS

SEQ ID NO: 951956 - protein, 131 aa, Homo sapiens
GKVGKAVLTIDPRVCLLRIAKGLPANHTLTSETLRVFLHISDNQGENVLWKDATHNGLQGFDKMLLSGPVRGPHGTSRTCALHGPSQLKVGVDLELERKVSSSSLLRAVTGQEVPDNLCLYPLMFSFIPSG

SEQ ID NO: 951957 - protein, 42 aa, Homo sapiens
TRALKSFEQEFTQRTGGYCATELCCEPTNKSFAIAFRHADFT

SEQ ID NO: 951958 - protein, 131 aa, Homo sapiens
RIPCCTKDATPKLTPALPCQVYVNHGENLKTEQWPQKLILQLIPQQLLTTLGPLFRNSRMVQFHFINKDLESLKGLYRIMGNGFAGCVPFPHTAPCEVRVLMLLYSSKKKIFMGLIPYDQSGFVNGILCGS

SEQ ID NO: 951959 - protein, 48 aa, Homo sapiens
ARYPELARVDLRLVELEPGIGLVLSRYNCNRDQSALRLSASSSTFFLT

SEQ ID NO: 951960 - protein, 81 aa, Homo sapiens
DSVQIIVKTTNGRVNASIATRAPVGGAAGLANQASCSTSRWLGGLVKNKYVVVSAHDLKPVQPAVVPHLERSAIARSRANV

SEQ ID NO: 951961 - protein, 105 aa, Homo sapiens
VEESVVRRDDERTLEAICERLRPALYTRGTRLVRELDPVDSMLFIIRGYLDSYTTQGGRSGFFNSCRIGAGEFCGEELLTWALDPRPSEYLPRSTRTVRAVSEVE

SEQ ID NO: 951962 - protein, 70 aa, Homo sapiens
PQLLEPVNTATCCRQPVSSVRHRHFQPRKTSNTGELVDDTQWHRVTFYDRLAEIAGEYLKKGRPVYVEAN

SEQ ID NO: 951963 - protein, 38 aa, Homo sapiens
IVSLCAWWAVAQDRAHCGCSSVVTQDQQPFSIPGVEID

SEQ ID NO: 951964 - protein, 54 aa, Homo sapiens
DWTSAVRPQEAWELDDLRFEVTGLDPDDVTGLANSHFGSSWLRPELMRCHPPED

SEQ ID NO: 951965 - protein, 78 aa, Homo sapiens
GVEIDVCIRVAGGTILDPEDGAARVAARSAQNWTWSGYHPHVPEVGGDDPRWRGTVRELGWYQLGPRRFRSRQDVYYG

SEQ ID NO: 951966 - protein, 57 aa, Homo sapiens
QLTVFVRFDLRTAGDAETTSEFEVSGLDLDRRDRPCENVTLALMAAGRLMRCHPPED

SEQ ID NO: 951967 - protein, 84 aa, Homo sapiens
KVDSTASHPRAYTATSKCTSAMAQRLHISHTGHSTIPTNANPLHLRNVLYVPHITKNLLSAHKLTQDNEVFIEIHPNHFIVKDQ

SEQ ID NO: 951968 - protein, 51 aa, Homo sapiens
YVPGKRYILHSCRYTVRLRCGGTQIRCACDKAPKRLSWLERLGCKHPSIFY

SEQ ID NO: 951969 - protein, 33 aa, Homo sapiens
ISVDRDNVEIPQDSVRKNGRRSLCADLTVAYEI

SEQ ID NO: 951970 - protein, 65 aa, Homo sapiens
FHCYMQLQCLDAGEGAQTDKRFELARVTCALLNLEPGIGLALSENCNRDQSALLFVVIVIPLLRD

SEQ ID NO: 951971 - protein, 50 aa, Homo sapiens
VDDEFRRNPTMTAAHKRSAVTVCVSRGIEIVCLRVMHDEGLVAIGQDQAG

SEQ ID NO: 951972 - protein, 64 aa, Homo sapiens
VPRCVNRLPLAMIMLSFRCGLRARRTHGLELARVDLRLVELEPGYLELALSDNCNREQSALSLS

SEQ ID NO: 951973 - protein, 42 aa, Homo sapiens
MTRSVAWNGLCSVWACAAVERKRFIVASHALEQDVYRMSSTI

SEQ ID NO: 951974 - protein, 195 aa, Homo sapiens
GCGTGVGRDVKARDQAPTPTNVPDAVENAQLHQYYQMYASTNPSGSSTVDGETLFKNGELKSLEEIMADAGSNREDQVVGVLRPLVEAAGVDIHAYQDQYNESKGDSTEAMSYDEYKNGSYMKTSYHAFPLLATATLIAACSTVQLDGVESVPVSTPASTSPTNYVLLAGWIITNVWSADPGVDLFAEPVAVVRA

SEQ ID NO: 951975 - protein, 69 aa, Homo sapiens
MATITPCKDLFEPYPNGNPSRFYVHAVANVRAWPVLAHNEKNVRRRGRYRELSPVEGQCWVGDSSETVD

SEQ ID NO: 951976 - protein, 45 aa, Homo sapiens
MPLPVLKALVSCRPICAPCRAAVPVQSAEAQTSMSNPLGKSGRIL

SEQ ID NO: 951977 - protein, 33 aa, Homo sapiens
MQAPVVSMRGGVAQTEIVLELARVDLRLVRTRT

SEQ ID NO: 951978 - protein, 65 aa, Homo sapiens
LDDADNRKGRWSRLQFSLEGEPIPGIEFDEAQVDARHFEAVVQYEPANRIETPELHHEPLETDLP

SEQ ID NO: 951979 - protein, 104 aa, Homo sapiens
SLGFPIFVSALEEELGYDPFTLSQDAYYPQTFAEFVAFYDRYLAGSMISLGLLVHVGFHMAGSADSTASELRQLGVRPGLAMSRPALTLRDPAEFVRVICALDG

SEQ ID NO: 951980 - protein, 37 aa, Homo sapiens
SADSRGSLERVRVVSSKLNVCCSDVPWWTLPIQFNAF

SEQ ID NO: 951981 - protein, 60 aa, Homo sapiens
RHLYKVAYVARKRFILYSYRICYSGSATEPIQIRYAYNKAPQQLSKLTFLGLNEEVSTMS

SEQ ID NO: 951982 - protein, 53 aa, Homo sapiens
VSEDPSKERGWSTLQDAAVRSMQPALGECFSVDSQGRYRGLGPYQLVSCRVGG

SEQ ID NO: 951983 - protein, 35 aa, Homo sapiens
LCLMQLQCLDAGGVAQTDKRFNWTRVDLRVCRISE

SEQ ID NO: 951984 - protein, 151 aa, Homo sapiens
MSGVSRGSPGVTSTMFGGATSAVTSRTDPTTSPADSSAPTGLPPSGSTTGSVTNGANLRTRPAPDVRYVDIAGHVSGDAAERYRTGSGRSVCRKADRTSRRSYRAYRKPARDPRQESPTYKQNGRFVDCDIRAVAEIFIPAAYRESEQRCA

SEQ ID NO: 951985 - protein, 94 aa, Homo sapiens
QIARGNADRVAVLSAFYFGQTKTGDGDVPTPTEGHEGLDQLVTELGDIDASTNCTFPLDDSDVVVRVGRYGTYVEDPVGNRANGDDALPPEELT

SEQ ID NO: 951986 - protein, 105 aa, Homo sapiens
AYNIELDNQPIPHAGAVRGGLSKRRIGLGYTGLGTMMVQLGIRYGSNESINATGEVGKFIAVEAYWESTNLAVERDTFPLYDRDKIQEAEFVKKLRKDLGQCIYE

SEQ ID NO: 951987 - protein, 42 aa, Homo sapiens
AKVSLTWTSPFWSITTVRSYTHMKEGSKPELGLPEKIDVVAG

SEQ ID NO: 951988 - protein, 130 aa, Homo sapiens
HIRTPRRLTGTMLIGVGNRCRLDGESLGIGAIDHQTSRVYRYSFGYATCTEPRRSAYKVEKLLDSDKDTVYNCQRSSSFNPGQSTDAFVSITRRQTISMPRETQTATGDRLIAAFLWDFDGTLVEPESRW

SEQ ID NO: 951989 - protein, 34 aa, Homo sapiens
MIDGANAQGFTVKAAPVSDPMSMVPVSVVDSGND

SEQ ID NO: 951990 - protein, 50 aa, Homo sapiens
MPVQFRLRHLSEPRISRQGGEITRSDEDTVYNCAEEFKLHPGQYTDAFVV

SEQ ID NO: 951991 - protein, 57 aa, Homo sapiens
MTRSYEVRTGWAVTETVPAATRSMVIDGASAKGFTVKAEPVSDPMSMAPVSVVDSGN

SEQ ID NO: 951992 - protein, 130 aa, Homo sapiens
MTNVGNYGGYLPSGTLASSGHRCNLLTVGTMSDTHWLLDYPDSQNRIRTSGVSPLTSRCLGPGFCPQGASSEQLLSFENAVDFCKLGAPFFTPHNPQSGETLHPGVVDEDFGRKVTIMIIGIPRESLPGE

SEQ ID NO: 951993 - protein, 160 aa, Homo sapiens
MPPFLTGCQTNVGRYAFIRCGDSLFFQLLSLGGRDADGFGSALSHGFKLLDGDFALLFLEVSRQEEMWVSMTLRSARRDSACSRIATPKSSSCDTTVWWAFSASFPTVMTSEVGEIRNSPSLTHLHDELAIYPALIRRTDRYIEVGAVHAERNPVGEVFD

SEQ ID NO: 951994 - protein, 168 aa, Homo sapiens
MHVEADDPEFRRPVWPTSLADPKVLRVVALSGGYPRDGANKKLARNKGLIGELLSAFGEGLNVAQSQQEFDQTLRSFHRLDLRRLGVLTLRQRARWETCGPVVMRELSSALYSSRVIPELVAFDLDDPWPLRKLGLPQEMARIVARLLDRTSVCVISGGQFGQFRTSV

SEQ ID NO: 951995 - protein, 186 aa, Homo sapiens
VYLALTGHTAEESSNQEEVPAMSAATGAIAIDRAVPKPQGASRLRQITTLVRRNLTHIKRQPEMLTDVTVQPIMFVLLFAYVFGGSITIPGVDYKPWLLPGIMAQTIAFSAFIVAIGLNTDIGKGMVDRLRSLPISRSSILISRSVAALFHSSIGVPVMLVTGLFIGWRIHEGLLKGLPRKWAALL

SEQ ID NO: 951996 - protein, 63 aa, Homo sapiens
MVVIVNVALRVHQYGPYLEYERKVLVLHERTYEVPEVIRTINFDHNEKRAVIREMFDLFNERV

SEQ ID NO: 951997 - protein, 90 aa, Homo sapiens
CAIEDPTTLARHLGGFRCSCCIERLMCGKMCGLASCRVCRGRRARSDERRACKLFPMLLLAKAVKVRPAAPPHNPTLVIVRPKSLKGYRA

SEQ ID NO: 951998 - protein, 42 aa, Homo sapiens
SGGALEDPTNMASTLGVFDVALHRAVDVWKHARIGVMQGIVE

SEQ ID NO: 951999 - protein, 56 aa, Homo sapiens
MAFKPMANWILENAAYELVYTTTLAVEATECSILLNVEMADALMEGGTDAVNAGKD

SEQ ID NO: 952000 - protein, 71 aa, Homo sapiens
MANWILENAAYSSSIPLPLLLRLLNAQILLNVEMAVAWIEGGTDAVNAGKRLTERDKKSPVITPSLGGRGP

SEQ ID NO: 952001 - protein, 134 aa, Homo sapiens
LYHEAYWDMLIGSEYGAALMVNPLVLGPSITKPLRGCRYSFGYATCPNLEDRVKVVKLTRSDENSVYNCQRSSSFILASPPTPSSSINREQTISMPRETHTATRRTVFRRCLVGISDGTTSRTLSPRWVEANSR

SEQ ID NO: 952002 - protein, 34 aa, Homo sapiens
ITLEIPPPERLLDGCTHLTERHPSLAGSARLGRT

SEQ ID NO: 952003 - protein, 75 aa, Homo sapiens
RLKLVPDDKNISILMAEIKVMALIPDSSSQTDSLGLFFAGSRPGQTNSTEPSAWPVSGCAFVPMASTTPIVGGNK

SEQ ID NO: 952004 - protein, 34 aa, Homo sapiens
LLIYCWHDRYIDMIPLCDVLEVKSKQKKKIEEKQ

SEQ ID NO: 952005 - protein, 140 aa, Homo sapiens
TFPILMLNKSVMCPSSQTVVHKQTHLCVHLSICFLSWVKQQHRTFSPGEWVAVPLYPWQARNPVVRRKQVMKLRHVALCYSQDASTALSHVSPSTGKTQTCEEATVPDLGSQANVHKLLKDAGRSLLEPAISTGARGGGV

SEQ ID NO: 952006 - protein, 137 aa, Homo sapiens
IYLDTMNISIFDGMNKGHGPHPQTVVHKQTTPRYSVLIWFLAWSNQQHRTFSLVSAWLCLCTHGKHDTHRARKQVMELSTGTVSSQDASAALSHVSPSAGKTQTCQEETCPRPGLPRGCPQLLKDAGRSLLEPAIST

SEQ ID NO: 952007 - protein, 34 aa, Homo sapiens
CPGQILYEREMWASLMSLVLGAETFNMGLYRERV

SEQ ID NO: 952008 - protein, 50 aa, Homo sapiens
CCRDGIVTKSLVAELDVVDRLESLVSAFMDYETVDSYILLSNEISSCKMS

SEQ ID NO: 952009 - protein, 53 aa, Homo sapiens
FIDLRFGHFRIYHEHYWFMEDDSWLASVFVQTDAAQMGWYGCCARVVNEAQSC

SEQ ID NO: 952010 - protein, 41 aa, Homo sapiens
GPSFYTGRRLTLGRRLTLGRRLTTGRRLTLGRRFNTGPSFK

SEQ ID NO: 952011 - protein, 42 aa, Homo sapiens
VTWPSFYTGLSFYTGLSFYTWPSFYTGRRIYTGRRFTLAVVL

SEQ ID NO: 952012 - protein, 80 aa, Homo sapiens
  misc_feature (78)..(79): Xaa can be any naturally occurring amino acid
SSTRGPDSVVKLENWTDASRVDGVVLEKVQEDEFRYLNVPRLSVSRRRACTRCMVDSRGLLVRAHAFGVEAATMSLHXXY

SEQ ID NO: 952013 - protein, 88 aa, Homo sapiens
IISTGPDSVVKLEIWTDASRVDGVVSEKVQEDEYRLSNVPDSGSQTHGWYRCMVTAWSPAQGAPLAISRTQSLQVHIEIDFHASGSYI

SEQ ID NO: 952014 - protein, 44 aa, Homo sapiens
MADFTEQRSALSPRLRVQCGHAQPLLVRHMVRRLELMPPRTAYV

SEQ ID NO: 952015 - protein, 68 aa, Homo sapiens
YREQYKAITRRVCHPQQRALLEADFTEKGLPVARALGTVRDAQSYLSVTWSQADNMPPRPPRFAPEPG

SEQ ID NO: 952016 - protein, 97 aa, Homo sapiens
RDSEDPSAAYLSWIIYENRIVNNGMRECSQLQYSEYEVTDHIYDSESSDDINNSSEYQKLNWNGARKGDGQTDSKSTPMPCELTEELASTVELISDN

SEQ ID NO: 952017 - protein, 45 aa, Homo sapiens
STAKLKVLTTYIWFKPFTKEIGGRCAVAKRKRMADVGWHIVRPCE

SEQ ID NO: 952018 - protein, 54 aa, Homo sapiens
VKLGDRILMRKRSGGQCKVNNTDYKRQYLKMYKQSRRIAIYVKPTDIWYGLQSQ

SEQ ID NO: 952019 - protein, 68 aa, Homo sapiens
MRRAHAQDEVDVDWHMSACDHVLIDALGIPPEPQPGDGHTFFSEIGLDHASFWAVDILVLRVIALHLP

SEQ ID NO: 952020 - protein, 105 aa, Homo sapiens
MYLSSSCRPLRSTGCSRSVRRSASAEHPPVAGGVLQQAAEKRRGQQVKVDLALVVHRLVQAVQLRKPGLIVEARIASVQDFHPQRLAAAQFASDIASTGVGQTRQ

SEQ ID NO: 952021 - protein, 79 aa, Homo sapiens
MYNTAKRSQTRIGLNFTKEIGGRSRGSRQTSRRGAFVRLRHVLIEALAILLKPKPADGQTFFSEIGLDQPPFAGVEQLP

SEQ ID NO: 952022 - protein, 92 aa, Homo sapiens
VNKHSETKIRNGEGNYPKTDVCQPQHRALIESDFTEKVSARRQAFGSARDRQVLSIRSMVAGGTNAATSAFVLRYEPQCIARQILYSVKGYK

SEQ ID NO: 952023 - protein, 44 aa, Homo sapiens
ILQVTHSETKVLTRIGFKTFTNEIGGRCAGLTAEDDGGRGVHLS

SEQ ID NO: 952024 - protein, 88 aa, Homo sapiens
MALNENDLHPPNQTAKMITVGFRTSQLTTTVASSRNSTEMEQRKVKVKRYQKSPNAIYYCKKSFHSLTQYHGHGVLQVSEQMLAGREA

SEQ ID NO: 952025 - protein, 37 aa, Homo sapiens
REVNTQRTRSELCVWFLTIRSTNYACLLHARHRSASI

SEQ ID NO: 952026 - protein, 42 aa, Homo sapiens
RLTITAKRRYLARLSHSRRRNILTKLRSREAFGGRKSWYTGD

SEQ ID NO: 952027 - protein, 89 aa, Homo sapiens
IGFKHLHDKRSAGRCAVFKCKNESDVAAFVRLRPCSDSSCWESRLNQSLVNGQTFSSEIGLYQPPYLLAVDILRYGVIRFYFLPDTYPC

SEQ ID NO: 952028 - protein, 38 aa, Homo sapiens
DHVTLVLKTFTKEIGGRCAGLKRKTAADVAAFVRPATM

SEQ ID NO: 952029 - protein, 95 aa, Homo sapiens
PLSAPKLSEENLTPRTEALAKLGINWCPLVGADAVPQPKERAPCQLWLLDPRPRYSLGPLAPSRKTQGPLLDLYGQKLPIGHTPPTPPAPPLPLP

SEQ ID NO: 952030 - protein, 40 aa, Homo sapiens
RLEYFVSSTSFRVLRIEYFVSSTSFRVLRYEYFVSSTSLR

SEQ ID NO: 952031 - protein, 95 aa, Homo sapiens
LILARSMDNDAPAIDHHRKMSNEIQRIVFYNGSKKPKELDYPETIKKKKIRGAIISVPDTKAYYIAIVIKTIYYQLGNIHRSMKRVEHANTDEQI

SEQ ID NO: 952032 - protein, 102 aa, Homo sapiens
VKSWGSVEHCPWSTDGVSLCSPGVVVQWLRSWSPQVPAPGFTPFSCLCLASSWNYCGVPPDPANCVVFLVQTGFHRVSQDGLDLRDLGIRPPRSPKVLGLQA

SEQ ID NO: 952033 - protein, 109 aa, Homo sapiens
LEDPDPITPVANGSQKGTRVSPLDSYPALSLACRVLSTAWWGWEQWSTCSSLWAVSWFGVWRRVYVYRGGESFLGRLGAREVCRMASARESRKGSADGSMGSVLQTMKV

SEQ ID NO: 952034 - protein, 84 aa, Homo sapiens
SIDLIKLASDDSHTRLVVIVQLSVYIRGRSHSWFLMTKVHRTYTHECSMYNSEIQICWDYNNVHILVLILYCVNMRWWWLVEVG

SEQ ID NO: 952035 - protein, 45 aa, Homo sapiens
MIPSIRYPHWQPTRSSGSSYAGGTVTLGDYNYRFMKANKLTLVKF

SEQ ID NO: 952036 - protein, 68 aa, Homo sapiens
LLMLTKCWDNEREPLCVDTYGAMHFIVLTNILNYMAFVSLHVKGIILMYHCISFEFVMRLMVYFNFLL

SEQ ID NO: 952037 - protein, 36 aa, Homo sapiens
DPPQFPKRSNLRIATHSQDCGTAVLSECSHSQGVYV

SEQ ID NO: 952038 - protein, 36 aa, Homo sapiens
KISRTEACHYIDTDGQQWIRNGILNSAFLLKCLLDV

SEQ ID NO: 952039 - protein, 70 aa, Homo sapiens
VRTRMCGSSGFSGPRSLHVAEQCGIDQSSLGGVTRCLRWELSGPGHAACMWTNVCNRDCECPNMNMRPDV

SEQ ID NO: 952040 - protein, 112 aa, Homo sapiens
VIPLQYSRGGLIWQLHNHIEYYTTTQYHAHRKGEGSGRPHRGEMMPKVTYLEKRRASIRAGSSHPKPVAIITSSQKIICHPQPSSPHHPVTLRCVWDHSLGQPEERCTLLES

SEQ ID NO: 952041 - protein, 37 aa, Homo sapiens
MHTSTHLLTLSKHVIVTCHRWASFQGWGHKGLNKNKG

SEQ ID NO: 952042 - protein, 105 aa, Homo sapiens
MIPCVMYPEWYAVTVWKQREGSNRDFRGKRLLKSTRGGTLEAGLANKASEVKALYEQSPNKKRLHKGFSLPSSKQLAMAGWEPRFDNASKIREGSLGKECRHLSL

SEQ ID NO: 952043 - protein, 52 aa, Homo sapiens
MLFVPLPWLRMSPLTVLPASTPASCRFILTTTSRSHFSHPLFNPAVAFVHHL

SEQ ID NO: 952044 - protein, 99 aa, Homo sapiens
TSTGIASDLHKGRTMSGCQHVRTGSGSWQKLRGAPLPWNECLLQVGPRLAPCSGYHQNAVLTKPPPKTTPFPGYSLLCAQVLWNTHLSSEYTTINKIAL

SEQ ID NO: 952045 - protein, 75 aa, Homo sapiens
GGGSIFWQGGMMEHRGVLALFLYLDLSHGYMHALLFLKLQLELYIIRPVHFACMYITPSMETCKRNLITFFFNSF

SEQ ID NO: 952046 - protein, 50 aa, Homo sapiens
TTTGISRDTQTLKRLQKSLASIIISGAGYYVDATHSSETRAMSRTAYLTE

SEQ ID NO: 952047 - protein, 48 aa, Homo sapiens
HRQWDKPRHTDVEEAAEKTVVHIISGAGFMCMNSLLRDQGHVVTAGYR

SEQ ID NO: 952048 - protein, 58 aa, Homo sapiens
  misc_feature (57)..(57): Xaa can be any naturally occurring amino acid
VLVTAYIQTKLSLKRRMHLLVHCSSIHNSQVMETTQMSTADDWIEEDVVYTCNSVTXS

SEQ ID NO: 952049 - protein, 37 aa, Homo sapiens
  misc_feature (11)..(11): Xaa can be any naturally occurring amino acid
MALLFTTILVXFFLREQLLSLGGGGNCFSFGTYFNPH

SEQ ID NO: 952050 - protein, 37 aa, Homo sapiens
MTNTPPKYFNILSPKKKRVLVHNHSTYVTPKTFINDA

SEQ ID NO: 952051 - protein, 123 aa, Homo sapiens
MVPKTRVSYVTTEDPQRRLAVLGHAQVSAGGDMKPVSSLTLLIHFSIIHNIEAAHKRFELDELVLVVIREPERPFGEYLRVGPAGPGRDKLKQVCKLPGVYAVLLSNRAGWGRGVRPWAWAAS

SEQ ID NO: 952052 - protein, 88 aa, Homo sapiens
IDIPREEDPSTVYSLFAEQVPVADTNLDFFQSDPFVGRDPFTVLILLEESIHLVVILSKVRIHLHQTVSSGNLLILLPLQALTLSVQP

SEQ ID NO: 952053 - protein, 64 aa, Homo sapiens
APCSSRGPEWIGDGESTSPSDAVVKKGTEGPEDQQTFFEELAVEDKQAGEEEKVLKVEGAAAAA

SEQ ID NO: 952054 - protein, 133 aa, Homo sapiens
GYCYWEQLGHGITHDPAVLSEHYRMIPGRYSTPVISYVSPWTCWGHTEILAERTYRLLDDNMDQLIEYKAFVSCLDIMYTGDMNERIQLLYRLHIPPALTENDRDNQSPLKESSVVNIETPGYGKPNGDAVDY

SEQ ID NO: 952055 - protein, 50 aa, Homo sapiens
TYRVVLHYSLRLRSYSALCVAAAKETRSPALATREKITQRAGALRPMPYA

SEQ ID NO: 952056 - protein, 75 aa, Homo sapiens
MSPVLFSSHCLLFQERFSDLLVLLPFLHHFALMGSCSLRPRIHSGSRRLPACGAFGHRAWQLTALPFPGHPHRVD

SEQ ID NO: 952057 - protein, 41 aa, Homo sapiens
VTDSTASTKRGNVPAVNKGGTHSVHPLTDVLDRVYQLSLSS

SEQ ID NO: 952058 - protein, 87 aa, Homo sapiens
MCNACYWQCVYHDNKDITIQDQCSEQSRELVEYSGYLYGSNRAATPFSDSWYYPSYPPSYPGTWNRAYSPLHGGSGSYSVCSNSDTK

SEQ ID NO: 952059 - protein, 43 aa, Homo sapiens
WEIAIMWRLFGVGAQVFLDYPRNLYLASSFKYSLSEISIHCLQ

SEQ ID NO: 952060 - protein, 118 aa, Homo sapiens
LVGTTGHHKRMDLPGRSLVSTTEQEARLEDDMCLPCSAKGPRIPPGRCALEKWGLLAPRGVASGVAFLDGAARVERTVLCVGRGSQLLPSAFMGSPLELHQPKEPQNPPAEHAMNLNA

SEQ ID NO: 952061 - protein, 43 aa, Homo sapiens
MPDVAECATRFLCTMAVRQLRSMLNRECMCQIIGCSYQTPHGR

SEQ ID NO: 952062 - protein, 45 aa, Homo sapiens
TGNGFEHQILLPLIHLIRSTCSAPKLAIMSRVTGPGGASSPLVRS

SEQ ID NO: 952063 - protein, 54 aa, Homo sapiens
AVTGYNSSEELSIYAHKLLNTVTLREHAQILVDKTVSTLKLLRDSINESNFPTP

SEQ ID NO: 952064 - protein, 82 aa, Homo sapiens
QNTACVGSYAPTPGPVHVEHEEKELSVQRTSQKPGASAEHTPSGISRKAHSGICNYGKKSLVKAKEIQSMYEAAAPLCSYAL

SEQ ID NO: 952065 - protein, 48 aa, Homo sapiens
ADRLVICCWRIFTVLLWAHGAVTAPCPSSWRNFLAVWRSPLSFSRVTH

SEQ ID NO: 952066 - protein, 205 aa, Homo sapiens
  misc_feature (188)..(188): Xaa can be any naturally occurring amino acid
SQGRDPSADRKLIAAELDIEARYLCDKFTFRSNVFGKLEMSRTNIPERRLQLDMTAARNFAFEWNARGIVEIRPVFAIRHDFDTQTSEAPSPYSSYRVDLNMPVSSGVITCASKVLHSFGLPSADSGRNVRQLVYTNDLNPERAIESNRFAVLRLYVIQTWNTYVPIYANIRIINAAEILFIDKLKHXLVIEQNSAKSRSVRDEL

SEQ ID NO: 952067 - protein, 76 aa, Homo sapiens
MGGVHHISAIADTPPPAKLQFMAGQSQTCCARREQGSVALEPAQPGRGGIFPGLPIAKTWGKAQYILQECTISPGT

SEQ ID NO: 952068 - protein, 66 aa, Homo sapiens
VTADGRVRDRDRPGGVTCEMLTDSVGDRTAGWRDLWILRKRGDTKRGGVTLWIAEERLVTRKRGGV

SEQ ID NO: 952069 - protein, 43 aa, Homo sapiens
RGSPLVKVLTGIQRHRGAFEKPRPSIARITIVQVIMSIRTKLL

SEQ ID NO: 952070 - protein, 33 aa, Homo sapiens
MAVDEERMDRVYQMTSKEAAAFGDVILEDTNDS

SEQ ID NO: 952071 - protein, 44 aa, Homo sapiens
VLQDLKEIPPCAQHNEDQGYAPPERSYSVWIGGSILASVSHLSR

SEQ ID NO: 952072 - protein, 47 aa, Homo sapiens
IHYPPTPADTGCHSTITHLLIDSLACSRRLINQIANDVNRVLARKII

SEQ ID NO: 952073 - protein, 96 aa, Homo sapiens
IDRYRVTVLGSWASPEVAARHSLAQLGILTCSLGVLIQGGKHGAYEALKANLKNSTLFLTHSIGSSQSQRQPSFRVGKSTPCLNGVCHVFHSTNAL

SEQ ID NO: 952074 - protein, 79 aa, Homo sapiens
QVYEQTSVNADDVKGLEQGRPGLGACVGHLVRADDVSNTPIMAQASTREAPRHGVKSNCSLDSGGARAPGIDSLDGSSD

SEQ ID NO: 952075 - protein, 74 aa, Homo sapiens
VLYCHRDAEGAQQQPPEPEWIGDGESTSPSDTVVKKGTEGQKIKKTFLEELAVEHKQAGEEEKVLKEKEQQQQR

SEQ ID NO: 952076 - protein, 85 aa, Homo sapiens
PCRPPQLPDGSFSDEYWCPSSGEYGTDRSHTNCAFLDLPSYEPDFNNQQQSYTALRLSFSLFRLLAVMSRRSLMKCSCIGVCSVA

SEQ ID NO: 952077 - protein, 50 aa, Homo sapiens
FGRARDLEPTPVTECLREQSWDTKTLVLNSRVPRSILVHIVLVGFTFRYP

SEQ ID NO: 952078 - protein, 53 aa, Homo sapiens
  misc_feature (12)..(12): Xaa can be any naturally occurring amino acid
ALILEDPADSDXKSPVDINPSFLETLFLCCWPSAWGSPEPKMQVSAQTMAAPS

SEQ ID NO: 952079 - protein, 47 aa, Homo sapiens
LNGADRDTLLFQLLVIHGLPWLCVEFHMAFSLFYFVSYKNTCQLHLR

SEQ ID NO: 952080 - protein, 32 aa, Homo sapiens
  misc_feature (24)..(24): Xaa can be any naturally occurring amino acid
MFENHEKLAGLAIPKHRGGPHHEXRPTDWVTQ

SEQ ID NO: 952081 - protein, 56 aa, Homo sapiens
MPVYLRIPPSPQLGGHVGLPKCWDYRREPLTQPKTNFIFWEMALVVTQAVVQSRDL

SEQ ID NO: 952082 - protein, 81 aa, Homo sapiens
RHKSLKQQEPAKLGCGRKCMNKVSVLKEEKVKFEQQRLQVSLHMSQIVMDAVRYTCSPSYLGGPAQGGLLIATNVNNSKTL

SEQ ID NO: 952083 - protein, 44 aa, Homo sapiens
LPTGSEAELRYHEAKQSNFQQCISKAVSGASAGDYSDAIETLLT

SEQ ID NO: 952084 - protein, 62 aa, Homo sapiens
RSSVIFSINFSQILRSYTQTRMTKSTIDWQYHSAVRCRVSCGEECPWLIWGLQAELQMQPPF

SEQ ID NO: 952085 - protein, 70 aa, Homo sapiens
FFELLGDSARQYLLRVSGNVLDLDLLTNNEAKVCFEIGLLVTGGVLDLELLRVTGGVLERERRRVVGVLD

SEQ ID NO: 952086 - protein, 134 aa, Homo sapiens
  misc_feature (40)..(40): Xaa can be any naturally occurring amino acid
IRFPTVARGENAGGLEQAGASRGPSKRIFPESGASVPSPXNGLREVTSFSSFCSSVFAKIPALRNQWLRGFAVFLVKRVSETGWGSDGAWVQILTPALPDRVTPDEWGERSHPFQAALLTVKWGDKLPPHCGDG

SEQ ID NO: 952087 - protein, 38 aa, Homo sapiens
  misc_feature (1)..(1): Xaa can be any naturally occurring amino acid
XKGSPVYLELPAYTNTASSSEVLITTQKHRMLQHTVEK

SEQ ID NO: 952088 - protein, 90 aa, Homo sapiens
QDDPGLLREKERNSNLENIFEDIVHENFPNLTTKIDMQIQEIQRTLVRYYMRRPSPRHVLIRFTKVNVKEKILKAARENGQVIYRENPIR

SEQ ID NO: 952089 - protein, 58 aa, Homo sapiens
WNISNMRLMYLASKSFRQISLIPGDVIDLLVTFHVHHTFQVTLSNLSNRESSHRLTLP

SEQ ID NO: 952090 - protein, 47 aa, Homo sapiens
MLKRYTHLKASRLVKKLEGNKHRGQQVVINHLVPYPAITQQTPTGVV

SEQ ID NO: 952091 - protein, 76 aa, Homo sapiens
  misc_feature (3)..(3): Xaa can be any naturally occurring amino acid
VGXGTPAPDRVYGLFLTLEYILAPERAHLIPLDIFARQRKRRRVRQWQPQRLLLDLRLGLLVQLAAHALFAGGLAS

SEQ ID NO: 952092 - protein, 36 aa, Homo sapiens
SLRSLPLLFKRPALVALYVPTAMVVTAQFTAYSYVE

SEQ ID NO: 952093 - protein, 34 aa, Homo sapiens
LSRVGIALSHALFWSITASLVVRLAPEGKQVQAL

SEQ ID NO: 952094 - protein, 79 aa, Homo sapiens
MELYPMSDFNSPELITDSRGFATLWLSREAKNNAFNAEMIRELIIALDHVQGDPALRFLVLRGRGKHFSAGADLAWMQQ

SEQ ID NO: 952095 - protein, 45 aa, Homo sapiens
KLRVAFELKEDDMHAILKAAEFPVSKPELSALFRKFGHTNYRTCG

SEQ ID NO: 952096 - protein, 55 aa, Homo sapiens
AADQETMGIKAMHQAEQQRTNDPRTAEHQQDQGHGVATHAGNTFNKRLNIAVGRE

SEQ ID NO: 952097 - protein, 40 aa, Homo sapiens
VSYADDARRSYQVPAGSLSAALTRFAGLASRGDAGDLIAT

SEQ ID NO: 952098 - protein, 47 aa, Homo sapiens
MRLSTIGYLHADAKALVGYRQFQMTVLARSSLTGRLPPTCALRCCVL

SEQ ID NO: 952099 - protein, 60 aa, Homo sapiens
LGPPRDYYERFSLLSGQNARSLLLGARLATVHEERDKAARFGQQLERLYPGTPEYQQYLS

SEQ ID NO: 952100 - protein, 112 aa, Homo sapiens
  misc_feature (102)..(102): Xaa can be any naturally occurring amino acid
VVLSRLALMAFSVGWPLAEGLQQLPLVFVSRHGETPRTLDILSDLANDEPLSPTQFSLSVHNAVIGLWSILRNETSEMTALAAAGDGLEHGMLEAAALLNEXPPAVLLIITE

SEQ ID NO: 952101 - protein, 44 aa, Homo sapiens
LAQVSFKFASIHAEPLTMDAAWLIRVFGAPWIYGAFVGYIGAFF

SEQ ID NO: 952102 - protein, 66 aa, Homo sapiens
PLVQLIHLSDLLLYKGFEQPLIEVCRQVNTLLTLALATTQISITNHECFISTSLSVNMAARPFARR

SEQ ID NO: 952103 - protein, 70 aa, Homo sapiens
  misc_feature (17)..(17): Xaa can be any naturally occurring amino acid
EKVSEELRIRVSVACPXLTVKRYDGGFGVALNMVDIPDWSRHLIATKRIRVAAVRRLVDREMSKPARPKT

SEQ ID NO: 952104 - protein, 35 aa, Homo sapiens
QQHQHGLDFLTRAGNGVSHRVADQQAEDGAEKRHL

SEQ ID NO: 952105 - protein, 68 aa, Homo sapiens
VVLSLSLGMSGSLAAAELNIPAQSLEGALRELGQQSGRQILYSPDLVQGKRATALHGDLDVSSALQKL

SEQ ID NO: 952106 - protein, 54 aa, Homo sapiens
GYLTEHFDLAELRDQSADMYVCGPPPMVESIKQWLLDQALDGVQLYYEKFTESN

SEQ ID NO: 952107 - protein, 47 aa, Homo sapiens
PIAVPVILAGVRTAVVMNIGVMTIAATIGAGGLGVLILASISRSDMF

SEQ ID NO: 952108 - protein, 51 aa, Homo sapiens
PAHLIEVKREHAGNKKLDGEYIYLKPEWADKLASRAYLLGGVNPRYQPMVV

SEQ ID NO: 952109 - protein, 68 aa, Homo sapiens
PTATDQGSYLSVAGRNAHLDTPTDLESWLSDSARITQIAAATDLGSWVSDSGRISQSAISANICLLRG

SEQ ID NO: 952110 - protein, 54 aa, Homo sapiens
MFRVEAIPTLRFSLNAALQCDACVVFPEMLLAGHALDGSIFLVPDFGDIQQDIK

SEQ ID NO: 952111 - protein, 42 aa, Homo sapiens
IIGLQRPVTEVIRPAKYAPIGKPIASGSKCKAALSAPEPVTV

SEQ ID NO: 952112 - protein, 54 aa, Homo sapiens
VGGGEFGLLVQVEELLLDLVLVGQVTDGVVHFGLVVGLHGRVFEQFANLLLHRL

SEQ ID NO: 952113 - protein, 35 aa, Homo sapiens
VLPELVLDSSLTTCARAAVSPWAAASYSGLMVVMA

SEQ ID NO: 952114 - protein, 92 aa, Homo sapiens
GYCTARCPGADPADMVIGTSVNLDGIDAQVAVLVFRGVVQLSQSRVTGTGVVPAVGAFFGHAIKALDHLHRPIRLQLIEPHTQGCTHDAAAD

SEQ ID NO: 952115 - protein, 33 aa, Homo sapiens
  misc_feature (1)..(1): Xaa can be any naturally occurring amino acid
XANSRTISRVIAPAGAEAAVLGGDAKGQQAALA

SEQ ID NO: 952116 - protein, 48 aa, Homo sapiens
RQQDDVLNAQRTKIANLAASAFAGATSYIASPYVGAPVGAGVRMYVND

SEQ ID NO: 952117 - protein, 84 aa, Homo sapiens
SIPRGSPINHPTLPIALFVARRPGTESYLIDLRDGALLQTITSKTNRHFYGHAVVHKDGEWLYATENDTSDPGRGLLGVYRFEG

SEQ ID NO: 952118 - protein, 59 aa, Homo sapiens
LAQPAEIIALSDYVQTACGLDAIIIFAPGTARRAESIAACSQCDVSVPGRPIILIGVNG

SEQ ID NO: 952119 - protein, 86 aa, Homo sapiens
EPLHFEQVDDLDGRVGLDGVIHLGEFETGAQVIVGLADHRGVDHHERGFLGVSERLHFVKSGAREIVFDLDRHAGNSYWQTKLING

SEQ ID NO: 952120 - protein, 80 aa, Homo sapiens
TPGCGRSQTIGYLLPQHPNLIALPIIGTRPGLGGVFKDQPRLTQLLHKITDVPRRKSSAVSYGEAAIGQSRRNGPVQCQQ

SEQ ID NO: 952121 - protein, 71 aa, Homo sapiens
QAGTADRELHAFIIRRLGIDAGLVLEHVFVGADAPLLHAAHIDEIGATGHALELRLGHLASAGFAAGDLDR

SEQ ID NO: 952122 - protein, 43 aa, Homo sapiens
MIPEMLVPAQISYLASNPLLSHIVAECDDPRRFGATWIRRTPS

SEQ ID NO: 952123 - protein, 66 aa, Homo sapiens
DSAICIENQEQQDILAKVLSARLDREVRLQVAEDATLIGGVIIRAGDLAYLMARFAGKLGESVPMY

SEQ ID NO: 952124 - protein, 111 aa, Homo sapiens
HPDYRLQRFAADSRIWRKYRPSDNQVARANDNTTNQAGILRNLHAHFPVDSLLGKPLRFVCCTLVQCKSTGHYNVYRYLYYGLVQVKQSGDLRQKRETVVFGNNVYPLMFR

SEQ ID NO: 952125 - protein, 67 aa, Homo sapiens
YAGRSTGSPALVLYPSDSESCAADVLVGVAQHLAGADFALGMNRDCPLHKRTCNFGGVIAGVRDIVD

SEQ ID NO: 952126 - protein, 81 aa, Homo sapiens
PQPISQCPRADPVGSLHHDGRHGGLDPIKETGYHGVLHRYAMHIHDSTIRMNSEGSTKSTPAITPPQVRCISQPMKVANCC

SEQ ID NO: 952127 - protein, 61 aa, Homo sapiens
AATVDLSERSPDYNPWRIITAQFAQRHLPPHKDTEQQNASELSKAQPIQTNLACCTFLLHR

SEQ ID NO: 952128 - protein, 35 aa, Homo sapiens
MAVHQAGRGIDGLSAASCPSRLTKKSTNVLTWVPS

SEQ ID NO: 952129 - protein, 117 aa, Homo sapiens
WAHQGQLNDLRAAIGFKGEGFHRGTTPFAVGMHHGKRRYSVREFPNTSHPPCENNPMFDWQDLYFFTVLARTQSLSAAARELQVEHATVGRRIDALEKALGVKLVDRLPRSRPLTEE

SEQ ID NO: 952130 - protein, 76 aa, Homo sapiens
DPHHRHGGFDRVSNSPFQAPLASLPSLQASAQVNGLKGAWVDWVLHAGIVGGAVADDQAVADLDDAFGARGDFAVV

SEQ ID NO: 952131 - protein, 73 aa, Homo sapiens
HLQVLVVEGKLEAVRSAEGSNVTERELAMAFPGKVGEALNLREVEQLVDQLNRLPSKQAQMELTPGKQVGGSD

SEQ ID NO: 952132 - protein, 49 aa, Homo sapiens
LYDHGRRDLDDAFGARGDFAVVGNQDDDVALARQFIEQCHDLGAAVAVE

SEQ ID NO: 952133 - protein, 94 aa, Homo sapiens
GLTLSGAVQAQAQSQPESATTTLPPATVVADRTGEAVKVERVSSGALGDRKAVDTPFSVNAVSSDEIQQRLAQTANDVFKYDPAVQVLSDRVPS

SEQ ID NO: 952134 - protein, 40 aa, Homo sapiens
DPQKISECRRGTNATRWSAPGSDPAAAISIPCCMKRKFPL

SEQ ID NO: 952135 - protein, 104 aa, Homo sapiens
VDIGPDEAELKVTTMYQCPWRGFPQRLATSDHLVSKSATHSVRLRLGRHTAAQREAPPKVSNAALVKNQPIWVSVPSQPKRTVNIPIGKAHSTAPVSASAANFN

SEQ ID NO: 952136 - protein, 32 aa, Homo sapiens
MAAHWEKTTALGTLYPVTLARMCSITWSLVRV

SEQ ID NO: 952137 - protein, 97 aa, Homo sapiens
CPARPRVQVDVLGFAGPAQAGGDAQGLADLPGGAAEDCETVGGLVNRGLAVIGDAERLVVVGREQGTAGSAVQVFVEQVGTDDPAHRLVLRRGQAQF

SEQ ID NO: 952138 - protein, 42 aa, Homo sapiens
MFWRVVARYERTDRRGYLTDACKISQSTYFGGRSITAYRVLE

SEQ ID NO: 952139 - protein, 73 aa, Homo sapiens
VSTRLGLPAESVGQAAKIAQAHARWRVVAQLVAQLTANAVLTRVSSVDRLTSDMERLRCRTTQVSSKLKGRAD

SEQ ID NO: 952140 - protein, 62 aa, Homo sapiens
TEDPLQAHFPVESCTENLGEFVLLFLVQCKSTGHFNVYRFLLFGLYKVKQSGDLRQKRETVV

SEQ ID NO: 952141 - protein, 54 aa, Homo sapiens
MTEPPSVQRLVKNVGAAQYLDAALPQRVLEFIGAVPPGPVSGKPSSIAYKPEAW

SEQ ID NO: 952142 - protein, 87 aa, Homo sapiens
DCDYSEIPDNQALLLLALDRAITPRLINDDFTVADCRGLAPRYVGDFVQQLREAGLILEDPAKARPGTYYWEGDEIWMLREQVAYRL

SEQ ID NO: 952143 - protein, 36 aa, Homo sapiens
MSRLKKSSSPYAPDALAGLWSPWPVHGEILDTLGAT

SEQ ID NO: 952144 - protein, 80 aa, Homo sapiens
SSRDRAELNGVKDALRAQLGALAVGGAEKILGATIDQNAHALSCVNKLCCVKFNASVRSCAELTTVGPDPYAKAAFVALP

SEQ ID NO: 952145 - protein, 80 aa, Homo sapiens
IQRRCAFNPRTPSAGPDQQMVAVIQAVSESGTRQPVTECRVRTLALSGIVPLAGDYAHLCADLVLLACPCRWGTRASEFV

SEQ ID NO: 952146 - protein, 49 aa, Homo sapiens
ALGLTPYLVGDELTGADIQMSFIGEIARAQGKLQAYPNVAAWVQRFQAR

SEQ ID NO: 952147 - protein, 55 aa, Homo sapiens
MTRKTYYAPGTKTRDYSYLGSDTVLHIGNELELVQDLWLTTGLAAIYTRRETQVS

SEQ ID NO: 952148 - protein, 77 aa, Homo sapiens
MLHVTHQYPQRNLPWGNFVLDIDYDRVLAWPCWFPCEGSMQFSILSRRGAWGLAAPTITEGKLTMAIVELGVLIYSG

SEQ ID NO: 952149 - protein, 104 aa, Homo sapiens
MAAAWPTLSAKCSHLHVFVIGGRGRIGLQAAVAVAANQVVDDRAGLDHYVGAVLNHRGFAQSIDGLEFRWRKIGFRVALVALELVRQAEFFEQPQDASRTGVVE

SEQ ID NO: 952150 - protein, 94 aa, Homo sapiens
RDRVPVSVVEPSVRIRTYTFEPWGGLGDVAQVGFGVGGEQAHALLVEVADVLGFLDGVAVADTVRADAAVHDLVQLVDRRDVEARTLVFEQVDD

SEQ ID NO: 952151 - protein, 37 aa, Homo sapiens
LYSPVVVQSKRVAVLDGLGKIYHSSVPFVVFSNITVV

SEQ ID NO: 952152 - protein, 101 aa, Homo sapiens
PGGVLYTVLLDVDNADHSLMAEMTTQVFFVANEARNVLTAPIAALQDGQQADRPQVRVVASDGTIQTREVRTVQSVTVLRGAEFLERLRIDGDPSADSVLA

SEQ ID NO: 952153 - protein, 46 aa, Homo sapiens
MCRRWYFVRYPSIFLMRHTRSAASHSFTVLRGRKTCQCTYSDPSFI

SEQ ID NO: 952154 - protein, 51 aa, Homo sapiens
LVCIMLEVCVTGPGARPMNSRTRCGKAASRYCAAPTVYDQDALALGGSVNY

SEQ ID NO: 952155 - protein, 36 aa, Homo sapiens
MDWKVSLDVKNLTNEKYVTAVQSLYDAKGQDTASWY

SEQ ID NO: 952156 - protein, 147 aa, Homo sapiens
FGRLAQSLSQLVPVLLSATHAIWLVKTALYLQILRFSNGSIMDFGYYCLASAVVLYGEPKSVIATASLLDTGRLCARYRLPHLRAISDVTLSHSKVNNSDIPSEIQGQEGTLMIDKISDCQGVVLTPRGGQRQDLTHPQHINTMLYE

SEQ ID NO: 952157 - protein, 143 aa, Homo sapiens
MRQTDARWTLMLQLPLSAVMADLQAMQHDLDAQRITDIFGMAVAGLLIAGIGLLVIWLVGHGIARPLKQMVAMLNDIAQAEGDLTRRLTSDRADELGAIASGFNTFLAKLQVMITQVVSSVQKVSDSSEHTADIAIRTNQGVH

SEQ ID NO: 952158 - protein, 59 aa, Homo sapiens
LALYHEKHTSKEHFLYTAEEELIGADEQLPEKAKIEVLLATSGGMDVDQLSNEEVQRYV

SEQ ID NO: 952159 - protein, 59 aa, Homo sapiens
TLIELIDAFNPKLVYGRLHERILSADFVRHYNGRLLNIHPSLLPKYKGLHTHQRALEAG

SEQ ID NO: 952160 - protein, 31 aa, Homo sapiens
MLLPYMALVVCTQCDFAGLHDLAHRTKGGVD

SEQ ID NO: 952161 - protein, 34 aa, Homo sapiens
SIEPYLRCDDQYLGFFQVQLAFPADAGQGDVAYV

SEQ ID NO: 952162 - protein, 54 aa, Homo sapiens
GIGVVSAVDYQVISADQLQRIVGVESGVVGIDLDIAVEVLQPPLGRLDLGHAQG

SEQ ID NO: 952163 - protein, 36 aa, Homo sapiens
RNSSGQVLGYAASERTCSLGLLSEREPMDCHYFVLG

SEQ ID NO: 952164 - protein, 39 aa, Homo sapiens
TGVLEEGGVEVRSVSSIVMTARKDWKRPEPQDRRDKARP

SEQ ID NO: 952165 - protein, 156 aa, Homo sapiens
MYAGALQRCRNRVVRPHGCLSSADSLVSQSCRVSAICSARLVDIGLRRFPELVEQSRQVIAAQAPELDVFDLQSDRCWETVRSGGVNVVTWAALAVRKYGRSSGANQRRKRYVPGCIACEAREEGVRIECVVNEELTIRRFLAIKRVSLSSLYWRQ

SEQ ID NO: 952166 - protein, 72 aa, Homo sapiens
VGAQEREKEEEEEEKKEEEEEGRKKEEGEEEESEEELVVVVVKAKRKRSLYVKESCQASSGGTQLFQNYTFC

SEQ ID NO: 952167 - protein, 49 aa, Homo sapiens
ELSKYLLSPMFCPPEAARLYVGVRYLITIVHQAKGEAIEDLTHPFSKDM

SEQ ID NO: 952168 - protein, 63 aa, Homo sapiens
SEDLQDSRTEDTQVYFHHLTLAVLIGLLKAQKSIVSVGCLWTFGGTSGKISIDYLGMLGSSFF

SEQ ID NO: 952169 - protein, 34 aa, Homo sapiens
LLVASWSEMVQYPVQSGVKTRLGGQLQAAPARCF

SEQ ID NO: 952170 - protein, 85 aa, Homo sapiens
MVIKNSHSDQCPEMWELETGSQLIADNHELAHALPAAIHEGEESHSCMNGHEWQDTEPMIIVQITTTSHAGNHIDNTHLQASKPS

SEQ ID NO: 952171 - protein, 134 aa, Homo sapiens
MITPLYSSLGDRMRPCLKKKKKTKSKFSTKKHKCLLRNSEALAHGVSTSFQLRLQSCPVFPQCPQPSSKRLSGRNSVHLAGPWLGPTWCMMHYKSKDWLGAWRKTTRVSNPRLDPPVPGLGAALLKEPDCATGL

SEQ ID NO: 952172 - protein, 139 aa, Homo sapiens
WLGEQAGGSVPWTTDKVTIIPKVLRCLRTDLDTLKGFSGDRVLFLPHRLGPSSLANPGELSSARTLGHRLARAGLLSWPGSVKKSLHSSSRRTIRVIMTPIPGHFTSKEPCSVKEIVALSLLSKSLPKKIKGQSGMYQN

SEQ ID NO: 952173 - protein, 44 aa, Homo sapiens
MVAGTCSPSYSGALRPCSVYRPGPVYTRYLKCNLVGTPRYPCEV

SEQ ID NO: 952174 - protein, 57 aa, Homo sapiens
LAFQLVLGLEEGRQGVFHGDLRAAVLAPFTLDSISPYSSPSTLMPPFGLRKGAHTSF

SEQ ID NO: 952175 - protein, 36 aa, Homo sapiens
ALDVDTSSRIRHCYTMEEQESNLGKISDFLGYCTPN

SEQ ID NO: 952176 - protein, 159 aa, Homo sapiens
CGPFMFAGEQTGRGKPHRRKAGGIIIHKIPVAQHHTEEEARVPIQRQERWAETGDEMGQDGGDEGKSTLSSSGHHQAQLTSRTRGRNGMRERKEVRVKLRIQIEKLCGGNTCAGTMKGKAKKGRRLEGKSGLPFDTEIGGDIQTHCSEAVQQAGGRICV

SEQ ID NO: 952177 - protein, 32 aa, Homo sapiens
VDQQDPFMFAWLSDTLYPHCPEPQGDAVECLV

SEQ ID NO: 952178 - protein, 55 aa, Homo sapiens
YGPGWSAVVRPQLIANLRLRGFKRFSCLSLPQLAGIYRHIATMCPGLIFVYFQVR

SEQ ID NO: 952179 - protein, 50 aa, Homo sapiens
PRVIPLFQLSRLPKNCLLDGLFRSSVEKMEILSNWYRIKIVGWFHTGKHQ

SEQ ID NO: 952180 - protein, 85 aa, Homo sapiens
MCSSGTYFPKLSSPHSFDLQQHVHKSYPHFLRMVVETVSESWQELLYQWVGSVGGPKSLADHLTTEQRPSAELVSNASTEGGVKS

SEQ ID NO: 952181 - protein, 54 aa, Homo sapiens
VGAAVAGYTTATEMQNQAASVTYTTAHGMSKFLNPLREARDQTCVLMDGRAIVR

SEQ ID NO: 952182 - protein, 34 aa, Homo sapiens
CAKLLSRGLAVVGSVLGASSPSQACGSPRPTGGI

SEQ ID NO: 952183 - protein, 44 aa, Homo sapiens
SRKKAKLRIFLVLEEGTRISAVGGTYAVISLGGEHGVGVLRVVF

SEQ ID NO: 952184 - protein, 38 aa, Homo sapiens
MARSSVKVSDHEILACSVEWPRETSSDLRMGQLFSDYV

SEQ ID NO: 952185 - protein, 32 aa, Homo sapiens
IAITSSYLACSDRKRKDYATVERCARTLGNSW

SEQ ID NO: 952186 - protein, 105 aa, Homo sapiens
KEIHDFITTHGEIWEPQCKRNITSPFLTSTSHSVIKPAAIIHHPTICLSFGSSVGIMSFCFRSHFILVQVHTTSLNPSVLPLSTAGNSSTGHQATCNHFTSKCPS

SEQ ID NO: 952187 - protein, 42 aa, Homo sapiens
NHITDIVTDSYAKSFACAEKFAAEKTAASASTLSCESKLKTN

SEQ ID NO: 952188 - protein, 39 aa, Homo sapiens
MARRVQDLQGPLVYRVGQDSTVVSGQHPFDAGLTLQVAK

SEQ ID NO: 952189 - protein, 38 aa, Homo sapiens
MARPGTDLQGPLDDRVGQDSTVVTGSTRLMLDFTLQVT

SEQ ID NO: 952190 - protein, 37 aa, Homo sapiens
MALSHVSSLRFRPLSEEKRRPLSSVKQRLVLLHHPLC

SEQ ID NO: 952191 - protein, 196 aa, Homo sapiens
KAHDARLTALWTKLMTPHYVVRCSKPQAPITGHMNVYSPSEYGSSTELNLPETAKSVTLSNLQPGVQYNITIYAVDENQDITPVVIQQETTVTPGSDSVPSPRYLPLAEVTDVRVTIIVNPPESAVTGYRVDVIPVNLPGEHGERLPIRRNTFAEVTGLSPGVTYYFKVYAVSHGRESKPLTAQQRSKLDAALTSS

SEQ ID NO: 952192 - protein, 42 aa, Homo sapiens
EAHDVRAKNQFFPNLRSVPAATRPSTYCARDRKMGDTDGWFD

SEQ ID NO: 952193 - protein, 48 aa, Homo sapiens
MAHDVRVLTFSRVERGCGSRSFGERIKEMGLSLMWERATGTGSMYVTR

SEQ ID NO: 952194 - protein, 71 aa, Homo sapiens
AKGQSRLQASNPEHMVCKQEYHTLQCKSLSFILGDAGLQWMSPLHSSTIPETIHHPQRRPPCEQQDYLEDP

SEQ ID NO: 952195 - protein, 112 aa, Homo sapiens
KRTMGSPATCDAVEERRRYKLDKQQTFRVNLFYGFDKYKRSVTSGISQRNSLSKTWGTYVYWLEEAECRDSLSSVIFDEWRPHFHILECRKRTLSQLKKERDGQRTYVALVS

SEQ ID NO: 952196 - protein, 36 aa, Homo sapiens
KRTMAALGHGAAVARSEMTGQAPPLMGRISYAAVGR

SEQ ID NO: 952197 - protein, 35 aa, Homo sapiens
KRTIASTVTKNGEIDHHREQYENLRMDLERKLEEL

SEQ ID NO: 952198 - protein, 71 aa, Homo sapiens
MGKSNSYHRFSQTLYSLRAELKGLSCHCKLQTKHSGRSYVNPLQEVTRVQEAEAAGELCPIGRWHTELPLS

SEQ ID NO: 952199 - protein, 47 aa, Homo sapiens
DGIHILVLGQLLLGWACFTLQVLLSSDGPIFCRDLATMKRTFGTLGP

SEQ ID NO: 952200 - protein, 33 aa, Homo sapiens
MALSYGHGAAVPVVEMTGQAPSMMGRISYAAAG

SEQ ID NO: 952201 - protein, 86 aa, Homo sapiens
MKPKILKSFANSSGSALSPCLHSKKISQRHRACFQIYTQEGTSAQSTLQVFSNGNAPISLQDSQIGHLGFRKRHNIPGPPRLGKIA

SEQ ID NO: 952202 - protein, 101 aa, Homo sapiens
MTTRRYTVREKRVHNYRSGSYCLDSLRPGNPGHRLLQHPRTSPKVFPAEPLQHPARWERGHRLPGPGLLPPGATQCDLERKRTGRDRMTLPTQPGCLRAPV

SEQ ID NO: 952203 - protein, 33 aa, Homo sapiens
YPEIRAHEPSIILLMTLYARPRITVKDVKQHPV

SEQ ID NO: 952204 - protein, 129 aa, Homo sapiens
EWTFQPEIFSTFLVPADEQPGPEALWVLGSYPGCCWSRSPSGLLGAEMMSPERQVHGQELQLRAALGGADLGLTSTAPRSPRHEHLAILPCPQGVSMFTYCIQTLNGPVKWRPQRHASWVFQWHHPTSS

SEQ ID NO: 952205 - protein, 40 aa, Homo sapiens
MRVHTAPKDDVRSSSAARRRTTRAPLMYGDAGTERALRES

SEQ ID NO: 952206 - protein, 51 aa, Homo sapiens
SARWRVLMKPLERLECVEGVAHIIDPKAISSDHLYGHPWTPYTREWTDGLF

SEQ ID NO: 952207 - protein, 80 aa, Homo sapiens
ARCIWNTSERSMLPAVGRQPVSLLLLPGESAGQCDAEVVMCLCSCSIQAAGGDSDARCGCINLSPRRTSTTLMIDQRENG

SEQ ID NO: 952208 - protein, 64 aa, Homo sapiens
DLEDPTPTRSKWSVQECTLDESYVTRDWYMLKVARIKATTPRTVVSVPDIIAGFGPETAGRSPS

SEQ ID NO: 952209 - protein, 116 aa, Homo sapiens
SKPRLYQVVRWLRAYSRVADVLVCPRMALLRASAEKATCEAIYHPSCTKTLILEGQGPTYDFIQPSLFSAEDPSSQIQPLTGLSVLNMKVRGGEATSMESHDRRLPRGHGCSEQAI

SEQ ID NO: 952210 - protein, 86 aa, Homo sapiens
MSRYRQLSSSTDPSPLSLPSSWTTGVHHHTWLTFVFLVETGFACARAGLELLTLNEPPASASQTAGITGVCHHAWLIFIFSVDQSV

SEQ ID NO: 952211 - protein, 42 aa, Homo sapiens
NCRRFLRTASLRRVATRTDSGPYKAHLDLLLCQTDIACDGTT

SEQ ID NO: 952212 - protein, 63 aa, Homo sapiens
YVIPSDSQQHAFIFPTSMDLVLATLWHIIRLLQPNSTGRGHITTEIAVSLLQCHVNLYSKLQS

SEQ ID NO: 952213 - protein, 54 aa, Homo sapiens
MAWRPDTKLRHSTVQCGEYTRPGLASRAGGTSSRTKLVTRRKRCVRRKPVSDIG

SEQ ID NO: 952214 - protein, 41 aa, Homo sapiens
PHVFSKNPPRLMLYMPLNLLGLTKPVIAIGNLAGTGSHLSA

SEQ ID NO: 952215 - protein, 77 aa, Homo sapiens
RCTARSTILVPSLLSSWDYRRVPPHLANIGICKETGYAMYGEAGLEFLTSSDLPTSASPSAVITGVSYHAQPIIVSI

SEQ ID NO: 952216 - protein, 124 aa, Homo sapiens
TRRASNRRIFSYVKMARRDQGIARTCTPPGTRRRLQNGSRVNGNTYIRNPVLMASGGMRIFRAFVGRCGCPQPHKNDRDGEHEGQNNGCNQRGDFAVIHALPSPSCEIRRADMATIVSPHADYV

SEQ ID NO: 952217 - protein, 73 aa, Homo sapiens
SSDLEIPTRRGQTGSPSYLVPAVRKYGTATSLCVQRNKKKSHCAEDPSLDFRNNPTMEDLGKLQPLLASNLCS

SEQ ID NO: 952218 - protein, 41 aa, Homo sapiens
AAPGVKPRPSITTPVITTWTPIFQKKSRNIEPNMWYNSIKI

SEQ ID NO: 952219 - protein, 34 aa, Homo sapiens
MPAAWGFNLIEFNSLLVTRKAARALGLLNRRSGV

SEQ ID NO: 952220 - protein, 42 aa, Homo sapiens
  misc_feature (6)..(6): Xaa can be any naturally occurring amino acid
RCTWCXIALYSICLSQTAHPAARIRAWSWGFGIVPGAAIYRN

SEQ ID NO: 952221 - protein, 54 aa, Homo sapiens
TLHLRSNCFVLHLPLQNCPTLLQEYVRGAGALRIVAGGVIIAIRKSSRQTTACV

SEQ ID NO: 952222 - protein, 55 aa, Homo sapiens
AAPRFKEGFWIPILKLRSPVTFLSRSGAGHHTRYPIEPGNRYRLSQLHQVHVVLI

SEQ ID NO: 952223 - protein, 178 aa, Homo sapiens
RRPRCQKDLDSYLKTTIASHLPESDLRSTYEVSNEPGNRYHSPATSMPWCSMSGLRPLGTSYHKGRAFSMSTITPLRTHGIIFPELGLWHWACQRVDISIYEGQLKISSGPRNSRHLHTSVAPGCTLYCRGQIREANTEHRSQEVLCGPGSPCNMGHILGGTTIKRFIALFKDPAFSF

SEQ ID NO: 952224 - protein, 63 aa, Homo sapiens
YQVVVKNVTIGGICTYTREWYRAKVARIKELLPDCGISDRVSSAVYRYVSTEEDHPRDTQASC

SEQ ID NO: 952225 - protein, 54 aa, Homo sapiens
IGRGGRIWAGTQVWLINTLLLQAQHQQAFFVTLQHFLTITHQWRQLPHECGCTF

SEQ ID NO: 952226 - protein, 67 aa, Homo sapiens
PDVVAHACNPVVCDAVVGGSQGQEFETSQYGEILSQKNKNIKAGVGPDTVPHTCNPSTLGGRGGHIT

SEQ ID NO: 952227 - protein, 46 aa, Homo sapiens
  misc_feature (5)..(5): Xaa can be any naturally occurring amino acid
MTVLXRYRVDRTGLTPRSLPVLTLPDRTWDFPYVTPGDSSTTSTLH

SEQ ID NO: 952228 - protein, 48 aa, Homo sapiens
WALVQGGRLVVSVVHSASQLGVHAVAQLVFFAMLAGCSTNAHIPQHPI

SEQ ID NO: 952229 - protein, 71 aa, Homo sapiens
SNSTKSTGGRTGNTHYGKTSRKPAGGQAMGVTERVTSVGACLVWRVGCHRGAYTWYIGGEEEGFLRIMGGG

SEQ ID NO: 952230 - protein, 50 aa, Homo sapiens
RRSLSVSGDVISMLEAINELIRFDHIYTKPLVLEIASETESQANVVKTEL

SEQ ID NO: 952231 - protein, 77 aa, Homo sapiens
MGSLYLGIIPYLRLNYDQQISKAHKADATHPMCQPYFHGLITHELVICQDPTLPCPQGGVSIRAGGDGTKNEKISFI

SEQ ID NO: 952232 - protein, 189 aa, Homo sapiens
LSLKCVSVCVCVCGIWDWLQTEAQKDMIHADLSPMAWKALVQSSPLHNWERHSQWRHAPIFYVCQFSQGEGTKRAFSCGSIKSPLKSDPSCWTNSRGSGFCPLTLPLSCQPSESPHNTKPSPDIRLLLQGKNTYFHVRYQELGFPGNSGREREFKMIRNIHSDQLDPFSSLLLRLYLQHRAGSQASPSH

SEQ ID NO: 952233 - protein, 66 aa, Homo sapiens
MPCDQHQMQIHLYLVRGPCISEVLPLVGLAKYTFTFFSLKQARNVEQSYNELRFISLHTDLDCTDG

SEQ ID NO: 952234 - protein, 52 aa, Homo sapiens
DHIYSTDSVYIVATFITSSGNFLLKNPTFMFVTCILSAIEKPSGSLQPLRDT

SEQ ID NO: 952235 - protein, 35 aa, Homo sapiens
GFKASQNELGRIPFSFIFGIVEENGILGKLVDKGK

SEQ ID NO: 952236 - protein, 44 aa, Homo sapiens
QRWRPEEAWALEESKIFLSPSPAQVSPFPFPSRWTIPSFTVKAF

SEQ ID NO: 952237 - protein, 38 aa, Homo sapiens
IHMGLSSFAVPLHGCTGIAVCTSRQEAGEHVSASFNSI

SEQ ID NO: 952238 - protein, 36 aa, Homo sapiens
GGSSRTPTLHVSKSSRKIWHPHIAADAISAKKSNMN

SEQ ID NO: 952239 - protein, 104 aa, Homo sapiens
MGENDQHATRQEYVCRHGILRTSRENMYLGSSELSETNMYMGSSELSERICIWDPQNLQRVYVYGILQNLQRPLHINGPGMMPALGEERVTTVPGKRAKNGQNR

SEQ ID NO: 952240 - protein, 100 aa, Homo sapiens
LYDFDYAQVLYKWNHTIFFVCNWLTSSSIISLRVIHIVMSENFFVFLRLNNISLYVYATFGLSIYSLMNTDCFHIVCVYVCVCVCVCVCVCMVFFWRQRD

SEQ ID NO: 952241 - protein, 33 aa, Homo sapiens
GSNNSPASASQVARDYMVRASTLHVIYGICFIL

SEQ ID NO: 952242 - protein, 68 aa, Homo sapiens
LLEVGLVSCYISFNKLSTQNKGYKHNDVIGIIRTILVGNHMAIFGKVKFLRKQSRQATQFKNIIHPTA

SEQ ID NO: 952243 - protein, 115 aa, Homo sapiens
SLVLFKCFIYWRWICSVPGLECSGTISAHCNVCLPGLSNSPASASRVAGTTGTHHHARLIFVFSVETGFHHVGQAGLKLLTSDDPPASASQSVGITGVSHHARPDFCIFSRDKGK

SEQ ID NO: 952244 - protein, 51 aa, Homo sapiens
KAANMFSIMPLCATLKCAVFHHGSLNTHTHNATNTNHSLHPTISGLSRAAP

SEQ ID NO: 952245 - protein, 36 aa, Homo sapiens
CSSNIHSIQGINHPRQAVVQFSAAWPTHAGASSQQS

SEQ ID NO: 952246 - protein, 38 aa, Homo sapiens
MGVASLPHKTVYEDKLRGSPTQCFDHVLFHELSVVKQR

SEQ ID NO: 952247 - protein, 96 aa, Homo sapiens
RTYVSGGCDASIKLREVRDSMCRPTFIGHESDINAVAFFPNGYAFTTGSNDATCRLFNLRADQELLMYSHDKIICDITSVAFSRRERMLLAGLQQM

SEQ ID NO: 952248 - protein, 39 aa, Homo sapiens
VFPPDSLKLLGSSDPPALGSQTAGITGVTYFAGLQHMPG

SEQ ID NO: 952249 - protein, 37 aa, Homo sapiens
TDSPMHRLVFHKHVLTLATKVTKPHGTKGWNFKGYVR

SEQ ID NO: 952250 - protein, 38 aa, Homo sapiens
SSYTDSPMHRLVFHTHVLTLCHEGPKPNVLKGGNSEDM

SEQ ID NO: 952251 - protein, 100 aa, Homo sapiens
RSTDSPSTDLLSTMHAYLSHEGPKPHVLRVDLKDMYRGIKQIPGGTVTFNDKVKISNKSYNPVLISDTSFKDNSFPKANPSSVRLARGVCFARGEFPILN

SEQ ID NO: 952252 - protein, 76 aa, Homo sapiens
  misc_feature (28)..(28): Xaa can be any naturally occurring amino acid
SSRGSQQLYRLTKHRLLFHQARLTLATXSQATRTKGGLQRFCPGINQFPGGPVTFNTGSNSATGPTIQCCFQIQAS

SEQ ID NO: 952253 - protein, 35 aa, Homo sapiens
KQLLHDSLVKAMLNANEGAIVEVALGMVLQGTMLF

SEQ ID NO: 952254 - protein, 62 aa, Homo sapiens
  misc_feature (9)..(9): Xaa can be any naturally occurring amino acid
AVNYMTQYXNNNNNNNNNKTMSSLTNMVKPVSSQNTKKISWLGWRVPVIPSYVRRLQSVLNL

SEQ ID NO: 952255 - protein, 84 aa, Homo sapiens
GSPSSYTDSNCLGWGGGGPASAIARPTTYLGLSLDIRKMQTVVSISEGSDLMSKCMVNCLAKCLARAEQFLVKVCILGYVQMMF

SEQ ID NO: 952256 - protein, 76 aa, Homo sapiens
PKQFIQTQMHLTPAVMCHPVLCVCVCVCVCPQLDVSTVHVCVSVPVGMYLLCVCLCVCLRVYVFVSLLGCVHGVGV

SEQ ID NO: 952257 - protein, 47 aa, Homo sapiens
DSPMLPHVSSMLAVNELPSSSTVLNQQLGCLWKRDQLLKCLPFGFHN

SEQ ID NO: 952258 - protein, 52 aa, Homo sapiens
VADVVGCADRRCSAMLALPKEVTAAPAGGVPPELCVAITTALSKVGPDNNQP

SEQ ID NO: 952259 - protein, 38 aa, Homo sapiens
PNAVIQTHGEGYVMPTEGAIVKVALASVYYNGQCSLTS

SEQ ID NO: 952260 - protein, 51 aa, Homo sapiens
MQASSQYANGQYRLGRARAHACVSRSDQDRLQSLGLSSSDVTQQLQFLLRG

SEQ ID NO: 952261 - protein, 55 aa, Homo sapiens
ALTTDQRQITNVHLTQILCFSVCCGSRQLTDSQESAITSCNWRLYSLAFAGIYFS

SEQ ID NO: 952262 - protein, 175 aa, Homo sapiens
MSPRNQRIYILLQHHTTPIPNLTTYWGSKALLSKCKRTEIIANYLSDHSAIKLELRIKNLTQNRSTTWKLNNLLLNDYWVYNKMKAKIKMFFETTENKDTTYQNLWDTFKAVCRGKSMALNAHKRTQDISNLDTLTSQLEELEKQEQTHSKASRRHDITKIRADRKVQYSTGYRA

SEQ ID NO: 952263 - protein, 33 aa, Homo sapiens
  misc_feature (24)..(24): Xaa can be any naturally occurring amino acid
RYTIPFCCSHFDYRSYGRIKLCQXTYHLRSDWI

SEQ ID NO: 952264 - protein, 85 aa, Homo sapiens
VSELSMPYHPCTHGPGTSRPPDHTAQEHPEHTLLGKGPAEENILIIFCREQGPNCLIMGTSLNIFPGRSPTAQTPPVQACKYPRL

SEQ ID NO: 952265 - protein, 49 aa, Homo sapiens
ICSAYTYSDVHLLLPGRVIALDPDASIHIQHLAGSSEHCKPVEAYNSLC

SEQ ID NO: 952266 - protein, 71 aa, Homo sapiens
YAIMSLAAVYKNITSSITSIRGLAWQPHGGRRAGVCSVDGSYDHACHVCQWPQGKREWYGKTSVQVGPIML

SEQ ID NO: 952267 - protein, 171 aa, Homo sapiens
SCVPPTLTLDLRYWIHHIATKSGKTVANFRHHFTDKHKKASIIHPWPLPIRELNTPLHLYCPGLKTLVLCLGHTRVGWVSGNGTSGSTTLQYSGPPSVGASKKQRLLKGGYSSYRSRVTNLYRHGSPGSLVFRAKLPSSKFFTPHSGSYKVLWANNTLLPSRSFLSSDNQP

SEQ ID NO: 952268 - protein, 82 aa, Homo sapiens
LETQIVIQKKILIALILSRLKEVRKLQKNKLKPSRSSFMKLKERSHLHKIKVQGEAVNADEEASASYPEDLAKIIDEGGYDK

SEQ ID NO: 952269 - protein, 41 aa, Homo sapiens
VKLTGQCKTDGQCHTTASVNCLASVNLTASVKRRPAVQRRP

SEQ ID NO: 952270 - protein, 57 aa, Homo sapiens
MAIGYAMTCDGVRTSGTLVLYGVGVVTGVGRHTVGDTRYNYGCPLTLVNNTLRYGGL

SEQ ID NO: 952271 - protein, 74 aa, Homo sapiens
CIRSTQYNYSPPSNSDMNQPSVQPLIHLIVITAVGLDLVHDCMAHGSNSLTQAMKPGTRHNGYCASKGGQQAPR

SEQ ID NO: 952272 - protein, 67 aa, Homo sapiens
PYKQLKTFWRGFIILDAIKDICDSWEKVKISTLTGVQKTLTSTLMDDLEGFKTSVDEVTADVVEIAR

SEQ ID NO: 952273 - protein, 78 aa, Homo sapiens
DEYDDAELIGKTMEGADQCKVLRLDSKLGAFQGQQRMAQRGCIRACEEERVETPVSEEPGARWRTLAPKLSHFLLNGE

SEQ ID NO: 952274 - protein, 35 aa, Homo sapiens
RIFCHEQTAAAEGKFGIAMVSLYCLLEGAAACEIG

SEQ ID NO: 952275 - protein, 61 aa, Homo sapiens
SKDPPSRLIQTHAVAEQNTSCFRKVLNPQDRSILQEPGYRKVPGTIHEYIAMTTMLTMEGA

SEQ ID NO: 952276 - protein, 121 aa, Homo sapiens
KRSCRGQPGEGGTLRTGQSLGSVPLAVLPSDIEHELWVPGTVPHACNPSTLAGQGRKITSPVLENSLGQRIETLSSTKNKKVSWMWCWHPVVSATQEAEPGGSIEPRNFRVGVCLTCLGYR

SEQ ID NO: 952277 - protein, 38 aa, Homo sapiens
MRNSHATVTDLYSSSGPMPQHAGQSRMSPGIPNVPVAD

SEQ ID NO: 952278 - protein, 114 aa, Homo sapiens
EQTVLNRITLMTICLVILAAVGVGGWSRQLQQKVCLFLLSALSVSALYMLKVCGLLYTHLELLLSSQWILLSLCNVPLFPKEFQQPLPLFKIYVYMILFCRPFTFNVPMLLCLK

SEQ ID NO: 952279 - protein, 68 aa, Homo sapiens
KQLIQTQVVIDAGRIAVFPSLLTNPKTNIQKESYVTHVEYHSRPPGTQITASGESWIRPIPCRVCSLR

SEQ ID NO: 952280 - protein, 33 aa, Homo sapiens
STLLHDTRNKVMENTDAVAQAHNGEAGGRTAHV

SEQ ID NO: 952281 - protein, 35 aa, Homo sapiens
LLLPKDAASLLILSPQNLAVSFRTTLAGILALLPN

SEQ ID NO: 952282 - protein, 47 aa, Homo sapiens
MVIPVHVKRRPVHAHTCSCQTMASDCQCLFVDVEANDCQCLVMAVDG

SEQ ID NO: 952283 - protein, 106 aa, Homo sapiens
AHKISYHTQHKGRLKLQSAPVCILSGRSCKISTRCGCCGEKIALDETPQACSSSCGITTRAACQASGCLTQDNQNWQTAPFWTPNECGEHTGQGCPQPATLYSSCS

SEQ ID NO: 952284 - protein, 142 aa, Homo sapiens
SRCPNGGHGLPIVTSYTQISDHSLATWVALTTRCSSLRSLHEVLQDNDKVWLLRDHKRWNETPQVGVSCLRNNYPCSMPGLSVLIHDNQHWSTAPSWTPEWNAGNTLNGDVLNQLHVQLMEQRSCKGFKQCNPRTRNMYPGT

SEQ ID NO: 952285 - protein, 139 aa, Homo sapiens
KIVTVYNISYHTQHKGRLKYRGSSLHPFRKVPAREGQGVAVAGSEALDETPQAVSSACRTTTRAGCQASRASPTTTSTGRRRLSGHLMHAVNTLDRDVLKQLHVQLMELRSCKGYKQCNPRSRNMDLGLKDGGRYEQYR

SEQ ID NO: 952286 - protein, 37 aa, Homo sapiens
HSRGGLPFYPTEVEAAVRSMPLVEDVAVVGLPAESGT

SEQ ID NO: 952287 - protein, 75 aa, Homo sapiens
ACHGIGIRNHLDSSKAGRECQCAGAIFAHSDDRGINVVKSSTKNNGPFPWDEKCVLPIKCPECMELVEDDRQVSV

SEQ ID NO: 952288 - protein, 138 aa, Homo sapiens
MLGDNSTHITGQRIKTPTSYLYKNQLTIDQTPKCHSRNVKLLESTTQGETLQDIGSAKIFAQHKTLKTQAHKIKDEQVGFNHKWTKFLHSKGDHQQSGPDSLQNVKKVQTNPMIFIPGRNGTGLNIGKPINVMHHIKD

SEQ ID NO: 952289 - protein, 39 aa, Homo sapiens
MLAHKWTRVVTGHLNSAFSACDCFWAYAKLSYVPSLPSF

SEQ ID NO: 952290 - protein, 51 aa, Homo sapiens
FLDLTVLDGLRPWKGSEMTAGVELIVYTVPGHTVPILSLPDPCPPHRRPGN

SEQ ID NO: 952291 - protein, 54 aa, Homo sapiens
DVRYSSYSNFLYTELSYIPDGRQNGECISTAPSRAQAGLTMNLGDTGTHTIHKI

SEQ ID NO: 952292 - protein, 106 aa, Homo sapiens
MSHVRITTLLGVERCIVFPGRDLPYVGTYGILGSPWRQSNGPSSDNLRVEVIGVVVSIFFPTNSIINCQRLTQKSSTAEGLNADIKCSQKLVTCMGAGGTFLWTAE

SEQ ID NO: 952293 - protein, 135 aa, Homo sapiens
PHRSTPVIPLEEACLISRTIGRETQQLRICAVAAGHPGICSPVRWKKLAYTWESTEATCRRHRATVDRYHLASPRPKQALSVRDDTPEMCSVSCASGERGLCKPNSLVPHCSNTPGALSLLQASAQGAHFLPLPH

SEQ ID NO: 952294 - protein, 70 aa, Homo sapiens
EVRQTKSAIYFQRGVTELHWCIAMASQVSAPFQLLPVSWLGLLRPTWNELHIWPHARGFVRWPLILWYST

SEQ ID NO: 952295 - protein, 109 aa, Homo sapiens
MPGQCCDWPCLGSELQTAVSDLREHLAVFAWVIRCEVALQLLQVAGCQKAIFKVKSVGQQQTHPAEQTIGSTFTDQNGSCHQSLPSASSYFFKAVFIIDGGLKALEWSR

SEQ ID NO: 952296 - protein, 71 aa, Homo sapiens
SLINKHTTKDTCLRRFRAQEESARKPWWAKHIMAARGVEGRGVAATEQTPGSVASSVFGTLGVAEPGLGWA

SEQ ID NO: 952297 - protein, 77 aa, Homo sapiens
MVSLPSSTWYLAVGENQWSQVPLHFITDDMQFSDLGGIHGIAVVFLGEFFHGVEQFHGVGESSELTRTVATDGPGTR

SEQ ID NO: 952298 - protein, 33 aa, Homo sapiens
MSISNDALSLQGRTNEGKPSSSMSSDFANATIV

SEQ ID NO: 952299 - protein, 119 aa, Homo sapiens
MLVSLLVAHLYLDTALKIGVSWLLGGVCAPLSLLIVLNQGGSQQHWLVLSNLSLGSPLIPVGGLLHGHWRVVVVATVMYLCRLLSVPAHLRCDGQVNADPYLHLDFTYFTINSLHMVPL

SEQ ID NO: 952300 - protein, 119 aa, Homo sapiens
MSVLVCLYGRECEYNLTPILLQKYSKPEKAVAQTSATCRDFVSSSLLLGTVLCIVEKPASCALPHLGDYMTLYPCVSTSMCADLDNYTRSKHDRTHAEETIVDQLTLSHPDASVLRLDE

SEQ ID NO: 952301 - protein, 71 aa, Homo sapiens
MVRHGNESLPLMPPGDLDYFLLPTAGSQKPSGPTWLDLHIFNSLVTSNFLMRQSTVRHQLNTVQGSSTGNL

SEQ ID NO: 952302 - protein, 41 aa, Homo sapiens
TKERTLKPAIQKHKANPPKEASFYLCRCVTTVNKNVRISNI

SEQ ID NO: 952303 - protein, 58 aa, Homo sapiens
HGPSLSTNSYNHAWPVVDRYTAMTSHWPVDDHYQHIPCTGSSFARKRPITIHGPCVVP

SEQ ID NO: 952304 - protein, 38 aa, Homo sapiens
NSYNHALGRRCYTNSYRPCTGPSLYSITAITMHGPSLN

SEQ ID NO: 952305 - protein, 58 aa, Homo sapiens
VNSYNHALGRRLTVNSYNHALAVVEQPTAITMHGPSLTMLTAYDQSWAVVDHSPAITS

SEQ ID NO: 952306 - protein, 33 aa, Homo sapiens
ITILAVVYTNSYTITGPSLSTNSYNHALGRRLT

SEQ ID NO: 952307 - protein, 66 aa, Homo sapiens
RWKLMDLDRLSLTQSSTEMMTWLNQRNPEDKHNAVVTNIVVSESTRGLVESKGHGNSFGMLTAFGL

SEQ ID NO: 952308 - protein, 51 aa, Homo sapiens
LSVLVARGTGTNMLERGASIEHRDKKGFTPLILAATAGHVGVVEILLDNGA

SEQ ID NO: 952309 - protein, 30 aa, Homo sapiens
CSDNPAGVITRIMKQEFETGLGIIVETLSL

SEQ ID NO: 952310 - protein, 42 aa, Homo sapiens
FYLHFWAHGETPLLLKISQMWWHATVVPATREADVGGSPEPG

SEQ ID NO: 952311 - protein, 42 aa, Homo sapiens
MAHRDYHAENLIWLPQRDGAARVGMIDFQDAVRAHPSWDLHS

SEQ ID NO: 952312 - protein, 37 aa, Homo sapiens
RTRKCSVSDESDLQMMKADRSPSVHRSGQRSVPIKDK

SEQ ID NO: 952313 - protein, 56 aa, Homo sapiens
RVGAGRLRCSSRKRIPPLTRQMARQGEVAPQHIEEPAVRSGRPQADRVGDGPPQKA

SEQ ID NO: 952314 - protein, 79 aa, Homo sapiens
SALVTPLGAKPGMEPAARECSANRSSTWRWSESELSPRELATKFTDEKQYFVCEATVYRLLKAQDLIASPAYIVIKARD

SEQ ID NO: 952315 - protein, 55 aa, Homo sapiens
MSWLRLAERIVVNSVKCCMKNRHRDEHRQRHARQRQQQKERDRRQRRIPGVAHPQ

SEQ ID NO: 952316 - protein, 61 aa, Homo sapiens
QLGPMINVLIVVTHFPVFCVCWGSLMDVQSTAEDKHIVCEEGHRSSQMISYWPLVHDRFVC

SEQ ID NO: 952317 - protein, 72 aa, Homo sapiens
DYGSMVAHPVIKHEGSERADSLRLGVRDQLGQHGETPYSAENAKISRAWWQHACNPRYQSGLGRRIAGTRDV

SEQ ID NO: 952318 - protein, 45 aa, Homo sapiens
SSLLQQLRQVQPHLIQRIVDILIDAHRQQRVRQGAADQELHRQVI

SEQ ID NO: 952319 - protein, 50 aa, Homo sapiens
VDPVALLGPMRLQHIGHAADFVMKLAIGDVAAVPGVIAFPDDRRLALAVG

SEQ ID NO: 952320 - protein, 50 aa, Homo sapiens
IILFVPSIASPPSKYLINNRSKRQPNNINHCPSLYTYHLQNSNSTDLLGM

SEQ ID NO: 952321 - protein, 36 aa, Homo sapiens
HSMRIPHYPIDQYSYSSDALPQSYAYPPQYCSIESG

SEQ ID NO: 952322 - protein, 40 aa, Homo sapiens
CPTYSMISRGDEWTLKECDPELSVVECTGADTKEVRCANR

SEQ ID NO: 952323 - protein, 174 aa, Homo sapiens
YDIRSPDRAVCWRLPLPGFRCKVVKTWLNLVRQHGSRMDATRNARSPNQCGMDPQMKSHCEFHSRNGLQSSIRLVRRTLDVLRLQGLYWIDFKGGITIYGLRNAEGLNELCNEHWFAYVGGMNALSLQRAALEASSEEELADRIVDESGICVRVGDARQLLGYRSLDAGRRAAV

SEQ ID NO: 952324 - protein, 60 aa, Homo sapiens
KPYACALIQPDLLSLQEYVQQIADALHYLQNVSGYLFVRLVQPATPTLSERHPCPAHSSH

SEQ ID NO: 952325 - protein, 40 aa, Homo sapiens
ATKLRITRTLPSRREYPSFQTSTWDAVAHTRACPDVLRST

SEQ ID NO: 952326 - protein, 138 aa, Homo sapiens
CAVAYILYQMAAALYALGWGVATCRCPLGLVSHTRVNARLACVPSEDAQFPKVHWSARVTSSSAWHNERLDVPVWDVEATLNFLKVHFFPNNIILELPCSWVICPEGCAECGRPVPDAGDGSACELESRNSTSGPWEA

SEQ ID NO: 952327 - protein, 59 aa, Homo sapiens
RRDGYESLVVVSNRIAPPDDKKASAGGLAVGIMGALKAAGGLWFGWSGEIGDDQQPLKK

SEQ ID NO: 952328 - protein, 83 aa, Homo sapiens
GSARRTGRTLCAGTHQVISTISAVILQPASSRPFFGMPFLSSSPYTFGKLPSLAARTPAWPTSIIHEPSDVRQAKAVKAETIG

SEQ ID NO: 952329 - protein, 58 aa, Homo sapiens
DPARGRICVTASSYRIGRWVSAVLDIYCAGGLVDANNIGDDSLERRESLSLCEIDAAA

SEQ ID NO: 952330 - protein, 64 aa, Homo sapiens
MIRPFSMMETVSHTPLLVKVVGGVRVVMCSRSVIAAGRPDQRELLGPDRQWVRRGTGQRDDALG

SEQ ID NO: 952331 - protein, 148 aa, Homo sapiens
LDVNYVGYRSWAELLASVMPPVSIHRPGKISTGMTMSRMVMRMPSNQVPDVQALGRWSAEAMGSRSRRQPVFLSLYFMEEAKCYEAQAARVHDEGVEQGPDDMVRHGGPLADVDHGGRRGSRVVGRPQHSHLVLLLEHHIVQRLTGTE

SEQ ID NO: 952332 - protein, 40 aa, Homo sapiens
SDAELCGIQNSVSANRSDPVTLDVLYGPDTPIISNIVQRL

SEQ ID NO: 952333 - protein, 104 aa, Homo sapiens
RNGHASTLSENDQRQEWSCCGRRRCWMSRNAEVPLEEENRSLKADLQKLKDELASTKQKLEKAENQVLAMRKQSEGLTKEYDRLLEEHAKLQAAVDGPMDKKEE

SEQ ID NO: 952334 - protein, 55 aa, Homo sapiens
LLFARPSWSEREKLRLHIPALEVACAPDVLLGTVGSAHPIAPQIPNNRLLHVQLI

SEQ ID NO: 952335 - protein, 35 aa, Homo sapiens
YGDAQLNEPAGPVLSVIEAAIRHSWRQSTTKGYRV

SEQ ID NO: 952336 - protein, 78 aa, Homo sapiens
MSLRLECSSTVLAHCNLHLLSSSEFPASASEVAEITGACHHTQQIFVFLLEMGFHHVGQAVLKLLMTSDLPVLALPYA

SEQ ID NO: 952337 - protein, 38 aa, Homo sapiens
MMTLNEHAAFKHLFEQSTSCTALNPFNPEWTQHIVQRL

SEQ ID NO: 952338 - protein, 83 aa, Homo sapiens
  misc_feature (4)..(4): Xaa can be any naturally occurring amino acid
MTLXLCALILQVQPASRSCHNEHVLYTCPPASVDCPDLVTSVTCGLSAWPLSKTVLLQRAQIVTNACLCTKNACSTYVHAVLT

SEQ ID NO: 952339 - protein, 81 aa, Homo sapiens
LQVDLRVSPSDAVTMCLHRQYNRFEEAPHEHVCTPTSPALEHVQIGDILTVGQCRPLSKTVRFNVLKVTKAAGTKKQFQKF

SEQ ID NO: 952340 - protein, 35 aa, Homo sapiens
FQAGYEEIKRIWTTTRAPVTTVTGLDRYSAHSSAS

SEQ ID NO: 952341 - protein, 68 aa, Homo sapiens
QTLNYVGGHTLGKHEGKRGKKGTKEKKQDLGTGITASQLHHYDQNQWLPTYFTCLPKYIIAGHIVQRL

SEQ ID NO: 952342 - protein, 54 aa, Homo sapiens
KEINKEYGPRTHETGNISPIGITTTRAPPPTGKEAFIVVRSLFREDLNSATHAH

SEQ ID NO: 952343 - protein, 46 aa, Homo sapiens
RQTLNYVLNYEVAFSAAIPPNWLPRDLRIVIAAFLLLKGRATSPTQ

SEQ ID NO: 952344 - protein, 37 aa, Homo sapiens
GGTLYLQVEALLCCNRSYMQHFGLKSDRPKFVFQICP

SEQ ID NO: 952345 - protein, 72 aa, Homo sapiens
PVNADYVDAEEVSRQEERWRDLVLMLTECDLVTCEDRWRDLWHTEEVSVTGRGVVSPVDAEEGLVTGRGVVT

SEQ ID NO: 952346 - protein, 71 aa, Homo sapiens
ASAIYRARNVAAPLNSKKNKKSSLNPCATLEEKCYDCGSPDRIMYALTIYYKKMRNMQTMEVIIINESLGF

SEQ ID NO: 952347 - protein, 36 aa, Homo sapiens
  misc_feature (7)..(7): Xaa can be any naturally occurring amino acid
ESRGIPXLDAELLCTTSDKYNRFEKRHKNMSVHLSP

SEQ ID NO: 952348 - protein, 39 aa, Homo sapiens
AFSNFWNCFLVPAALVTFSHVEAHLSCSEAGTRPLLRFL

SEQ ID NO: 952349 - protein, 39 aa, Homo sapiens
TAQRNFANMQRCPPETAADYWLRPGREFTPFSPEFTRAS

SEQ ID NO: 952350 - protein, 89 aa, Homo sapiens
SDAHYSALHPTRTTASRSATRTCLYTCPPVFRDRPASGDTRHTCGDVPVLCSKDSRAVTRVSKFTKVCPVPRKPVPEVSESWYIVPASP

SEQ ID NO: 952351 - protein, 114 aa, Homo sapiens
LCGNEQEPGKDVCCAPSMPNSEFLSGGLHEPTCSPCSSLRTMPPRRDLESAVGIVTEGDHLLCTLPATHEVHAQVPSRAGVVGEVVETGHLAGELATAGLIIVVHVGDHIVQRL

SEQ ID NO: 952352 - protein, 52 aa, Homo sapiens
SDVNYVGHAAAALRRGLGSLGVPVCGAAELSVNSLEKFTSSHGFLSTVRPTV

SEQ ID NO: 952353 - protein, 93 aa, Homo sapiens
SPNYRTPTVLGSVATPLRILAQQWDQSVVTLVTLDLAIVGRQHRDVDHRPGRQLLDRALGAARQTLIDAASPTRCPNYRLGCDAVKDMLVWID

SEQ ID NO: 952354 - protein, 43 aa, Homo sapiens
MPLTLQDGIARPSRWSKLRNMIVRALCKRVAQERWMEASSALA

SEQ ID NO: 952355 - protein, 68 aa, Homo sapiens
DNYAVHRITPPLFLIPTLPQCTQGPRHLIFLIHRVLSSVIHKDQDTFLFLVTEPFPSVIQQDDDHVPS

SEQ ID NO: 952356 - protein, 39 aa, Homo sapiens
LTLNYVSPDGSYLLPVENHCSTLLLCQALTGHAGTNMSF

SEQ ID NO: 952357 - protein, 48 aa, Homo sapiens
DGFNGTLDRLLIEGLVFESAVSKKGSISYTPGREKTTTIDRAGRATFQ

SEQ ID NO: 952358 - protein, 43 aa, Homo sapiens
IGDICHTWATCLASVARQCSFNAAQRSPRSAALPRSQFQKVSE

SEQ ID NO: 952359 - protein, 55 aa, Homo sapiens
DDSRGPDGVNGTLNTSTLQMLLTLCSKVHNACGLKIHMANRNSENQVRDHNLGNS

SEQ ID NO: 952360 - protein, 39 aa, Homo sapiens
IAYSASTNRHQNTFVHLSPLPSSDRSTIGDIVDQWRDVP

SEQ ID NO: 952361 - protein, 50 aa, Homo sapiens
MLVQPESRLRGRCKRRGPLCWDDDKKALAGRTVSVRFQTLEFRYSLDEAM

SEQ ID NO: 952362 - protein, 74 aa, Homo sapiens
LLLQSSEYPVTLNYCAVCIHHGLCVPALTTINDMHISYYTKLYKDEMQLASAQYRAVALLLRRLGGVCENLYTA

SEQ ID NO: 952363 - protein, 69 aa, Homo sapiens
  misc_feature (1)..(1): Xaa can be any naturally occurring amino acid
XTLTTCMQSNSKIYNNNESKMSLTMYLGKQYSPFFFLYCFYQQASTSIISNPLLFGPHTTILAHIVQRL

SEQ ID NO: 952364 - protein, 33 aa, Homo sapiens
MGLRHYGSSWLDLSSGTYSIPYPMSFLLIVLRL

SEQ ID NO: 952365 - protein, 40 aa, Homo sapiens
MVIAVVYGTEALNCKKFRRPYIQYPDATDEDFTSHIVQRL

SEQ ID NO: 952366 - protein, 34 aa, Homo sapiens
FTDLEDPSTALQVGSQVQGICRGSEGRLIATRSL

SEQ ID NO: 952367 - protein, 42 aa, Homo sapiens
GAQTWADLAGVKDRLLVGAQKCYGPEASLQDLTFTGESELQS

SEQ ID NO: 952368 - protein, 167 aa, Homo sapiens
RKVSNGMKLMEWNGINKMSQKEWNRMAMKSNVMELQGIDVNGTEWNGIQRNGIEWNGMNGKDSNGNHSNRMHFNKIGSNVMEWNGKESKRKEWRQMEWNGTESNGIEWNGIIWNWNLNGMELHMKWNGMEWNGMPLNYMDWNWTRLEQSGMESDEIEWNGLLWNGVV

SEQ ID NO: 952369 - protein, 34 aa, Homo sapiens
ETCCMGCQVYEAYGQTECTGGCTFTLPGDWTSGH

SEQ ID NO: 952370 - protein, 34 aa, Homo sapiens
MFGRRITYVGIWTIAVQTRVLGGVRTLYSMIRRT

SEQ ID NO: 952371 - protein, 38 aa, Homo sapiens
TLHRASKVKNGKNGWQGGSWRSSPSTGCPELGAFGFLS

SEQ ID NO: 952372 - protein, 71 aa, Homo sapiens
MPIEGLHAARSFLLLRQVDEHLGIVLTDCVSTESGPVLNSSSSRFSSSSEVISLMGLERRLMMVTHCNTVS

SEQ ID NO: 952373 - protein, 48 aa, Homo sapiens
SGSPLDGLPYDDPCLHVTYTDDERTRRTYTPTRRPYNIVVRYRGEDTV

SEQ ID NO: 952374 - protein, 33 aa, Homo sapiens
LALTTYDDDHDDDDLTTDPHYLRNSRRTGNPTT

SEQ ID NO: 952375 - protein, 57 aa, Homo sapiens
RYSETPRRPFDYALDMKTIGETAAGVDGAEALNEGCHGLHISPSRALDFRDFLLKPD

SEQ ID NO: 952376 - protein, 124 aa, Homo sapiens
MSVVTRLECYKPLHGYQGQAQHDEAVDREEGSKKERRKRMMQSPFWFLPHLVEFYSNFSRNTRSKLRIPSCGGGRGAPRKYGRTPGSIHRAIARLQFSSMRQGPAAVLIGWGQRDLGRNYFQYV

SEQ ID NO: 952377 - protein, 51 aa, Homo sapiens
GPTEVAPAQTQTCNSRTHLYCTHTQSHTSTLEHAAPTTQSPVVHIRTHNGM

SEQ ID NO: 952378 - protein, 40 aa, Homo sapiens
HKYDNAAYKSYRSRLESNFRPYGIVSSIKRNLLKIFERGR

SEQ ID NO: 952379 - protein, 110 aa, Homo sapiens
MAKPGTLKSVACYGESISFSELSGEVLETEENWPFAVIQAAFTFLMGSTTIRNIKSHPSTHPQHSALPASPMELKMLSVTHMMVSVPGRSGRWVASVGKLPHMLLETTEA

SEQ ID NO: 952380 - protein, 44 aa, Homo sapiens
LTKRSTQNHKHKLGTWYFHKQLQLKQTSFSSTTFNQRFKHYIPF

SEQ ID NO: 952381 - protein, 33 aa, Homo sapiens
AFPSGDADTIVRPQLRGLSVRCLVCDAEDLVKP

SEQ ID NO: 952382 - protein, 61 aa, Homo sapiens
MQLIAVRWVSATFRSLLSSLTCCESWIPCMLPSLPLLLALPFLMAAAVAAFPRSSRSTAAW

SEQ ID NO: 952383 - protein, 68 aa, Homo sapiens
FLPVHNVQAFADTRRRIQSTRLQPGHGRALLLAQRGLLQGFQRSQATAQAVGLLAQFGQFVLAIALLF

SEQ ID NO: 952384 - protein, 54 aa, Homo sapiens
MKKIHLLLWDAYLAVARLADAQYQSIVNYKKSTAYQTKQELMQSSKEEAKKLKS

SEQ ID NO: 952385 - protein, 41 aa, Homo sapiens
AITGMTQARAAGLAYWRDGDPVEEVEQTGAAPSNPNKGRIY

SEQ ID NO: 952386 - protein, 42 aa, Homo sapiens
VQPHELTAPPEHPDCSSPHSNQLKQQPPPRHNDSTTHQWRTA

SEQ ID NO: 952387 - protein, 137 aa, Homo sapiens
SKRRCCFQREMLFCTLQNSSHHIPGAQREVRNRGWTLALIPQERDTRGNEQCCYQRSRRLTPAQGAPEWALSTALHVASGSPTARKSRTGWVSRRAGQGENMDDRMEGAQEACNPTSFTTGKLKALNDCLKAALSIS

SEQ ID NO: 952388 - protein, 102 aa, Homo sapiens
SDRARYHLVDGDYVVAEIMWVHPYRVCGFSLRVCAETRDRRDKDRRQRDRKKDSWARGTTATKARRQTGSGPECLEALLFIVVKARGQGKECQSSPIIAGHE

SEQ ID NO: 952389 - protein, 60 aa, Homo sapiens
RDWRLILRLDTTRFGLHSQATRFSASHEMGISRAGTGRIPSRGLSLRLEGTRGAKIAGSR

SEQ ID NO: 952390 - protein, 36 aa, Homo sapiens
DTAVNRARYHLVTGDNCWMTMDSNKARTPPILLGTD

SEQ ID NO: 952391 - protein, 49 aa, Homo sapiens
MRMDGRAMRTRIIAGHEISRDRRLLVGSAMDSNRARTPLSLLGADRRIV

SEQ ID NO: 952392 - protein, 59 aa, Homo sapiens
SPLLQAIPFVGHPNAAKWIDLTFHIALLHNLNTFLMVLTSVFGSTPPQWGDITFATRNM

SEQ ID NO: 952393 - protein, 73 aa, Homo sapiens
MEVNTAESGVDNPEASLTHSMPTVNDDNNSNNNTNNKTKVQVTSSAWSVLLATGEGACTLVEIGDSKVTASSS

SEQ ID NO: 952394 - protein, 96 aa, Homo sapiens
YVSGLGGLDSVGDVELGWLDWTGLDRTGLDWTGLCDLELGDVDSTVLSSTGLTLGRAGLRCGVLTLDWTDVDWTGVHNIVRDFGGLLYDVDPAGTA

SEQ ID NO: 952395 - protein, 43 aa, Homo sapiens
MVLQATALGANWANGAVTAQWVIGLLFGQHATMSCKLTAVHGC

SEQ ID NO: 952396 - protein, 78 aa, Homo sapiens
KSHAYSRKAHISTHAHTAHTQTHSTHKRTEHTHTQHTHEHTAHKRTEHAHTRTHSTHTSTQHTHKDTVHMECTHTTGR

SEQ ID NO: 952397 - protein, 60 aa, Homo sapiens
HTVHTHKRTDTQTHSNTHTHSTHTSTQHTNAQHTHTHAHTAHTLAHSTHTKTQYTWNAHT

SEQ ID NO: 952398 - protein, 76 aa, Homo sapiens
AGQSPCYQSKGTYIHTCTHSTHTNAQHTQTHSTHAHTAHTRAHSTQTHCTRTHMHTQHTHQHTARTQRHSTHGMHT

SEQ ID NO: 952399 - protein, 47 aa, Homo sapiens
VLEATDTKSVSLVRPQEGASGGGEVAVLPTPLPVVTGSPFPSSSFPI

SEQ ID NO: 952400 - protein, 125 aa, Homo sapiens
FFYLSLFKTDRSPSVTQAGVHGTIIVHCSLELPGSSNPISASQVAGTTGPHHHAWPVLKLFVERRLTMLPRLVLNSWAYQQALASQSAGITGMSHRGRPIPYSRLGVSNLLASLGHTGRIALGHT

SEQ ID NO: 952401 - protein, 31 aa, Homo sapiens
MAVNRARYQPDCHNPAIALADTEVLVRSGVF

SEQ ID NO: 952402 - protein, 105 aa, Homo sapiens
VTENFSHHIRVSDHEMIHMHYHLSATHGPNSVGGGWASSMMPSDWACYLSPNSVCWTNKNIAMPGRSWTVLKVFRLASPPAPTTNDKSRIGWFLACPSTVRAVLG

SEQ ID NO: 952403 - protein, 40 aa, Homo sapiens
  misc_feature (2)..(2): Xaa can be any naturally occurring amino acid
DXRGSPWSVKSYGWGGDVEGDVRCGGLQGLIGEEFYGVSE

SEQ ID NO: 952404 - protein, 115 aa, Homo sapiens
YNAKAFSFLPNPNRSLAPDSTNGRLETVSWMNGRTFADAVSYFVKQPAGGIYNGDVNLMRTFYILTAIDANRFFFHRHHVLPSCLYCTMKFVLLSYDFPVKTLFNGFFFFGVIFR

SEQ ID NO: 952405 - protein, 135 aa, Homo sapiens
NPVCAEADPEEGDGQSMPPPVFWFWFFFSERVSLSSPRLEYSGATLAHCNLHLLGSSDSPASASPVAGITGAPHHARLIIVFSIQVGFHHVRQAGLELLTSGDPPVSATQSAGITGLSRTRPSVHTWNINGFSRE

SEQ ID NO: 952406 - protein, 88 aa, Homo sapiens
GGRETTSLLFSTLIALDSFSLLTLYTFPDTELRQREMQPINHSTVPNHITESQTQETGLNSHVFRADSVCCLQPIIPALTVGLCIIAA

SEQ ID NO: 952407 - protein, 49 aa, Homo sapiens
TAGERRRGGGGLVNDITEEQWNRVRQWPGTTVEPEQTEVREAELSNARC

SEQ ID NO: 952408 - protein, 88 aa, Homo sapiens
NKLVLDVSRYAMVGALCVAIVDRPTPSSISHLLSPTLTEGHVFTVNWHCSPTSLMVLRCVYNYPEEIRRHFTPYFATYLIPPLKSILT

SEQ ID NO: 952409 - protein, 42 aa, Homo sapiens
LTPQVVGPLRTCVTYSDSSLNHAKLLTGSCMSVYTTYCAVTA

SEQ ID NO: 952410 - protein, 102 aa, Homo sapiens
VALEDPVSIREKPCVREHRTRLGTVAHACNHSTLWRPTQEDGLRSGVQDQAGQHGKTPSLPKIQKSARHCDMRLQSQPLGRLRQEDGLNPGDGGCSEPRLHH

SEQ ID NO: 952411 - protein, 44 aa, Homo sapiens
NSASVSPLHAKQHASTLATNSILMASIGQRSTQLGSRSSHIRHI

SEQ ID NO: 952412 - protein, 108 aa, Homo sapiens
TRLRGMRSTGPDPTGAGCAVSDARIYPEMEGPERDQLVIPDGQEAAQAAAGEGRNQQKLRGEDDYDMDKNEAESETDKQAALAGNDRNIDVINVDNQTRDTINLLDQR

SEQ ID NO: 952413 - protein, 31 aa, Homo sapiens
MLPGKMEQYKTVRAQKGRGLVDSLKPTEGLG

SEQ ID NO: 952414 - protein, 84 aa, Homo sapiens
TVWAIVFKATGLGLPREDNVHSVIGRDAEKEVVSDLKRPIAVRCVSCLPEYKVIAEDESSLSYQSTLDACNRVDNVLRDYSQLE

SEQ ID NO: 952415 - protein, 47 aa, Homo sapiens
LKKDHHGKRMVHGKRIISPMSDAVRSDENRRLSPVSCMRHDGSPGVS

SEQ ID NO: 952416 - protein, 97 aa, Homo sapiens
VIAVIAYDQARVHAVWAVADRFNSVSLRTATFIVACERICARAICVGSTPENPLLNPPGGALLQRPLEQRQIRQRQHGNALPPARPRTRPASRTPRM

SEQ ID NO: 952417 - protein, 102 aa, Homo sapiens
DPLSDTPDLASPAANAAAGAAGVCLPSSSMSLPTSPGGSWAGMIAPAGTPADIVQRLAVVLDRIVRSDEERQRLEAMGTVPVGGSAQAFNEFIAAETRKWGE

SEQ ID NO: 952418 - protein, 87 aa, Homo sapiens
TKAADRWHVPDPNNAQDLEKKREKALLNDFEQYQQHSGRELNGVPTGEVLLDSFKDAWSRKDYQTIIKVAQKIPDEALQEDEKLLLW

SEQ ID NO: 952419 - protein, 134 aa, Homo sapiens
IAEPSQLIMQGHTMVDRIVVEPKKLSPVEDSQRPGAHLTVKKIFVVALKNTLNNITYRDYFEQYGSIEVIEIMTDRCSGKKRGFAFVTFDDHNSVDKIVIQKYHTVNGHNCEFRTALSKREMATASSSRRGRSG

SEQ ID NO: 952420 - protein, 109 aa, Homo sapiens
MRPIPSLMKYTSNAQLNIFPQDIINVESYKLIVTPAEGEHEGSMQQGFYTTYNFDSAFTVTIQSPEGTVYKNGNGSKHLKAVIYNAVGEVNSYQEYYLIIMGIYISRGT

SEQ ID NO: 952421 - protein, 63 aa, Homo sapiens
SPDHREIQLQIAERSGIRITDEELNQAMGTIAQRNGMSLEQFREALARDGLSYADARDQVRRE

SEQ ID NO: 952422 - protein, 87 aa, Homo sapiens
KTHNNGDELHEHYVKHYSAGKRKGAIKTHNNGDELQEHYAEPLSKRYKRPGAVAHAYYPSSFEKLRRQITGGQEFETSLVNMAKPCL

SEQ ID NO: 952423 - protein, 47 aa, Homo sapiens
TPVVHFYCFWQHACTQHAQAISMPSIQLVMAHPQLGSRSSHFVTPWS

SEQ ID NO: 952424 - protein, 146 aa, Homo sapiens
IRPCRAGAGMPPSSAHVDLASAASAHIPCSLLPCGLRHTDLHLRRDHQSPENIKITSTEEQIAREPGIGWVLQITQRLLARRDRRPQGSHWLTWSPLVLCLSLSLCVLWSTFPLLPCASSLTRDYSVRAIRAGPLCPLPRVSSHST

SEQ ID NO: 952425 - protein, 52 aa, Homo sapiens
LCMEIADMGAWALPQALVMMEYADMGAGPSRSVLVMMEIAGMGAWALPQVLV

SEQ ID NO: 952426 - protein, 33 aa, Homo sapiens
LTAACAAVVMEVVHGDQQQLGVVVVEVCYGDQA

SEQ ID NO: 952427 - protein, 51 aa, Homo sapiens
VRLTSSRHSTRLHWNERWNGTEWNGMELTRIEWNGMEWNGINPNRMEWNVI

SEQ ID NO: 952428 - protein, 33 aa, Homo sapiens
AGSSTAQVICLSLKGVSVSPSESEERLGRGVQG

SEQ ID NO: 952429 - protein, 143 aa, Homo sapiens
MLAKEDSPSHITHIRAHTNVPGTITKANEQADLLVSSAFMEAQELQALTHVNATGLKNKFDITWKQAKNIVQHCAQCQVLHLPTQEAGVHPRGICPDALWQMDITHVPTLGTLSYVHVTVDTYSHFIWANCQTGESTTHVKRH

SEQ ID NO: 952430 - protein, 121 aa, Homo sapiens
MLHQCCHAGRISAVADDLGVGRRFLRVEMKNWEAFMGVLQNEGRVKTRPSHDKTGRTLRVSEGAAAIAGRCNNRTNYRFEVDYADREGFRPNVGIILLNQRNEVFWGKRIRTHSWQFPQGG

SEQ ID NO: 952431 - protein, 218 aa, Homo sapiens
PSTPAENVGTNKTSQLKEEFKPIAREAKNLEKRLDQWPTTINSVEKTLNDLMELKTMAGELQDACTSFTSRLDQVEERVSVIEDQINEIKREEKFREKRVKSNKKSLQEIQDYVKRPNLHLIVVPESDGENGTKLENTLQDIIQENFPDLTKAGQHSNSGNTENSTKILLEKSNPKTRIVIFTKVEMKEKNVRAAREECRVATKGSHQTNSGSSAKLY

SEQ ID NO: 952432 - protein, 40 aa, Homo sapiens
LTSTLHLQVRMQRQKTRQARGQMLRADLVTGLAIRSVPLT

SEQ ID NO: 952433 - protein, 56 aa, Homo sapiens
MHASCLIEVMGAVCELLQQYSPGNLLSLEGVRVSPSESEERLGRGVQGNSEKSIFK

SEQ ID NO: 952434 - protein, 202 aa, Homo sapiens
QDLEAEECRYSETSLLKEDVQTHRKEAKNLEKRLDQWLTTINSVEKTLNDLMELKTMAGELQDACTSFTSRLDQVEERVSVIEDQINEIKREEKFREKRVKSNKKSLQEIQDYVKGPNLHLIVVPESDGENGTKLENTLQDIIQENFPELPRQANIQIQEIQRTPQRYSSRRANPRHVIVIFTKVEMKEKNVRAAREKCRVA

SEQ ID NO: 952435 - protein, 34 aa, Homo sapiens
LYLLSLYGCQGQSSDSLERRGRGVQVHSEHRIFT

SEQ ID NO: 952436 - protein, 49 aa, Homo sapiens
MRLPTCIQPVTEPALETGPSDHKLSGCGYTRPFSNSYGHLMGARWGYRA

SEQ ID NO: 952437 - protein, 35 aa, Homo sapiens
DVNLSRKMGDTDPTSTGVGVPGGWARVDYLCRKAH

SEQ ID NO: 952438 - protein, 74 aa, Homo sapiens
MWFLGFISPPRKEGLALSPGRECMGPIIAHYSFDLRPQLPECRGLRGGHITPGPQLRKGPGGAEEGGTSKKSHG

SEQ ID NO: 952439 - protein, 38 aa, Homo sapiens
GPRISSHQQYLAFLRIVQHVTYKPLSTRSQFSLMGARL

SEQ ID NO: 952440 - protein, 40 aa, Homo sapiens
  misc_feature (1)..(1): Xaa can be any naturally occurring amino acid
XGSPIDWGDYTQVIHSGGRKMFLVVPPLSQTEGTGYRARI

SEQ ID NO: 952441 - protein, 128 aa, Homo sapiens
GRYPSCVHQRSRGLSGKMVSWARPRPSCSVQPWDSVPCLPAALAPAMAKRGRGTAPAVASESASPKPWQLPHGIGPVGMQKMRVEAWQQPPRFQRMYGNTWMFRQRSAAGAKPSWKTSTRAMLMVARL

SEQ ID NO: 952442 - protein, 37 aa, Homo sapiens
SSPISNDEDVYNKVERIGVIVQVRKKYSHVDLMGSID

SEQ ID NO: 952443 - protein, 36 aa, Homo sapiens
MARIHSLAHITTNIFLYSRSQACCMGSKHGGYRSSH

SEQ ID NO: 952444 - protein, 56 aa, Homo sapiens
LEDPRIGSHQRNANITTMRYHLTPVRMAIIKKSGNDRYLEMMWKNRNTFTMMGEDC

SEQ ID NO: 952445 - protein, 33 aa, Homo sapiens
MHAVLAYVLIYLHNHGPEELVRSEGAQARYAGV

SEQ ID NO: 952446 - protein, 48 aa, Homo sapiens
TVHADYVLDLVQDSNLVLHAAFLALQDLLEECIGMAYQVLRSSLSSAR

SEQ ID NO: 952447 - protein, 35 aa, Homo sapiens
RLGTILRPSALRNEGEMMTSQMKRRKSNLLMGEDC

SEQ ID NO: 952448 - protein, 103 aa, Homo sapiens
LLPSDMSGLLLPRGRERKRKENTGKRIQQHIKKLIHHDQVGFIPGMQGWFNIRKSINVIQHINRAKDENHMIISIDAEKAFDKIQQPFMLKTLNKLGTDGTKM

SEQ ID NO: 952449 - protein, 43 aa, Homo sapiens
TVRCTPRPRLSLLSLRLTLTPIRLSKLPGLSCRKGSQTAPITS

SEQ ID NO: 952450 - protein, 35 aa, Homo sapiens
LGVHRMVVNEVRWWTVCLSRSSPWFLEVGKCYGLL

SEQ ID NO: 952451 - protein, 49 aa, Homo sapiens
QPACSVSKSSFRSALASERMISRLIPAACEGCSMSRGSCLEVGVALFRF

SEQ ID NO: 952452 - protein, 80 aa, Homo sapiens
GEEKNLWARKAEVAVSWDRATALQPEVTGVKPVSHEKNKNKNPNSTYTFHLLRVVRNDWVLKIIHCKINGGTMRVPPVFM

SEQ ID NO: 952453 - protein, 66 aa, Homo sapiens
DIHQKQRTYRHMYLLWLAIYYGVVLVCIMYTGLCLKPFLEHIGPGARIIFFGSTTILMNFLYLMGA

SEQ ID NO: 952454 - protein, 53 aa, Homo sapiens
YVLDRKDAFFTVRCTPRPRLSLLSLRLTLTPIRLSKLPGLSCRKASQTAPITS

SEQ ID NO: 952455 - protein, 72 aa, Homo sapiens
ARICHSIAVSRVQDPVLSPRHLVLWHKQRVLSSDPGNVRNLRRVLASSIQNPLSSLPPLTPSAVLPSQENKV

SEQ ID NO: 952456 - protein, 76 aa, Homo sapiens
GTVLPYLHVYPTANNVIRYYGCCSSKCLVSEGYVASTVIIRLSLPSMVRTIFASQFPTILSPKDALAAVYNEVDDF

SEQ ID NO: 952457 - protein, 34 aa, Homo sapiens
SEPFEEILAQPMLRATSLWRLVRWLPIFLISFTS

SEQ ID NO: 952458 - protein, 48 aa, Homo sapiens
VTFWLSVYSVQSGAQTSRSLAWYAHITWVLWGSGSLSRLRTLRYPTDF

SEQ ID NO: 952459 - protein, 44 aa, Homo sapiens
WAGAQVCRSVCGLRRPVCRPVPGRSGARACLQAAAPVCPARAAG

SEQ ID NO: 952460 - protein, 47 aa, Homo sapiens
YAQPTVLDFNAPVLCINFEIRRLRNSPSCIDGTFIFIIMFRHFIIMF

SEQ ID NO: 952461 - protein, 104 aa, Homo sapiens
TAVLTHEEAVKRAGAMGASALGRSKPQAHKDRGLWLACGCCDHDGIRQRLPWQAAPRHLSGGKRLSQVNVPELQPAQAPMGDNCTRHLSEEANRNCMQRQHEQR

SEQ ID NO: 952462 - protein, 36 aa, Homo sapiens
MRPSARPRFRSARYLCVACACRPHWSRVLSLLLCLW

SEQ ID NO: 952463 - protein, 84 aa, Homo sapiens
PLLSLAHRQFPCVPQLPTLVHSTCHFPGLAGQVMGLAGPGSLGSPRLQGPCFVSSVSCRRHTSGPWSSSQGACAGSVAQEGILV

SEQ ID NO: 952464 - protein, 79 aa, Homo sapiens
PTQTTFHCTHVLSARSQFSSLWAGFHSARSIVHFVPCGSTLPHPGSSSQPWWAVSNQSPFPSSPAGSKQHHVTIAPIGP

SEQ ID NO: 952465 - protein, 71 aa, Homo sapiens
MWQHTPCQGQKFQASVGSQHTTSPFPSSPAGSQQHMSPCTIVRSSPSSAQQGVAAVKAQRGGQPALAVTLV

SEQ ID NO: 952466 - protein, 47 aa, Homo sapiens
PLGYQDLFSLRPSSPKPALASPANMPVLSRSLHSSGNPTGNCTCGPR

SEQ ID NO: 952467 - protein, 53 aa, Homo sapiens
VHSLYHGAYYAVNLLVLLCATHDASLCLMGSALLRALPIKSQCCQSVLAACGH

SEQ ID NO: 952468 - protein, 110 aa, Homo sapiens
AQPTQPIPATQLHPQCHHAHLFPSWHCTGLVWAVAVSSIGISTNIQPIPGPGLQPSSSLHSLACWARCTQGMFSCLHGIHWAPSVGMAAVHQGASSQQSALPGHAPSYGH

SEQ ID NO: 952469 - protein, 136 aa, Homo sapiens
QYSKARHMGHSKHKGQRGQVCSSWAVGRGTLCTIHPICSPHASFRLPTLVAQLAAGKARWSKVTCLSLHLHLGHMSIFLIPTGLGLSLHQAVSPTMPTIQQEVQQYNLPKAAKLTAGSVSHMVQSTCLSEWLAACT

SEQ ID NO: 952470 - protein, 82 aa, Homo sapiens
AAVVRTPSFSPGHSQFPWVLASNSYKTCSYQSGRGQVGGWRAWSRGPQAEGHGCVSSPEESVRCSLTYDFPAEGKQGPGILR

SEQ ID NO: 952471 - protein, 57 aa, Homo sapiens
LPFQGWLGRFGAGGPGVGVPRLQGHGCVSSPAERVRCSHNHHDYPAARETGSWIILR

SEQ ID NO: 952472 - protein, 90 aa, Homo sapiens
DCCRLVVLRVSPSPPSSPFAPRCYSACWVEGRGRAGLWAFRASWQPGRAARPPASGEACSCVRSDGDKEEDTLRRHPSDTRYPKCLERDK

SEQ ID NO: 952473 - protein, 93 aa, Homo sapiens
MDVTRKSLESYAFNMKASVEDIDTSRQDKKMRTNRRFWTSVNDIINWLDKNQTAEKEEMNINRKELEKVSKPIITKLYQSAGGMPGGMPGGRR

SEQ ID NO: 952474 - protein, 45 aa, Homo sapiens
MARQPSPLYLLCFLSSDLCLSPLLRYSGSPSLLSRPNHEMVWAYS

SEQ ID NO: 952475 - protein, 88 aa, Homo sapiens
VSAFIQLKSEAVDLEDNCTLEGWAEHSGLSLQSYDGGTEPRGMSVEGAPVQVLHWTLPIPGCQSRWLHPKPGAKACAGRLGMSWLARD

SEQ ID NO: 952476 - protein, 49 aa, Homo sapiens
GTEVKVRQQLYTYLQKKTLNHYPQPRGPQHPGPTKTPNLAQTSPETCKY

SEQ ID NO: 952477 - protein, 87 aa, Homo sapiens
PSSFSSLDTVSSRGFLASSSYKTCIFRPGLGRFWGSEGLAVGVPRAEGHGCCVFSCKKAVRCSLTYDFPAEGKQGPGILKGAWMKRD

SEQ ID NO: 952478 - protein, 36 aa, Homo sapiens
TLQPNTVFITDSERKTRRNLQIVVTLYSIDNGNMIV

SEQ ID NO: 952479 - protein, 59 aa, Homo sapiens
VTHQPTWGAKRHERSSYSGASQTQVTGSGRGRYRHQVLRQTFQPWKAHDVQALDTQVLA

SEQ ID NO: 952480 - protein, 77 aa, Homo sapiens
QVVYDGSPVRSSHCSDRLYERHLTEELLFSCVTEPLMDSSVKLDRCTIFILYDNYILHSSWGPFYYVSIAFYIFYEC

SEQ ID NO: 952481 - protein, 60 aa, Homo sapiens
YAQPPPLAVVQNLQLLSLDHSQFPWDSWLQTRTRLAFSGTGWAGLGLEGRRETGSWYPKG

SEQ ID NO: 952482 - protein, 87 aa, Homo sapiens
MIQEPVSLRRVSHSVTEHLTLSSGETHNHVPSAGDPYLQALCPKPAQPDLNMPVFYEFEAGTQGELTVVKAEKLEVLHHRKRWWLER

SEQ ID NO: 952483 - protein, 74 aa, Homo sapiens
AHHTLAVSQNSSLLSHDTVDVPWYYFKARTRVAFVSDWLSRFRGCRAWSCRPQAEGHGRVSSKEKQGPGILRVL

SEQ ID NO: 952484 - protein, 49 aa, Homo sapiens
ITRDWPHGKNKILGTKTRLGQEAGKLTEEGSRFDFATMNLAMNLMGARL

SEQ ID NO: 952485 - protein, 108 aa, Homo sapiens
GIRHTYSACSEPVFSVAIILELMGCKIAVGVPSGSFKYFSALVIPDSHSSNLFSRFLTSLRWVRTSSFSSEKFDLLKPSSLNSSKSFSIQLCSVAGEELHSFVGGEAL

SEQ ID NO: 952486 - protein, 69 aa, Homo sapiens
ARYRIFVPSETTSSKSTNRNAERAWRKENPPTLLVGDESHNSKQYGSSSKKLKLELPDDLAVPPLMGAR

SEQ ID NO: 952487 - protein, 69 aa, Homo sapiens
DSQDPVTRFVYRGRVTDIGVWGTGGDGELLDVRWWPEEFMGGVDWPGRESVIAGKGTDVSGADGYTSRF

SEQ ID NO: 952488 - protein, 54 aa, Homo sapiens
MHPDQVVVRGEEGPDRSGRRRYGDQLQLAEQHPCRRERGVGRGLGGVMLGAQTE

SEQ ID NO: 952489 - protein, 77 aa, Homo sapiens
LCTALLLSAIASSHAALHRQEATWFHVHLFSQSESSALVYAGQVGLVGSLPVSAPFNSSSAYTVRSYVFHPHSGRRD

SEQ ID NO: 952490 - protein, 176 aa, Homo sapiens
IGAALLSRSLQAFVRYYVERGEIRRFVIKCRVANQHSNSVAVRNGFTLEGCLREAEYLNGRFDDVNIYGKIYALQRSQQRGAGDALVAVNHLFAAQVNALPGKGFNDRIICDFNPVLNEHISLIRARSLDHHLIVQHDRSAAQPCLTANQHVVLDDAVSFHHGILGNLRAVAHRRN

SEQ ID NO: 952491 - protein, 122 aa, Homo sapiens
MRDRKGSELAVDVQGEDRVRGRTERGGKGGSIWMYGGPMAGYGSLTRGGEGMVMGIVRGSGVWVREGCNPLSGGDERGCGRGMGRPPPHMDYKYEIHKPIHVKRKCITVREYIMSEQIANLT

SEQ ID NO: 952492 - protein, 40 aa, Homo sapiens
FGCEMWRDGYGMGSIGRSGLEDREEVAAITHDSLNIHKPL

SEQ ID NO: 952493 - protein, 30 aa, Homo sapiens
MGGVDWPGRGGVIAGKGTDESGADGYTSRF

SEQ ID NO: 952494 - protein, 50 aa, Homo sapiens
RLRWGSRNTPPVPTLLVYPRIPLLSERLTRIHKPLHVPRLVSFLGKLYSL

SEQ ID NO: 952495 - protein, 51 aa, Homo sapiens
TDRFGARGYDDVRPRPGRRRCDDVVRRTDLDWPTGRVETLLDVVYGYGDGT

SEQ ID NO: 952496 - protein, 51 aa, Homo sapiens
SETPKSTQKQMQPRICQYRIYHCHSEGKEAWCMAGAGFCVNTLLCPIDIQQ

SEQ ID NO: 952497 - protein, 66 aa, Homo sapiens
ADDSRSRLISKHTTVEMAMEQMVHTLSYPDPQDCQGQEDHLSPGVRDHPGNDGENLSLQNVYKKLA

SEQ ID NO: 952498 - protein, 46 aa, Homo sapiens
VSGAGVYEPVHGSGPDIAGQDKANPLAQGSQCCYDVTLRLKPTKLP

SEQ ID NO: 952499 - protein, 102 aa, Homo sapiens
PHVSGAVMNCVVWASPEGRAFSLSSIDHGETGSLRPFTEATGPVQRLHPHDLITSPKAPPFNSIALGVTVSIYELGKDVFRQQQMLRYVYPGTWVKGLIVLG

SEQ ID NO: 952500 - protein, 57 aa, Homo sapiens
MWRSVANGADGDLNPAQQRSLLKIGYAAIDYLIPNEKRRSALVGVLLNPLDSAKVDA

SEQ ID NO: 952501 - protein, 39 aa, Homo sapiens
LPARLFADTPDADSVHLNIWLTSWRGDEVTVASESVTRR

SEQ ID NO: 952502 - protein, 131 aa, Homo sapiens
MILPLPRVKPHSAQALVDLLVLGAASGHEISAASAASLASNRMPLPWPEYSVCSRGPSLRKNNQLNGTPVSPLSAKVNSMTRHTVLSFEQRVMMLGNLRDQAPWASMRPTRWPISPRIAPGFDPGRIGMVP

SEQ ID NO: 952503 - protein, 72 aa, Homo sapiens
ENQNHSSLPDSDGTGGPAGTRLASPSVAECSVGRHRRRCSHGVWQPEVEGELRAFVQGADQHQGEHRSGTSE

SEQ ID NO: 952504 - protein, 51 aa, Homo sapiens
FKLDLSPNRRLCDRFNSYYYNRAKTVDQKIFYDICSSLQAKRQANNKRHRA

SEQ ID NO: 952505 - protein, 76 aa, Homo sapiens
MKSFAVLNCSLSEMGLVPQSTSPIGDAGSDGNQPCCCSANQFVNETDFSLTLGLPEHEVGYVVLDHNGFDFRQAVF

SEQ ID NO: 952506 - protein, 40 aa, Homo sapiens
MLATWSDMKVSKTCGQLDRCPGDVTACRGLRAQSQSYLEP

SEQ ID NO: 952507 - protein, 107 aa, Homo sapiens
SRGPPHAVASVIPALWEAETGGFLSAQEFEARLGNIGKTPSLQKIQKNWLAMVVYTFSPRLRWENHLSPGRLRLRCTMIAPQHTSLGNRVRPHLKKKKRWNQLKFPF

SEQ ID NO: 952508 - protein, 67 aa, Homo sapiens
QVNASLGDTVRTCLYKNKNKKDVAGHGDEHLWSQLLRRLTQDDRLSLEVGTAVSHESHHSTPAWVTE

SEQ ID NO: 952509 - protein, 70 aa, Homo sapiens
RFLHFKLYYEATVTKTAWYWYQNRYIDQWNRTEASEITPNIYNHLIFDKPDKNKKEERTPYLINDVGKTG

SEQ ID NO: 952510 - protein, 155 aa, Homo sapiens
  misc_feature (150)..(150): Xaa can be any naturally occurring amino acid
MQGSAIINASLIKTLLKATLLPKEAGVIHCKGHQKVSDPIAQGNAHADKVAKEAASIPISVPHCQFFSFSSVTSTYSPTDYFYLSISSHTRQMVLQTKENYLLPASQAHSILSSFHNLFHIGYKPLAHLLEPLVSFPPWKSILKEITSQXSICYS

SEQ ID NO: 952511 - protein, 145 aa, Homo sapiens
LEGKRTCCLHCAMAMGGNLGRNMTEWISQLSSTNSSQKLSKHCSQVDSVRGFGGKFGVQMDRVDQSAGGFEYQGKTEKHAPQKDYSSGFGGKYGVQADRVDMSAVGFDYQGKTEKHESQRDYSKGFGEKYGIDKDKVDKSAVGFE

SEQ ID NO: 952512 - protein, 67 aa, Homo sapiens
SGTPTPLIILVIIETISLLIQPIALGVRLTANITAEPPTHAPNWKHHPSQYQRINRSLLHYIIIHKF

SEQ ID NO: 952513 - protein, 71 aa, Homo sapiens
DCVWINMTVVTSEMVTAESLNIPTLTISSTASASPCAAIYQGVSHPLPGSSSEASLINVDLGVLYHILMVH

SEQ ID NO: 952514 - protein, 35 aa, Homo sapiens
SQSTADQYSLTPAHGGFDMGWRGVISRSPYKRYLS

SEQ ID NO: 952515 - protein, 80 aa, Homo sapiens
QTLNYVLCLAASEKRLHALSQAPDAGGSFLLLAVTLPSIACILICYWSRDRWACHPLARTLALYALPQSGWQAVASSVNT

SEQ ID NO: 952516 - protein, 91 aa, Homo sapiens
  misc_feature (80)..(80): Xaa can be any naturally occurring amino acid
SDAELFDTDLPGSLGQSEEKPCACLRAVSHARLAPGPTVPSKKEIPLCGKSSLALAVSSVLSLNRCCSCLFPSMLVERAXELQRRERVPEL

SEQ ID NO: 952517 - protein, 37 aa, Homo sapiens
MDGMERNVWNGFNGINRVQENGMEWNAMEWSHPEWNG

SEQ ID NO: 952518 - protein, 45 aa, Homo sapiens
MQESILQFTSNDKLLAVVVGPVEVSAYTIHGGRVDQPYVSGNPEL

SEQ ID NO: 952519 - protein, 50 aa, Homo sapiens
NPILESTINNMRLATLSCMYQDIPDSAAAIKGSFVQRLKSSRLALDTLCG

SEQ ID NO: 952520 - protein, 87 aa, Homo sapiens
  misc_feature (31)..(31): Xaa can be any naturally occurring amino acid
MYLEISVEDHDSGCQASELPYKAWVIESVNXVNDSTLTYHLRIYHHPTKPQLNAWQPESYFAGFLINNYISPAFLFQTIIALYLKLT

SEQ ID NO: 952521 - protein, 74 aa, Homo sapiens
MKFVSPVGIRLLSVRQDTLNSSVEEETSMLSTYCFTYPGSYTHIAWDRDLSRQRHTQKLYKGYSMYPRHGHECS

SEQ ID NO: 952522 - protein, 83 aa, Homo sapiens
DTIRAYTSTFVSGAWVSVGGSRDGRDAGGVGSSVGGSRDGRDAGAWVPALEAAVMAAMQGVKISVCVQAAGSKQKLSSCDFEK

SEQ ID NO: 952523 - protein, 126 aa, Homo sapiens
SSPQSQDLANESCVDHPGPYMTSWRRKNRRGSLHQYWSQHIDEISTVVTTQSAEVGPAKTYSPGPLEIDLDSMRNLMAILVNSLCVVVARYTLQMEQLNGILLHLESELAQTRAEGQRQAQEYEAL

SEQ ID NO: 952524 - protein, 81 aa, Homo sapiens
SPQSHDLAHISGGHSGPNITELARKNLHGELDKSGLSQIEESTTVVTTQSAEVGAAYTTLTESSDVRVSGPWYVSTCHSII

SEQ ID NO: 952525 - protein, 65 aa, Homo sapiens
MMGLMDVSPILQIEESTTAVNTQSAEVGAAETTLTELRHTVQSLEIDLDSMRNLVSAFTSPAQLL

SEQ ID NO: 952526 - protein, 77 aa, Homo sapiens
MDPVCFNIPEDWDERAKIDITTDSKPEDWDKPEHFLHPHAQKPDDCDEYDRRIVENPQLIQNPEYQVLSGEPSRQYR

SEQ ID NO: 952527 - protein, 38 aa, Homo sapiens
VIFAVKQLEIDAPCYFDIQKIQSVPVLRFTGGIQIFVK

SEQ ID NO: 952528 - protein, 53 aa, Homo sapiens
YRLQLGVGECTAVSPRDLSMNNLTELQSWPLPPPASSWSELRLFWEPISHIIP

SEQ ID NO: 952529 - protein, 66 aa, Homo sapiens
SSGLGSDEIIGCRSCPLSLSRFWVGTQKPLAGPGGAIESSDMQNPEKISQKANPRFYESNIICRGN

SEQ ID NO: 952530 - protein, 45 aa, Homo sapiens
CYVHRQPLAELISEPRSTAVLVGGDDPRNRTVVAHAGDDRGRSVK

SEQ ID NO: 952531 - protein, 77 aa, Homo sapiens
ETCPSASRAVYMLKGGLSRQTKLYDGSQYVTGLPSLIQTGLSVILSPLNTVQTKLLGLLNHLHQFSALQPLLDKNGS

SEQ ID NO: 952532 - protein, 84 aa, Homo sapiens
ELTPTIPPPWEVEVGRSQGQEIETILGQRGEILFSHQKYQSIIRTYWHMPCFSATQDVDVGDSHEPGKQRVAVHQYHAIALQPV

SEQ ID NO: 952533 - protein, 129 aa, Homo sapiens
LHDTRTLRLSVSKMYPRAFEVLRFQDCRRSCEADEGFLLAEDQPVFGVVEICHAGLPPFSTLKSLQVHLGTLQSAPLSEAHGYKTVTGPHGLPLLYPAVEQVRCQAVFSSQVIPGSPGPRGKVELGQAK

SEQ ID NO: 952534 - protein, 159 aa, Homo sapiens
ARSCPAGVVFDRPRFHAYFPEIFPIRIAPVPTYHSVCSPAQHFKETHRTSSTTSITPPSVVTRPAGMVTLPALAYPALFIAFALFFVLPLGFHGLWVPDETRYAQAAQEMLNTDNWVVPHFMGLRYFEKPIGGYWLIAIAQALFGDNLFGTRIASAPPA

SEQ ID NO: 952535 - protein, 152 aa, Homo sapiens
MAWRTQGVNGLLDIIASGPVTPASALQHVIQHDVGQVTGIAGQVPFQNKSQRLHLAAIFKTAGEPVWPVGRVRHLALPQGIKRGLQLIFRQAVGKPAARATAIQAKHQPRCFRRAPVLMGPQVQAAVITMDPRPHALCRRTFRPPDQRTISE

SEQ ID NO: 952536 - protein, 93 aa, Homo sapiens
MVTLPALACPALFIAFALFFVLPLGFHGLWVPDETRYAQAVQEMLNTDNWVVLHFMGLRDFEKPIGGYWLIAIAQALFGDKLFGTRIASAPPA

SEQ ID NO: 952537 - protein, 196 aa, Homo sapiens
MRHEFVATNLQLKMKMAGRWYCEDPVDEELNNRMRRLSASSTDTPAACASELLVLQMSSLDAGVADPDWKELHIVGTWPDITYSTTCVLTCAPDPSTVRPVAVLTQSAVLCLSASWKEKQDYAFACEQMKSIRQDLTVQGIRTEFTVEVYETHARIALEKGDHEEFNQCQTQLKSLYAENLPGNVGEFTAYRILYY

SEQ ID NO: 952538 - protein, 72 aa, Homo sapiens
PRIHQPAVIWTMKSKLRRSQMEMRNLLGIGVKVTSCYALAKRQAALCPCSKDLWNFELERDDLGYVVEEIPK

SEQ ID NO: 952539 - protein, 149 aa, Homo sapiens
AESPEKGAPWITTENMHVSFWSRLSVFLLFLHSAPDVQDWPECTLEENPFFFHAGAPILQCMGCCFSRAYSTPRKVQEDYVGPKERHLRLHLSVLLNHINRVTVVVGFHSGEPHGVPVHYLLLSQILNVLPSAVLMTADFLEWKIPLSS

SEQ ID NO: 952540 - protein, 45 aa, Homo sapiens
WDHSHREYLLTSSQHQYTPYNSCTHPGTHYHHLIHNFHNYGTTFN

SEQ ID NO: 952541 - protein, 95 aa, Homo sapiens
SYDHATVLHHGRQSKILSLKTNKKKKGRKEGGKGRKGLKLATGGFRIEILWGGGPFFIDFPTALFKKVTLGRRSRFKFFFSTENLTLTLGANFWV

SEQ ID NO: 952542 - protein, 38 aa, Homo sapiens
MPQTILEIHINNRVYDLDVRSGHSDSAAAIIGSFVQRL

SEQ ID NO: 952543 - protein, 158 aa, Homo sapiens
DQHMHLLLIITNSNLLTFLYPTKGYLPSTVAFSSDADLIVPLLQTAALSTRILLILAWRRMVYRRMVFAYGFSFNMILMLSVGFFFPLCDASSCVLLEGLFGSLGLLNILAKICINHLVHGKIVITLDEKRLYANCRTIHLNFRKALAVQMQKRPTCP

SEQ ID NO: 952544 - protein, 33 aa, Homo sapiens
YVQVVQQRTFISPIKCIEALKLEENRVVKRVKS

SEQ ID NO: 952545 - protein, 34 aa, Homo sapiens
SITYLHTLRLVDDVRSTSSSPPAPDAFPSSWPRT

SEQ ID NO: 952546 - protein, 103 aa, Homo sapiens
LQYPVFRRILIRSDFKTRDAFELWSHGSLIVTTVERPPAVYFLTAPTAITSLRMHTCPYCSKGRSASTVPDPLSVALQGCILVPGATLSTVFKSGMGGSLVGS

SEQ ID NO: 952547 - protein, 62 aa, Homo sapiens
MGTLPVFPNHATETQRLAFIDHLVENIFQVFHILDFEHMLLIVFLGRHSIDVHLVHQRPEPK

SEQ ID NO: 952548 - protein, 57 aa, Homo sapiens
MEFSNTLSRFGDLRPPTHFLLPSSDWVLLSDDAYQVLVLLLSRWEHDTFSMAVAHHV

SEQ ID NO: 952549 - protein, 67 aa, Homo sapiens
MTVIHHITSSYWYYPFTSSGKLRGSWYSSIKDETMSVLFTMMPNQSLSVLDKEVKWMLQPGTVAHAC

SEQ ID NO: 952550 - protein, 109 aa, Homo sapiens
RAGSGDREELDKVRVSEELRRARQWSSYSLLRLELSERTLRELIRTVQSLEIELDSMINLKARLENSLREVEVRYALQMEQLNRDPACDTWSHELAQSRAEGERQAQRV

SEQ ID NO: 952551 - protein, 70 aa, Homo sapiens
LAFLTYHEASCLQAPPSHLIRLVVPLQQQLPYPPGAMRYLAWRRMVFRRMVYAYGFSFNMILQVYQRVLL

SEQ ID NO: 952552 - protein, 34 aa, Homo sapiens
KSLAVAAVPLSQRIAGFQTLTSDVILLLLMHNRS

SEQ ID NO: 952553 - protein, 94 aa, Homo sapiens
MVYRRMVFAYGFSFNMILKYFSGSFFRTLRWIYTCVVLEGLLGSLGYNKDSAKICINHLVHGKIVVTLEEKRLNAKCRYNSSNFRKALTVQMQK

SEQ ID NO: 952554 - protein, 99 aa, Homo sapiens
MGQRKSCNGHLCPFSFLCTLVGARPPVGPMSLWDPEDVSVPVGGEHRGAPALIQPMTKGRADPCLLGTHLLQEQPAPPPASAPASCMAFSSLLQENVVK

SEQ ID NO: 952555 - protein, 88 aa, Homo sapiens
TSLAEEIITLYCPYILSELNAINLNLRPWTIKHRAIIMRTCDCATNRRHRYLHITLQLLQVALNIFYAHHNFKTMVVIRPNARSYLIH

SEQ ID NO: 952556 - protein, 33 aa, Homo sapiens
MSLLTRSWALGRLHVDDTYETLRVRTITDLLLT

SEQ ID NO: 952557 - protein, 51 aa, Homo sapiens
FASTCQAGNACPAVLNGAAQQQAPGLGFSSSQVHVFSLGPRGEPCEMGLNI

SEQ ID NO: 952558 - protein, 65 aa, Homo sapiens
  misc_feature (59)..(59): Xaa can be any naturally occurring amino acid
MANQATQHWLKQGSGCCRVHAAVSSSHAHQRISHTFPSQAIVRAGTMQVCSASSLSHSXSTVQHR

SEQ ID NO: 952559 - protein, 49 aa, Homo sapiens
MGNWYWNWNDDLELDELERELGRDDLELELPELDDLELELDDPELDMDE

SEQ ID NO: 952560 - protein, 37 aa, Homo sapiens
KYETECGRGILKCSEYPLLMFAARQDQILGQIQTIRG

SEQ ID NO: 952561 - protein, 134 aa, Homo sapiens
DNQVSAPRSAQSYTAHVAGLEVLRSPSPPCAELQQFHQVAVVSPWPQSFQFDEDDGDGEDEEDVDDEEDVDEDAHDSEAKVASLRGMELQGCASTQVESEITKKYQKQVRLPERRLTPCEVWFIGKEKEERDRL

SEQ ID NO: 952562 - protein, 124 aa, Homo sapiens
SLASTVLWDRECTGRPQTRNQEERFFLAETLKDCLAFHELGIFSKGLGTKGPSSGQDPRQMCRTSNFFSSGEETRLGDSAMAGQGQWHTGPTHSFLQRISMNATHLPFQGQRTGGLHIRPLYLI

SEQ ID NO: 952563 - protein, 129 aa, Homo sapiens
TVLLTETRFGSRTLSVLYGARGRAEVVRRVAACCELSNFTRSLLSPLGHQSFQFDEDDGDGEDEEDGDDEEDVDEDAHDSEAKVASLRGMELQGCASTQVESENNQRRTETGALTRKPADTMAGVVYWQ

SEQ ID NO: 952564 - protein, 75 aa, Homo sapiens
LELRVVEKRVEIESMLSVQQQVRLQLSATCLIHDVAADTSVQFTLGPSDRESLSVEETVAESRRRDTSTLRVPSS

SEQ ID NO: 952565 - protein, 120 aa, Homo sapiens
SRIRRFLTTVKLANDNADYMKMNRTEKPKATRSAASLAILGKTVQVVRQDEIDVVPESPLSDVGSEDCRYCAKKMTTNLTRQDSCQGNSPPFEQGNSEPESPMDVDNSLTIVDKDSEADE

SEQ ID NO: 952566 - protein, 102 aa, Homo sapiens
SIRRFLCGEIFFFKSTLKSNLHILPCKAYPYSQFSKTKEAMSLTCIIFLGQKKCPHGCLSRPDFKPIHPSYNFRPSGLTNIGLTKHEIQKRELKEILKPNKG

SEQ ID NO: 952567 - protein, 159 aa, Homo sapiens
  misc_feature (62)..(62): Xaa can be any naturally occurring amino acid
WVCGCLRIPESTVFAELQTRFGLSDVCSVPMTGTRGQVLEVVRSPSPRCAELQQFHQVAVVXRWHQSFQFDEDDGDGEDEEDVDDEEDVDEDAHDSEAKVASLRGMELQGCASTRVESENNQEEQKQVRLTERRLTPWEVWVLGKEKEERDRVAMKALE

SEQ ID NO: 952568 - protein, 127 aa, Homo sapiens
SEVTRVTLESTVLNIGGDFKLMEQLATWACGMCWTARASLEDKCLPMAIRSHRNISALKRDLDARAKNECYRATFRLPRDERLDVHTSCTLWTPFNNAAIPGQMFISNNYICFASKEEDACHLIIPL

SEQ ID NO: 952569 - protein, 103 aa, Homo sapiens
MSMLHSSVSDDQLARIATVHSCITVTLGDESISHSLVVVSRQLYSEHLYHTIICASPSPLLSRLFLQRLFYRQEIGKTVPSHHHALIMAENISADDTRVLGVV

SEQ ID NO: 952570 - protein, 74 aa, Homo sapiens
MHARSGAIVHGISASNSACIVCLQLVWVAAIGGPCCCTLGASWPSADAGLAAVWGIIWYCSICLGLIRWPLGVH

SEQ ID NO: 952571 - protein, 93 aa, Homo sapiens
MLERRFVMAYLRAHSASIVCLPAALFNSITLHSKQLQNDCESAAHSAGLLEEPETVCICTNIEWRCKPVLWFCDDLTTNVVPYLNIPNQYCEY

SEQ ID NO: 952572 - protein, 77 aa, Homo sapiens
MLERLQCDGYLARILASAGWSSMEERHLLLTLCRALACPRRTWCPLDKAWQELGSKQHLGLCPNPAQRHSLASKSRQ

SEQ ID NO: 952573 - protein, 36 aa, Homo sapiens
SQRPASVHGIICQHIRASAGTFPATLCGCSLSGILQ

SEQ ID NO: 952574 - protein, 114 aa, Homo sapiens
MPCSQRPPSVMAIFCQHIRAFVMFPDCGHRARQHFVSTAAWLLRQCRGHFSHTSGHTGSPGAALARQQVVSSAHGVNLGQPGTGHEAQFHLISNQSTPQAQFKHFAQGKSHSHL

SEQ ID NO: 952575 - protein, 36 aa, Homo sapiens
VALVCMAYCSTFWLALCVCQLVQCRAQLSSPTRSAS

SEQ ID NO: 952576 - protein, 44 aa, Homo sapiens
LPVCMASFASTFWLSRTFQPPWLACSSVGICSSVTKLGVNPWSI

SEQ ID NO: 952577 - protein, 57 aa, Homo sapiens
  misc_feature (46)..(46): Xaa can be any naturally occurring amino acid
RVFAAACFQFLQVNYGLHTFSQGPGSLTSGLSSQHFFPGFMDFPLXQRSFSFNRRSQ

SEQ ID NO: 952578 - protein, 58 aa, Homo sapiens
GRLTACSRGAVCWLSATFGFVLPAAIVCLQLLVCLRCLVCCRCLCVAAALCVCRRLVC

SEQ ID NO: 952579 - protein, 46 aa, Homo sapiens
KEYPYSTKMLARSMSPSQMVASTPPSSSSRNIAAASYLAAKSRYDT

SEQ ID NO: 952580 - protein, 50 aa, Homo sapiens
LRIRLLLVGFETLSESCSLVSARQGSSCVMAIGMEETLAQSITLSVLSLN

SEQ ID NO: 952581 - protein, 42 aa, Homo sapiens
MKTTDRLTSMWPADRTLTHLCHCCTVIPRAEHLSAACNLNTG

SEQ ID NO: 952582 - protein, 37 aa, Homo sapiens
ASSAGISRTNRVPDVGRLFRGSQLWFSDKISRYITRV

SEQ ID NO: 952583 - protein, 98 aa, Homo sapiens
IEISTVVGIHSEMTGKTQAESGKIHVQASLCFLRPMKCYSTHTSPSNKNAATCTQYFCPGEPIRDSAPKVFIGHTLPSMYQNSRLPKREHTFMFVQIG

SEQ ID NO: 952584 - protein, 71 aa, Homo sapiens
TPNWLFDDAKRVLEERRLTLPGLDIHDRFERGERATATRETVAGCMPVSTPTQNDVQASASSQTSSQAGWS

SEQ ID NO: 952585 - protein, 63 aa, Homo sapiens
MRRRRLIGSSMTGAEPQRALVEKVVPKDSEKSENNFIVPDISLKGNSGWFTALLLGGVIEEPI

SEQ ID NO: 952586 - protein, 36 aa, Homo sapiens
NWFFDDASFREKQDLCSEEMGTACSGTMTPVIEEPI

SEQ ID NO: 952587 - protein, 31 aa, Homo sapiens
MATQDQSHALTYTTAHGNARPITHRSDETEK

SEQ ID NO: 952588 - protein, 71 aa, Homo sapiens
NWFFDDGCHIAVPMAYTNDYRYDWTPAGKPRYAAGVSLEKAKRQTYTHTQHLTKAVFQCKIPRATRSKNQL

SEQ ID NO: 952589 - protein, 38 aa, Homo sapiens
MWCETRLEMEVEVGACSTLEAMIRNFIFILEISVMRRR

SEQ ID NO: 952590 - protein, 94 aa, Homo sapiens
LIGSSMTNGRADTDDEVLQAEVLMHNELQSGEVREFVAVAPKAEQGYYRPLKKSMRVQKMVISGVPHPLPTLKKSLVGRSERSAFGSFVIEEPI

SEQ ID NO: 952591 - protein, 96 aa, Homo sapiens
YNRARTPNCFFDDVTSVIWMPLWSIFCDLGTAGAAVNKTDPPPQKILPSLCLYASVGVDVDGNKHINKQLYGFPGSGKCHREKQSKKREPVIEEPI

SEQ ID NO: 952592 - protein, 74 aa, Homo sapiens
FLRLITGASGIALKRPKKHKKQKPKKSTPQNPSNIQNEEADPSQREEKQLAKDKEKLKNVCGLSGSFGLIVSDE

SEQ ID NO: 952593 - protein, 69 aa, Homo sapiens
SLIGSSMTSWLGGNESDQLSMRMQVQSLASLSGLRIRCAVTVMEARGYSSNLTPSLVTFICRKRHRRTN

SEQ ID NO: 952594 - protein, 66 aa, Homo sapiens
CTNRARYPLLRLITEVPIHVGDFSRKGFQSLEANLHLATPFKPSASNPSHHDSLLPCVATVMRRRR

SEQ ID NO: 952595 - protein, 50 aa, Homo sapiens
MDRLREAEEEENECAELQEESLPDSKTAVQDFSTAALQVFIIYAFITCDN

SEQ ID NO: 952596 - protein, 77 aa, Homo sapiens
MPFFGGALPFGGGNPCQKLGGSSGVQRGPITSPKGGLKFFPFFEGAPPSTPQRGGSYKKNMWGCFLKTPRGHTTLGL

SEQ ID NO: 952597 - protein, 62 aa, Homo sapiens
YNRARTPNWFFDDAASRVAGTTGSMPPHPLIFAFLFLFFLAETGFRHVCQAGLELLSSSSPH

SEQ ID NO: 952598 - protein, 30 aa, Homo sapiens
MDLSGLARLCSRTLAATSNGTTHDVIEEPI

SEQ ID NO: 952599 - protein, 57 aa, Homo sapiens
NWFFDDASTTSRQNPIYFASSHPTLFLLFAGSFSGLGCKSHDSRDVPPPTNVIEEPI

SEQ ID NO: 952600 - protein, 56 aa, Homo sapiens
NWFFDDAAGEVRDGTCILMYTVGLLTPEPHRELPVVHFFLELDRPLSGWTVIEEPI

SEQ ID NO: 952601 - protein, 53 aa, Homo sapiens
IAASMTHHSHSNAGFIHIRDLHHSSDNTGSLTHCREGQGLNLHPPGYQAGSLP

SEQ ID NO: 952602 - protein, 49 aa, Homo sapiens
MTALFHILNSDLYLIRSIYTRCNLSSSGNVKDLLTIVIYLSKCVIEEPI

SEQ ID NO: 952603 - protein, 51 aa, Homo sapiens
TTRARYPIENMMVNDGLFPKKNIQCTKSQNFAYNFNVFTNSLKPSVIEEPI

SEQ ID NO: 952604 - protein, 53 aa, Homo sapiens
KALAVVGPGSMGLIWPLLSPPTPAEFSTYLNFCRSLRFDDKPDYSYLRQLFRN

SEQ ID NO: 952605 - protein, 79 aa, Homo sapiens
  misc_feature (55)..(55): Xaa can be any naturally occurring amino acid
MTLRQGLTVSPGRRSAVAESRLTAAWTSWGSGDSLTSASQVAGTTGMCHHTRLIXVFFVETRSRHVGQAGLALLTSGDP

SEQ ID NO: 952606 - protein, 124 aa, Homo sapiens
MRQALHVGQANLERPTSGMSGDSPASDSINARITGISHCIWPLFFFFKNGVSLRCPGGNAGVLSQLMESFTSQFQSILPPQRPKQWGPRAHTTRRGQFLGISSRDTVFTTSARLGLELRISGST

SEQ ID NO: 952607 - protein, 35 aa, Homo sapiens
TANHIPAHFVHASGHMTEGKWQEIQLLKLGPTDRA

SEQ ID NO: 952608 - protein, 43 aa, Homo sapiens
SGHCSRTALTGWPLPFKVLGLDTGPQTLVFVTFSGVSLVELKH

SEQ ID NO: 952609 - protein, 43 aa, Homo sapiens
YESITEGAHAEDSELVKKLTSGHRVTRLIDRASCLLVLEFQEG

SEQ ID NO: 952610 - protein, 51 aa, Homo sapiens
KTHMTGCSKPTEGEGTGTMTQAVFVAGLEEALTPFTHIPLASIEPQDHTWT

SEQ ID NO: 952611 - protein, 44 aa, Homo sapiens
MTGETTKEGRKRTDALPVNMSKQKIQSYIKTILICLDNAKLLIP

SEQ ID NO: 952612 - protein, 33 aa, Homo sapiens
GREKRSAALTRTRQVQVHSDSCGDKPVRWSVTV

SEQ ID NO: 952613 - protein, 104 aa, Homo sapiens
MIRDHWSVVSTQEPDLTLLLFILTVFLHTVHISFSLPTELSLCQAFETFHNMTPSNPSSSVLYYISKCTDADQWDTVLLPAGPLISLPAVSFTCLVSFSVNLAC

SEQ ID NO: 952614 - protein, 31 aa, Homo sapiens
MTSEEFHRPGLGQRRQQRLYSNNKIQKYSQV

SEQ ID NO: 952615 - protein, 59 aa, Homo sapiens
RVRGRRIVVTDIPLETGRCECLDLVQPWRSYRSAEAPHMRVRPNYRSPNEVDSVVTRCY

SEQ ID NO: 952616 - protein, 74 aa, Homo sapiens
NFRLGTCHALHRVAHEMEQVREQAALIISLESWETAGAVPVAQWTLGQLTMFTCVRRVKLRRIYEPDCVKACVP

SEQ ID NO: 952617 - protein, 153 aa, Homo sapiens
WRRAGRFRSLGDGQVDFKSIFSKLAQYDYQAWATLEWECCLKDQEAGAREGAAFIRDHIIPVTDKIFDDFAGAPISTAQMQQMLGIALSPNGAAPMNTLSSAGTAGDDALRHHYLRIDGQRVHCVVGRQRPARAADPWLAADLVCLGAMCCMH

SEQ ID NO: 952618 - protein, 42 aa, Homo sapiens
SVPICRFQVNEDCALDRADTAAQITQRKWEAAREAEQRRAYL

SEQ ID NO: 952619 - protein, 64 aa, Homo sapiens
AAAVSLCGKSYSPGNHRCQSRVQKLKSLELIFEGRKHPAQEKDEVLEDSASLVLPRFSACFYPS

SEQ ID NO: 952620 - protein, 48 aa, Homo sapiens
TWPAADENGGHQKNAGKNTCHPIVQYIQWIILSFRINIPPDHELRLPE

SEQ ID NO: 952621 - protein, 41 aa, Homo sapiens
MFKKLEMCQKLRSQKEMIVKCFEGEGGHSAFQRILGKVREE

SEQ ID NO: 952622 - protein, 139 aa, Homo sapiens
ELGYRSLLRTAFDLPVLRNPRQLSHTGSWDYRCTPLCDAIFFFFKVEMGSCHMARITVVSHCTRPATCSYSSRKWRGREVKDTCQMSHSWRSREASCPSSSWLCQPDSPRGEGLPFLPGSIRVLFVPLIVFGASCSMSV

SEQ ID NO: 952623 - protein, 38 aa, Homo sapiens
RGQSELQLVAYTTAIAMWDLSHICDLHHGLQQCWIPGV

SEQ ID NO: 952624 - protein, 94 aa, Homo sapiens
NAVAAIMLHSAYQEELHRIEQFVELPGDGCQRGRCKPWEGVEPFYISHRLVNWFLVKLRHEKLRHPHGLTVDSRQLWVECPGRQEPGLVSQPVP

SEQ ID NO: 952625 - protein, 42 aa, Homo sapiens
FKLGNEFRRLPAARAKPLSSSCKTARIKDRDKHPLTIKAIHR

SEQ ID NO: 952626 - protein, 42 aa, Homo sapiens
QPVQSARSPGTIINSKWLKDLNIRQDTIKLLEENIGKTLSDI

SEQ ID NO: 952627 - protein, 38 aa, Homo sapiens
CRGAVQDTAGTPRLFSAMASKAMVTCSPVDTITSSSRG

SEQ ID NO: 952628 - protein, 35 aa, Homo sapiens
YLRWILGARVRILPNEEKGPVSVSLSTKTKVLVSV

SEQ ID NO: 952629 - protein, 42 aa, Homo sapiens
MSASTVPCSTRGFPKAKRDFTCRHRRCAAEDNAGLEVATRGR

SEQ ID NO: 952630 - protein, 60 aa, Homo sapiens
SAMDQSKQRNMEGLDWLSLLASIFLHYWMLPALEHQTPSLQLLDSWTYTRCSQTFSHRLK

SEQ ID NO: 952631 - protein, 62 aa, Homo sapiens
IDGLSTRSDLEQNEQQRIDKHVEHWRLGGSVVGLNPHQIGVSLAAQLFEGCEGWNGSAIVWW

SEQ ID NO: 952632 - protein, 50 aa, Homo sapiens
MEGLDWLSLLASIFLHYWMLPALEHQTPSLQLLDSWTYTRCSQTFSHRLK

SEQ ID NO: 952633 - protein, 47 aa, Homo sapiens
MRKMYFAGFSSDISPKDKVSYGSKLTLGKWVSLAITTKDAPAQNPLS

SEQ ID NO: 952634 - protein, 33 aa, Homo sapiens
VGLGAVVAGRRRTSGYARQIRNYVVMKRVVDRV

SEQ ID NO: 952635 - protein, 72 aa, Homo sapiens
EDSPCEAAVQLEKAGRKMWNEKAVLSLLVFIFLAYWMLPALKHRTPSSSAFGLLDLHQWFTRGSQAFHDRLK

SEQ ID NO: 952636 - protein, 67 aa, Homo sapiens
TRSGLLKPINSYNSPVLPVQKPDKSYRLVQDLRLINQIVLPIHPVVPNPYTLLSSIRSSTTLYKLFS

SEQ ID NO: 952637 - protein, 74 aa, Homo sapiens
NAEHALHAVKMRQETDSVIPMADSFKSGSDLKESWLSPTLNDDLDRYIGYATSKRFYDIVREAVPNIVISENKF

SEQ ID NO: 952638 - protein, 50 aa, Homo sapiens
MRAGRRERLMPRRKRTVLPAHPDHDQRPWVAAFGGSGRHSGSGRAAPVHG

SEQ ID NO: 952639 - protein, 42 aa, Homo sapiens
TLRGWDLTGNGHAQRGQCDYMQQEDQSGNFNYEAWASVRAES

SEQ ID NO: 952640 - protein, 47 aa, Homo sapiens
MALALPAALLMGCSSPSGIAVNRGQTVVMDPSVLTAGIFADTPSVSN

SEQ ID NO: 952641 - protein, 42 aa, Homo sapiens
MSGATSGIGGGPRPFIIQGLGSSWGLPTTQGPVGNLQFGERE

SEQ ID NO: 952642 - protein, 42 aa, Homo sapiens
SLCNRVILYLKKKERKKEKKKELTIMVEGEEDEQAYHMAKKG

SEQ ID NO: 952643 - protein, 50 aa, Homo sapiens
RAARGNAVFFSYERPDPSTRTLHGGAPVLAGEKWIATKWLRNANSTEEPA

SEQ ID NO: 952644 - protein, 38 aa, Homo sapiens
  misc_feature (7)..(7): Xaa can be any naturally occurring amino acid
  misc_feature (9)..(9): Xaa can be any naturally occurring amino acid
MVWSNFXRXLNPRLVSLNQVIKEIICLQPPKGGDLCLV

SEQ ID NO: 952645 - protein, 98 aa, Homo sapiens
SSRTDSSPASIFNRREYETTYHQQHDRDDDRKARQYPLAQGPVLHSNSSRAIQMEGSIAERVPSLINGLWDLGHAQGGKFSWGGISVAAVTAADGSST

SEQ ID NO: 952646 - protein, 108 aa, Homo sapiens
KPVDAGFGNYFPALTCIDPIQMVLRGKQFQSRLTIKSDLTRRIKLRSSIDNCVNFQIFRAKCIQVGVALLVSKCAMLAIFASLPAKPCPALHPMVDSACEFSSSRRPS

SEQ ID NO: 952647 - protein, 108 aa, Homo sapiens
MQTTGITTVSLGAADNQLGLRRRSLFRAGSSNAHHNDSLLTWSEIAFSDLYREPVLPALPSTLITRVIKTGVFKGKVVASASSATATRPMTVESTSLIAVCVDAAAEF

SEQ ID NO: 952648 - protein, 43 aa, Homo sapiens
TATGEGRVRSLASLSGLKIRLCRELLVEVADAARIHTAFSGGV

SEQ ID NO: 952649 - protein, 50 aa, Homo sapiens
VTAGARSLDVAFISVLLESAQEADLEALQHGQQALVKVLERGLGLLLVDV

SEQ ID NO: 952650 - protein, 46 aa, Homo sapiens
MVCQKRQVLCTSATCACICAISALAQVLYCRRSCPWLRRSFSVWRG

SEQ ID NO: 952651 - protein, 38 aa, Homo sapiens
SGFGCLKVSCWRSWDRGSSTGDTEYSGVGGPAYLRMAW

SEQ ID NO: 952652 - protein, 35 aa, Homo sapiens
LVWWRAFLMFDLTARGPWPDHVRPDRDGQPRISIM

SEQ ID NO: 952653 - protein, 47 aa, Homo sapiens
SCSDRNVTCPVRCRNWLAADCRFLPLSPIYRLKNSTCIADVLVSAGG

SEQ ID NO: 952654 - protein, 85 aa, Homo sapiens
PPELKPTKHDRETQLKHGQMVSLHTCSMGSIYVPAFVTLPSMKCNLQICLDVTGVMQVIDELYCLSVKICLPFSAWRWWGSLIES

SEQ ID NO: 952655 - protein, 73 aa, Homo sapiens
MVTRGTLPRVDGPWGRPYLRAVIGPGPRARRVDQHVPGRRGALLPRARVGRPARPWLTVGPVSKNRLLRMCVV

SEQ ID NO: 952656 - protein, 64 aa, Homo sapiens
MAVWKSQTTASIIACSCWRYATATSMEQFLSHICGLHLSSQHGQILSPLSRTRDQTHSFSVWRG

SEQ ID NO: 952657 - protein, 123 aa, Homo sapiens
RKGDVVIISPKAVWDGISMIVLVFVERERADIVDRFKACDPCDAEVMIGYYVTGDADFILVITAKDMEDYEAFTRRFFYENHDIKGFKTMVVMDRVKAEIRLSYRRLTGQRSANMSVSFSGGV

SEQ ID NO: 952658 - protein, 42 aa, Homo sapiens
MGDLQCLGSHESRPVPVVMTLCPQLRPPPLLICELRSLNAAS

SEQ ID NO: 952659 - protein, 73 aa, Homo sapiens
ASGISELSSAAIADRLAKAEHGWENSTKSLGHWKSGEFTHSGRLSLHELYQALRDEDQRAMRSSSCRSLNAAS

SEQ ID NO: 952660 - protein, 40 aa, Homo sapiens
RIPALRLSERMHMTPTAVLGEKKQDLFDVSCGSVHLMPLA

SEQ ID NO: 952661 - protein, 93 aa, Homo sapiens
ACLSDLRTPASGFGTGDMLDDHEKGEVIVVRSASYSHLLGVVIHTRLGVQLAAIARIPASNWESRSDVEASQEMAKRQKKTQKTESVHLMPLA

SEQ ID NO: 952662 - protein, 74 aa, Homo sapiens
MRQLVKRSSHCLNTTQNGWFKGSDQVSRQCPQSTLSHTLKTYIILTIYIFKIGVPDVAQWLTNPTRNRSLNAAS

SEQ ID NO: 952663 - protein, 53 aa, Homo sapiens
ASGIMNAPSPQNADGRLDGGHRTSQIRHVRQHSEVVVEIDGDRAISVHLMPLA

SEQ ID NO: 952664 - protein, 71 aa, Homo sapiens
MRIVNAQRKQICLASMRMLVQSLASLSGLRIQHCCELRCRSKMQFGSCIVVAVVEASSYSFNSTRSLNAAS

SEQ ID NO: 952665 - protein, 41 aa, Homo sapiens
MPLEKGGGGEGRWEEPRGGSGSHSVPTEPFSGAWSFSGGCG

SEQ ID NO: 952666 - protein, 85 aa, Homo sapiens
PHFIGEEQTLSRKKKIEIEEKQWNCHSHPNFSSHHPDQSAAINIETRPFSGGVVPRHRKRVSDNGMGPRRVPVGARGVPWINARA

SEQ ID NO: 952667 - protein, 66 aa, Homo sapiens
SVHHVIGEGLEKAKRLNNNYKNKEKQMMSLVLLPGPDIHLEDQEKWPENGSLNYNTILQLDPSPVA

SEQ ID NO: 952668 - protein, 71 aa, Homo sapiens
VVPRTEKVLTAKRLALGAPQTCCLGVSPSTGNIIGSGIFISPKGVLEHSGSVGLALFVWVLGGGIPSPVAW

SEQ ID NO: 952669 - protein, 46 aa, Homo sapiens
MSKRNWFVQTGRDRENAYPYEKLEHSAGWLHNYKDIYNEGLLRWRG

SEQ ID NO: 952670 - protein, 68 aa, Homo sapiens
GGATGTEKACILVVGLNWCSHCRKRYRGSSKKLKTELLYDPEIPLLRIYPPMKVTDLKRYMDPFSGGV

SEQ ID NO: 952671 - protein, 57 aa, Homo sapiens
MYDLSHISDLYHSSRQQQILNPLSKARDRTHVLVDASLIRYPLSHDTRSLKCRYARY

SEQ ID NO: 952672 - protein, 43 aa, Homo sapiens
LDKEADSEVFIEPAALQGLQVLAGSWAQQLQILHFHFVHLMPL

SEQ ID NO: 952673 - protein, 37 aa, Homo sapiens
MPTISTPNKQIIYSINPNHNTRAHLNNLYIRSLNAAR

SEQ ID NO: 952674 - protein, 63 aa, Homo sapiens
LLRCSEVPALRLSERHGEAIALELGTGAGAPLATSAVGCDGRRQSPDAPLCSTSVPFTLMPAS

SEQ ID NO: 952675 - protein, 102 aa, Homo sapiens
RTIPIRHDARTESARFKMRKTNANNDKFRFSLSLQLLTNHLKLHHNLMNLEQRRIGKDKGVFVLILVLFRQGVAIFDIRIFNAMEIMFIAPIRSIVRSMSKT

SEQ ID NO: 952676 - protein, 108 aa, Homo sapiens
AEFDLGCVAEEGSGNSTAYVSVDPEDLAAGVRHREAWQTVAHATLHKAFLLHGIQRGASLGENTDTPITAAAVTMARVDFNTFIQTSSFALVVSELEPHRTLIRRHRP

SEQ ID NO: 952677 - protein, 76 aa, Homo sapiens
ETDTERRRRRRRRTRTRDDDDDDDTRRRQTDTDTDTRHNDDDADHDDTDHDHDTHTHDTRDTRHNTRHTTWTHDTR

SEQ ID NO: 952678 - protein, 107 aa, Homo sapiens
NSLNPGGGGCSELRSCHCISSWVTEQDPCLKKKRGRAWGLTPCNPKHLWEAKAVELAVRSGSSQTKPGPNMGGSPVPLMVSFRRDPSKKSDLGRLCEAWATGPVGLQ

SEQ ID NO: 952679 - protein, 54 aa, Homo sapiens
WKWEFGSWPRRECKGTISAHGNHHLPGSSDSRASASQIAGIYSMCATRRASMSF

SEQ ID NO: 952680 - protein, 40 aa, Homo sapiens
WGNRVSLWWPRLKCKGAISAHRNLSISGVSSDSPCLSILG

SEQ ID NO: 952681 - protein, 57 aa, Homo sapiens
NCVVLPVFCVFWSQYCTVLWLASTSQARRNLPTVFAWHLDCAELCQTAVGYIGTRHR

SEQ ID NO: 952682 - protein, 52 aa, Homo sapiens
LPLARRTVRERIKDLPPSKDTVKEFDFNRQGISSRVRGLIYQRAGISLAYST

SEQ ID NO: 952683 - protein, 39 aa, Homo sapiens
SPFYRLTTPCNPGIRVFQLNLDSVTRYRIPLLHIVLRIS

SEQ ID NO: 952684 - protein, 105 aa, Homo sapiens
LNPSAVPACACPADRAPRAETPSRPPNIRLSPVPSWYCATDPLPTEATTTVPQIADIAAQPRKRHRTASRCCHIVPRISPQKKKEKKKKKKERAQILHCRWPTAH

SEQ ID NO: 952685 - protein, 44 aa, Homo sapiens
MVKEPMGHPYHGIRSSHKMEQTFTQATTWKNLKEIMLSEKKKRP

SEQ ID NO: 952686 - protein, 49 aa, Homo sapiens
RILSIRCSAHTDSVSVWVEGWCPGLLTNVRLLTRLLSSSVDSSCTHQSH

SEQ ID NO: 952687 - protein, 100 aa, Homo sapiens
CSNTHTVTTRSHTALTFTLTNVTNTLTHPPFTHISHSHTLTFYTHSTLYIHIHTLSHSRTHVHTCTYSHTFTQHSHIHTRSNKLTFTHIHTHAQVGIKKD

SEQ ID NO: 952688 - protein, 42 aa, Homo sapiens
RTVFIYYFDGYLKSNHMNLGSGMVAHTCNPNTWEAMVGMMKD

SEQ ID NO: 952689 - protein, 85 aa, Homo sapiens
AINHQCQLFKKKQTAAATSNDAESNHITPLIFEIDAVNLMDRGKIEGFCKTYQVNKPMNNQKQKKENPKHRKEFNNKITQLNRST

SEQ ID NO: 952690 - protein, 59 aa, Homo sapiens
SHCHYSYNRLITLREVPEEYSSWLKSSVELSGLTIGNYRWLYLARLVGKSAFPSPDFIA

SEQ ID NO: 952691 - protein, 36 aa, Homo sapiens
SSRIPPYFACLSRQIGGISLVGINGFVVGPMIAAMF

SEQ ID NO: 952692 - protein, 67 aa, Homo sapiens
MPEWPGEVGENPTLTRNRDHHLCGSRGTRSRGGGVGFRRGLRGRHRRVNVCVVCGIPSGRFRGGTVD

SEQ ID NO: 952693 - protein, 56 aa, Homo sapiens
RSQELRFGKLLLDFRGSIEMPGCPGKSLLQGVGLSWQNLCQAAVDVDNVGIQSPPT

SEQ ID NO: 952694 - protein, 80 aa, Homo sapiens
NEFARRIDAVGSKRTMQRLLDFFGIRHIAGIDTIEGKRNRAAAPQGCDALARIRSPRHTDLDDTGHGRIRKHVDRLKFLL

SEQ ID NO: 952695 - protein, 174 aa, Homo sapiens
MIDGIVSARVHVVLTDNDLLKRVISPSSASVLVRYDPWHRYQYVDPADQDPVWPTVFPGLSYDGVSVTAIKAAVSISQNPAQPRLTRFMGLWLLEDNLNQARLLFGGELLVAIGACGVLDRQQWARRQTQALYVLKEGEMSLVERWQGLIAQPLKLVREAKPRGMYRRRPACEV

SEQ ID NO: 952696 - protein, 93 aa, Homo sapiens
NCPDCVFTQFIFEKLGLLRCPEIRVNQLYVIGQGVFADKGVNRLGGRFQSKLFKQAFEGVSRRFHIFSMRADHRMHGRVVDAAANLVVVVGGR

SEQ ID NO: 952697 - protein, 37 aa, Homo sapiens
RYRATALQPGRQSETPSHQNNKRDPIGRACGPPLVPP

SEQ ID NO: 952698 - protein, 141 aa, Homo sapiens
ITSHCRGDLLTDVRLRGVGIGHRLTDLGGLHLAGKGLGGLLHLRIGDDGGKGVCVLVGFLSSRQEALGKLDEVNLVGVIGDILGECWGQIRVLRVCGDADALHKQGRNADACGHGDVGEELRCALLEVDAAANLVVVVGGR

SEQ ID NO: 952699 - protein, 150 aa, Homo sapiens
KGMELNGMGMNGMKLYGIEEKEWNAMDKKGMDWNGRECSVMDWHGINCNATDSNGVKMYGMECHETESNVIECNGMKKMDSKIIDWKGWVSKGIDSNGMESNGTEVNRIELNEWNGIDRNGMERNGMIWHGIESNGLGRRGREFSSSRRP

SEQ ID NO: 952700 - protein, 90 aa, Homo sapiens
MGVDGNGNVVMAAEKPEKIEPLHLVRLSDGSEYKVTPWHEFVLVDGSKRQAKDLQPGDELMPPKGVEGAFGTLHDPDKAYVDAKAPTPVP

SEQ ID NO: 952701 - protein, 65 aa, Homo sapiens
LVGAVQIGSKQAEDMEGLDWLSLLASIFLHYWMLPALEHQTPSLQAFGLLDLDQGLSDLQPQTKG

SEQ ID NO: 952702 - protein, 104 aa, Homo sapiens
SNMTPLLPPSEQVEHVSQFFQIHPKNPQARLIKQAVEIIRAGGVVIYPTDSSYAIGCQIGDKNAVERVRRLRDLDKNHNFALICSDLSQLGRRRGREFSSSRGR

SEQ ID NO: 952703 - protein, 67 aa, Homo sapiens
RIVPSSLNSFKRFKTKEYSQRHSIMPPSTLIPKPGRDTTKKENYRPISLMNIDAKILKVGMMKDASF

SEQ ID NO: 952704 - protein, 61 aa, Homo sapiens
MCSAALSVAEGRSPGVRSKSPKAEDLESDVRGQVASSNGERWRPEDLASLALPCSSARFDP

SEQ ID NO: 952705 - protein, 81 aa, Homo sapiens
MSPPQCNSTQDLMTEIHRNNVEYVPIAAGVVRVGAMKGAQDRKDVPPSLISSVPPEFGKSSTGGVATCVSDRPRISSSSRR

SEQ ID NO: 952706 - protein, 73 aa, Homo sapiens
RPRRLIKSLTSLPPSYFFGLCFLPAGAEIDGGEASDFIWRRHIIGCSIHFGNDNIGIFTELLSQLFGRRGREF

SEQ ID NO: 952707 - protein, 63 aa, Homo sapiens
VLHHTYPSQEKNRSPVLETEILVEKITLKGSMSSTEGPQCKFMTAPPLLSSPVGHAQVGMMKD

SEQ ID NO: 952708 - protein, 67 aa, Homo sapiens
GEAADAHVEAAQAECVADFLGVFVFFGIDGVAAPAHHDLRLDARAQGAGVAQQVEHVVGDALGTAQV

SEQ ID NO: 952709 - protein, 36 aa, Homo sapiens
VYQSIDTRHHEQLLSARVRRLCQMPRGVQRMTAYHA

SEQ ID NO: 952710 - protein, 88 aa, Homo sapiens
IELDKNVMGEATLSALDGKEKGFAVGGQHPDHPPIEHARQISFPGLHDVVHFDFQCLSLLLCRRLFLHRSSMNRTDEQQGRDTRQAGD

SEQ ID NO: 952711 - protein, 34 aa, Homo sapiens
MLPVLHHTYLSLPTSFIIPTPIEEGEKVKAEISF

SEQ ID NO: 952712 - protein, 80 aa, Homo sapiens
ETYTTHLGTWLREWLDQRDGAFLQKGEEDSGVPTPPEATSWLCGLGELLNLSGPVSPAVTWECSEQNCLRGVTVDPTPVP

SEQ ID NO: 952713 - protein, 118 aa, Homo sapiens
QKIHIRIESRYLVTGVAGSRLHCNLRHLVSRDSPALASQVAGTTGMCHYVWLFFFFFFFFGIFIKNGCPPLLGQVCLKLLTSVSLSTSASQMCGDNRAVTHRAWAHFFFFLFFLFSSF

SEQ ID NO: 952714 - protein, 36 aa, Homo sapiens
MACSKFACLSPILLPRAIKARCLRRRMVTEQVSNGK

SEQ ID NO: 952715 - protein, 88 aa, Homo sapiens
SVRVLPKEINIGVSGLERADPPSVWVGTLESTASAARLKPTCRVFRSSSFSCAGCFLTLNMELQVLQLLDPWTYTSDLPGALRPSTTD

SEQ ID NO: 952716 - protein, 60 aa, Homo sapiens
TGPRGPPSFIIPTRKKAERQRTKAAERQETGRRKRRRRKKEKNKKKKGGEGRRRKRKEAE

SEQ ID NO: 952717 - protein, 99 aa, Homo sapiens
MCIRWGHFNYVAHGVMVLQVGEDWMVSPTHYAIWIPPGVHHSSRNRGAVAYRSAYLSVGASAQMPSIPTALAVSSLLREILDELARRDIGEAVKPEHRR

SEQ ID NO: 952718 - protein, 136 aa, Homo sapiens
TGSDVGIPENLSTNLLVNHGWHGTIFELDATECDKMRYFFARTAATRHYHWTREGLTEYYSPVIVQKAISPENINELLMAANQEPEPDLFIIDIDGGDFAVMENLSAIKPRVIVVEFEKRFRERTAWFSGVDAPRI

SEQ ID NO: 952719 - protein, 53 aa, Homo sapiens
NTYLKRKKKEKKEAEEELRRTKKKEKKKEKKKERRTKKMKEREEGGELRMKVG

SEQ ID NO: 952720 - protein, 106 aa, Homo sapiens
SLRKPNVNGTAFMKYSWIALVLLLCACTSGPNHQEQLVEKRLWEYQLLTHLNHFKSYPEDARLQRLTGMVRVAFVVDAKGNLIRHKIVSHTGSDLSSGQWVDAAGI

SEQ ID NO: 952721 - protein, 113 aa, Homo sapiens
KNRARTGIAEASEKVTATIGAAAVGVRPCHGTQRDGVVGDDMDVGDALFQQQVFGFEASGHVGRRQGKRKGGGPAPGELPPLTCGLTLLAVAALLAVRAFVAAVGLFTLAYST

SEQ ID NO: 952722 - protein, 37 aa, Homo sapiens
MPPSKDTVKEFDFNARDFERVRGLIYKRAGISLAYST

SEQ ID NO: 952723 - protein, 120 aa, Homo sapiens
GPDQFQVVGVYRSRYQLQATQADFPDLARDDVLGDRNVLLEQIKHTSGQQGFDTYRMILHAHFSLFTLGRFERLGGTGTGASRWLERLGVGDVRGNARIKHVAQASVTAEGFIARVLGRR

SEQ ID NO: 952724 - protein, 70 aa, Homo sapiens
  misc_feature (1)..(1): Xaa can be any naturally occurring amino acid
XVAFKAHFFLIRLTHFLAMRLVTLVCLEMSLMLLAVIRPQPFIILVSDLPFPESSTWLPVEPLTDGVVAV

SEQ ID NO: 952725 - protein, 37 aa, Homo sapiens
MLCTGMCCKPAGERVLSSVMHEKTFPCRGTWHMSTAV

SEQ ID NO: 952726 - protein, 56 aa, Homo sapiens
CTLYADVENKRLMVTRRYGEHGGFETTFVLILDKTLPDVLSGETGSDNLLAYMHMP

SEQ ID NO: 952727 - protein, 90 aa, Homo sapiens
RPYHTYHLSPKRFELMKATSAKSQDTKSLCKNHKHLVTPNRQAESQIMNELPFSITTKRIKYLGVQLTRDVKDLFKENYKPLLKVGMMKD

SEQ ID NO: 952728 - protein, 39 aa, Homo sapiens
MSRACFGQYNITPSNDVTVRCDCEAWTVRRDWGVTVRRD

SEQ ID NO: 952729 - protein, 113 aa, Homo sapiens
SFIITSRPSSYLLFLHTYLPILTSYLHLLYHTYPSFIIPAFLYFLFFLPRATMLLTFKTSLYCFLPSKLNLLPLLILASPFLMLILLSSDLLLSNYLVLPLTFLLPSFCFFYF

SEQ ID NO: 952730 - protein, 57 aa, Homo sapiens
RLERTDLLILPAFIFLAYWMLPALKHQTPSSSAFGLLGLHQWFTRVLSVPSMHRLED

SEQ ID NO: 952731 - protein, 57 aa, Homo sapiens
SPCGGQCKACSTSAGRPSPKHSPRLCSRTNFNGWADQARANAPPVLIYPTLSTYKRL

SEQ ID NO: 952732 - protein, 56 aa, Homo sapiens
NEINYNLKYSEEVLKKYSPWLKSMCEFTGLTIGNYNGFYLAGLVGKSAFPSPDFIA

SEQ ID NO: 952733 - protein, 103 aa, Homo sapiens
MRRGWWAHASSPSYSRRLRQEDHFSPGIGGSSELGPHTCHSKPAQLRETPSQKQKQTREPPMSSKIILTAIQFLSQSLPIRHGWLICITQTHMGLSRLFTNPI

SEQ ID NO: 952734 - protein, 71 aa, Homo sapiens
GCSAFLSSRHWFSWQKLLAVGLVQLQLYREPAPVPVPGAARPTAAASALLCAVAGPLTLSLTLPSPLCTKF

SEQ ID NO: 952735 - protein, 51 aa, Homo sapiens
CCRQDLWRLEDRDGREIAVRVRGRIEANTGELLSDAALGGLGIALHSYWHV

SEQ ID NO: 952736 - protein, 59 aa, Homo sapiens
PQYGHGLFATEPFLPEHLAVVRALQSGNLEGAQAALAHHLQISQERALLRVQTIARGIE

SEQ ID NO: 952737 - protein, 50 aa, Homo sapiens
  misc_feature (45)..(45): Xaa can be any naturally occurring amino acid
GRLPVAIPIAVVRMDELTCKILTSSIVDTRLVQGGWTDGAGGLHXSSVCH

SEQ ID NO: 952738 - protein, 75 aa, Homo sapiens
PGRRSAQKSIFQRMYENAWIFRQKFAAGVGLSWRTSDQVLSAENEDVEFGRPHTRVPYVGHCAHGPCENEGHTSF

SEQ ID NO: 952739 - protein, 88 aa, Homo sapiens
HTLPGEEKKEKRKRKQATRQGEGRGRRRRKKAEEEELRRTKKKETGEGETKEDKEKGAEELKKKEEERRRRKKKHGDGRRVGMMKKEE

SEQ ID NO: 952740 - protein, 55 aa, Homo sapiens
DLDPHWHYPDILSLKKTHAPVEFHRAQWLTNPTRKHEVAGFNPVAFVMLGYWILA

SEQ ID NO: 952741 - protein, 84 aa, Homo sapiens
VTSYSHETSLCDRDNYSLANPVNVPLTTFKPDITFPIRLHNSPTPTLTNKEAFFPYDYAILILAIIPILDTFQLQSIIRCPGKS

SEQ ID NO: 952742 - protein, 92 aa, Homo sapiens
MAGNNVGYFCKNDRARYLYPFVFMRVRSLHIVHQAGLQWYNSQLTAGSNSRVQAILPHTTPEERRTSGMHHHAWVTCVFSVEIGLQEVGRQS

SEQ ID NO: 952743 - protein, 70 aa, Homo sapiens
MVTGAREIKAAVSCDCATEFSLDDSSETLSKEKKEKEKEKEKEKEKKKKKKKKKKKKKKREAVRFKFAAN

SEQ ID NO: 952744 - protein, 79 aa, Homo sapiens
SIGGHFNLTASLFFFFFFFFFFFFFFSFSFSFSFSFSFFSFDRVSLLSSRLKCSGTITAHCRLYLPGTNDLPSSGPSSS

SEQ ID NO: 952745 - protein, 89 aa, Homo sapiens
MVVHTFSPSYLSGAEVGRSLVPGRSRLQGAVIVPLLLSLDDRVRPCLTEKKEKEKEKEKEKEKKKKKKKKKKKKQKREAVRFKLPRKSK

SEQ ID NO: 952746 - protein, 50 aa, Homo sapiens
AALRETCFCKIQKLAGALVAYAYLSLLLVEAETGGSLDAKEVKAAESCDT

SEQ ID NO: 952747 - protein, 45 aa, Homo sapiens
FDWRALTVAGSGHETQVEFWSQVEGSSHLGDGWAAGPSTGDLVGL

SEQ ID NO: 952748 - protein, 64 aa, Homo sapiens
MLIDSVTLTLSETIASLVARWWSLKTSDDVGAKCSYNEEKYKAMDTLEVCMVRESRLGIRLNKH

SEQ ID NO: 952749 - protein, 53 aa, Homo sapiens
ASVIYTYSSRAHCRILNPCSNGQGYYARITSWFLVEFVNHCTMRRTSVPLLRM

SEQ ID NO: 952750 - protein, 42 aa, Homo sapiens
CVAVCALHRSCCVFGFTACAYCYQTGGLLLLFIAMGIFTFSA

SEQ ID NO: 952751 - protein, 73 aa, Homo sapiens
GSSVDAEHRTGLSRVVLDPEFILKGSFWLQFGGEMSVEGKDESEETQQEANAGMQVRDVSLDKGGRGIATRSL

SEQ ID NO: 952752 - protein, 45 aa, Homo sapiens
TKKERIERKKERETKKTERKRKKRKSNAPFQWSSGKIVFHGNPVS

SEQ ID NO: 952753 - protein, 72 aa, Homo sapiens
RSLLKSYVKLLILCGSAGTSRCLRVPRQSQSAAGDKDPEQGVWFPGPTSGLESSLPADSTGASLTRIATRSL

SEQ ID NO: 952754 - protein, 44 aa, Homo sapiens
ILVKLASEQWLMHVILALWESEAGGSPEAQEFENSLTNIARRSL

SEQ ID NO: 952755 - protein, 126 aa, Homo sapiens
ESASVYWDFFEASFGNVDFYEDIAFSTIGLKRRKISTWKFYKKRVTKLLYRKEASTLRVESTHHEEVYENSSVYFCMKQSRFKRRPQRGQNIHLEIQQKDFSKLLRQEEYSTLRVEGRYPKVVPVD

SEQ ID NO: 952756 - protein, 108 aa, Homo sapiens
PRPESVRIGQQQKFIGLGLCATECGVVGFSKTGAEIWRIKSAFSDWGVTVIATALVLVAALLHATWNTLIKFSGERLLVIACMDTVALLFVVLAVGFVSFPPLEIWVD

SEQ ID NO: 952757 - protein, 68 aa, Homo sapiens
  misc_feature (1)..(1): Xaa can be any naturally occurring amino acid
XFRRGNFLPHACPIKSYITPPYATITAHTTIESRAMGSITLVRPSISSFSTKNDRYPEPQQNSPPMFA

SEQ ID NO: 952758 - protein, 38 aa, Homo sapiens
MVGIERVLSCCDSTTLIAVSLLAGQRKHQDVTRQRDGS

SEQ ID NO: 952759 - protein, 100 aa, Homo sapiens
GSISGVSSLHTLSIPSENSRMRRQDPSSTRCSSSLCQGLGLLHRPSNLPFRPFPARTDESSIRRDPSSWDFGTVGRSFTVCRGMQLKSVPSSEKLPVRPS

SEQ ID NO: 952760 - protein, 76 aa, Homo sapiens
MVYSARELSRQPLYREPNQRSYSYVTDPDGTKIVDDITLPAAGLNTYLFEVVNDKNQIISTEVVETVRRLYIQEIM

SEQ ID NO: 952761 - protein, 75 aa, Homo sapiens
MIPGRSDWVMAGGFIFDEVVVMKLDWLPKIARDTCYDAIGENVLGLPRLQVGSSSLLTEGILFNLFLLRPHRAYL

SEQ ID NO: 952762 - protein, 35 aa, Homo sapiens
ISIVYPDADRLTSSCFDEDRYLPLNVKQLNQSSIN

SEQ ID NO: 952763 - protein, 54 aa, Homo sapiens
MRREIGEVVLAEIAANSPPQFYIGQITRFLRLEACEADDSNAAAAANSALQRML

SEQ ID NO: 952764 - protein, 45 aa, Homo sapiens
SRGSLRDLFEWSCHHIGSRKWDECEHEQWWELMNNEGREWMRECG

SEQ ID NO: 952765 - protein, 85 aa, Homo sapiens
CRAAADIAGLSHPLYGGAVTCSATLQFFDPANPITIVRVFCVLALAVRAIICLEHSEASLRKIFRKKKPPPTPDSARPAPRLLTP

SEQ ID NO: 952766 - protein, 73 aa, Homo sapiens
MGESLVLSELRIQSCHYCGSGCCCRKGLNTDLGIFTCQRHSQTHTHTGTRTHIHTHIEGVSYHQAWDHCNTVS

SEQ ID NO: 952767 - protein, 42 aa, Homo sapiens
MVVRSHLAAALTPPGYMLWTFCFICQQSSARNSTFLPTPAGS

SEQ ID NO: 952768 - protein, 53 aa, Homo sapiens
RPLDGLPDDDRVEWDGRARFTTLFPGFSQGQRVVHRTALNRDRFQGRGPSLGG

SEQ ID NO: 952769 - protein, 101 aa, Homo sapiens
SYLVLTIDPESKGFRIITLRSPLYVRGTFKSPNAGVKAGPLIARGAVAAALATLVTPAAALLALISPAEGEANQCRAILSQMKKCRQGDAPRRMARGVEGE

SEQ ID NO: 952770 - protein, 49 aa, Homo sapiens
VLSTATVCVQPDYQYVRIVWYRHHTLPAYIFCMIQSVVERSLLYAPPIN

SEQ ID NO: 952771 - protein, 51 aa, Homo sapiens
NFQGAVLNADSQRESHKLANFPVKVHLSLCANLASDLLPISGDFLIATRSL

SEQ ID NO: 952772 - protein, 35 aa, Homo sapiens
VCNGAPITSGSRKGMNVSRAKAGLRTRGESGMREV

SEQ ID NO: 952773 - protein, 75 aa, Homo sapiens
VLKGVAGLSLCRNHDKGTDLTPQVEETERQQRTHATTPATEPFQNTEEPYENIRNEGQNTDPKLNPKDDGIVYAS

SEQ ID NO: 952774 - protein, 70 aa, Homo sapiens
MYKYFIKDYPDGVIIEAPLDQDDWGAWQEVHSTVQEIQVVGDALTETNTKRIAKAVNEKSCNCLLLKVNQ

SEQ ID NO: 952775 - protein, 38 aa, Homo sapiens
EGQQYEYYLLSCHSTHSLCHPGTSTFEHRARLGPIYGL

SEQ ID NO: 952776 - protein, 54 aa, Homo sapiens
MVYLVRGSRVRLMWYFEGGGKKCMQVEEALGIEVGVTGSSYKRLLGIDVAALIT

SEQ ID NO: 952777 - protein, 55 aa, Homo sapiens
SDGCDCKEGRVTNLSNLSKTFPVLALNAPIPGNPSVPGKLEQLITLTCLGAAAEA

SEQ ID NO: 952778 - protein, 42 aa, Homo sapiens
VTLRILVAAQPINTVDQGRTTALVGDVRFRRMVLGKMSGRGL

SEQ ID NO: 952779 - protein, 69 aa, Homo sapiens
RDRCGLAMSRCKNFYEAKVQALIHRPVSMKQSRKLRQDERQAGGRRERRLRPGRPSSKLKANIQYIAPC

SEQ ID NO: 952780 - protein, 57 aa, Homo sapiens
GEYDGEKLPPDMSHAPEASQTISSATRAYPGSRPSLPPGIGRRIPPHSHPLSVLRFY

SEQ ID NO: 952781 - protein, 52 aa, Homo sapiens
SSEPIIPSISNALNVISIYSRTDESSSCTAEQAARKFEKLKPGSQIISRKLN

SEQ ID NO: 952782 - protein, 64 aa, Homo sapiens
IRGSIDGEKAPPRYGHTLPRAVSRPIFIWRTRAIPPCSRPSASHQWIVRRIPPPSSSFDVLRLY

SEQ ID NO: 952783 - protein, 72 aa, Homo sapiens
CHAARKLLTLAEHSGSHVSSHNAGITVMSHRTWPKLLSTSLLHKLTAKPDAIGRVLGQDGAHYGLTLSHPLC

SEQ ID NO: 952784 - protein, 66 aa, Homo sapiens
THNQGKYDGEKAPPDMVHTLPEGRLTTHLHLATSRIPPRSRPSAPHQGIGRRISPPSSSIDVAALL

SEQ ID NO: 952785 - protein, 100 aa, Homo sapiens
MPRRCHRTIPPPQSTSISDTHSTDPDSIRSCPQIPPAPYYYHFHIPPYQDESTPYSIFPRGKINSRIPGLHFPSRFPVHSRPLLRLSLKVRAAIDVAALL

SEQ ID NO: 952786 - protein, 71 aa, Homo sapiens
EDPRKQRSHINKEEDRKRVSSMSAGVGELGVRFESCVWRYGVSDPSSLIIRSASEWWVGLDRGPVVSWMRE

SEQ ID NO: 952787 - protein, 182 aa, Homo sapiens
MSKVLSSVTPEKRYETMDTHCQNEMSTGTGQSNTVQNILEPFYVLDVSEGFSVLPVIAGTLGQVKPYSSVEKDQHRIALDLISEANHFPKETLEFGLRHVEDESAMLQRPKSDKLWSIIILDVIEPSGLIQQEIMEKAAISRCLLQSGGKIFPQYVLMLGSLVESQTLLEENAVHGKNVLWI

SEQ ID NO: 952788 - protein, 84 aa, Homo sapiens
SCSNPYGDDCVGRGRDVAAGTLDTEMCSPGIPGHLLLRGGTDWMSGVPYRRGYGRNMEVVLRQVREGSEETGPDTRSGVSVGVE

SEQ ID NO: 952789 - protein, 104 aa, Homo sapiens
LNLTLPWNGAIRSSDLFHTESCAKTPVLPHCTQACKYRQKPPATDRGFSIRSLDTPSSIYQSSPVLENLHTATLKAAFFCTMLDKVQCCSLEMGFITRLTEAHC

SEQ ID NO: 952790 - protein, 67 aa, Homo sapiens
LSCVGVYTYQYFVKATGRLMDDASIAAAGCSKNRPLLVVTEMLGRAMQVFIVNSSFDHGKKLTFSIF

SEQ ID NO: 952791 - protein, 42 aa, Homo sapiens
MRPRYKDAEPERSSLEAKDGSCNELEIEPLHSSLSDRASPYL

SEQ ID NO: 952792 - protein, 109 aa, Homo sapiens
  misc_feature (7)..(7): Xaa can be any naturally occurring amino acid
SDAAPLXVMACPPRPCSTAFDSPPFFSLSPSFLSLSLSLSLFVCVCVCVCVCVCVLCFLRSFSLVSGVVCSLHLSELLDCHAVPYTPHPAWPSVVTLRVEREGTPTRVD

SEQ ID NO: 952793 - protein, 53 aa, Homo sapiens
MLVKLVSNSRPQVIHQPRPLKVVGLQAWATVPGHQVRTENQSGKLTLELRLLR

SEQ ID NO: 952794 - protein, 133 aa, Homo sapiens
DAAHARLRLARNRATGRLLIVRAGSAAHVSGAHQAHHPFGLACGAGVFQGLAQGHLVWVASAVWCSISVPVLPAQPAQQPVKPQGVFAVVSVKGGTGAFSSDMEQVHPQGVVCIPFRARLGRIPKRGILSQSH

SEQ ID NO: 952795 - protein, 144 aa, Homo sapiens
LHNTTDHSAHPLPLNIGRADGCFGNGRLKVYRVGTVLVNVGMQVHEHSKVSGSASLCPTSFERAHLFAGGAITKCLPGVCVAVPSSHLSLISDPSGPPTLCLCVCVCVLCVCTAVCAVQRVCVAEQCVCVYVHMCVSLSLSCSK

SEQ ID NO: 952796 - protein, 97 aa, Homo sapiens
QALWWHQPAAAASVHHKPKSSMQQGWLVARPSKPCVSVSSTGTARLACLCCSSKPASKPRVLGNTQASQLTQATPAPCNTAGLLTSSVSGGTCSSDI

SEQ ID NO: 952797 - protein, 38 aa, Homo sapiens
MPAYLLHLSLPHTIGPLTPGTVAVYHSILTPHNSAASK

SEQ ID NO: 952798 - protein, 32 aa, Homo sapiens
MAYWKEWGWVRGSTSERGDTSVGVVEGSASAV

SEQ ID NO: 952799 - protein, 74 aa, Homo sapiens
ASNQQLVKLWASTQASFPHSHALHNSGRSSQQASLSCRSMHTVPFVFTSSTWASILRQAIITTHTASPCGILHP

SEQ ID NO: 952800 - protein, 41 aa, Homo sapiens
  misc_feature (18)..(18): Xaa can be any naturally occurring amino acid
TNPSVSSSVNMLHPWHHXSGPSFNVHRAQFTCARGYSSCTA

SEQ ID NO: 952801 - protein, 55 aa, Homo sapiens
  misc_feature (14)..(14): Xaa can be any naturally occurring amino acid
  misc_feature (42)..(42): Xaa can be any naturally occurring amino acid
LTAGLCKQGAVPPXPFHHAFSSFLQASPSQCGTRCSPIQHPXFLGPAQGGIRLSS

SEQ ID NO: 952802 - protein, 39 aa, Homo sapiens
  misc_feature (30)..(30): Xaa can be any naturally occurring amino acid
KTPSGGSGAAEGVRCQAITRCNVCRLPRQXECKIDILSL

SEQ ID NO: 952803 - protein, 68 aa, Homo sapiens
SPEQLATREILPPRRGDYRFGFKARSTTSTIETGKILWDIAVSGLRHISSLNEDRTCGNIEQQIRQGD

SEQ ID NO: 952804 - protein, 37 aa, Homo sapiens
RIAPSVDYGRDLENLLRCSQEAAVGFEAHSRVLSRAL

SEQ ID NO: 952805 - protein, 35 aa, Homo sapiens
PASLSTFSQTLDYERDATLKSLNEHIENLLSPDGS

SEQ ID NO: 952806 - protein, 52 aa, Homo sapiens
ALLSSYAQLVFQHSESNRKPSTLPQPALVDDSDLENPGGDTMQYILNPICTW

SEQ ID NO: 952807 - protein, 80 aa, Homo sapiens
RNTLLNTQESLAVNSHIIGYITRVASAFRTVYQVGGVTAYFRGVQARVIYQIPSTAIAWSVYEFFKYLITKRQEEWRAGK

SEQ ID NO: 952808 - protein, 59 aa, Homo sapiens
LFRRYGYSGAFYYGKVAYNLVTASRNNKGDIRRFAMTAIESDLLQLAYPPRLDLGPQLT

SEQ ID NO: 952809 - protein, 55 aa, Homo sapiens
SGRTMSTGRCVALCHGQLCEAGKVWAPDLRVRAEDVLHVIDELLSDQVGERVNTR

SEQ ID NO: 952810 - protein, 48 aa, Homo sapiens
MTKQGYLTPPKYTSSPAMDANQDEVYELPGKEVRRLIIKLIKENASKS

SEQ ID NO: 952811 - protein, 189 aa, Homo sapiens
GSRFARLFLSLAVVNCAALCPSDTTLRSGEDEQVDHSTMRSAFRGYFLRPSLGRNGLKKQSSSLRRLMVRLQLVEAITSFTEDRTKEMDSSRKLTKRALKCSSEGFSKGGSFLSQHSMKGMSPRMLGSRYTMPQRETVAGEATARSCTSNIMVIASVSLMISPELRQQLLVVIQHRVHVLNPDGIHLAI

SEQ ID NO: 952812 - protein, 68 aa, Homo sapiens
EDHRQNTLKEYYIGHSDSDFRSECSAGNGIPILPNGNKSEIWNTYGPQPFGEGILHLYIMDSSLSSDI

SEQ ID NO: 952813 - protein, 49 aa, Homo sapiens
TGVRHCTHSGRTFIFEKIPFDPAENVPIISGPLFFTYRECSHFDEEKTL

SEQ ID NO: 952814 - protein, 44 aa, Homo sapiens
VFPLKATFIQSSHLADYLPVYIVDISKENPSGIKPTYLSSLRIT

SEQ ID NO: 952815 - protein, 50 aa, Homo sapiens
VFNLAGIACMYVPTGVRATAKAHSDSSSGKNCWKESTAGTCHIQSAWRSG

SEQ ID NO: 952816 - protein, 37 aa, Homo sapiens
MIQFELVPLMELVDTLMEANRIKGCTDNLTLTVARSE

SEQ ID NO: 952817 - protein, 42 aa, Homo sapiens
MINRARYRSMALSSSDECPLPRSASGHGSGVQSWQRLARCGQ

SEQ ID NO: 952818 - protein, 50 aa, Homo sapiens
DPDTQVSFPLNRLHSIQSSHLADYLACVDLVYPKKNPSGIKPTYLSSCVS

SEQ ID NO: 952819 - protein, 120 aa, Homo sapiens
MINLSSYLSWSWYAVQSRRAFFTNRRPHVAPCTPTSRGMCCGSLLGIVRLPNSSPAAFPIPGLNIYPQNGEGVKQTWDRRSECPGKTNYLAKPLAKTLGREAQNGTVWVFFWASLGKGLI

SEQ ID NO: 952820 - protein, 52 aa, Homo sapiens
PLQVLFAMLTPTLAAVTLMQLLAIDFHDPCVNFFPKKEKAPSGNGGSCVSLP

SEQ ID NO: 952821 - protein, 41 aa, Homo sapiens
  misc_feature (31)..(31): Xaa can be any naturally occurring amino acid
PRQFDGISASTFGFIATLRFMWSAISVQHRXFQHIAWQSHP

SEQ ID NO: 952822 - protein, 65 aa, Homo sapiens
TTGPAPSGLATTATLSLMSHFRPARMSSRALPDPGHIPSAGLCCSQKATRARIPLSQDAAAFHFR

SEQ ID NO: 952823 - protein, 46 aa, Homo sapiens
STSVLSSSFVSRHTSHTYYTQKCKVPSLVNKIILTERLGFLFWLFG

SEQ ID NO: 952824 - protein, 77 aa, Homo sapiens
TPDRPCDSEQGFITEDLKCCIWWRCRAIVAPGTHMSHAHCCWTTRLLWIRQVQTQMKGCEVTGGNYNDRTLIGKQTP

SEQ ID NO: 952825 - protein, 35 aa, Homo sapiens
PYVLPPKNWKRSPDEVRWLMGFNRDVIHRRSRSSS

SEQ ID NO: 952826 - protein, 67 aa, Homo sapiens
MYGYRVQGPSQWLVSQVFLQLDVSFNEAHLCNEDNGHPLVESTVLIYGEYLVHVPKGLYDKMARYMT

SEQ ID NO: 952827 - protein, 61 aa, Homo sapiens
SPVLSEVRNYYAQKTIALVMERASTVSSFPDVELQTEALRGLAVVSMVNAGKDTNGSRYMQ

SEQ ID NO: 952828 - protein, 44 aa, Homo sapiens
TPPPPPPPPPPRRTYYNCSPLPFVIVFSQNMITGHLRLTVLLLT

SEQ ID NO: 952829 - protein, 82 aa, Homo sapiens
FRGRSGTAHSASVLPVPEGMRMAALNLDGADSDLALWPGSHQPTSGNVSVYCWPYSVRTLAPHCDQLATDSTFSPDQPGTCK

SEQ ID NO: 952830 - protein, 51 aa, Homo sapiens
RVYQGAVTLIITYLIRYERSSVSLGRSLSPRCETFLHICTHAFFKAILFMC

SEQ ID NO: 952831 - protein, 35 aa, Homo sapiens
KVSFTGDCAHGMKIMEMSAKGINLLPGTGGKSPLI

SEQ ID NO: 952832 - protein, 35 aa, Homo sapiens
MHGYSMFGQAVLNTPNLSVISTVLVTPKVVVTTGD

SEQ ID NO: 952833 - protein, 53 aa, Homo sapiens
LKYCNRAGMDTADLEQAVEVMLLCAQALQRYDYAGRDCGAFEGKRPCVIFLSS

SEQ ID NO: 952834 - protein, 53 aa, Homo sapiens
VLLRDCLKFTIELGWILQTYSKHVEVMCFVPKRCNEYDDAGEIAGDLRGKDPV

SEQ ID NO: 952835 - protein, 76 aa, Homo sapiens
NGQEREKNTRHQQVRARWDRRTRGCSGSPWSTLYNGHRCFPTYETPKAKSTFSPMQKTHSSIAPRRRGVSQSGNSQ

SEQ ID NO: 952836 - protein, 103 aa, Homo sapiens
SRNFDTLKEFPGIPRISQFVCEIRRRYCKCIKTLWNTHQGMLLDLYWLSNVVELEVETGKTKKAVWSIMIESSSSEVFDVIYRPLEKQLKHASSFSRVVLEDG

SEQ ID NO: 952837 - protein, 77 aa, Homo sapiens
DAFLEQYTIDQNSYQQNLDDLYHDAFKKRQCISFYNVIDGGQAIPALVLNAVCNQSEYHIRCTVLRGFPYLPPIYKG

SEQ ID NO: 952838 - protein, 132 aa, Homo sapiens
  misc_feature (2)..(2): Xaa can be any naturally occurring amino acid
MXTVNMKKPKTQIWETMWGESVLGATVAWTPPGSKGDIQGPPPGPGQSPVPEGAPSGSVPCGQNLGSYICLAQAEDLAALVGALRVAHLQGHGGVVTLVGSQLGIIDVPPGPGSRHAHLAGALVRAHLEADG

SEQ ID NO: 952839 - protein, 45 aa, Homo sapiens
MLLHTLAAVELRQLLVIDSQDPGVKVLSANREGSLREWWQLRFTS

SEQ ID NO: 952840 - protein, 106 aa, Homo sapiens
NKYSAAQTDDELRKCAVVQQSEGGSHIIQRMYGCDLGPDGRLLRGHDQLAYDGKDYIALNEDLRSWTAADTAAQITQRKWEAAREAEQLRAYLEGTCVEWLRRYLE

SEQ ID NO: 952841 - protein, 36 aa, Homo sapiens
AARYYGVREMNEPTDDYDVPCGVCIVVVRLTSRAFR

SEQ ID NO: 952842 - protein, 58 aa, Homo sapiens
QHRYYRKGKDENYTKHNIARTNPYTFCINELTRNNFARRAKAKTPVNLRMYVRTAIRV

SEQ ID NO: 952843 - protein, 100 aa, Homo sapiens
GACHAWATQSWVDQTLRNPKECSGGDVQNFVVERQHASVLPCSCDPSGQCGSSPQMLQVFQSQGPGLKVVTASTNARWLQQLVDAIGQATLKGQVPLHNA

SEQ ID NO: 952844 - protein, 39 aa, Homo sapiens
RHIRISSYPVMMQTITDRGLECISHRVWEVVSGNIYAAG

SEQ ID NO: 952845 - protein, 41 aa, Homo sapiens
SSIDITTSEIDLPSEEAGTTQQDEETLWSFNSLMQTVISML

SEQ ID NO: 952846 - protein, 69 aa, Homo sapiens
LQASLGTAGLMGTADHLTGNGVWEGVDGHQRRRYENTEYLNSEGVWIHDRVSIGKSSYSQEGYLDLVRG

SEQ ID NO: 952847 - protein, 134 aa, Homo sapiens
PSHYIIRSFALSSNHWGIFTLAVECALTYLLFIPIDEVINLNLAYYAAVLLDTELIIFIGPCVNLLSSRQRIQCNKNCFASLTDVLGIPFVYPDSCTPDRSVSHRDCKRNRGHNGKEPYRISQEIGNLMKEIET

SEQ ID NO: 952848 - protein, 43 aa, Homo sapiens
MICCIRCDHTFPNQVQFHCVRNLFAIPYIVAVSIDISLLYFRL

SEQ ID NO: 952849 - protein, 133 aa, Homo sapiens
TSCMVTVHTVPSLVSTASPAVTLVIRKASKRDKHATFFSLRLLYYMDLKDDRPYHHLRAASQDLMSNLSQDDLDQSSCGIRHSGSIANHARSAVVRCCVTDGPVLNLGVPPKSVSGQPSSASTEEGKGSTSTI

SEQ ID NO: 952850 - protein, 88 aa, Homo sapiens
MLAVLRTERRCITVVTASTKARWLQQLVDAIGQATLKGQVSLHNASIILTHHELTGPRSAAGERDGGPMHGSKWAQVGQVRCQGLDIA

SEQ ID NO: 952851 - protein, 69 aa, Homo sapiens
ADTISSVPSGVYSQREWSAALARKWVQGDHMKIAHQFFQLVGGSASECDTIPGRQCMASCFFLLKQYDD

SEQ ID NO: 952852 - protein, 33 aa, Homo sapiens
LDDPQELVKGHAYSVTGAKQVNYRGQVVMPDPD

SEQ ID NO: 952853 - protein, 77 aa, Homo sapiens
SHYIITNLNRDEFVLKSNSYNRLYTAVTYCISRSSYSFSYSLSLIYFAFSYRGGVFQSLNSQVPLPCLRVSYASYAI

SEQ ID NO: 952854 - protein, 55 aa, Homo sapiens
IFTVTIYTKRVYTLITRWRSFEIVSAYLQTASIRRRLQIQSDVWMSSETINWPYR

SEQ ID NO: 952855 - protein, 153 aa, Homo sapiens
MAPWLIQCGDLVVVQLMRNRTLRRPVKLSLWMQLMRLFRSIRVLNASPNPGIMPLRMDSSWLAVKCRSLTERWAPRIAPVFNFLTPILLHHDLIFFKFCKFIKHPSGLQDGTLIVIQSQFCRARENPPEDLGELQAGALHHVGLTAALVGTDH

SEQ ID NO: 952856 - protein, 45 aa, Homo sapiens
SRTSTNHWNVIAAWIWGPAENNSGLGWTILNKITAHGSVLSSGVD

SEQ ID NO: 952857 - protein, 38 aa, Homo sapiens
EERWVPALMYKQSSEFEAGKKTSVTLHVHTNIAGSQFL

SEQ ID NO: 952858 - protein, 112 aa, Homo sapiens
VLEDPVSSHHWTRFTCTETLEGLLHYQYITHYCSFFVILRWSFTLVAQAGVQWHDLGSLQPLPPGFKRFSCLSLPNSWDYRHAPPHPANFVFLIEMGFLHASGDPSLKVIDL

SEQ ID NO: 952859 - protein, 102 aa, Homo sapiens
GLMLNGVVDFPGVFQLHIPMYFRDAILKREVVQHRVYAVRLWRTAFLSLPGTNVSSSIDSGYAWPLLSLGFGRMQSHWKVLNLVPGTEYLALLLAQQLQTHN

SEQ ID NO: 952860 - protein, 46 aa, Homo sapiens
GWVWWLTLYSTPVGGCRGRITCRPEFTHSLGNLDPVSLEKSSYSGV

SEQ ID NO: 952861 - protein, 58 aa, Homo sapiens
MVWSRHQQQDIADNFEAFVLEPAIVRIKCHVPPWCVMVLQNVENVCGIKASIVTQLAW

SEQ ID NO: 952862 - protein, 48 aa, Homo sapiens
IQLMWSEMRKRGFEVVYMTEPIDLRTVCSSIKEFDGEEPGLLFTKAGS

SEQ ID NO: 952863 - protein, 47 aa, Homo sapiens
YKLMGYSDLPNSDSRSAGDYSALATAPSPCTVISNGSSNGSLVKTSA

SEQ ID NO: 952864 - protein, 38 aa, Homo sapiens
SSSAHIYICLETKPGNNYDILSTAESMTNSVYYPQTFQ

SEQ ID NO: 952865 - protein, 36 aa, Homo sapiens
MTSYGRLYFILKHSSTGTYCKPYDGHSLLHHLELYH

SEQ ID NO: 952866 - protein, 46 aa, Homo sapiens
MAATPLIHHTTTEACYGGARYGRYGGARYGSARYGGARYGCYGGAR

SEQ ID NO: 952867 - protein, 31 aa, Homo sapiens
MATVSKSPSHDVGPIGGVFDTVAMLRGEMFV

SEQ ID NO: 952868 - protein, 138 aa, Homo sapiens
MLPSHSYYLASVALYSTLGFILLAVECAQTYLLFIPVDNMLNLNSAYYAACARIQNTSSFIGPCVNIVSTNCESKCNKTCFAFAYDVLGIPFVYPEFMYSRRSDSQEIARDTEVITVNSRRISQEIGNLMKEIETLVV

SEQ ID NO: 952869 - protein, 46 aa, Homo sapiens
MGFSEREGSIYLNDFARVVSRDHEAVNGILHFIDRVLLPPEALHWE

SEQ ID NO: 952870 - protein, 110 aa, Homo sapiens
MLHVPTHIDGSSNRSTVHLLFSLLLLHNLLLSLSPAPFQMDIAETAKIFFNSDGYNGHAVRSLTTAVLLLEYTAVTKSCELKFTEYPNHIFANASEMSKSVKLIKISAIY

SEQ ID NO: 952871 - protein, 51 aa, Homo sapiens
AERLVLLLIRGLGICTFNVWESFPFSTGSEASLDRCHFHICAGAVRKLKKN

SEQ ID NO: 952872 - protein, 61 aa, Homo sapiens
LEYPPMLLSGSEVLATSEGRGSRPQDPFLIADQWPALPLKLDSVFEDPLSKKLFFFSGPPS

SEQ ID NO: 952873 - protein, 34 aa, Homo sapiens
AHSGLLAVFSLALHENIMPYFYDLGFYICMVTCE

SEQ ID NO: 952874 - protein, 44 aa, Homo sapiens
ARHYMKTTDNHNNNKRQEEYTKMTDQKTINKITRVCPHLSKITL

SEQ ID NO: 952875 - protein, 63 aa, Homo sapiens
GEKYHANRHDRKAGVTTLISDKIDFKTKDTKKDKEGHYLMIKGSIQGEDVTIVNIYAPNTGHV

SEQ ID NO: 952876 - protein, 41 aa, Homo sapiens
DFEQSGRRFAFSRFQLDFSFELPAFGVPRYFPFTASIRIHI

SEQ ID NO: 952877 - protein, 55 aa, Homo sapiens
MLLLLQRAAAQADCLDNDGAVPLEALNPAALHCSESSPEPCLPVFPALQPLYPPA

SEQ ID NO: 952878 - protein, 57 aa, Homo sapiens
TWKEGRLKEVLTKTIYCVNYAHCLGDGINSEAQTPALPKYSLETVLAMCFKMVGYRA

SEQ ID NO: 952879 - protein, 62 aa, Homo sapiens
MLVLVGCSLSRSSRHTLFSSRSLGPHCVLVWVFEASAYVGIPLCRSHPAAEMHPTDYEAGVP

SEQ ID NO: 952880 - protein, 96 aa, Homo sapiens
YHQIVNIEIRLIIYSLQSKMEKFYTVSKNKTGSCCDSGHELLIAKCRLKLKKVGKTTRPCRYDLNQIPYDYTVEVRNRFKALDLIECLMNYGWRFV

SEQ ID NO: 952881 - protein, 56 aa, Homo sapiens
PVAYARATQVQDPNLIVTYTIAHGNTKIHNPLSKARDQTCILINQLNMGLLTTEHD

SEQ ID NO: 952882 - protein, 41 aa, Homo sapiens
MSCNDQTSRHELSPSALFLLLLVLISMYSRLAQSWCISRCW

SEQ ID NO: 952883 - protein, 68 aa, Homo sapiens
RLFFPVVRLFHDVSGCVHEPGVSPVRSVELELQSGRSCPRVLSLRVERCGLLTTAGGRKISPSSDLSN

SEQ ID NO: 952884 - protein, 49 aa, Homo sapiens
SSSKGIVPWEKRMHEERTPAGAMMKWNEVTDAGEVHHMYCRHGRKVNTL

SEQ ID NO: 952885 - protein, 37 aa, Homo sapiens
MSAAAGVRGVRRVVTEASLRRAVTDVLGGARYGGARY

SEQ ID NO: 952886 - protein, 34 aa, Homo sapiens
VTQRPSGGGGGNIMKREYRAVTAALLRTCRRARY

SEQ ID NO: 952887 - protein, 69 aa, Homo sapiens
SVRAPPNTFRNERLLTSASVTRLRNERLLTAPPYERQRNWRSQGRVKRRCEEASLRKGVTEEGISSIAV

SEQ ID NO: 952888 - protein, 97 aa, Homo sapiens
  misc_feature (42)..(42): Xaa can be any naturally occurring amino acid
LRNDHNEALRNSASITPSVTRLRNTPPYTLLTPTTTTTDGRXRYPYRAPVVVVVVMLLIGARYGGARYGGAVTEALVTEALVTEGLTGGARLQEALS

SEQ ID NO: 952889 - protein, 54 aa, Homo sapiens
  misc_feature (24)..(24): Xaa can be any naturally occurring amino acid
LRSTSDGLPRCAYDAFRNERLRNXAASVTSAPVWCRQGVLGGCYGGVVTEALVT

SEQ ID NO: 952890 - protein, 70 aa, Homo sapiens
RLTILGRSLGGARYGRYGGAREALVTEGVRHERLRNERLRNSASVTTPPNERFRNSPTKKRKIAIPRRSL

SEQ ID NO: 952891 - protein, 131 aa, Homo sapiens
RTATPNVLTRPDCYKLGARYGGAREALVTEALVTEALVRRSLRTLRRRSLRKRCYGGAVTEALLRKRCYGSAVTEALLRRCEDVTEALVTEGCNGGARYGCTEALVTEGYGGSVRRRSLRKRCYGSAVTEV

SEQ ID NO: 952892 - protein, 53 aa, Homo sapiens
  misc_feature (38)..(38): Xaa can be any naturally occurring amino acid
YQRLRNVLTPPYERLRNERFRNERLRNSASYTPRMVYXRDQRFFFSLVALCYG

SEQ ID NO: 952893 - protein, 127 aa, Homo sapiens
MHLRSTLRSPVTTLRNDASVTSYRRLRNDASVTTLRNTPRLHKLRWRSRNERQLQLVESGAVTEGVRRARYAVRRRRYGRAPNWWSLGVLGSVVTEALLRRRSLRKRSLRRRSLRKLLRRARYGGYR

SEQ ID NO: 952894 - protein, 118 aa, Homo sapiens
MTHIWFYTPLLLYVTLVAKDHDDDLLLCSLGFVTLLLEQLHTLKRLSAICAIDQDVAISAREAVSGQFGPISEPPGVIETHLLSHAPVCLNGAHVDILLRLDHFRTHYMVPIQKLLQD

SEQ ID NO: 952895 - protein, 36 aa, Homo sapiens
YNEDVVSVQLGVQRYHPYVHWCSSVCVPLGPIPREP

SEQ ID NO: 952896 - protein, 52 aa, Homo sapiens
PEGRVTDATETNITRRWRTKTDTITGYQDVMPFQPMARIQSREPSSQMSEAK

SEQ ID NO: 952897 - protein, 196 aa, Homo sapiens
RDCRCYHFHGNDGQDTPVLRELPEPVVATFHPHLPTTAGIAAIVLRLGGARDATVAPVYSYYAQNEVVATDNLDYRHHSYKDMRQLMKVVNEECPNITRTYSLGKSSRGLKIYAMKISDNPREHELGKTEYRYNAGIHGNEIARAESCSQLLMQYLCREYRDGNPRVRSLVRDKRIHLVPSLNPDGYNVAAQHGSE

SEQ ID NO: 952898 - protein, 124 aa, Homo sapiens
VLSCIYLLAPGKLKAAETLEECALRSGDRALTLSCQTKVAELLGESDGRRTSQEGPGDSVKFEGGEDASVAVEWSGDGSGTLPEEWLFGKIRDVLRKSSELLVRKLQGTEPRPPSSNMKRAASF

SEQ ID NO: 952899 - protein, 71 aa, Homo sapiens
WGSGPDLRPGPGSHVHECISYTCHVPARPLWSPCFICTWATEDDNPDSVSVTTSERREVLRDRSPLGCQLD

SEQ ID NO: 952900 - protein, 39 aa, Homo sapiens
RIELRYRFVGAGRRAGSVSLRGRCLCVGVYSRGPCGMCP

SEQ ID NO: 952901 - protein, 43 aa, Homo sapiens
DLRIPFVAVVVRVVVGRADVTEREGRVPQVVRKAATLPTTRAH

SEQ ID NO: 952902 - protein, 85 aa, Homo sapiens
MDRSERIRTYNWPENRITDHRIGYKANNLDSVWNGDMHDLFKALQDQERAERLEAEGYTGVAYTYGQALRRGVQRLRAAGVPSPE

SEQ ID NO: 952903 - protein, 106 aa, Homo sapiens
WVVARGVWAGKNRVSLLSPSLECTGVISAHCSLHLPGSSYSPASASRVAGIIGAHYHTWLVFVFLVEMGFRRVGRAGLELLTSSDLPASASQSAGITGVSCAAPTT

SEQ ID NO: 952904 - protein, 108 aa, Homo sapiens
KDPLGWGAWGVGGEEQSLALSPSLECTGVISAHCSLHLPGSSYSPASASRVAGIIGAHYHTWLVFVFLVEMGFRRVGRAGLELLTSSDLPASASQSAGITGVSCAAPT

SEQ ID NO: 952905 - protein, 68 aa, Homo sapiens
MDSHHYLVEDFSEEYQKPRPRLADGLKVREAAGLKDGLRCRSVKGSKVSTDTVETQINLKMSSNTRSF

SEQ ID NO: 952906 - protein, 50 aa, Homo sapiens
MRYEMDHLAAALALMQVSRAEFLMTSSIRELLRLHSSSLPAPWTGCLVPF

SEQ ID NO: 952907 - protein, 145 aa, Homo sapiens
SDLELPGSLVLYRCLATRELYLRVELSDVQNPASAYTENVLHFKAQGHGAKEDNVYEFHLEFLDLVTPEPVYTLTQRPGTTLQYRRTESVVGEHSQSRKSDHCFRLLHFDRWLDESDAAMELRAKDDERLNQIRQESEGSPETLT

SEQ ID NO: 952908 - protein, 37 aa, Homo sapiens
TKNKEMRRNISVILDSPITLSVEKERDKEVSDDEAEE

SEQ ID NO: 952909 - protein, 67 aa, Homo sapiens
EHLTDMVSLLVVQCKEKGLDPEILKTSELMTIGKVGKVIETKDDAMLYKGNGDKAQIEQRIQEIIEQ

SEQ ID NO: 952910 - protein, 125 aa, Homo sapiens
MPTQYTEVARKLVILESGLERAERAGWALRRQHVPKLEKDLHPVTTNLKVTGGQGEKYSQKDDRYEEEIKVLTDKLKEAETRAELAARSVTKIGETAFDDLTEKVGHAKEEHLKYGHRLLASDFN

SEQ ID NO: 952911 - protein, 71 aa, Homo sapiens
MPGPVLGSFQSRLGLGRSCAQACVGPDFGVGPGPCWVLGVWCTRRAGWGLFCLGTLGNAEDWLVAAHLSKG

SEQ ID NO: 952912 - protein, 55 aa, Homo sapiens
SGVLAHAGTGLGRFPYRLGWATAVRQACVGHGLWSGDLEPCWVLRRLGTDGVAGL

SEQ ID NO: 952913 - protein, 33 aa, Homo sapiens
ETKVKKEEEELKKEFIEKEAKLHSEIKETGSRN

SEQ ID NO: 952914 - protein, 46 aa, Homo sapiens
PQNLGAVVVPSGEEQRYTCHVQHEGLPEPLTLRWGGKGGSCSQAAS

SEQ ID NO: 952915 - protein, 143 aa, Homo sapiens
CAWIRESPTGICRAIAPCLPATLELSKGGLAICLPSCGFSSQAIVTLATVAPYLQRGVARQHLGAKSQINLGNGCAGEGRWFRFENRSSFPSCTPSTARSSPTLERFAGDVIEVHKAGDVLEQQNPEYLDDKANTVGRSMIAQ

SEQ ID NO: 952916 - protein, 75 aa, Homo sapiens
RCRYPKPKPIRVRPNSPHFCEDREVRKLRKKSWFMRFKEISCLCNIKVQSEAASTSGEAAASHPEDLANARHGGS

SEQ ID NO: 952917 - protein, 77 aa, Homo sapiens
LLLRIPHSFGPPRGPAYTWKSGAHLHLISRLASWASEENRTSRTPWAIFPWDTISTWATWMLLVTPGLQGMPGERGG

SEQ ID NO: 952918 - protein, 93 aa, Homo sapiens
MGADHEQPRVTRVAVLELLVVSRTRQRQSRRNLVASAQTVQVRAHVAVCSNGSEVGMVPTVDRVQIGGPYAYVPAIVARSTLLYDVAMIVWLH

SEQ ID NO: 952919 - protein, 178 aa, Homo sapiens
MSAMQMKLARAQAVDMLDRFTETVSVLVPVWRQNTLALITTKNISPELIASATKAHQELMQQIVQQSGHPQSLKAGRTTLNNQLQTSNNVARTRSAGHSGLRRPWPERPHRRHGSCASLADRIQPSDPATVAEYGRDVGAITREFTADSLLEQVRNSDLDDAGDQLTQVVNVARNLNV

SEQ ID NO: 952920 - protein, 43 aa, Homo sapiens
QQDQQTQTSPRSPDGSSRTREHTTAPGAPRAPSLPGLPIFTSE

SEQ ID NO: 952921 - protein, 36 aa, Homo sapiens
NPASVQSGIKQLHARITHQMDHNRSECAQGISRSHK

SEQ ID NO: 952922 - protein, 114 aa, Homo sapiens
TSEYADELRRLRCSELRLCHYTPAWAQRVKLRLKKKKKTQFTQTAPTLHIITTSHSSPIMALLLQSQVLYSLFLNLSQQPPEGKYKFPSLFKQASAQVQAHFPLGPHVWHCTTL

SEQ ID NO: 952923 - protein, 34 aa, Homo sapiens
TKTVGRASSLFSGSQSRSAAAQAIATLRSHVHQV

SEQ ID NO: 952924 - protein, 66 aa, Homo sapiens
RPWWPWLRRVAHGLGGGGGADWLPAPRRTRARCLFLVVILWLSSSFDLPVCAFGLAVVFPLHTGYA

SEQ ID NO: 952925 - protein, 56 aa, Homo sapiens
SGPVLQASSQTLGTRQTSFTWDDSFTSAILWVPAGPVRTTFTSADPTGSPWCKHPV

SEQ ID NO: 952926 - protein, 98 aa, Homo sapiens
FGARRRLRNVSQLSCRAQVRQRAVIQRRALQALVIQGETARLDDVQPHAETGGEADGGADVLGNTRLKKCDTHNKRTNHKGSRGFAANRKDLRTWPAR

SEQ ID NO: 952927 - protein, 39 aa, Homo sapiens
AAAVEEEFRGERSQSREPEKPEAGEERVESEQRDGLEPH

SEQ ID NO: 952928 - protein, 128 aa, Homo sapiens
ADLPVVRGTCEQARLRLLCMLDEFAVVELKTNLGFLRRIIGHPAFAAAELDTGFIPRYQDELLPVPGELSDEFWQAAGQAFMQTQPLNDARSPWTDTHGFRAGLPAEVSLHLSCSGQDRLVTLHPGLS

SEQ ID NO: 952929 - protein, 35 aa, Homo sapiens
SFMLMLRGNRSTRRLSFINYSASYTIKVYHNHHPT

SEQ ID NO: 952930 - protein, 57 aa, Homo sapiens
AYSLCERECACVNLCVTMCKGPLMQECCGDQRICVRVHYREGWLAVVQQELGVRTML

SEQ ID NO: 952931 - protein, 108 aa, Homo sapiens
MLRGTSNSPQKGESICPLRYRMVSNCFFTVDADGQEKQREPTRFTVDTDREKSMSFVKLNGDCTYITEAEADTLTVAGAKDGRKHLKATDGDFGDLIDLDHHCLKSAA

SEQ ID NO: 952932 - protein, 42 aa, Homo sapiens
FGSRTMIGETVKKFFDSADLEPIAIGRFFILKYKIYLKKKYF

SEQ ID NO: 952933 - protein, 34 aa, Homo sapiens
YPEAMFALNYIDIRSLQRRLEIARSNVALHQETL

SEQ ID NO: 952934 - protein, 35 aa, Homo sapiens
  misc_feature (28)..(28): Xaa can be any naturally occurring amino acid
  misc_feature (31)..(31): Xaa can be any naturally occurring amino acid
MAESSLLHANALIIFICLFPLHIGEAIXRIXSLLR

SEQ ID NO: 952935 - protein, 40 aa, Homo sapiens
GIETELSLLLRVYTLPLDNCTAFIFACVVTHLTLRAQSKQ

SEQ ID NO: 952936 - protein, 57 aa, Homo sapiens
MARGKGLRGVNPYEWQGHSKRLGDGDMKLEARSSTQTRHPKPLARLGSREHRGRDHE

SEQ ID NO: 952937 - protein, 35 aa, Homo sapiens
VRRIGSREMGEEGEGFSNIAQVTALHTKTSDTSYP

SEQ ID NO: 952938 - protein, 35 aa, Homo sapiens
LVSGLHVCLCDERHLSYMCHRYFISFARRYFLSVA

SEQ ID NO: 952939 - protein, 35 aa, Homo sapiens
TVEREEDEKDKRKDETEKERRQDGESLIAPPLKLS

SEQ ID NO: 952940 - protein, 36 aa, Homo sapiens
LKDRSITCARHRQVSGHQASIGPAMCVCCEKRPLEP

SEQ ID NO: 952941 - protein, 40 aa, Homo sapiens
DVAGRQAQHTARAGFAAQWWEGRGGAALQVWVWQGSWKRG

SEQ ID NO: 952942 - protein, 124 aa, Homo sapiens
TGVPFRVVVGDRGLKEGKLEFRGRRDESRHCRGTGRCAGYVESASRAVMELTRMRRYLSASPIAAVLCAGALLAGTQAAWAGAQKEEYLADSVRSALSAAVADSRPLRPVFANNDEQLGYLRWR

SEQ ID NO: 952943 - protein, 97 aa, Homo sapiens
RRIGSSVLQGGRRSPGRSTIDSDNYKAIIELGMNFGIAARDSSGAVFEIAAESAPTVALPQYLYGHFLINHRAFERGLSYVIRALAIDPLQAENHVG

SEQ ID NO: 952944 - protein, 83 aa, Homo sapiens
VATYARDYAVWSLTQKMATIVPVITITAPQSRPSLYWAARLYEDVYRAEELADRNEVASPAFMPGTFEALRAVTVRASSPEDQ

SEQ ID NO: 952945 - protein, 36 aa, Homo sapiens
MGIIGKGRNRGKALSNHSTGLSVAHKNERRYYLPCT

SEQ ID NO: 952946 - protein, 33 aa, Homo sapiens
RRKEVRVRRIGSGEDNRLEEDNVLEEAILPILR

SEQ ID NO: 952947 - protein, 55 aa, Homo sapiens
RIPIAEEARSTWLILLSTLLISGSFNLSTLYHKQQEHLVKLSSCPRQASMQGTET

SEQ ID NO: 952948 - protein, 104 aa, Homo sapiens
MGNPRADIKDKTSKSGSEEARYTPKAPAGLRRYADSAFTRRNARGMRRAMTRTITVAALHIPLTGPVQPNIDAVTALVEEAASKGAQVILPPELFEGPYYCQVG

SEQ ID NO: 952949 - protein, 39 aa, Homo sapiens
ALLSTSTATSPYPHTSYYRNHQPTHSIDSPWSYALDRKH

SEQ ID NO: 952950 - protein, 54 aa, Homo sapiens
TYCAEDHLIGQKITYRAEDHLIGQKITIIGQKITYCAEDHLIGQKITYRARRSP

SEQ ID NO: 952951 - protein, 37 aa, Homo sapiens
MPDSSKYSGFFTLYSLRGQLELKPPERDRGRRERAPG

SEQ ID NO: 952952 - protein, 36 aa, Homo sapiens
PFKSPGCNLCYAALKINQFNCSRLSRKESPGGRLAL

SEQ ID NO: 952953 - protein, 44 aa, Homo sapiens
LILVVEMYGGCYWLAGLGLELSCLCSCPSTVEAVKPLTTLNHLW

SEQ ID NO: 952954 - protein, 43 aa, Homo sapiens
LTVLVVELCLRCTLAQVCQDARCFLLPLFLLSLFFLVLFIAST

SEQ ID NO: 952955 - protein, 38 aa, Homo sapiens
HSTDFKGNLALMLTHLKLENFKIWRSTGPTPLAPITLI

SEQ ID NO: 952956 - protein, 52 aa, Homo sapiens
CWHQDTSGHSVSLPFHSPAPGGAQLPFSTDSPVLTCPLLCLYHALHDKVIFC

SEQ ID NO: 952957 - protein, 93 aa, Homo sapiens
EKESKGDIRKARETEPGSSSKATLIGVKADLKTGYTIQCGCFNNSILGSLLFKPDLSCTLGLRRFCTVTQAGVLRYNHKLTAASTSQARVDPS

SEQ ID NO: 952958 - protein, 167 aa, Homo sapiens
GDSTGSQKITYRAQKITIYTNKLENPEEMDKFLDTYTLPRLNQEEVESLNRPITSSEIEAVINSLPTKKSPGPDRFTAEFYQRYKEELVPFLLKLFQTEKEGILPNSFYEASIILIPKPGRHTTKKENFRPISLMNIYAKDMNRHFSKEDIYVAKKHMKKKLIITGH

SEQ ID NO: 952959 - protein, 41 aa, Homo sapiens
ARYQKITHHNLGNKKRDDDNELMTSGPRMRVRDSTLHLKEV

SEQ ID NO: 952960 - protein, 36 aa, Homo sapiens
LISALIIPLAGRLFHFLPLPQLPSSPLSPGGDLLHD

SEQ ID NO: 952961 - protein, 42 aa, Homo sapiens
WYLVILSCIICTKLALKFRLPFQLLLSSTNINLYTIRAPFRS

SEQ ID NO: 952962 - protein, 44 aa, Homo sapiens
MLLSEVGDCGAALLLIELCWSQPRVYLCADGACTEVWLFLAYVL

SEQ ID NO: 952963 - protein, 207 aa, Homo sapiens
LNDTTARSTGNLGPACCRQALQTSFRYGQMNSPFEYEKVRYVYTEARKLQIAEYTPCRRWLASAYIPRRHHFRHVNRNCSTAALAIIPVLTSRHRRLLKGFSIATLAASISDSFATLGPLSSSAVSNPRKVANAFNRQRAPAARQAGTQFQQLIPQVQPEQSIVPMGTAISRQGYAERDKRISRSDMHPPNQLSASSKGGDVHSARS

SEQ ID NO: 952964 - protein, 68 aa, Homo sapiens
VIFCCVEPSPYSYILLVVWHERWSGPHVLSRNIVNFVFRLASQTSYASSFHCFHNPLWARRTSRYCYV

SEQ ID NO: 952965 - protein, 56 aa, Homo sapiens
GPNITYRAEDHFIVQKITDSAEDHLVQKITYRAEDPPYCAEDHLVQKITYRAEDQP

SEQ ID NO: 952966 - protein, 42 aa, Homo sapiens
LGSGRMLFKFTMFTVFFKYQDLVLSCKLECSGQSYLTAASTT

SEQ ID NO: 952967 - protein, 38 aa, Homo sapiens
YLRDVDFLQRRTTPTCLSEVMTPRIELVVAPAGVTLKE

SEQ ID NO: 952968 - protein, 55 aa, Homo sapiens
ALQFCTSYSSDQITFSTLLPLTKPYSSLKAQPKCHLLRDPANILCSPPSEFSTTS

SEQ ID NO: 952969 - protein, 51 aa, Homo sapiens
AGTITHSWGTLYVRQRNAGIQSDVSQMIPSWLLRSGAAKVIFCTIGDLLHD

SEQ ID NO: 952970 - protein, 52 aa, Homo sapiens
VLTITLSCRRSPLALEVLRIALNQPPAFMVEIKELLSGSPERYTLCRREVIF

SEQ ID NO: 952971 - protein, 68 aa, Homo sapiens
GYPHFRASVSVQSSELPSQSEFFVISKHFTATPRIPPTSTVLKTDSINCNFTVEPQTFTTDLPVHLRS

SEQ ID NO: 952972 - protein, 45 aa, Homo sapiens
MVDIWLRHCGETERATERKWAPEMKVITQILGRCHHQKLIYSDVF

SEQ ID NO: 952973 - protein, 36 aa, Homo sapiens
  misc_feature (1)..(1): Xaa can be any naturally occurring amino acid
XHRAASITQRASKHFCEAYRCIFVPRMQVHRSCHAI

SEQ ID NO: 952974 - protein, 35 aa, Homo sapiens
GALTHNLNDKPVTNDWWGWSTYLLLKDYKPNQSFA

SEQ ID NO: 952975 - protein, 132 aa, Homo sapiens
QLSRGSRADSVVDRDSDHRPAGSGRMLGVAQAWLSKSFGWYYMVVIAAYLLFAPRDGAVKGMYSLAASLAGQLGDSWIAAWQVAPDEDRYALVAVDQGAVLPGCDQVGSAEDTTRKVAQMLGSSISFKDVYL

SEQ ID NO: 952976 - protein, 199 aa, Homo sapiens
SRTEADPELVEPYLIVCHGLQHRLDHASAGLAALWLIDQVGSETTTQEQVLEALTPIGLSSPSSSRTGPHRATSDGQRARVHRLLVEGIDVIAVIALAIRIGGIQGSNVPDSFLVVPPARKLPCESICSGSLAMAVVAQRETAIQSSVEGKLGTRVRRRVRVCMGHSVTDCQENLPSGPSWKRRGGAYDQCMEDIYMHV

SEQ ID NO: 952977 - protein, 105 aa, Homo sapiens
LFTFCIRLQLQTRIGATDPRSNGAGTLTCQLPILEVAQGHVLKIFLSINGTECLHQPVAGAHEGVGAGDAIPPRPAADACGMRFFRACCLRPPHAQTCISAGLMR

SEQ ID NO: 952978 - protein, 56 aa, Homo sapiens
  misc_feature (55)..(55): Xaa can be any naturally occurring amino acid
MPPMQCASISFFLQRLSSLVPPQVVFGHASNSRATSQRAHVFIKQQGSTLRGILXS

SEQ ID NO: 952979 - protein, 58 aa, Homo sapiens
LRTTADAVTTKVSLHSSWRFPPFFSHACMGGGGAAIGVPTLNMIIGLTTPSSHPESFA

SEQ ID NO: 952980 - protein, 53 aa, Homo sapiens
MALIHLHVRSPCLLCGERNARRSAASGCAASMARRLRRSLKISIFRRRLCAYC

SEQ ID NO: 952981 - protein, 39 aa, Homo sapiens
MRSRRRTGYSFLGLLSQGAVVSKSVHRKEYAALIEAYLP

SEQ ID NO: 952982 - protein, 64 aa, Homo sapiens
QCTFETAPVDTSTPVTNFSEARSSPTTGEGTSMPTSTPSEGSTRFTSMPVSTMPVVTPEASTLS

SEQ ID NO: 952983 - protein, 58 aa, Homo sapiens
SCRFTVSLSAVDVCATPLAENTSSAAYDSDVCATPPRIEHVFRRIQDAVTCFQCLFLR

SEQ ID NO: 952984 - protein, 45 aa, Homo sapiens
MALSHSIAAEARMGVRLFNRTTRSVSLSEVGAEFVETITPAAAPS

SEQ ID NO: 952985 - protein, 38 aa, Homo sapiens
CIVIERGEALANSRVIGVVIAGLLGGWQVGLGAEIDRL

SEQ ID NO: 952986 - protein, 104 aa, Homo sapiens
ANARYGLNTGDVNTVVQAALSGSQATTILEGDRQFALTVRLAPEYRATIDAVRNIRVAYTNANGGNSYIPLSALADITLDTGASYIYHEKNARYIPVKFSAPPP

SEQ ID NO: 952987 - protein, 104 aa, Homo sapiens
ESARHIFSPPVEITSQSWSTAWDSACTGLYCEGLKVGFMNSVKITIPSVIASILIASVNGYALANWRFKGSEVFFSILLFGAFIPYQVMLYPLVIITRNLGPSA

SEQ ID NO: 952988 - protein, 62 aa, Homo sapiens
DRVRHLDLLVCVTEKMSAASFIDRQKSGTIKLPLCGSHILLAILKCTSLLRKGCRLVKQSRM

SEQ ID NO: 952989 - protein, 53 aa, Homo sapiens
SRGSPHSFGLPHSDHLLTLTHSDHPLHPILIPTTCSTLTHSDHLLHPNSFRSP

SEQ ID NO: 952990 - protein, 52 aa, Homo sapiens
CALVGVRRTSRWHNGPACLCDRGILVNPQLQTADPHISAIRRMLPVGRTTLL

SEQ ID NO: 952991 - protein, 43 aa, Homo sapiens
RECRGYYFYAAAARRALNAWDARASDSYVDQGDAQTLDRMNSA

SEQ ID NO: 952992 - protein, 121 aa, Homo sapiens
MTIDIICGFLKERCFRGSSYPVWVVQSGKGWLLSARDNTPQKADTDADLIDTSYSPLTNFQDHINRQGEYIQEIRRQLNTCQRERALTSEVRGPGSTHEQPTCAQIRTEYTPTREGGGVRC

SEQ ID NO: 952993 - protein, 182 aa, Homo sapiens
MHRQCQEKASGRRCGSRLLSQHSGKLQRADHLRSGAQDQPAQHGETTSLIKMQKLAGHGGVRLHSQLMGRLRQKNRLNPGSGGRSEPRSHYCTPAWMTIAKLCLKKKKKKGQGGEGGDISFFWSTLAGGAPQLRYGGCSVYGGCPCVWGALVLQWCTGGSVQPAGRSNRGCSGPGSAPRGAG

SEQ ID NO: 952994 - protein, 74 aa, Homo sapiens
MVVSGTRGSGEEGVCLMGTGYSLQDEEFGDGCTTICVVVLCWRQGLIPLPRLECSGVMITAHCNLKLLGSSNPP

SEQ ID NO: 952995 - protein, 144 aa, Homo sapiens
RASRCGPHGANVTGYLGCCFSRQKPLWLVVPLPKFCSGLLVLFRPLSLTGCAQLVLTGVDPMLAKGKPAMEQRELCEQASMGSGHCTQPGMPAVAVQAAPGASTGTAVAGPGVPQATSTAGTGECGGTWKLRDTRNRRAPKRVS

SEQ ID NO: 952996 - protein, 72 aa, Homo sapiens
LSRIPKSVTQDVGPVVRGKPFPRCSTKTLGGEFPQELRFRQRSCSHRSSDRIRRRPIRAEHQASGQSYVLMD

SEQ ID NO: 952997 - protein, 35 aa, Homo sapiens
MSRTPRGFLPASAGGTTGPARQIACRKLDSFIDTS

SEQ ID NO: 952998 - protein, 62 aa, Homo sapiens
TTDHIHIDGTGIQIRDDEPVKPRNESARIGACVFIIKGFNCIVAHGASTGRLYGRFSKISCN

SEQ ID NO: 952999 - protein, 33 aa, Homo sapiens
VRLLILQEELRLWSGQVGPIVPVASWLLWDAVD

SEQ ID NO: 953000 - protein, 34 aa, Homo sapiens
MSLLGVLLDLDVGGSALALAVSTAQPGQFHKLVH

SEQ ID NO: 953001 - protein, 48 aa, Homo sapiens
MTITVGIPISMLSCVVRISQAFRHKWTGIIPTRTILVPGHSTTGDPHR

SEQ ID NO: 953002 - protein, 41 aa, Homo sapiens
DQEEYRDLTTWRNIIEEVVRKITIEQPQQGVPGRDDQSKRR

SEQ ID NO: 953003 - protein, 115 aa, Homo sapiens
NRGHWEADAGAQRIKQHVKLAQTSHTGTMKVSAAALAVILFATDLCAPASASPYSSDSITLLNCQYCPNIAPSTIKESHYTSGTCSNPTIVYVTRKHRQVCAKPEKKWVREYINS

SEQ ID NO: 953004 - protein, 39 aa, Homo sapiens
VTRLTFRWSLLTRRTAGRLPTVDSVWVTLGRVRLLTRRG

SEQ ID NO: 953005 - protein, 46 aa, Homo sapiens
DTARIREDVARYIDVRRDGGIPAVYPNNVFLSTVGQRCHRDCVLKL

SEQ ID NO: 953006 - protein, 109 aa, Homo sapiens
MPSIPPKDTNPPPRMVFITRRVPLLATSSLFTPCTLAGLIYLQFLESAILPSLLLCVWCYFRRKHLLLVNTFSDLKTQSRCNFQKALTQPTTSSDQYHFSGFLFSHSSL

SEQ ID NO: 953007 - protein, 94 aa, Homo sapiens
TKLDKADVMNWMCKRKIKDFFSIRLDHNMFLTHEETDGSITSGYSHVLHPSPNTLPLGLLAAELAPPPRRVVYNRSSGLVSNAPGVQIRVPTLS

SEQ ID NO: 953008 - protein, 35 aa, Homo sapiens
AHNSEDQLKFVLTVESTVAKCTLVAVPLASSWYRA

SEQ ID NO: 953009 - protein, 174 aa, Homo sapiens
VTFVLNYSITDTQATLLTNYPTTLLTYSVKITQSYSTNLLRTPTLLTYSTNLPPKTTLLTYYANLLYSPIPLTYHPTLLTYSTNLKLKPTPLIYHPKLLYYPSLLAYQPNLLYYANYPTTLLTYSANRSPKATLLTYYSKPTLLTYSTNLPPKTTLLTYYAKLLYSSIPLTYHP

SEQ ID NO: 953010 - protein, 31 aa, Homo sapiens
MCFIRQLIFHFTSKHHLASKPAPDTAMRCWK

SEQ ID NO: 953011 - protein, 95 aa, Homo sapiens
MAFARDIAAADIASLLLHLIAPVSILSVLPKSHATFLRSSCPFQHLDSSFQHLIPPSTISLLLPTSHSPYHISSRLPTSHLPSNISYPLPKSHSP

SEQ ID NO: 953012 - protein, 77 aa, Homo sapiens
MSVPSTSHPSFQYLMPPSNISLLRSKHPITTHSQPPITTHSQPPITTHSQAPITAQLASSHHRPSPRRASQPPIAGA

SEQ ID NO: 953013 - protein, 105 aa, Homo sapiens
VLIPTSRFLLPTSHDSSNISSPIHHLMSPSNISSAPSNISSPLPTSHHSIPTSTSTTTISCLHSTLSLPPLQHLMDNIPTSHQTFQHLIHTYHHLMPHTKHIIEP

SEQ ID NO: 953014 - protein, 148 aa, Homo sapiens
GSSSSLRSNVSSPFQDLMARANISFLLPTSHDFFQHLIAFQHLMSPSNISSLLPTSHPPFQHLITPSNISSPSHISCLHPTSHCPLPPSHGTFQNLITPSNISSLLPTSHAPSNISLHLPTSHDSIPTSHSSNQKLITPSNIIIAPSK

SEQ ID NO: 953015 - protein, 60 aa, Homo sapiens
  misc_feature (2)..(2): Xaa can be any naturally occurring amino acid
  misc_feature (4)..(4): Xaa can be any naturally occurring amino acid
EXHXLEDVEEYVGTEEVSLERAEYSVVNEKKGYSLCRVMLPKKYASAVPSKHNGMRGRPG

SEQ ID NO: 953016 - protein, 193 aa, Homo sapiens
WTVCMHLATSHASFQASHRSFQTSHCPFQRLIRSFQHLIAPSNISCGPSNISWRVQHRMAPSNIAERPSNFSSRPSNFSSLPPTSHRASQHLMPPSNFSCPVPTSHGAFQHLIAPSNISSRLPTSHPSFQHLIAPSNISSLLPTSHHSFQHLITPSNISWLLPTSHGSFQHLMAPSNISSLLPTSHPTFQHLI

SEQ ID NO: 953017 - protein, 151 aa, Homo sapiens
ASETQSEQSNFAVDSPEALEFWMKLKIIYVTAPDKRRRELVAAEGEYEMTCILGDGETEAWRGYINVLRLDSPVVSGLCGGGGRGPPALPSNTMGHCSQSPLTTSCCSSNPSSRAASFGTPLHPPPNSLNIFFIHTRIMHHALRTVNMSVH

SEQ ID NO: 953018 - protein, 102 aa, Homo sapiens
ENVTAKLQATEGHSPRPAEAHLLPGTAAGTTGRTIFLNYQHSTTRTSTPAPWVLTSDDGGPRRLFVTTPDPARPLTPGHVDAPLPPTRHNCERGLLYDVDPA

SEQ ID NO: 953019 - protein, 131 aa, Homo sapiens
PSHPINIQHLMDPSNLSSLLPTSHRTIPTSHSAFHIIIAQSNISSPLPTSHRSFHHLIPPSNISLLLPTSHSSFQHLHLSFHNISCQLPTSHAPSKHLIAPSNIILAHITLLQLYFSLRPADVGKGSAACL

SEQ ID NO: 953020 - protein, 55 aa, Homo sapiens
HTNPNISCQVGVSKGTCSMLARRMQHVGTAQHMQHVGKARMQPCMRQGVHAAELG

SEQ ID NO: 953021 - protein, 69 aa, Homo sapiens
RRYQDSEQSKQQAQMVSGGGVKRQGDEKDEHGRSFTIEFREEAYHSRSKSSNCLLEEEATDEEEDQNSL

SEQ ID NO: 953022 - protein, 48 aa, Homo sapiens
  misc_feature (15)..(15): Xaa can be any naturally occurring amino acid
MSYYTLEASYTSDRXTQISLGLKPKHRSLKLLRSPMCGKVENYWPRDS

SEQ ID NO: 953023 - protein, 166 aa, Homo sapiens
  misc_feature (68)..(68): Xaa can be any naturally occurring amino acid
GKALLHVGATIWRSLSVLPALGYSRHMGFGELKSPAGLMVLKINLADKSYIEGYVPSQADVAVFEAVXSPPAADLCHAPRWYNHIKSYEKEKASLPGVKKALGKYGPADVEDTTGSGATDSKDDDDIDLFGSDDEEESEEAKRLREERLAQYESKKAKKPALVAKS

SEQ ID NO: 953024 - protein, 53 aa, Homo sapiens
GCPEDPRQSSTIRFRETIHYYKNITERPPPGFSHLLPGPFHKHMGNYGELTKN

SEQ ID NO: 953025 - protein, 33 aa, Homo sapiens
VNGLRWMARKLCRLGGEEPLLLDDEGFQLSVWS

SEQ ID NO: 953026 - protein, 70 aa, Homo sapiens
RSVSRAQTSSICPVITAGSALNAVLPAFILQIHAGRRHPTDTRGLLLTLDLVSTKVMHCKNVNVLGNTPT

SEQ ID NO: 953027 - protein, 40 aa, Homo sapiens
CSRGSPGKALHCYSVGKIECVSAETTEDCIAKIIELEKLM

SEQ ID NO: 953028 - protein, 48 aa, Homo sapiens
STREDKMLWLHCDLRYKQTTVVGNGRAPGQSHVQLSNGIDLNLLSVKR

SEQ ID NO: 953029 - protein, 36 aa, Homo sapiens
YSKIPASLPIDQVLLSCAGSEWSAHGNAVHLMMMSA

SEQ ID NO: 953030 - protein, 39 aa, Homo sapiens
NCATVRKIFSECYSGVLNPYARVLVGALKTTVLQSTGYC

SEQ ID NO: 953031 - protein, 50 aa, Homo sapiens
MVRATSHSPHHDFRQIGSSHSCFNAQPPIIKAVYTSCATKLVKIALAHTF

SEQ ID NO: 953032 - protein, 38 aa, Homo sapiens
SVEHYNWTWSHHEVKSDLETRERSEGWIGVIARSFRNG

SEQ ID NO: 953033 - protein, 33 aa, Homo sapiens
MLVCLRLLLLSIYGVLTRVTPRKAIDIIAQTIP

SEQ ID NO: 953034 - protein, 39 aa, Homo sapiens
VILSMIIALIVTARSNNKTKHIAEENLIDAAFQNLKLRS

SEQ ID NO: 953035 - protein, 35 aa, Homo sapiens
CRGIGSQHEEVDAAVQRSNLLTTTGEFPITIEYTR

SEQ ID NO: 953036 - protein, 52 aa, Homo sapiens
APCCYIIGGSVLPTQGRMWRSALQHLVCVVLSVGKLFIFHHGLQVVAAVQGT

SEQ ID NO: 953037 - protein, 94 aa, Homo sapiens
LLSHVDILYKPTKHMGNTHTYYTAHELESWAQLYAILIRAELGQPGNLLGNDHIYKVLVTAHAFVINFFIVLPIIIGGLGQLTSTPNNRRPRYG

SEQ ID NO: 953038 - protein, 46 aa, Homo sapiens
TLRSGYLLPDTEAYGDRIERLLRLSLNIDPDAEVEEEPEKNEETRK

SEQ ID NO: 953039 - protein, 47 aa, Homo sapiens
SVTDEEVDELYREAPMTKRGISITSMFTLHPETVEPTDKDDVKELIA

SEQ ID NO: 953040 - protein, 45 aa, Homo sapiens
TCTGMSLEGTLTVPGTGAGGTLTVPGTLSWGDTHHAGHRELGVTS

SEQ ID NO: 953041 - protein, 53 aa, Homo sapiens
DSIGSQSNLHGASSECPPAPGAVVSAPQLPGAVTVSVPPAPGARHGECPPSSR

SEQ ID NO: 953042 - protein, 47 aa, Homo sapiens
VLTCTVGVGVGVTVVVVVMGVRFVLCVPVGVGVGVTVGVVMMGVVVG

SEQ ID NO: 953043 - protein, 46 aa, Homo sapiens
HTTLVSTPALVVPHRAPGVRHLHRWVLGLGSPVVVVLMGVDSGVCV

SEQ ID NO: 953044 - protein, 55 aa, Homo sapiens
KCSTVVMLLCPPGKDLNAPDLYIPRMAFITYVLLAVDGTQAQHLGGEPLLNAGYR

SEQ ID NO: 953045 - protein, 40 aa, Homo sapiens
AVTVSVPQLPVPGAVSVPPAPGARGECPPAPGARGECPPS

SEQ ID NO: 953046 - protein, 47 aa, Homo sapiens
MQITEISLRRRFCETTATRIAVVSPAMEPPSSSDLCMRKATASPGNT

SEQ ID NO: 953047 - protein, 67 aa, Homo sapiens
PSGMLRHIVHEGRRTRSLRPTWLFQAARTRSERAFDTEIAELVKAGNAEVHWVRTLSQPGTAKAGRD

SEQ ID NO: 953048 - protein, 44 aa, Homo sapiens
AGGVVLKYIARAKARGLGVIFITHNVHHAYPVADRFTILKRGTS

SEQ ID NO: 953049 - protein, 70 aa, Homo sapiens
PVRFRSTFRDWAGDFTDFPRELIEAALAHTIGNAVERAYRRSDAFAKRQTLMQAWAGFCLKTAAPLKPAA

SEQ ID NO: 953050 - protein, 87 aa, Homo sapiens
FASCSVTRRVIPIVRSPLARRPSVQRRLGSGQNPEASDAFWAACCDLSTSGDTFSLRPAGSSSFFAAEAGAETAPPVSARTSAINCG

SEQ ID NO: 953051 - protein, 106 aa, Homo sapiens
MPHSLRHGAQSGVGQVDLIAVLFGVLDEARHAVGGQVLAAQQRHGHVRHLADIRKVLSGLNDSLRYSAGAVAMPLWWIKEGIAVRRRARNVLDANVPPAPVRFPMG

SEQ ID NO: 953052 - protein, 40 aa, Homo sapiens
GDLEDPPAQQMIHQGNRIHILLIAILFNNILSGRSEPYTN

SEQ ID NO: 953053 - protein, 68 aa, Homo sapiens
MQRMSEGVPSVTSGTQTWNGAIPSLIAIAIMIITREVLIGNIGYGSLSGEYIVEEYSYYKDYRCGCSR

SEQ ID NO: 953054 - protein, 45 aa, Homo sapiens
MGDETPEEVVFSLKASRYATNCRDIGLAAKDSIQRFVNSEIAELG

SEQ ID NO: 953055 - protein, 34 aa, Homo sapiens
AAITLIPERYPMHPSDIWPASSHMTKKRRRYLMH

SEQ ID NO: 953056 - protein, 64 aa, Homo sapiens
AARSSTPPAMAGFRSTPSDVRKVMLEVAPVSELPLTDAKVRAAALIMLVCARGNMNWVRVQARA

SEQ ID NO: 953057 - protein, 45 aa, Homo sapiens
MRDRRRRRGVVFSLKASRYATNRRELAGAKDSIQRFVNSGIAELG

SEQ ID NO: 953058 - protein, 107 aa, Homo sapiens
KWVTPSTIPHGQSLTLAPRKHRHSAGQPRLHAAAVLMGDRPQVAMHNSLVTGSCDSSQGVYSPAPRPVKTALPRGGNLGALTRSLENAGRTASLSARAGAKLPGYDE

SEQ ID NO: 953059 - protein, 40 aa, Homo sapiens
MVEEHGNKVVRALVPLSEMFGYVGDLRSKTSGQASYSMEF

SEQ ID NO: 953060 - protein, 37 aa, Homo sapiens
QRRAVVRVWQANIGKTIIAHVPITNGEVQETGDFELD

SEQ ID NO: 953061 - protein, 33 aa, Homo sapiens
KHLREARCPAGDLVCFDFEASAFLHHMVRNLVG

SEQ ID NO: 953062 - protein, 35 aa, Homo sapiens
VYPADATGLHHPRLSTPMPRRRLSGCPRCVVHAGI

SEQ ID NO: 953063 - protein, 55 aa, Homo sapiens
VCGSRQVALGVTATAADRAELLVGIQRIGRCGLAARDHGLAVVIQHGGFRRFAGT

SEQ ID NO: 953064 - protein, 43 aa, Homo sapiens
PADVLLGRLGSWSIVRQQYVLHSRHQLISTGIHGMRVALQCTS

SEQ ID NO: 953065 - protein, 37 aa, Homo sapiens
TVIPGACAVGGTISITWKGPTGRFELALVQLPRVAQE

SEQ ID NO: 953066 - protein, 58 aa, Homo sapiens
TLAGIPWVHVACGLVFDQSPLRCKQFGIWLRYDSRERHPQHVPGNTVDLTTAWRCHPV

SEQ ID NO: 953067 - protein, 42 aa, Homo sapiens
VECLTAWRLALAGRDLLHLHDLNGVGSGAVPGTPVSVHMGNS

SEQ ID NO: 953068 - protein, 73 aa, Homo sapiens
PELTLNPLRWQTDTTQKLLTVMENLELVDELVFKIIISSTEAWTNNALSEGSATTLEDNNGKKPCKETWLSAV

SEQ ID NO: 953069 - protein, 115 aa, Homo sapiens
PVRASFFVLDSFLLSFLQVGAALLNPILGLGMCSPCISAPQGAPRVAHLLPWLSLPCLEGACVMMQPETRLGELFPPPYVVYNRELGVMPFRSLTSLNTTFSQSVVPGSDCISII

SEQ ID NO: 953070 - protein, 61 aa, Homo sapiens
AVSGDLSFPSDVLCTQPLPPAYFFMAISEPLLRAMFLWKLRAAGEPGSISPIQTYSALNFL

SEQ ID NO: 953071 - protein, 88 aa, Homo sapiens
REIPWVLGDCASIYTRGQRSSPAQDRHAWAQGESSTAVQCATVFTTVKGAVLIQSCLFEESCVSTNRRALVLWLGSARGKQPRVLPVV

SEQ ID NO: 953072 - protein, 49 aa, Homo sapiens
ACSKALVRSVYCSWTCNSRVRPTCGIVGERPNIDTIYVIWVHLRKVCSS

SEQ ID NO: 953073 - protein, 86 aa, Homo sapiens
MEHSSLLCHVHIINTFPLWLVSSAANGPQNVSSFSHTQHPLCMTSHFLEFYKKSWSCCHEYLFEADYNYFFHPGGPLRVTEARYFD

SEQ ID NO: 953074 - protein, 61 aa, Homo sapiens
PVSGEMADTLTSEVDHKKRKIREEIEHFGIKIINSQTVTLMRDEDFKLQDQALKESIPFAV

SEQ ID NO: 953075 - protein, 33 aa, Homo sapiens
TAELQDDVGRSVHELERACRVAEQAANDLRAQV

SEQ ID NO: 953076 - protein, 82 aa, Homo sapiens
MQGGRATTYCAGRSVLILLSDTGLGKEVCFAVQKDTSPITIHHLKLNPWIPPCTVGGHIPPIPYSFLITLHGRQPNATSLYY

SEQ ID NO: 953077 - protein, 77 aa, Homo sapiens
GPDFVEARLTRADSFTLETLDIRPEGFSPSSRYSFRHSLFLKIHCSLQYSFFSLRMLLYQSSFDDSTASVVCFSPAT

SEQ ID NO: 953078 - protein, 105 aa, Homo sapiens
CRVTVYSTDEDKFQLILTIVGTIAGVVILSMIIALIVTARSNYITKHIEEKNLIDEDIQNLKLRSHRLHQSMEHNGASSLRSGLRPPRDRLDANIPIPDDSRHCT

SEQ ID NO: 953079 - protein, 56 aa, Homo sapiens
PYGNRGAQPLEAAGLPLMLGLQANRYELRQPQRRTYSAALLHQSQPGPEKGLSCGR

SEQ ID NO: 953080 - protein, 89 aa, Homo sapiens
CSCVLHVLSRTCRLACVAAGQLAARGVQVPGGSWLGGTYLAVTFCPLSLQVTLSDSWGKKPWSRHATTTFPSWGVLSRLSGKTLGLVGY

SEQ ID NO: 953081 - protein, 118 aa, Homo sapiens
PVTTLTVTLWLLRVSSVYGLCRAMEPWEDLYLQCCLPLSPRPLITATLSKSGNTFRPEVHLLPPPSEELALNELVTLTCLARGFSPKDMLVRWLQGSQELPREKSLTRASRMQVWEVP

SEQ ID NO: 953082 - protein, 78 aa, Homo sapiens
FGASDGPGAWGALFLNDYLLCLGVAMGCSFQQPTWGPLLRPPPHIHLLPCFALLGAPSYGCFTHWRMYRLVCPHIPGI

SEQ ID NO: 953083 - protein, 58 aa, Homo sapiens
DPPCYVARTDALQVRFQRDDARNPFARVGDLERRQLSALLGVDTYGYVEAAQANGAVF

SEQ ID NO: 953084 - protein, 37 aa, Homo sapiens
GLRASGDRPSWKWSMHTAEARLAVETALAPSASTELD

SEQ ID NO: 953085 - protein, 38 aa, Homo sapiens
TLEAPPQYARGARICLCRNDGHYVRLHLYSSLLYTERA

SEQ ID NO: 953086 - protein, 53 aa, Homo sapiens
MSGPRAEPQEVVVDRPGGARRGHGEACADQLRPSLHSSSLNSTYPISLTVTTT

SEQ ID NO: 953087 - protein, 57 aa, Homo sapiens
GSCRSVWMLGGGDKVTDQQDPKAEEFFLVQNKMKSLPCLTSIPHSTLAPFRGTDARN

SEQ ID NO: 953088 - protein, 46 aa, Homo sapiens
MRVPHEECVPAGVSLHSRAPNPSGSADFSTGMLSPVREHTDTNAPR

SEQ ID NO: 953089 - protein, 57 aa, Homo sapiens
MDPIGQGCSSSWIVPGASGHKLALDIEIHAYRKLLEVEEEKSLGEKSERCKIRVLWE

SEQ ID NO: 953090 - protein, 46 aa, Homo sapiens
LMQLEKKLHSLQPHSFIRSLPHHWSINLQGCLVTSDSCAGTHLFVF

SEQ ID NO: 953091 - protein, 36 aa, Homo sapiens
VRPQVSSPQRLVPSDRGPERGVSSPCRATDTFVGNT

SEQ ID NO: 953092 - protein, 100 aa, Homo sapiens
RSPGRRALEQFATVVEALLINLNKGFVNEPFLLQRLAYWAIDLYAMVVVLSRASRSLSVGLPHWPRIEKMLCDTLCIEAASRIPQGMAALQSDPWQPELY

SEQ ID NO: 953093 - protein, 34 aa, Homo sapiens
HTRYWCHGGGEVVGEWTITPYALPPEIESDPVSL

SEQ ID NO: 953094 - protein, 61 aa, Homo sapiens
MGYTRVYHKCSDDILLAFTLLLLPGLFYYRHGDVVCCCKVFTSSFPGLFISLSGYILTYAF

SEQ ID NO: 953095 - protein, 35 aa, Homo sapiens
MSAGSCCERIITIIVVYISCLPCLSAIYLGLKSGV

SEQ ID NO: 953096 - protein, 129 aa, Homo sapiens
GSFRIISFTYTKFTTVFIPLPRLPLLTVAVFSLSSRAAVSRGSVRCNTLLNTDAAGAHPPGRLSQQAWVQPRHLHFRQAPRWRLGPLVQEPHLENDGFLSIAISALLCRWLLFEMNWFGSDTVSVLFAS

SEQ ID NO: 953097 - protein, 34 aa, Homo sapiens
SEVPDGYRICPYVQPSTPASSLSSLRSHTGDAPF

SEQ ID NO: 953098 - protein, 120 aa, Homo sapiens
MLHDTRILGTLISDPKSLSYLDFSRILNFLSFRNIVAQPLPWAPLKGSEFWSSGLLPCFPAPLGRTYRAAFDFLLGFPARASPCMPCASLRASILDYISETSGSAWRRGPTDLSLLRSAF

SEQ ID NO: 953099 - protein, 210 aa, Homo sapiens
RVVEQLIKLPQRFVLFCDDLSFEAGESDYRVLKSVLDGSLEQAPENVLLYATSNRRHLVPENQSDNENWKTIDGELHPNEAVEDKIALSDRFGLWLSFYPFNQEHFLDVVEHWIGELASKAGLQWQRDEELDILAVRWATGRGNRNGRCAYQFARYWVGLKLLELSTMIDLQQSGVGLNGYAMLHAQLESLLADERDFIANAAQLSAFLF

SEQ ID NO: 953100 - protein, 49 aa, Homo sapiens
THPRIARDFQDIQDDCHSLRLVTSRGFWVSTFVACCVLSCDIQLRVTGP

SEQ ID NO: 953101 - protein, 50 aa, Homo sapiens
MSRYNDFPIQRIIIFTLTFQAITAIFLLRRLGYSPCLGLTFRVCILVLWL

SEQ ID NO: 953102 - protein, 69 aa, Homo sapiens
VVVSVERLDLTACGCGFSNEAKVVERAGASVVPVEPELLGKVVDSSPRSAVVSVAGNPVWVEARAAGEG

SEQ ID NO: 953103 - protein, 53 aa, Homo sapiens
DLRAEVVYAPLRLIGNMQVQEYVSFEFGQLCAGGQFSLYGFVESRRGDSCCDV

SEQ ID NO: 953104 - protein, 42 aa, Homo sapiens
RLTGPQVFLVILRVEGRRLTSSEDFYHSKRRLIFSQEEALIR

SEQ ID NO: 953105 - protein, 177 aa, Homo sapiens
QSGFSIPPTWKDGRMNSNVIPSLRMSGRSPRCPGILEQTLSRLPFQLYFQALQQMLSLYKPTSNTRPSAENKAQAPQCFSHVAPLPCWDFPHQGGVCSPGAHSPGICFPLSFQAGVEVINVLSAPSHGVPWRPTWGHKDQAGAFYLRSLKSEDVKVKNRVWGNFQQWETQVTKDLTV

SEQ ID NO: 953106 - protein, 81 aa, Homo sapiens
IPARRPVIVAAASRSFLQATVEVPCDLMKSRTSGKGFGRQHHVWFLCRLWSPSPLGSRQVVLVACAQRVATEGTGTLLEAD

SEQ ID NO: 953107 - protein, 92 aa, Homo sapiens
MPSCTSDGTLSIHEDKFITSLLTMAFAPIPQRLVAVMCYEMGSSKQVGMTQGPGDQDRPPLSITFLALSSAKLPTGLLPESHRVCPNSLRPL

SEQ ID NO: 953108 - protein, 67 aa, Homo sapiens
SSVTRPGVVLHACSPRCPRGCGRQLTCASDFAVTVSYDHTTALQPGRQQDPVSKKITFVLTEIIKLF

SEQ ID NO: 953109 - protein, 146 aa, Homo sapiens
GIDTNASHATHRYKRRATSKGLTKIIMLLREQDKGQKQTYWEVSSKDHKAKDKSRTTDKGLMYIHACIVLINILNNRKQGSRAENQSDHRYIRAEVFSTLVSLWVLQETRVYLSPYLNRVRQTFPEQPFIDLPPGIHSFPRVLLLI

SEQ ID NO: 953110 - protein, 68 aa, Homo sapiens
RRQCIVFSVISRLPEVYCPSVCPLSMVFWLSIVTLDGADSGDVSHDPGPCVRVVLTREFRLCSLGLTE

SEQ ID NO: 953111 - protein, 68 aa, Homo sapiens
LLETKANFSLPEKCDYMIGDYYGELEKEAAQSIVTKYKEEVRKLLPPSDKRTYRRNNRVPRPSGRATE

SEQ ID NO: 953112 - protein, 48 aa, Homo sapiens
MVGWRSDHGLGCLQCSPFQISLCVLRGDSGAATMVRLVWQALGRSRYW

SEQ ID NO: 953113 - protein, 39 aa, Homo sapiens
RLRVSRAAYGTVPQTLGQHAGAAHSMLGLQATRYAAEAA

SEQ ID NO: 953114 - protein, 83 aa, Homo sapiens
MAGVFHDRLASSVTQILHSSRDLRTFTDHVYVQLKFTALGGLILTSSDFGMCRHSDEGEFSACGEVKNLISQSLRRRDVYPEP

SEQ ID NO: 953115 - protein, 40 aa, Homo sapiens
SLASRTNRSRSLAAKLARYIADGGPVGGRPIALQEAHRGV

SEQ ID NO: 953116 - protein, 48 aa, Homo sapiens
MYSCAVNSTVLSGSLVLMNRRVSYVKFALQILMDLIVIKAKDTCIQNR

SEQ ID NO: 953117 - protein, 69 aa, Homo sapiens
  misc_feature (16)..(16): Xaa can be any naturally occurring amino acid
  misc_feature (24)..(24): Xaa can be any naturally occurring amino acid
MGSEVFQDSRILVEDXGSIERAGXERGGPLRAGLAEELCFIPQREGAREGSEAGSGWMKVVLLGHSLVI

SEQ ID NO: 953118 - protein, 49 aa, Homo sapiens
TGVFRYPELAWVLRCGLPDRFVPRRERTAVSQAQDACGPLILIPLRPGL

SEQ ID NO: 953119 - protein, 111 aa, Homo sapiens
DTGPTDVDTHHSDTTHHALNTSHILHTCKSHHRHHIRTTPHTTHTTHHMPHITCHTHQTHTQYTTHLTHIKQTPHTPYHTHITHTTHAPYASTHRDTYTSHTLTHTHPTCH

SEQ ID NO: 953120 - protein, 80 aa, Homo sapiens
CEPEDSAVHAYNSPVLTVVCQVSGRVWGDERRTDPSVQLSCVVLAGAAHVLESEKKGAVASDALVWHIQNAWVTTEQQER

SEQ ID NO: 953121 - protein, 94 aa, Homo sapiens
CPLRIMSLCMLLAGPTVPGQPGLYRPVLAFGLQKGKQLMDHAARAQKMCSGLCPRRPFWAFNPLRPKLLVLSAGLTLEPAGGSPVASAAWRFAN

SEQ ID NO: 953122 - protein, 70 aa, Homo sapiens
MPLQHTCVTVPAWCGMKRRPILTIITLEDSSGNLLGRNSLEVLCKCLVLGETGAPEEENLRKKGEPQREL

SEQ ID NO: 953123 - protein, 107 aa, Homo sapiens
RIRECRQRRDSSTQRRPGTEQAGDNGTSLSPQARERPWDTSKRLLCLDDFYGLCFTTVFVLGNHAWSAFSGPEIRADLQWSTVGSRSGLKAHLKPPPFSSTGYRSSN

SEQ ID NO: 953124 - protein, 32 aa, Homo sapiens
MVVELVKFIHPYFSWTNTVGQSLVAGLGSVLG

SEQ ID NO: 953125 - protein, 101 aa, Homo sapiens
WHADTPSPPSRSTETPLLSGHSACAVWRPEDPHLVNFVFLVETGFHHFGQAGLKLLTSGDPLTSPSLGLGRELLRPATISKFLTNFLVWSLGVCSVVVRRV

SEQ ID NO: 953126 - protein, 33 aa, Homo sapiens
RQTSRLICQMPENDNLVKELYGKLDEDIQKERV

SEQ ID NO: 953127 - protein, 47 aa, Homo sapiens
PPIAFQSELCWVLALAFAAFRRPEGSELLSLDPVLPFPCPLFSVAEP

SEQ ID NO: 953128 - protein, 43 aa, Homo sapiens
MITEEPSSKMDNAKSRVYFACKDKLLKVSTRPYPGYRGSTFSN

SEQ ID NO: 953129 - protein, 96 aa, Homo sapiens
ALLKQITLGLCLWSCLEEGTILQTPEWKIHKQLAPLHLEKLQTLNSNAMKASGRGAVSCKATGLELLKAVGAYLLHQHDLDVRHGVKRKLFQSFKT

SEQ ID NO: 953130 - protein, 67 aa, Homo sapiens
MAQYIMSSTRNTSQEEVNINRKKRISDTTRHCSPRTLIPRPPATPSRPLALSSLSQTRYLGESIVVP

SEQ ID NO: 953131 - protein, 51 aa, Homo sapiens
AETISAILELVIGVEARLAGVEPGAAIAVPRWATLLVNAADSPCYRSSKFC

SEQ ID NO: 953132 - protein, 39 aa, Homo sapiens
DRVVGAEKSRCSVSYVMYYELSYGLRHLRCITQAETRQK

SEQ ID NO: 953133 - protein, 42 aa, Homo sapiens
GQQGPALLINLVDIHFVMGRLHGPWRIAHVLEHLGLGARRVH

SEQ ID NO: 953134 - protein, 35 aa, Homo sapiens
MAYVHTAEKFKEASSLSDRTGDGKILYSQCGHSAC

SEQ ID NO: 953135 - protein, 82 aa, Homo sapiens
HSMDPVRSPYSLSLASQIDQDGSSMAVLLVWVCLRLHWLQKVTLATLIVLIHRPHAHGMTYGPRPCRDTRIFAYTFLIDPGR

SEQ ID NO: 953136 - protein, 137 aa, Homo sapiens
SYLYDAVEGNIKEGRTINLSNALIVIIHLYDLPFDSRKSVMLVRAREGICILVTLTRPWESSPSIHLINEVLQQILKRSKRFVFTLSAVIIGLIIVTALATTAGMALHQSIRTAHLVNDWQANSTQMWNTQQGIDQK

SEQ ID NO: 953137 - protein, 58 aa, Homo sapiens
PLVSTGIQRLEHGKNYETCLEVQACYDLQVCLQIAFYLGAEEVIVEVIIEEIVWFYGV

SEQ ID NO: 953138 - protein, 36 aa, Homo sapiens
MSNLDHATSQMKAFLVRLGKVAHAYNPSHFSVAEGG

SEQ ID NO: 953139 - protein, 48 aa, Homo sapiens
DKLCKYVHGTAFASAQEGTKEGEAVTPWRSTGLGYFRSSLVVGYRRCA

SEQ ID NO: 953140 - protein, 43 aa, Homo sapiens
YLPLLKEPTSYHSSPGSLATTHFTDSSTAQASVEASTRFHSSP

SEQ ID NO: 953141 - protein, 32 aa, Homo sapiens
TLSRIPPISFRDLNIYDADCIIAFNSTARFKK

SEQ ID NO: 953142 - protein, 91 aa, Homo sapiens
MYKVIAEEDTCLPQCDSFCRVYLENMTPVRLMAARPIPATLGAINNVTELVTAGESIAQSMQKVLADTHWPGLYKHLLSYQLDRPEDDFAE

SEQ ID NO: 953143 - protein, 48 aa, Homo sapiens
TSLSSALSSCSHTTPACGALDPSFLPGTGAYDRHGFVMSGLFVRVHGS

SEQ ID NO: 953144 - protein, 41 aa, Homo sapiens
TFSLSHVVHGPPSMALAAIAPCSCSTSVWGARRCARLPQLA

SEQ ID NO: 953145 - protein, 69 aa, Homo sapiens
  misc_feature (28)..(28): Xaa can be any naturally occurring amino acid
  misc_feature (31)..(31): Xaa can be any naturally occurring amino acid
PWEGGEDAAPVAPSVPAYGDPELPTPGXEVXSESAQEPGARDVEAQLRRLREERTCKVCQDRAVSIVFV

SEQ ID NO: 953146 - protein, 73 aa, Homo sapiens
VALWCPGESALCSVPPGGGLVRMPYDLRALVPPRLGALPGGSLDHTVLFYGLTCFREQGASFLLGNWLSPTRG

SEQ ID NO: 953147 - protein, 63 aa, Homo sapiens
TSSPPFHIHIFIISHFTISTSQAIIIIIASTPPSSSLTHASAQAHQSLIACSIHQPHSHTAPT

SEQ ID NO: 953148 - protein, 73 aa, Homo sapiens
MRYSIERVRHWHGLLTENPSKLKPLLSLPSTLYQIKRSPVKGKNLFPFYEKGRNSKAPSGNSKGPSGNSKDPS

SEQ ID NO: 953149 - protein, 44 aa, Homo sapiens
MKSLCCYVVSITILKPPAAQYRVKKKYTKAKATFIQRSILVDAL

SEQ ID NO: 953150 - protein, 63 aa, Homo sapiens
RVSSRPMHGQGRSAHDLIHISVLCHEISTQATEPAINVQITQHPEGCTAISTLCWPITTIIRQ

SEQ ID NO: 953151 - protein, 140 aa, Homo sapiens
LGLSSCWRLRRAPSRQLIIVCIVETGYPMWDRRVLNLTGPRELPTLDSQKRWGYRREQPCPGSAYSQLPSGMLSWDPSENMKCHCSAVCLPVSPSLLSVHHHTFSSLSLVQFLAHHLSIYETAYKSLCLELKLASRKPQA

SEQ ID NO: 953152 - protein, 106 aa, Homo sapiens
MGPTQCNIERQVQHTWAHYSAPQSTACADAKHWLRWANGIIVLGRTHDLDGWPNENLVCMANAHYHCKTGLLPQAIPIQGRKTIIKDGIGNACDDHDDNNKIPDDR

SEQ ID NO: 953153 - protein, 63 aa, Homo sapiens
MSIDSLPICQAMSDILLVGTVRKLEDEISELHVTGQGMAVSPTLRVQGSIRPNALLLINYSLL

SEQ ID NO: 953154 - protein, 41 aa, Homo sapiens
MCYVQEVAAMQCAGVFIPYPPNFHRVQRISTIDPAKTASSS

SEQ ID NO: 953155 - protein, 54 aa, Homo sapiens
IELGTFPNHITYSPEHLITIYTPSKQVFNQYTTTNQRPVSHTKPPVPIGILPNQ

SEQ ID NO: 953156 - protein, 34 aa, Homo sapiens
ASDGVDAAKVQVVYSSITIIYTPGTNADVLQTPA

SEQ ID NO: 953157 - protein, 53 aa, Homo sapiens
MRDHADAYTPGQYFYPRGVGSEKLERIARLENKVKTLKRGERGAVRIPPASSG

SEQ ID NO: 953158 - protein, 84 aa, Homo sapiens
TFIYHNLVFLCRRCGSHTGAIIGLMVGGVVHTARARHQQVMLKRKQYTSIIMMMVEVDADVTPAARHLSNAADQNGYENGIFIE

SEQ ID NO: 953159 - protein, 47 aa, Homo sapiens
VLKVVGRSNLYGRNPVPLQLAIGAEDKFTGVIDLVKMKAINWNEEDA

SEQ ID NO: 953160 - protein, 72 aa, Homo sapiens
SIPAQNIIFISSSKPHLSPPMLSSTRIEGNQPERLNAGTYFLFYTLVGSLPLLIALIYTHNTLGSLNILLLT

SEQ ID NO: 953161 - protein, 44 aa, Homo sapiens
DTSDKASLISSRYCFDPVHSKAWSIVFSMSLQFASVSNPFAHQF

SEQ ID NO: 953162 - protein, 72 aa, Homo sapiens
RKLPCAMQAHQLPAIQADQPHRARVLVASRRPYRHGTAQEVLACIADIVGFLAHRPEEDRAETPARRSSPGN

SEQ ID NO: 953163 - protein, 134 aa, Homo sapiens
VREWCGAANKVVDCAITWFAVGLFGQVVRSLDHLVALPINWNQQIHAVNQKAWDKARYERAHPWGFWVSRVPLYCNFNCSVIGSYLGEGLVKTGYGQGETLASSTPAHKSQIVEPCYLVFHNSRGIPELSRHNF

SEQ ID NO: 953164 - protein, 35 aa, Homo sapiens
ERRKNLYFVSVSLSVHNTFSMRPELFEINALAASR

SEQ ID NO: 953165 - protein, 44 aa, Homo sapiens
SHRVHKIAQGADMMTETTVEMKIVSAVSNTLDNKPLEHALHTAM

SEQ ID NO: 953166 - protein, 56 aa, Homo sapiens
LDVLCRQVGQHPLVLLAAQDEAVDVDRLGQLVDRAAIVSLLSSQLPRRPPARVLAE

SEQ ID NO: 953167 - protein, 41 aa, Homo sapiens
AHAVVPNIEYTLSPTLRNPDGRSCCRSQWTKLLQVRVDEVV

SEQ ID NO: 953168 - protein, 68 aa, Homo sapiens
QHVVTTKYNDHSLPYQIASSLYLTDDTSWLLLLHYLRHMRYTLDDQRILMVLRSKYSFHNQWGVLSWD

SEQ ID NO: 953169 - protein, 69 aa, Homo sapiens
QNFVSDLLKIRSWLDEVHTPRIRQIFMDEVVAAHAETPDHTPRSLWTKLLRNNFVHTDFHCDLSNQNAA

SEQ ID NO: 953170 - protein, 57 aa, Homo sapiens
AHRRCFCYLHVVPGLMPHCHEGPFRLHSGAALGHRFMGGGGGHPLFWFRLTTDEHTL

SEQ ID NO: 953171 - protein, 76 aa, Homo sapiens
MIIDCVLELADQEDLQPWSSVSMVVMRMLILAGLVDLHLGPQTWCCGISRRLPWFRITSRDCSVPSSVDAMSLSLS

SEQ ID NO: 953172 - protein, 34 aa, Homo sapiens
MGGRDGRSCCCTRRGPILFLTFPYEHACLEFRRV

SEQ ID NO: 953173 - protein, 54 aa, Homo sapiens
GRSTAQQDHQHQEGSIMRPPLCRMRETQFCAVRGGVELAVEPAEEALLVVVVSL

SEQ ID NO: 953174 - protein, 37 aa, Homo sapiens
AHAECHTPWCQVIVDEVVAQQLRPLRFRIVVWLLGVC

SEQ ID NO: 953175 - protein, 42 aa, Homo sapiens
HCAYPTERTANNVHVNTTGFKEIAREFADLFSATGYGLSKNA

SEQ ID NO: 953176 - protein, 62 aa, Homo sapiens
LSTRKPHAASREVLMDEVVAYPGEVMVDEVVANNLSTMICNNFVHSDLWERGGVCSLVVRRV

SEQ ID NO: 953177 - protein, 80 aa, Homo sapiens
GSPSHAEGPDTSSGQVLVGRRLLQVTVDEVVAAHAENPYHMSYVWRFGDHSGRSCCNNFVHSDLRASISRTRGVVASRRV

SEQ ID NO: 953178 - protein, 67 aa, Homo sapiens
MFALVLNAHYSPSNGSGASKRRARDRTVRVAYSAIQVLRIERFGNCAFRKAIWSASMLRLDRIRCSI

SEQ ID NO: 953179 - protein, 155 aa, Homo sapiens
AKVWMSGDIARGKLRRQLDITRPAGRSMYSRLAGSGVRQSLAAEASRICCGLRYGEAALAMVGNMAGQGEGGQGKATTVRHGKPRNMNEASILRERPGLAKPALMTKRHYSLFPNFALTVNYKRSWRAGHVRGTMSTVRKSQKDLSAGTVSLALA

SEQ ID NO: 953180 - protein, 34 aa, Homo sapiens
RCNTIHFFNVRSGMDEVVAPRVIPLVTQIRVDDS

SEQ ID NO: 953181 - protein, 53 aa, Homo sapiens
AQYLSRVCIKTTVDAMTRSVYFPKRAKREFSFAMGGWSSETGEASSYLQYWVS

SEQ ID NO: 953182 - protein, 67 aa, Homo sapiens
SLVTSVPRPGQLAHGLMTETLVGAGFSQDNGELGLLFSSGGSATSGGSSDSDSGGSKPKRRTSLPFP

SEQ ID NO: 953183 - protein, 66 aa, Homo sapiens
MLTGYVNCLFPMLGFRRVHAHAEVSTLHEVTLRSVWTKLLRNNFVHSDLQQLLSIVTFLRVWSLGV

SEQ ID NO: 953184 - protein, 67 aa, Homo sapiens
VSIQQSGLLKDAQELLWRVPDNRMPSRQPVVYIFRSVLELQAQFKQGIVVCFQPNDVGCMKRGASCH

SEQ ID NO: 953185 - protein, 34 aa, Homo sapiens
HTPNIHTVDTLRNTLYTPDIHILLKITVMSGLNA

SEQ ID NO: 953186 - protein, 82 aa, Homo sapiens
SADLHSSARSLESSATALRVRLQEFDGALKQLQRHRLFHAAALRFSELNAGCTEFVYVVHHIERYRIFKCIAFFIADVETPF

SEQ ID NO: 953187 - protein, 53 aa, Homo sapiens
MDWRGTALEWAGVVRDGGLTQSGPMAQLLAQNQSPWAEVFSITSFAVNLANPI

SEQ ID NO: 953188 - protein, 42 aa, Homo sapiens
SEYFAWGTGSNVAPTRNIQRITITVVAASPFARDGGSRSKTS

SEQ ID NO: 953189 - protein, 44 aa, Homo sapiens
DTRRVSIRGNNDIIMDKLLRNNFVHTDLTLRSVLDLRTCGSTDA

SEQ ID NO: 953190 - protein, 112 aa, Homo sapiens
RHGRSAPVVPVQQHRTEAGHQLVGDVTRARMICGRPSPAPRSRARTRRCASRPSGAPTAGSSSSAAFHRGRDATASGLQLGLCRETSSAPGRAALPVHQSRLGGGIPLRSRT

SEQ ID NO: 953191 - protein, 84 aa, Homo sapiens
IYQIPTTSSIAFATTSSIRISRTRGVWWFGVCSNNFVHPDLRKSKGFKSSIVWSFGVCMHTPNNHTAHAEHRFHMSKSGWTKLL

SEQ ID NO: 953192 - protein, 129 aa, Homo sapiens
LKRRRSDDSGRSIMWTLSDIAMLDVAQVGHIDHEYEVLRQLLVAAAYGASTDSVHHPQSPGRSCSRWQGGHLSWPQIHGVGMPYTAHLLSAGIVEVLTTEARSLHVAPEGRDEGDCVHNSQHRDYPTLI

SEQ ID NO: 953193 - protein, 70 aa, Homo sapiens
LEDPSHAEYIPVSQGSLGGRSCCATTSSTPICNNFVHYDLTLRSVWRLGVCSNNFVHNDLRRLGTRRVQG

SEQ ID NO: 953194 - protein, 69 aa, Homo sapiens
MYLQHTSSSASFWCFSFWCFLFLMITSSIGSAISSSSPFETFPLSSIFVADCLLPYYQTGTSKPTLKPV

SEQ ID NO: 953195 - protein, 42 aa, Homo sapiens
AQLNIKLHHSICVDEVVAATTSSTGILLSLGSRACAVIPELE

SEQ ID NO: 953196 - protein, 59 aa, Homo sapiens
MLSFSTENPALLTCHRYIFCMARMYDLLLILNRSQKIVQRFCITVRDRIPGVFWRRDVN

SEQ ID NO: 953197 - protein, 60 aa, Homo sapiens
HAERPYRSECRAFVCTVSVDEVVASTRLNVHNPLVTQIMWTKLLQVRIDEVVADRNGRSC

SEQ ID NO: 953198 - protein, 36 aa, Homo sapiens
MSSCMAEILQGGLISPSISGLGGFASNFPGSLPTPL

SEQ ID NO: 953199 - protein, 34 aa, Homo sapiens
MPVWAFGVAVWSFGVCSNNFVHRDMKKCVGPRRV

SEQ ID NO: 953200 - protein, 39 aa, Homo sapiens
VLVPRAGTPLVLDTSVYMRAAWGCPGWILQLRQAPMMPV

SEQ ID NO: 953201 - protein, 92 aa, Homo sapiens
MDEVVDTAENPYRRKSGWTKLLRNNFVHSDLISRSVWLFGVCSNNFSILIWCVGDKAGRVLRGRYGDSAVHAHAECPYCTRRVPTREIRVDE

SEQ ID NO: 953202 - protein, 55 aa, Homo sapiens
MSLHPDCLICSMECRERITTESDLGSAPVLRIHDLFQQNPVPDWPTNSFSKQVSQ

SEQ ID NO: 953203 - protein, 38 aa, Homo sapiens
AGPADGCATARYSPGNSFALVTPCMTLKATPCVTLEFC

SEQ ID NO: 953204 - protein, 49 aa, Homo sapiens
ECGHKINGRNNYLNSRGISGLFSGHYYDRFSFSTAAEVAFFYNCVRRFR

SEQ ID NO: 953205 - protein, 30 aa, Homo sapiens
MIPRACILRVNRKSQRRNASQYATLDAAPN

SEQ ID NO: 953206 - protein, 31 aa, Homo sapiens
MVFLTCADALTGIGLRAGLHQCGNVMLGHLS

SEQ ID NO: 953207 - protein, 36 aa, Homo sapiens
GPAGGSRGQWPISNRSPFNVCAFQPVVFPPRHLRGM

SEQ ID NO: 953208 - protein, 143 aa, Homo sapiens
AVRKLRPLRLILRSVWRSACVHTPSTIHFLKSGLYGRSAHAEYPHLRQNPFHYHIHRRKSNFLPTTLSRRGRNGRSNNFVHRDLTSCVMDPRGVAVWGLGSSATGSGHKRAATTSSMMISRSVWALGVCNTPSIHTPQVWVDE

SEQ ID NO: 953209 - protein, 46 aa, Homo sapiens
SGVSITSFRTSSLQKKHTTHQQPLPISHDLPRMKTTFVIMVSPPPN

SEQ ID NO: 953210 - protein, 53 aa, Homo sapiens
MVVHLLRYSPGEQLRIGDTVQTEGDSSVTLEFADASLLQQRKVFPGCALDQTQ

SEQ ID NO: 953211 - protein, 39 aa, Homo sapiens
SIRRGVGGRGVDTEMNQTVPVLFIISSPQNDARNDPQNA

SEQ ID NO: 953212 - protein, 70 aa, Homo sapiens
KNELATRECHTHKPHSPKCLICFSYFSTKVWSLGVCSNNFVHYDLQQLRPLLTSEQTGVTQRVQYGHSAC

SEQ ID NO: 953213 - protein, 54 aa, Homo sapiens
MKSIRVEKRRSEGEKIRKKYPDRVPVIVEKAPNSSDEETGDIKEVPGCASESHS

SEQ ID NO: 953214 - protein, 59 aa, Homo sapiens
MDEVVAHTPNVRYLSKEISVDEGNNFVHSDFTLNNAASMVQQLRPPRHDLKKCVEPRRV

SEQ ID NO: 953215 - protein, 73 aa, Homo sapiens
MAISRTRGVGRFGVCSNNFVHRDEGGDDVSPCAMYGVFGVCSNNFVHSDMTSRSIWRFGVCSMEPRRLCFGVC

SEQ ID NO: 953216 - protein, 34 aa, Homo sapiens
ECFDITENRCPGKSSGSRMGYTEGPCFTVFNNVH

SEQ ID NO: 953217 - protein, 41 aa, Homo sapiens
MTCTPSGYGIHEVPEELSGQTNIHLSKNFFLTNRAQNGGSS

SEQ ID NO: 953218 - protein, 63 aa, Homo sapiens
EEGKASSGAAPSGNQGVSKQFFPWGLRGSCQEWNLKMLQRKSVDSFELGEIRVVETESLHFGL

SEQ ID NO: 953219 - protein, 96 aa, Homo sapiens
PSDCNNFVHSDCSPLVWTLGVCMHTPNVHTEQVVMDEVVANFVHNDMQQLRPLRPAIKSLVFRRVHHWDLEVLGPSACACTRRITILLQVWVDEVV

SEQ ID NO: 953220 - protein, 73 aa, Homo sapiens
MLYQSKGTYIHTCTHSTHTNAQHTQTHSTHAHTAHTRAHSTQTHSNNAHTCTHSTHTSTQHTHKDTVHMECTH

SEQ ID NO: 953221 - protein, 44 aa, Homo sapiens
YVILHTPAHAEYPYLCHQGGLYGRSNNFVHTDLGLARSVWSGHS

SEQ ID NO: 953222 - protein, 51 aa, Homo sapiens
MAGPLHFVPLMILRSVWSLGVCSNNFVHWDMQQLRHSDLIQKQTVWVLGVC

SEQ ID NO: 953223 - protein, 56 aa, Homo sapiens
SDLTVKEFVTCETVCMYECGYSGVCSNKFSTLICKNFVHCDLPNIQTEQYGGSACA

SEQ ID NO: 953224 - protein, 47 aa, Homo sapiens
SAATSSSQDFSVLAASVVHTPKAPNTDASPIDHMDEVVADRCGRSCW

SEQ ID NO: 953225 - protein, 67 aa, Homo sapiens
LSGYSACAATTSSIAHCNNFVHQTCNNFVHSDFSAEYRYSACAVWVFGVCMHTPKIQTPQVLMDEVV

SEQ ID NO: 953226 - protein, 63 aa, Homo sapiens
DAYSGPEMHRHTASYANEELSADGFIKHGIFIFFTFSDNTMDANTSCGRSEWPHDSVWSFGVC

SEQ ID NO: 953227 - protein, 50 aa, Homo sapiens
TLSLDVGVWTTVCTRRNDQYYIIWEVVMDEVVGNNFVHHDFKKCVELRRV

SEQ ID NO: 953228 - protein, 82 aa, Homo sapiens
CLSLERCDNRGGEGKLWSRSLRLLQESLNRLFPWGFSRKLSRWNLKMLQRKSVDFFEPRDEYTMSGDWDARFTSASDVVGLT

SEQ ID NO: 953229 - protein, 68 aa, Homo sapiens
MDVVTREEGRQALEPLPQAIQESLNNSSPGAFEEVVRWHLKMLQRKSVDFFALRRITMSVDCAAVTFG

SEQ ID NO: 953230 - protein, 73 aa, Homo sapiens
ECHHFLRSLDGRSCCATLRPPGFDFKKCVVIMATTSSIQTFHSDLIVVWTLGVCNNFVHCDLIVKKCVEPRRV

SEQ ID NO: 953231 - protein, 50 aa, Homo sapiens
MLGVCMLVLGVCSNNFVHRDLTSRSVGTERVQHADITKPHELKIGVNEVV

SEQ ID NO: 953232 - protein, 72 aa, Homo sapiens
HILFSELKKSLLASLAWSGTILILSSKSPGEELFSDSWMPMRERLQSLPSLLCFHNGPAIGTVSLTILLGTV

SEQ ID NO: 953233 - protein, 38 aa, Homo sapiens
NTSSQRSDFKKCLDAGVCSNNFVHPDLTSRSVWGFGVC

SEQ ID NO: 953234 - protein, 60 aa, Homo sapiens
LQRRGSYGLLRSHVTKLCATTSSITTSNIEVVNPIVVWMLGGNNFSILTCVTKGLGPRRV

SEQ ID NO: 953235 - protein, 71 aa, Homo sapiens
GNSYTGIAIPGYRYYRSPYDRETAIICCTRYNAHTALTEKPFYPQDKVLDWKKLLLHTPISHTKRDSLEPE

SEQ ID NO: 953236 - protein, 49 aa, Homo sapiens
QTLVTQISVDEVVRNNFVHYDMKKCVVAHAEAPYMSKSGYSEIRVDEVV

SEQ ID NO: 953237 - protein, 61 aa, Homo sapiens
MVLRRYSSVGGSACAATIYRPLGPDLKKCMGSRRVHAHAEYPNFLRSDGQKLLQVTVDEVV

SEQ ID NO: 953238 - protein, 38 aa, Homo sapiens
RSCTRVEQTCEVTVDEVLRNNFVHSDLILRSVWFLGVC

SEQ ID NO: 953239 - protein, 91 aa, Homo sapiens
DSEDPQREGQTVSWRLCEVVSAVAIEEVKLGALCEVVSVVVITELELRGPCEVDLVVVMKEVKLGGLREGVSVMEIEEVKLGGLCVVPRRV

SEQ ID NO: 953240 - protein, 61 aa, Homo sapiens
SRTAHAKPNARVERSGWTKLLRNNFVHYDMISRSVWRLGVCSLDPLTRRTPKPPQVRMDEV

SEQ ID NO: 953241 - protein, 36 aa, Homo sapiens
TRILLARSIRWYDDVAGSRRITMKIFVDDVCGVPKL

SEQ ID NO: 953242 - protein, 37 aa, Homo sapiens
MDIRRSVWTKLLQVRVDEVVANFSIVTLSKCLVTRRV

SEQ ID NO: 953243 - protein, 51 aa, Homo sapiens
MDEVVAAHAEATTSSITTSRVLLGVCSNNFVHKDLTANTGYSACAIRSLGV

SEQ ID NO: 953244 - protein, 73 aa, Homo sapiens
MRGTNCTRRVTIQIEIPMDEVVAGRNGRSCCRSEWTKLLLHTPNHQTYISVWTKLLRNNFVHSDLLSLDARRV

SEQ ID NO: 953245 - protein, 43 aa, Homo sapiens
HAEAHTLLEISVDEVVANFVHWDLILRSILEARRVQYGYSACA

SEQ ID NO: 953246 - protein, 56 aa, Homo sapiens
MMFYGPSAGTTSSITIYMEERKGIIGSVWSLGVCSNNFVHMRFDNNFSPSLTSRIP

SEQ ID NO: 953247 - protein, 60 aa, Homo sapiens
MVFVDEVVARSGLRSCCCTRRWIHTFKDARKSEWTKLLLTRLNAQTPEMGILIKIDLAVH

SEQ ID NO: 953248 - protein, 122 aa, Homo sapiens
MSIHYLLVAPKWRAVTQYLLCLFIILCVGIRRVQQQLRPSRSQPLVTGLCIGVWYGYSACAVWMFGVCSNNFVHTDLILRSIWRFGVCSLEARRVQYGPSACACTRRGSRPLVTQVLMDEVV

SEQ ID NO: 953249 - protein, 88 aa, Homo sapiens
GTEAQTLSCGLATGMRSRILYAQRLLASSVWLIGNQGGRSCCATTSSTLTCVTKGVDARRVQQQLRPSRSTVGGVLGVWLVRGMDVRR

SEQ ID NO: 953250 - protein, 93 aa, Homo sapiens
RLSHCTRERHTKRNWNKPSKRNVLKLYLISALDVELVLILTLYEVNCSPWYKYNTLYIILEFNLEYVWLGHFGAKVRHVLVEDKSVVWVLGVC

SEQ ID NO: 953251 - protein, 143 aa, Homo sapiens
DCQTMRGEVNSTLGTAAYMAPEVITRAKGEGHGRAADVWCLGVCMHTPSDHTAHAEDPHPQITMQIGGNNFVHSDLQQLRPLRSATTSSILTYFKKCVVTRRVQQQLLSIMICHRGGMVWRLGVCSNNFVPPTCLNVWSFGVC

SEQ ID NO: 953252 - protein, 57 aa, Homo sapiens
MLLLEILMDEVVRNNFSIETFLRVWIFGVCSMVIRRVQHAEAPNDSSSEDSDAETDG

SEQ ID NO: 953253 - protein, 54 aa, Homo sapiens
GLAQISCRSLDRCDNRRREGNALDAASLRANPGRLYTSSSPGDFRRRVVNDGHL

SEQ ID NO: 953254 - protein, 31 aa, Homo sapiens
MRLIFSNGLVLGVCCTRRVTKPPQIAMDEVV

SEQ ID NO: 953255 - protein, 43 aa, Homo sapiens
GGPAHAYVKLNTTVWSQIPVDEVVAQQLRPKRFSDVVWALGVC

SEQ ID NO: 953256 - protein, 39 aa, Homo sapiens
DRHTDSLKSGWTKLLLHTAEGPHHTRARRGLPRRAPVHS

SEQ ID NO: 953257 - protein, 33 aa, Homo sapiens
RPRESRLTSEIIMDEVVRNNFVHGDLYGYSACA

SEQ ID NO: 953258 - protein, 82 aa, Homo sapiens
  misc_feature (47)..(47): Xaa can be any naturally occurring amino acid
LSEGQCGMPCYAYFGLLKSVVLNGCRNMLWFMHQCELWSTVVGHIAXLKGCKVVGAVRSDEKVAYLQKLGFDFFLIYAEGES

SEQ ID NO: 953259 - protein, 84 aa, Homo sapiens
MDRSVLHTPSVQTIVLQSWVTEPRLRLKQNKTSRHQLAGPSTVVFTANRSQPGRILHPFSSSSATLDQPEKYNYTQEVGAFGVC

SEQ ID NO: 953260 - protein, 56 aa, Homo sapiens
MVKSHIWPCYMDSPSRTQLSYFSLQQDTTSGDSEFSEIIYVLQTNCGFVLQLSLLT

SEQ ID NO: 953261 - protein, 44 aa, Homo sapiens
CVRPAGACAHALLMPLAQVLIGLQQIQEEVQLLHHVVLFLLTLL

SEQ ID NO: 953262 - protein, 57 aa, Homo sapiens
RQFVTRIDFKKCLVTRRVQQQLRPPGAVGPSACAVWALGVLHTPSNHTAHISVDEVV

SEQ ID NO: 953263 - protein, 49 aa, Homo sapiens
MDLRATTSSIVICLEVWIFGVCSNNFVHSDLRRLGPRRVHIRREQQISI

SEQ ID NO: 953264 - protein, 56 aa, Homo sapiens
NRRCSASNGPHALPVTAVGPPGSLLYIRGSIMSISRPEDSLQERHPKVNYPEGNDN

SEQ ID NO: 953265 - protein, 79 aa, Homo sapiens
QTLVHRYGGRSCSAHAENPDFFKSQVDEVVAHCDSQQLRPPRHLTQVWSLGVCMHTPNNQTAHAESHILLERSQWTKWL

SEQ ID NO: 953266 - protein, 45 aa, Homo sapiens
MMCRREEGKEGRGRKGISGDVESVAFVLNLLGVADRKNESFFLLA

SEQ ID NO: 953267 - protein, 53 aa, Homo sapiens
LKIGDFGMLSMCSSCVCTEFPYQNLPIFTCTRRAPTLHTPRLQTEQAIIADLH

SEQ ID NO: 953268 - protein, 69 aa, Homo sapiens
MSFPVDDHTNTTEVGSSNHHTQIACIKFDNVDYLASPYLNLHSIVHLNDRIWVADGTSIMSHQVRNSLH

SEQ ID NO: 953269 - protein, 41 aa, Homo sapiens
LHRESPHCTRRSTYFNNPFIADLHVHTPRNHTEQTIIADLH

SEQ ID NO: 953270 - protein, 79 aa, Homo sapiens
LRTRMDTRRVHRESYCTRRKRNRRSSRAHAESPYHNRRSSREDRRFWSGHSRVCSMVDSDVCTGQGHGYSRVCKDLACA

SEQ ID NO: 953271 - protein, 46 aa, Homo sapiens
RRIWLGLGVCMHTRRKHTEQSIIADLHGRSAITRCSEWALAQTKIA

SEQ ID NO: 953272 - protein, 51 aa, Homo sapiens
MATLLLVKIGDFGCSVWFFGVCMQHAESPYCTRRASKLTHAEYPKQYRRSS

SEQ ID NO: 953273 - protein, 41 aa, Homo sapiens
LRILTRERQTIVADLHVSHAEPPKLHTPSNHTEHRGVADLH

SEQ ID NO: 953274 - protein, 38 aa, Homo sapiens
MRIPAHASITLHTPKDQTAHAEDPNRNRRSSRVKIGVC

SEQ ID NO: 953275 - protein, 43 aa, Homo sapiens
PVKIGDFAFVKIGDFGLDTGVCMHTLRIQTAHAEEPDHSRRSS

SEQ ID NO: 953276 - protein, 135 aa, Homo sapiens
MAIMVWFLGVCNVDREDRRFWVAQYGDSACAVWTFGVCSVDSRRVQYGLSAVCSVDFRRVHVKIGDNGLEPRRVVKIGEIALVTIGDLDSRRVEPRRVHAHAEGTKLHTQAGQILMAMVAISMDIRREYGGSACA

SEQ ID NO: 953277 - protein, 33 aa, Homo sapiens
HTRVSHCTRRKSDCTRRASHPEMGQESNIADLH

SEQ ID NO: 953278 - protein, 81 aa, Homo sapiens
MAILTREDRRYWPSLSLVPRRVQVWALGVCSLDVSACREDRRFCMGIRRVHVKIGDFGLEIRRVHAHAEYQTEQTVVADLH

SEQ ID NO: 953279 - protein, 49 aa, Homo sapiens
MAKLGRSGLDSRRVVKIGDIGLGLRQCAVWTFGVKIGDIGMLSLEPRRV

SEQ ID NO: 953280 - protein, 48 aa, Homo sapiens
VKIGDFGLSGVQYGFSAVCSLDVRRVHVKIGDFALVQIGDYGLDVRRV

SEQ ID NO: 953281 - protein, 45 aa, Homo sapiens
ECDNRRSSRVKIGDFGFRRVQSGDSALYMHTPNDQTEQTVVADLH

SEQ ID NO: 953282 - protein, 38 aa, Homo sapiens
MAWAFGVCSVVPRRVHAHADLHVHTPKNHTPFQGVTEL

SEQ ID NO: 953283 - protein, 68 aa, Homo sapiens
RKTRRRVFGVCMHTPRVHTEQSELAIFTCTRRITILHTPKIHTLLEVNAYIADLDRRYRVRGGLVARR

SEQ ID NO: 953284 - protein, 34 aa, Homo sapiens
IGDYALLSLEARRVQYGVRQCAVWMFGVCNADLH

SEQ ID NO: 953285 - protein, 58 aa, Homo sapiens
  misc_feature (4)..(4): Xaa can be any naturally occurring amino acid
MIPXKIGDYGLLSVDLRQCAVWVFGVCSLDLRRVHTPRDQTEQTIVADLHECKIADLH

SEQ ID NO: 953286 - protein, 39 aa, Homo sapiens
MYALMKTRDFWYGGSAMCMHTLSVHTAHAEASRAKSPIF

SEQ ID NO: 953287 - protein, 49 aa, Homo sapiens
LVTDSATYCPACHVWVLGVCSVDIGRVQYGHSACAVWRLGVCSMGFRRV

SEQ ID NO: 953288 - protein, 81 aa, Homo sapiens
MQVGLQRTDAYRWYRCENRGGNGKLCEPRPQVIHGASKLLFPWGIHEEVVKMEPEDATEEISGFLGARRIRVWRLGAFTSA

SEQ ID NO: 953289 - protein, 76 aa, Homo sapiens
DGPMLPVEKHAGRRAVLLTSRETAVTGNSSGSRMGYTERLLLPCFNKSTMLQCMIPNLPSTLTVKVFQNAKISQKL

SEQ ID NO: 953290 - protein, 60 aa, Homo sapiens
WLSRGSLYRGIPYCTRRDPKRNRRSSRVKIGDEWFHVWTFGVCMHTTNDHTEQTNIADLH

SEQ ID NO: 953291 - protein, 62 aa, Homo sapiens
MRSVERPYITHAHTAHTQTHSTHKRTAHTHTAHTRAHSTQTQQHTQHDIAHTRHTQLDTHAH

SEQ ID NO: 953292 - protein, 40 aa, Homo sapiens
EDPNYRKNHQEETHGHMNITKQLKHQVRPEQSVEKTRMSD

SEQ ID NO: 953293 - protein, 65 aa, Homo sapiens
MASMVVDPGVCLAYAEAPYRIRRSALRSDIADLHDRRYRFTRRTSKLHTPKDQTPRARNRRSSRG

SEQ ID NO: 953294 - protein, 73 aa, Homo sapiens
LVKDLHEKHDGHQNITKSSSMRYDRDNCGNKPYVHNLGNVYKLYPALYSSTFPEYKFNYIILLNTTDFTESIP

SEQ ID NO: 953295 - protein, 76 aa, Homo sapiens
HAYEIERDIYPHMPHSSTYQRTAHSNAQHTRKDSTHSEDTAHNRAGHAPTCTHSTHTSTQQTHQDTVHMEGTHTTR

SEQ ID NO: 953296 - protein, 65 aa, Homo sapiens
YGTYRVSFVLNRRIALMRCEREVGYLTVADGQGVQPIGASDIRSVDVVDGEWRTLIGLAGVRLAL

SEQ ID NO: 953297 - protein, 48 aa, Homo sapiens
WWCLLGEELRYSCHVQHEGLLKPLTLMMGAIFSATVPFVGIVAGLAVL

SEQ ID NO: 953298 - protein, 61 aa, Homo sapiens
CHENCAYRSTVSDQQRREGKLRWPLPQGIQESLHTLPLEDPERSCQAWNPEDSTAGYPVEF

SEQ ID NO: 953299 - protein, 40 aa, Homo sapiens
MDDVAGTVSPVICLVAVRVRAGGSAISGRGNLLPLGKHWI

SEQ ID NO: 953300 - protein, 64 aa, Homo sapiens
GPCGHLRCKCIISTEASAHLVFISFSAILLSCIDWLIKINSDKKIASHDVQKHRNGNRKRSGAP

SEQ ID NO: 953301 - protein, 69 aa, Homo sapiens
LIGGIRSNHDEIEDYYSLFLLVFEMESSSVTQLECSGTILAHSNLRLPGSSDLRLETIILSEVTQEWKS

SEQ ID NO: 953302 - protein, 96 aa, Homo sapiens
QYLSMWTHEHRDQPKERVGVRPGIAVTHAARFAYQLPKDQLAASIYALWKRELPYPSYRPHWLTCRLEDWQTGAGVEISSETAPCPDNAGTLSDIV

SEQ ID NO: 953303 - protein, 143 aa, Homo sapiens
FGGIRKVTDYSSRGSLIPIPPDWEKPPAVIDRPPHTESSNWHLVGAALGQSFQRKEQAAIFAVLQPLLVIPRQTGSGVDLQKTPTDLQQRGLIVRRKTNKQKGIVRTSTKSTSTPKPHPKVNQCQRPKLDTSTKMGRNQRKKG

SEQ ID NO: 953304 - protein, 54 aa, Homo sapiens
GIEVLPGIHGIIMFIYVLVAKSDLEEPYGAQERKEHPEAGTRAARLGEDPEIQV

SEQ ID NO: 953305 - protein, 38 aa, Homo sapiens
SARDSINRGFCEMTTIYEDEDVKKAISNDFLENLYNDR

SEQ ID NO: 953306 - protein, 47 aa, Homo sapiens
VRLAMPYKCMLLTDFILKFPHCAHQKYVLQAWQKADIDTHIQPRGYP

SEQ ID NO: 953307 - protein, 115 aa, Homo sapiens
SPNFSCTGRNLLAEIERISVIQKAPTGHLGWVPLWDKASREKEQAAIFAVLQTQLVIPRQTGSGVDLQKTPTDLQQRGLIVRRKTNKQKGIVRTSTKSTSTPKPHPKVTNVKDQR

SEQ ID NO: 953308 - protein, 99 aa, Homo sapiens
GWYSVSDRLPSSGGPMIPIPPDWEKPPAVIDRHLIQRAPTGIWMGAALGQSFQRKEQAAIFAVLQPLLVIPRQTGSGVDLQKTPTDLQQRGLIVRRKTN

SEQ ID NO: 953309 - protein, 109 aa, Homo sapiens
LGTICDEDAEEKLSRSLYSWCMAMAKADGSHAAHSFVRLWGPLCWRALSPAEGAKRLPSDGLIETRLGYFWDSSLPDYLCDLPPLEHMRPVSSSLAEVLRHKSRAWEPA

SEQ ID NO: 953310 - protein, 41 aa, Homo sapiens
NSRGPPSISWRKIIDRRTSQSPPERDLRYRRTAAEMPVHND

SEQ ID NO: 953311 - protein, 87 aa, Homo sapiens
MTGDGDGLTQDLSLWRHDSRRYNLPEVGSCGGAFWRKKLKYSCHVQHEGLPKALNLRWEPSSQSNVPIVGIVAGLAVLAVVVIGACW

SEQ ID NO: 953312 - protein, 73 aa, Homo sapiens
LVETMAAGDGDFQKWASVVVPSGQEQKYTCHVQHEGSAKALTLRWEASSQPNIPIVGIIAGLVLFGAVIAGAV

SEQ ID NO: 953313 - protein, 61 aa, Homo sapiens
GPELVETRPAGDRTFENWAAVVVPSGEEQNTHAMYSMGAAEALTLRWEPSSQSRVPILGIA

SEQ ID NO: 953314 - protein, 54 aa, Homo sapiens
TAPQTPARVRYIIAKGWSLRAGRRLSLTLGRRLETTICLRAGSCSCRRSAGVLT

SEQ ID NO: 953315 - protein, 60 aa, Homo sapiens
AKTAPSQGEGLGQTLLLHMAGVSLLLSRRHHHRRSLLEGPIPCRLGLHELRVLGLVLSIP

SEQ ID NO: 953316 - protein, 97 aa, Homo sapiens
MRRLFFSLLMLCVLPAWADSHDQLYKVAGWADQRAHFNDALSAAQQRYRNSLPPAVYQALVDNSNKRFAPQSVDQRAEAQLPKNLADPKPALAFFYI

SEQ ID NO: 953317 - protein, 89 aa, Homo sapiens
MRGCSFLCGGVLIGGTLVLRQLSREFLLKGQDTVKGRVPFNGQDPVKGQVSVKGQDKVKAQEPVKGPVSTKPGSWPIILIRCAMLNPPS

SEQ ID NO: 953318 - protein, 44 aa, Homo sapiens
SCDVRSNPEPTVYDWSTTSGTFSTSAVAHGSQLVIHAVDSLFNT

SEQ ID NO: 953319 - protein, 109 aa, Homo sapiens
ADLQVIELENYDQHDYLVLATRGGLVKKTRLDLYDTNRQAGIIAIKLREGDELVSAMAVSEGDHIFLFSHADQSLRFVADDEQLRPMGRGTSGVKGMSFRDGDYLINAA

SEQ ID NO: 953320 - protein, 37 aa, Homo sapiens
DCYIRAQTAAPRYSAGPVAPTSASRRYVVRLTRLGGV

SEQ ID NO: 953321 - protein, 42 aa, Homo sapiens
ESLTCFPNMPVRRHWVGIDRRFWVSSWALNVAPILESDKCKP

SEQ ID NO: 953322 - protein, 57 aa, Homo sapiens
VVTCRRQGRFLGPGSMPIVLLAQKAGREVLDRAVLGERVAALKLQTHGCLVGLVVEA

SEQ ID NO: 953323 - protein, 46 aa, Homo sapiens
MLGTNWVGLDRNAGAFIGGTFASHHRDFLPQLFRDERDDGVRHAQH

SEQ ID NO: 953324 - protein, 47 aa, Homo sapiens
MRALIRLSNEPLIRLSNDPHPAYPMALIRLSNGPHPAYPTALIRLSN

SEQ ID NO: 953325 - protein, 65 aa, Homo sapiens
MNDGEEIFKVYISLNRNGLLFEIIRMSSNLINLTLLKTMSLFSLLQTHFFLIPHKYCLGKFTHSH

SEQ ID NO: 953326 - protein, 100 aa, Homo sapiens
  misc_feature (2)..(2): Xaa can be any naturally occurring amino acid
AXSHWITDGEGGIVRDKVIKYILYNPLVIKQDGNKMLTSKGIRDHNKLNSGPLLGSAGRQNRDAQSISVPSVMLTPASAHGPRPSMTSVSRRHSDCDCRL

SEQ ID NO: 953327 - protein, 96 aa, Homo sapiens
TSYWDHRERPAGRVREYLKTEDAKVGEDACVIDTLTHDHVQQLPDRVHQGTSRLVKVVLLEDLAEQVGLCIPDTIHRILDLLAEGTHPGLIDDRGK

SEQ ID NO: 953328 - protein, 59 aa, Homo sapiens
DLTEEGQGRRAMKKALVDQHCLRLLFCAQVAASPLPPLCCPDSTGRAEMQDFFTPPPPL

SEQ ID NO: 953329 - protein, 43 aa, Homo sapiens
KREEEKNGFHPNFIHSLDSSHMMLTALHCYRKGLTFLLVLSSC

SEQ ID NO: 953330 - protein, 38 aa, Homo sapiens
MGAFCLSVNVLGMCVSVRRSVPVCISVPPCAVQLSTSS

SEQ ID NO: 953331 - protein, 45 aa, Homo sapiens
AEFTLVSVDSVTQCLRRHPLHGQPAVGCLLVVIEVVAVPGQPEVC

SEQ ID NO: 953332 - protein, 61 aa, Homo sapiens
LGPWAQNFFARQFLLPHEGEPVKRRFWRPKTPSKAAGLWQPGAALPCVALWGILCGSTGTE

SEQ ID NO: 953333 - protein, 78 aa, Homo sapiens
GYRSTNERHSWWNTHGQSESHAQMTVAACPVEYITALQLSSSPVTVQYAKNIPRKQRQHHPKLRAVLLVIPEAVNRPV

SEQ ID NO: 953334 - protein, 131 aa, Homo sapiens
SSSGMGCVADSHEMWLNLARDPRSYGCCLRQRPLSVEPGDIHPSVSGCRQQEMAADYTQQEKGHCHPTGCHEKEMTSLPLLLQQCQLGKWWVDVHKRVDHRACSFSSGLLGPQESLQPLAKDRLTQENKRP

SEQ ID NO: 953335 - protein, 64 aa, Homo sapiens
CWVTLRIPQTADPLLGCREGGGRFVGCSYRDGPKKCCAAVLFDLRVSWRRPALGALVPGRARLS

SEQ ID NO: 953336 - protein, 40 aa, Homo sapiens
AGSLDSRTPPPGMQAAGGVGLPSHAARTLHLTSRKAAACC

SEQ ID NO: 953337 - protein, 49 aa, Homo sapiens
VGFALNDGAAHGQHEPSAESGSRALQLAELEEGVSLKLEVAGPRGLWLR

SEQ ID NO: 953338 - protein, 109 aa, Homo sapiens
AALISLYPLDARAHELIVKLCSRPRWYFMSVATLFCEDPQLAFAIDFLTGYTALTWIAKHGDLRALQDLVSGAKKAGIVLDVNSEVQLWIIPRWHLAAIHGPPGGPAGT

SEQ ID NO: 953339 - protein, 66 aa, Homo sapiens
STRLYSPGYLQDRWVTCSARGSPTRSQMRDPVPLIFFPKHFGVWPKTCTNCGKPLAHFRETARSTG

SEQ ID NO: 953340 - protein, 43 aa, Homo sapiens
WVLRLPSEPEAVPLVSSSVRGTGGSSAIMLRTEGDWNEGLAAR

SEQ ID NO: 953341 - protein, 39 aa, Homo sapiens
RFLVFLNFLIVNNDQTKLTAVSTSAGSSSPVGSEIDKCM

SEQ ID NO: 953342 - protein, 43 aa, Homo sapiens
AVLVTIQTLFHQSNATPPNGGTNMLPICNTENDTPEWYLSSQF

SEQ ID NO: 953343 - protein, 64 aa, Homo sapiens
EHSETFRSTGIRAFTNWQPFILNYLSTPSPNAYTESLNSLIRVMNRLGRGYSFEALRAKILFTE

SEQ ID NO: 953344 - protein, 194 aa, Homo sapiens
ENDSLAGAAQRGSETAMNDEVAAFVNKGKQHEYITMPFLDLPPKIQERVVCSITAAVKYEVPANIVLAVAEQEGGKPGQWVRNTNGTHDVGPMQFNTAYLVELRQYGITPQDVAEVGAIPMIWLRGVCVVTYVMIKVTFGRGLRITIRVLRNIMLFIAPLSLSVPVSGKTGSSLAFPRLTPYKRVSRVWQLIRH

SEQ ID NO: 953345 - protein, 58 aa, Homo sapiens
TASLFLCEIVSSNGYLMDLPGGTVHTSPDTMLFPQSSQPADQEIPSGAYTTRVQAQNW

SEQ ID NO: 953346 - protein, 185 aa, Homo sapiens
  misc_feature (115)..(115): Xaa can be any naturally occurring amino acid
HKACHSEYLRPVVSSRINREFLVAKVHEVIISQHSSNHDSNRDHRLVLRKRCELSSAQLCFMHCPPVIGWHKQPDQGTHTNRHEVARLPVRYRYQAGPSHQCGSTDSEAQSPRAXIPTASIVPRIRVTQPMIGCRTFSTLHPCLSKQDATVSTRKGRSPVTDLNRIICPFDHGGSTMTSRGAAQS

SEQ ID NO: 953347 - protein, 178 aa, Homo sapiens
CSLMSPCHQQWMLFTAGFQHGQGQTEHDGDQRWYCHCRRNHSGSRCDQLLIWMPIPSPGLHTKERRVSVISEAQFVDLYLGDGLADARGLPGQARRVEAPLEWRADLERIRQLCAEKYAATLDPEFALLEDGVVLRVTQLIDVTSKPDFCPQQVVGSNSSGGHARPARSHAECSDERH

SEQ ID NO: 953348 - protein, 110 aa, Homo sapiens
MRIPYRGGCSRRTYVVGQAAVAHTCNPCTLGGRGGRITRSVVRDQPGQHGEHPSLLKIQKISRAWWQAPVIPATREAEAGVWLGPGISRLQWGSDHATAFQPGRKNETSS

SEQ ID NO: 953349 - protein, 109 aa, Homo sapiens
  misc_feature (16)..(16): Xaa can be any naturally occurring amino acid
MSSAETGRSWALVACXNPMSACRLSPTCPAQVDAGPPVTRALPSLPEGLPWGLRESRPTHLGPEKPVGPGILRKPCRCDPGPVPGQERGKAMSLVLPGPPGKWRGKGSP

SEQ ID NO: 953350 - protein, 40 aa, Homo sapiens
  misc_feature (29)..(29): Xaa can be any naturally occurring amino acid
MSPRSDHPRSFICWTEIKHASSTCNGAKXSLVGPRGATCE

SEQ ID NO: 953351 - protein, 39 aa, Homo sapiens
MILFQHPKYDISNMTSIASDVQVRRDMSGELDKCAPLCS

SEQ ID NO: 953352 - protein, 64 aa, Homo sapiens
CLHKGCEFRDSQTTCAVTGPEFMADPAMVAALAASVSASIGHWTLDTVELSIYGEVRGDWQLYD

SEQ ID NO: 953353 - protein, 109 aa, Homo sapiens
HKDAGFHTGSHGWELVVAMIWVGLAAQDFSQSLWHCSSSLFAACSTKSYGCCHRSRDLSSVLQVLPPTRNMHLVGCLCRLLFYSLTFPRVGDILAIRKSGSYIPLTPAF

SEQ ID NO: 953354 - protein, 49 aa, Homo sapiens
GNIVPRPDPVRTVEEALLRSSVPVMHNAVYLLCTAVRFYCCCWLTDCNM

SEQ ID NO: 953355 - protein, 37 aa, Homo sapiens
CAPTSSLSVVYEEDGSFKEYRFFGRNPDAVIVDTCRY

SEQ ID NO: 953356 - protein, 105 aa, Homo sapiens
MLLVQLARHRCRYDARAKPGPVLKLLETLNTDMSWARPGDRAKLDEAVDSLEEATNSTEWREWNTNSVSVPFDVTRLKYPIRKAWSDSPSEPNALDGMSITMLRV

SEQ ID NO: 953357 - protein, 35 aa, Homo sapiens
MSNRGGWSSIFLSFSLWVMAVVHAFPAHGPPQNAT

SEQ ID NO: 953358 - protein, 87 aa, Homo sapiens
ILTRARDRPMRSHAALWHRYRDREHRLYYYRTYLTPGLDHQLAVNQWPWSPATGGKRMAYAAGEGQNSTRHNPIAQGQGSADTHNRP

SEQ ID NO: 953359 - protein, 163 aa, Homo sapiens
MDSRVTLVSDDRSRLLLPDTLLWTRCGCMLGIHTGEWTAHIFEYAMSFEGNMTKCRELAAANGVGVLHPPGALATDPPGLIVCDVDSTVTRTVAIDLLADCAGKADEVREITARAMVGELDFTQSLYARVRYLEGLHIGALEEAWKATVINPWDSRANGPLAH

SEQ ID NO: 953360 - protein, 79 aa, Homo sapiens
DAVRLIDETPGIHDVVVSPVYITAPIGGVEQDDFLNLIVVATSDLPPSVLLERAHIIKAAHGRDHTIPNGPRTLDVDLI

SEQ ID NO: 953361 - protein, 73 aa, Homo sapiens
DSAAPADLIFVDLYTDVGPSSAHLAWRFLENCQGKLNRGGWLMINQWSATDGKPLGAALLRGLFRHHYWECPV

SEQ ID NO: 953362 - protein, 126 aa, Homo sapiens
ISRHARQGVDGLSDPLMEPLRGDGTIDGPQVGGEQRQDPVATVCAEKTKRRVGVDGFSQLLWCCCQRVPPAGLRCRQYLLYRTTRCRFGGRTGARGGRGCVRLGTLIRQMPSAVCGRGRQPGVRSV

SEQ ID NO: 953363 - protein, 99 aa, Homo sapiens
ESLVRRALEHERTPRLPQDMTNIKASILWPETSSTKAKTLQRIFSAKLGVVSNRSSRQKGSLVDNQLTQSTPCVLENCKGRARSMKKWTQRHGLTIISL

SEQ ID NO: 953364 - protein, 49 aa, Homo sapiens
GGSDEFFLMRLQDFHAFQPGSLVSVFFRGDFAFFLEHLHDAFEVHREHG

SEQ ID NO: 953365 - protein, 98 aa, Homo sapiens
AIVYIIWLPVLPILMTFIHPYSMLSPTTGCTEQQRMGPGRGPIPGQRLEITPVQRGTTLGLLRGLVSVDEVLLQVNGEPLWIKGRLFQVVQGELFQVK

SEQ ID NO: 953366 - protein, 67 aa, Homo sapiens
NSGQVAEASGNAYQNRNVSRALVLKITQPRVCLYSNTKGVRHSYNEDWNVLTSFTLLHDLLVTIFMY

SEQ ID NO: 953367 - protein, 140 aa, Homo sapiens
SALEVVCIDKLDMWGDSIPLHSIALIPFHLIPFNPIQVHSIPFHSIKFQSIPFHSIRVHSVPFYWRPFNSIPLQSCPFKSIPFLSIRIHSIAFHCIPFESIAFHSIPVHSIPLHSFRVHSILFHSNPFHSIPFHSIPFES

SEQ ID NO: 953368 - protein, 55 aa, Homo sapiens
MSRLTRNSGFAATCWRDSSDCGELLLKSTGGARRLANPGRTSGGECNGISQFDCE

SEQ ID NO: 953369 - protein, 86 aa, Homo sapiens
MKHLADGVSLRFDGADATMYLIDTMNQRRVHGELVMEMGEAGEVGISPTSEVMTLGKRCREAHQTVVSNSEDLGLASLEQAESRLA

SEQ ID NO: 953370 - protein, 103 aa, Homo sapiens
MQHRQPSTNEHQHSHRQCISAAPRIWTLHYLLATPRRHNSHSVQQKKDSLERGASQQRTARPRSCRLDSAGQCPCDFAVCRPHPPPCYVIVDRPDIGLPFWRV

SEQ ID NO: 953371 - protein, 76 aa, Homo sapiens
PSASINLHAILRSCVPLVNNDPVARNIVKDSDISVRFDAAGITPLTLIFDHGTARSETSNSSKADLRLGLVSPEHV

SEQ ID NO: 953372 - protein, 43 aa, Homo sapiens
RAGTNLKLPNVKLLQKNNSYIFDTHHVASLNAWNDKNTQINVC

SEQ ID NO: 953373 - protein, 43 aa, Homo sapiens
YVTTYSSPSCQLCHQYLFSFLSVMSPVLFSFPSVMSPVLSSFL

SEQ ID NO: 953374 - protein, 47 aa, Homo sapiens
PVAIRTKIHNRKCDWIRLLNVLPPCRSCHGRLYVGCALITSYLGSFI

SEQ ID NO: 953375 - protein, 83 aa, Homo sapiens
GTKPEVAKYFQSLIFDKANKNIKWGKDTLFKKWCWDNWLATCRRMKLDPYLSSYTKINSRWIKGLNLKPETIKILKETLEKPF

SEQ ID NO: 953376 - protein, 74 aa, Homo sapiens
MSSVDLCYANDQIHKSVSLVTLPGMSACLYCITPFVGQLDCFLMTNGPRGVVHFYGYSVVSTLALLVSIAFPIP

SEQ ID NO: 953377 - protein, 78 aa, Homo sapiens
PEYFQVKLIFDKANKNIKWGKDTLFKKWCWDNWLATCRRMKLDPYLSSYTKINSRWIKGLNLKPETIKILKETLEKPF

SEQ ID NO: 953378 - protein, 83 aa, Homo sapiens
LVLVSILTGLAHFRPASLCPVHPSHSWQEILQARCPSLAQIFHRISLALPLSVFLPLPLGCHFLCHSETPELMLFPGLETKLR

SEQ ID NO: 953379 - protein, 39 aa, Homo sapiens
MDHIVHIIMSICTMLCNKDHVIHDLFRAVYPFPGRQKIH

SEQ ID NO: 953380 - protein, 45 aa, Homo sapiens
YARQRLQLLAHTAPSSRAVCRLKCNCSVLITSASCSWARNGVSVW

SEQ ID NO: 953381 - protein, 40 aa, Homo sapiens
QYEKINRPGMVAHACDPSTLARPRWVDHLEIIVFNDHACT

SEQ ID NO: 953382 - protein, 34 aa, Homo sapiens
LVPCRFLLRRLRRARWDCAHFERTQFHRCLLDKA

SEQ ID NO: 953383 - protein, 34 aa, Homo sapiens
MIEVLRFPTFRNLFAAQVIALIGTGLATVALSLL

SEQ ID NO: 953384 - protein, 50 aa, Homo sapiens
PLFQSSSEKDDSSAASWPVPTGLGGQGDLSACFGLVSGSRLDFDIAVNLI

SEQ ID NO: 953385 - protein, 40 aa, Homo sapiens
SSSYLFHLLSSSWLYDLTSRPQKSHTVQRLQQAGISLSLA

SEQ ID NO: 953386 - protein, 34 aa, Homo sapiens
MCAGAQRPYTDCGNRSLFAYPSEQQPCGSEEGLQ

SEQ ID NO: 953387 - protein, 51 aa, Homo sapiens
FRPPPHPADKDTLQSSKQPSKARLEEYYLHTTETIKSPRVEQRLAKQPYYL

SEQ ID NO: 953388 - protein, 67 aa, Homo sapiens
DTLNINISIIKSLDSHFCSCMATSTYDRRYKRYRYTTSSSYTEEYVVKNLCSLLTTMVLAFTPLGTE

SEQ ID NO: 953389 - protein, 76 aa, Homo sapiens
CEFSWACKGPTAAETLGRSEAEWQQVLGCKNHKTTVMGPRGVGFPTDEQNQSVQKQAPTLRTTDLMKAQRPFNGIF

SEQ ID NO: 953390 - protein, 30 aa, Homo sapiens
MARCCAGQAGALGTGALLKLGCISEEAQES

SEQ ID NO: 953391 - protein, 64 aa, Homo sapiens
MSTPQITKSELHFNKIRRYSYAQSSLRSICCKPNVDLFSFSTVPFFYSVSLNSSPWGGGVGECA

SEQ ID NO: 953392 - protein, 34 aa, Homo sapiens
CNTRLVTESSSGFVPTPVIQSARGILLESEPCQA

SEQ ID NO: 953393 - protein, 58 aa, Homo sapiens
EILGMWGLEEHTGSRVLNIVAGFSVAELQIFQESHESPQEAWLLPDKRQLLLQEMGKD

SEQ ID NO: 953394 - protein, 63 aa, Homo sapiens
NCHDKQHDHPSPTTTPSRSITHHNHPSGKHHSQQWCMEHKQVVEVDVEAEVGWGEVRVVECVG

SEQ ID NO: 953395 - protein, 67 aa, Homo sapiens
LRLTRGSSHGRALARRAPQALEVGCRHVNHKRACLLMGKLNTDWELRNLCLFCEDVNRHLSYVVDMC

SEQ ID NO: 953396 - protein, 66 aa, Homo sapiens
MRPMSAQFIKLDSEYRPTHPIGCFIVDNKSGKQLTLYHILEQLSSLALTETDFETPLDSVQLLSIC

SEQ ID NO: 953397 - protein, 43 aa, Homo sapiens
ESSLGARILGSFSQSSTDWLCDLRKSLPLSQPPVSRRPRSIPF

SEQ ID NO: 953398 - protein, 116 aa, Homo sapiens
YTQTHTDTQHILTHTHRQYTTHTHTIEPTYTHADNTQNTTHRTHANPQTQTPDNTQRHTTHPKPIYIHNTHNTQTPISTPITTTTTVTPTPTPTGTETPTTTPITSTTTVTPTPTP

SEQ ID NO: 953399 - protein, 67 aa, Homo sapiens
FDSSLKGIQQDVDRGVPSSFVVPFHQHCIQGIPWACCTSSDHIDLIFREVQLPHELVPGVKGHDVCK

SEQ ID NO: 953400 - protein, 52 aa, Homo sapiens
FHHFTRIKASPYNGLQVPTCPSFTQSSGLPRQCPQFPVLSASVSWQTSPDDL

SEQ ID NO: 953401 - protein, 111 aa, Homo sapiens
MTDLFWHKIVTSGDFDKLVNELLAASSSTNALSPQIFKTVMSCLLLNFCNGLLNIHSFLQFLVHHDEIFACFMTSITIKSHEFTPMLMDPLFQYVIEIFIFSLVQGISIFH

SEQ ID NO: 953402 - protein, 58 aa, Homo sapiens
  misc_feature (36)..(36): Xaa can be any naturally occurring amino acid
  misc_feature (46)..(46): Xaa can be any naturally occurring amino acid
MRCSLISAPALVVLACCLHVGVCTWVSCMWVSCALXVSLCLHVGVXHPHVSRVRTSMC

SEQ ID NO: 953403 - protein, 60 aa, Homo sapiens
  misc_feature (56)..(56): Xaa can be any naturally occurring amino acid
RLIRFLYQSIFLEWLLKQILSCRKKWFIKTSDSFFWCIYLLTVIERQLRSRRYGTXRQVS

SEQ ID NO: 953404 - protein, 73 aa, Homo sapiens
RQRETDPKAFHRSLSLPLPSQAITGPQAYKGTVISREVPNAHSTGLLPWATLELCSQILVQCFLATLTGVQMA

SEQ ID NO: 953405 - protein, 42 aa, Homo sapiens
GVSVSGVEEFPSSFSAGEDPEEGGVNLGWGDSISNRVRVGKA

SEQ ID NO: 953406 - protein, 82 aa, Homo sapiens
MSIGVPRSLGVEYEVINELCSVDPSSSCIQNMLVRSRCLICSEKIRKSAIVTNSITGSERIMRVALWSSFVPFISDFYLSPS

SEQ ID NO: 953407 - protein, 35 aa, Homo sapiens
MPLRLLLLIALRDYVHRVILPSEFLGPPATLRCTV

SEQ ID NO: 953408 - protein, 44 aa, Homo sapiens
RWTWQRLQPTWNDLGDRFDSVGAPQCVWLRGLLLLRLPEAPRGN

SEQ ID NO: 953409 - protein, 62 aa, Homo sapiens
PTVQSDLNPWLPTWPWHVLNVPEPTASSLQVTLTGLLTTLHGVNAAHNYPLPSPLLLIFLAL

SEQ ID NO: 953410 - protein, 143 aa, Homo sapiens
  misc_feature (126)..(126): Xaa can be any naturally occurring amino acid
PSSFPYPPGVIPKLDCPTPRPGGGRRRLLGLLLCLLLSIHMQEACIEHLLDPQPKAQGYGNLIRPLPSTFTVCRREEADGLKFQALEVERRKGRAQGIQERGRLIRLGECGGASRVGLEDEARSQXDWDPVLPCPSPAQAVKQ

SEQ ID NO: 953411 - protein, 173 aa, Homo sapiens
IDPLWPMNAPQKSACTCTRSTGGRRVIARSRNRSVARPGQLIEYSRSTVIGRDGRSTDDPLEVRRTCIRGATTVTVCPALFEECALQPHRHLRAPEGVEVLIAEEDDVHVWAARYSGSGSSRYSASKVSRVRLMSWITTPSSDACCIRSYSAGSAVSTSVKAGSEFVDVPRLE

SEQ ID NO: 953412 - protein, 63 aa, Homo sapiens
SGESCPGKLIVIHGKAGLFLEGQIHPELEGVSIVISEKGASSPLITGFTDDKGAYSVGPLHSD

SEQ ID NO: 953413 - protein, 96 aa, Homo sapiens
RGMNNLPRAFPLLKAGALGINQSLGVIKPRMCSGPKKEGQLAATASVNTSWWQQQHAELWSPPEPASILRSQPCMWEQRSMQYTNNQLITTCSTEE

SEQ ID NO: 953414 - protein, 36 aa, Homo sapiens
LERELREHQERHLEQRDEPQEPSNKVPEQQRQITLK

SEQ ID NO: 953415 - protein, 106 aa, Homo sapiens
VPVALGVPVECREHDGEDSGSIVTYEAHDVLIVPERESTLCHLEMGARDTLGQLAEEGFHHFVENKAPYVHRQKPYCLRPWNLGAVFLRPWPLQGTYKGQDKACPT

SEQ ID NO: 953416 - protein, 43 aa, Homo sapiens
YAHYLLCKMADDRGVFPGQWALSGGGVEPGERIEEALRREIRE

SEQ ID NO: 953417 - protein, 82 aa, Homo sapiens
RFREQGTFTDFVIKCDDGTEFHCHKVVVCAQVDAINAGMKNGFKVMSFFSHENVPVMQIVADRNKEAQTGEYLLPEKKSSIV

SEQ ID NO: 953418 - protein, 86 aa, Homo sapiens
VIGSGCLIAGGAVVLGGTEVPPGSLVAGVPASVRRPLTEEERAGLIANADIYLEHVQDACRDDSRLSPRPLGWSAYGAVAKLVKAV

SEQ ID NO: 953419 - protein, 33 aa, Homo sapiens
MGILLCCPGWSQTPSLNEMEKRTPTQEFPPSQY

SEQ ID NO: 953420 - protein, 53 aa, Homo sapiens
VQTASIFLICFLVPYALGLTLTTKLTNTNISYAQEMETVCTILPAIILVLIDL

SEQ ID NO: 953421 - protein, 115 aa, Homo sapiens
TQSFINDPRSNDSNLRLIHIPVPADGSYFAGVFLHRHPAFAFPVERVHKLPVFAGRGRSQPRQRGADGLADFHVRGQAMPGRGNLDPSEQSGRIGRDRRNQGLHLDAIAAQRADR

SEQ ID NO: 953422 - protein, 51 aa, Homo sapiens
AQKPPRQVPLRLYAGNNLNAANDNRAAALVVRVYTLKESTAFMQAPFDAFV

SEQ ID NO: 953423 - protein, 83 aa, Homo sapiens
NYSRAACIIMRGTLTTTFFLGTTYDALSPELYTTYFVTKTLLLNLPVLMNSNSIPPPPLRPTHTPAMKKLPTTHPSIADMICL

SEQ ID NO: 953424 - protein, 38 aa, Homo sapiens
FGFAHIAAGLALSANSYAKEIKISSNNTSYSDADVQKL

SEQ ID NO: 953425 - protein, 126 aa, Homo sapiens
MDSFFLPLLCPRQITFLAKAEYFNGTTLVGRLQKWFFTSSGSRPVNRTSASAGQDAMNTAVEVLNDGDLFGIYPEGTRSPDGRLYKGKTGVARIALASGAQVIPVAMIGTGDVNPIGTWFPRPGKV

SEQ ID NO: 953426 - protein, 72 aa, Homo sapiens
MDECEQALAAEPKAKDPGGYLPKSTSPLDEFKRKDFNEDTLSVALPYYWEHFDKDGWSLWYSEYRFPEELTQ

SEQ ID NO: 953427 - protein, 56 aa, Homo sapiens
MLLFVSVVRLVVLTHYVLVLADIVRLAGLYLAKVLGPAWALPKVTKVLNAVIPENF

SEQ ID NO: 953428 - protein, 36 aa, Homo sapiens
MEFNGMESSGMEWNGMEWNGMESTRVQWNGEERNGM

SEQ ID NO: 953429 - protein, 69 aa, Homo sapiens
HYNMWYDMQYDMHYDIWYDMRGDMQYDMWYHMQEDMHYDIWYDMRCDMQYNMWYNTDMMLATAAVTPLK

SEQ ID NO: 953430 - protein, 134 aa, Homo sapiens
  misc_feature (113)..(113): Xaa can be any naturally occurring amino acid
MPLHSSLGDRVKLYLNDNNKNLARCGGQAAIPASQVAEDYRHSLPSPAYFCIFSKNRVSPCWPSLQKIQTISWAWWHASVVPATWGAEAGEWREPRRQSLQGAEIVPVHSSLXDSAKLRLKRKKNSTEISHAPL

SEQ ID NO: 953431 - protein, 87 aa, Homo sapiens
MCENDEEEKEKRENVERTMGDEKAHHDGMEKNSEGAFILVSIFLELWPTAPPFSSDYVFSAFKSSLVVLSKRVVPDKRIVSPKEWEI

SEQ ID NO: 953432 - protein, 72 aa, Homo sapiens
MGQGLLPSTLGPGRYGVETPLCLRWVQVEVGQGLLLSTLGPGKCGVGTPLCLLCVGKRKRDQGLGAVAHACN

SEQ ID NO: 953433 - protein, 53 aa, Homo sapiens
MEMDICEGEPNWLHVSYYISATLKQRHLVEALVRQVRWASKLWATGGLEVGRM

SEQ ID NO: 953434 - protein, 52 aa, Homo sapiens
TIMRKPISRLAAFIGLGVSLVASSLAAPAVARAEGKIRIAEQFGIVYLLLNV

SEQ ID NO: 953435 - protein, 88 aa, Homo sapiens
MAMKRSGESIDISNDELAPVELKVDVTTQFNLDIQADEFGGIKDLAELNDWNVAEGKGRDVDIGGGDDEIRSGQRRLVCLVAGQHEVL

SEQ ID NO: 953436 - protein, 121 aa, Homo sapiens
MMLLEVDASVRLQLRASMAGYSSLVLWRGDLTCVDQSGVKLLASSDLPALVSRELLGFTGVSHCTRPKTCQVVAIFIYKIYSRHLFKKLRVQPPPCKNHINKFVYNLKHCKHSEVTFLDKN

SEQ ID NO: 953437 - protein, 109 aa, Homo sapiens
MGFLCVDQAGLKLLVSSNPPASAFQSAGITGMSHRVWCILYIINRHEGLAMLPRPVSNSWPQVILLLRPPSVLGSQAGATVPDPKPSFIIPSTDLYQVYLILCCLLKCP

SEQ ID NO: 953438 - protein, 189 aa, Homo sapiens
  misc_feature (173)..(173): Xaa can be any naturally occurring amino acid
MSGLEYRLGYTVVVRLLLELLALSDLPAATCQSAGITRVSHLSQPEATFKSNDKGWWHDMLITHSLHCSIPRYAWGGLLLTLDTTSPLSATHNVSVLFPQDVAHGLCLKVLPLCYFPPYHSYLQFHQEPKTVISLILQEDPLFSVPYTSPCHMATPSGISQHLLPALLLKGLXEKTAQFCWDHSFVLSA

SEQ ID NO: 953439 - protein, 37 aa, Homo sapiens
KIGLLTSGGDCPGLNAVIRGAVLNGVKKYGYEFVGFR

SEQ ID NO: 953440 - protein, 36 aa, Homo sapiens
AFCCWNSENAGNHRPYCLLMIRKLLVYRRAPYHVAP

SEQ ID NO: 953441 - protein, 164 aa, Homo sapiens
  misc_feature (156)..(156): Xaa can be any naturally occurring amino acid
MSGLHTGISLDTTDHTDVLVSAPELNNVISLDYDSPVVKVYYTYVFLDVIRRADLNGSNMETVIGRGLKTTDGLAVDWVARNLYWTDTGRNTIEASRLDGSCRKVLINNSLDEPRAIAVFPRKGYLFWTDWGHIAKIERANSDGSERKVLINTDLXWPNGLTLD

SEQ ID NO: 953442 - protein, 69 aa, Homo sapiens
NKLVTDKTITYDQNAYEVFVTVADDGKGQLVATVEDADTERVFTNTYTAPVPPAPTATSATLEFTKELA

SEQ ID NO: 953443 - protein, 59 aa, Homo sapiens
KANLKDPSVRKEFCRANISSSSLFVRVSSKLSKKVLLELVLLAGPVVVELFIFALERFL

SEQ ID NO: 953444 - protein, 59 aa, Homo sapiens
SIEEKILDMQKNKAELAQSILSADHEGDIKLSEDELLGLFDKFYDINTIIIQFYNSITL

SEQ ID NO: 953445 - protein, 79 aa, Homo sapiens
PQFWCVYFGKFLCGQIFSEQLTNTSLNPENSLVGDGSQVNDTVSNLVSKLTTGKPAASASASEREASSKRIGNASGVSE

SEQ ID NO: 953446 - protein, 36 aa, Homo sapiens
MASGFLISGFSLGAGVTAQVYALIEYLTRGTSAESH

SEQ ID NO: 953447 - protein, 40 aa, Homo sapiens
YVRGYMIGEHGPSGFPMFTGVNVGGVGFDGLAELFDTDPM

SEQ ID NO: 953448 - protein, 38 aa, Homo sapiens
  misc_feature (1)..(1): Xaa can be any naturally occurring amino acid
XIPLFDIPMWAAIYYRWRLLWFYRCCLEHPQEDLNVTI

SEQ ID NO: 953449 - protein, 40 aa, Homo sapiens
HCNRAISHIVKHAKAFSLRCVFPRNFNSGHSLSQGVRRET

SEQ ID NO: 953450 - protein, 95 aa, Homo sapiens
LRPKSSRFDRVLTVKSTGLRHGGGDSAPPVEERRVGLPDYVKTKEEYPSSSFSSGGSGISSNMIADKGRLRVRMTALGTSSGPLSQYFPKLIIPL

SEQ ID NO: 953451 - protein, 41 aa, Homo sapiens
RGSPHPAIGACREEKDLTPSLSPQIKVLRSVKYPTEKHREK

SEQ ID NO: 953452 - protein, 42 aa, Homo sapiens
LAAQARVASTSVRCRLGSTAPAPRSCCSIRVETAAGSLLQRD

SEQ ID NO: 953453 - protein, 52 aa, Homo sapiens
DVVRSAQRLRAVELEVHLDEGARPGGAGLEVMEPQHAGLGGDDRLELGEECR

SEQ ID NO: 953454 - protein, 39 aa, Homo sapiens
LVSISRPEDSDAEHQRMTRCAEVVLEKLGLPYRKVLLCT

SEQ ID NO: 953455 - protein, 110 aa, Homo sapiens
GTPEQYTVNSIADLARQWLGDDSAINRSFRPSFGRKLAVVTCTVIGTCNSNVKVIIECGGCSRESTLLGRGSVLIVERSGDLAMGGRDGALPKQTVLSARDQCEGLRLHM

SEQ ID NO: 953456 - protein, 69 aa, Homo sapiens
VPLASKYQFEFPQFLTKVNIAAQCESERKRKLLAKKLKSLRAESQQNAPKPKPTVKIIDDYVVNQSTQQ

SEQ ID NO: 953457 - protein, 41 aa, Homo sapiens
ARYPFAPYRRLFQKKKFFTSCCRKYDITNSVYAFIRYSDVG

SEQ ID NO: 953458 - protein, 126 aa, Homo sapiens
LARYPSGLSPLRLDSSQALTAALEQAGGQQPDEGSGGGLIDRARAEYDKYFTPGGSERRNVFADRDELEEIRSNLAKGQERLAEVDEVVDSLSRINEQISHDQTGVASKKTDCQKAEAALASLTEL

SEQ ID NO: 953459 - protein, 42 aa, Homo sapiens
VPQRHGEVAVHPLVLRHVGLEAVLKPNICRVRLRSQISESNG

SEQ ID NO: 953460 - protein, 35 aa, Homo sapiens
ANHLPKSVFHLCPWETEGQAWIIMNRAMPHDTEEA

SEQ ID NO: 953461 - protein, 88 aa, Homo sapiens
  misc_feature (3)..(3): Xaa can be any naturally occurring amino acid
SGXFAIVPRESQPAHYEKRKDDDPDVYSDFESDHVALKQKQEIISDYNMRMAVLEGSECLNAAKDLAKFQAGEQQRSTGKIPIGLGGK

SEQ ID NO: 953462 - protein, 42 aa, Homo sapiens
ANILPKSVFPPRALGRQMGPSLDYHEQGNAQTPRKLWRVEPV

SEQ ID NO: 953463 - protein, 46 aa, Homo sapiens
GSSRGPRTFAQKLELTTHHRIIQESDPIVYRIGAKNLLVRSQTLSY

SEQ ID NO: 953464 - protein, 67 aa, Homo sapiens
YPYTARSPPGSKEVSCVDAQVHFQVRTGRSVGRNMNPGLAMSWCNYISKLNQVLAAASETEPSTGSN

SEQ ID NO: 953465 - protein, 36 aa, Homo sapiens
MVRACFWSSSQPFWGAGTKTAQNVGFRSLENIRSRL

SEQ ID NO: 953466 - protein, 50 aa, Homo sapiens
MSWYHSLIFNREQPQRNAAHAGSSRAWRRDDGRDYSVRKIRFSSGPSTLN

SEQ ID NO: 953467 - protein, 55 aa, Homo sapiens
  misc_feature (52)..(52): Xaa can be any naturally occurring amino acid
AAAAPRNKDGKGKVCPDSCATAHFFAHLQEFLILLGLAWRVGQKRNGRKRRXDPE

SEQ ID NO: 953468 - protein, 111 aa, Homo sapiens
SEGSDNGEEVTDLRTIGVKLAGHEGKRGKTTSPLTFMKHLLCAGRSAGGAPLCAGLSAGGEPTVCWPLCWGHAHCVLAALLRVHRVESLPGLHGSQLQPLVACSKTCGSLS

SEQ ID NO: 953469 - protein, 84 aa, Homo sapiens
DVALCARYRAPFYYSTERTALCATAVVIPSAVTGTRRASSFDYTLVPPGNFLPLLLTHSNMPAHAIPPTHWTCTCCAHALSGIW

SEQ ID NO: 953470 - protein, 90 aa, Homo sapiens
  misc_feature (1)..(1): Xaa can be any naturally occurring amino acid
XDRARTHCLKAWDVEKLKGKQGVFLTGKWIKLGYKDGLRSPSLICSKAEASGRLENPDFFFFFFFWRGSSRSVAQAGVQGRDLGSRPSNM

SEQ ID NO: 953471 - protein, 81 aa, Homo sapiens
LFARQWLEESSYPVNTYIKKTERVQSGILRSHLKELEKQEQTKPKPSRRKEITKIRAELNETNKQKNIQNMRTRQVSDPEF

SEQ ID NO: 953472 - protein, 42 aa, Homo sapiens
LNWALSETTISQANSNKPQLITQTLSIIQYYVEHRMSSTLEF

SEQ ID NO: 953473 - protein, 65 aa, Homo sapiens
AAKSILEDTPLVKSSDYRVPVTIVKTFTVDPRPSVLQAHGMITCNQNNFVHDCINITIKQHTVTT

SEQ ID NO: 953474 - protein, 72 aa, Homo sapiens
AYVHRPLEHNVVDCCQRCSPWHVRWWPSLSTLLRHVTGKPTTETPYSKLEPKTIFPRDFLLHYEMRQVVDCF

SEQ ID NO: 953475 - protein, 77 aa, Homo sapiens
PRLRLLSSSTHRFIDEEDAGHLQSKGNKSRTWQKQKESHLTREYYVFSEVRNEINRPGTVAHACNPSTVGGRGRWIT

SEQ ID NO: 953476 - protein, 60 aa, Homo sapiens
  misc_feature (55)..(55): Xaa can be any naturally occurring amino acid
MDSEREREKRRELRAKLGFEVRVGKIEVWELTERISGCRDRVESRLACPSSEERXLDEPY

SEQ ID NO: 953477 - protein, 45 aa, Homo sapiens
VITPCIASSSLSPYITITLLKLYFYLRHILLHLIITITIITIITI

SEQ ID NO: 953478 - protein, 105 aa, Homo sapiens
  misc_feature (9)..(9): Xaa can be any naturally occurring amino acid
  misc_feature (31)..(31): Xaa can be any naturally occurring amino acid
  misc_feature (39)..(39): Xaa can be any naturally occurring amino acid
  misc_feature (46)..(46): Xaa can be any naturally occurring amino acid
  misc_feature (57)..(57): Xaa can be any naturally occurring amino acid
  misc_feature (75)..(75): Xaa can be any naturally occurring amino acid
MFVTIHPQXTLGYFHFLGIMNDVAVNTQVYXLVWTSVFXYLRYRPXGGMAGSYGNSXGLTFRGKCQTIFPSGCSXSVYVPHQHLPRPSKKHVRWGLKGDLHFPKK

SEQ ID NO: 953479 - protein, 34 aa, Homo sapiens
  misc_feature (18)..(18): Xaa can be any naturally occurring amino acid
LEHEEEMRRDEVRTMRLXNKELLDEEEDIDPFYA

SEQ ID NO: 953480 - protein, 101 aa, Homo sapiens
SSPHYTHKLHPLEPIHFTFYFYLLQISRIHALSSIPTAADSFVAPKVSFLGVFIEAGCHSITQAGVHQHNHSLLLQPQPPRLKLSSHLNLLICWDHRCAPP

SEQ ID NO: 953481 - protein, 72 aa, Homo sapiens
QQMLGHSGWASIHLQCQHSSQHPAVAQPWLHTPCSLNHINHHTHIQPGPLVGCVAVVNPPASPLWPGLQHCG

SEQ ID NO: 953482 - protein, 84 aa, Homo sapiens
STLCTIFVVLIRLIHFMSKHLPLLIYSHALTFSSKPGHTDFNATQHVSWWQQQFVMGFAFQQSAPPTFPILVPSTISKGASSQQ

SEQ ID NO: 953483 - protein, 112 aa, Homo sapiens
LSISTSTIDLHIARHGVRSAGTKCDRHVILLLLSISYKFPAQNYNRKVQNQDASNTLITGSPLNISPIQGCTHVRENQTTKLKKTLRIPVIGTRMQKNSLCTNEEDLTDVHQ

SEQ ID NO: 953484 - protein, 35 aa, Homo sapiens
RYNWASLDGQDSNQNIHSNGAQTDGCQARQSPARK

SEQ ID NO: 953485 - protein, 80 aa, Homo sapiens
SIFIPIPQHSLLTHHSSISCCCAAIHIPWSITAFMQQCTSTQQHGSSFNSTQGQSSTAHMHHAQCRMVKVSGISYMGASG

SEQ ID NO: 953486 - protein, 67 aa, Homo sapiens
MDGLNTADGLRKVICSTVFELGHQSSALSLGIGLELYADSPKYRAYSEYNLGYTACVHACVCVCVCV

SEQ ID NO: 953487 - protein, 36 aa, Homo sapiens
GHLTLDLERTWNEHCNALDLNMYMELEPELKQDVHT

SEQ ID NO: 953488 - protein, 47 aa, Homo sapiens
ESTDHGLSIVLLGFSQSCSATEIRASGLSKKESYFNAFFTFHSYNRR

SEQ ID NO: 953489 - protein, 71 aa, Homo sapiens
AVNTDVWSAHQPGTVCGPTDMALIYLSSHVLLLNEQISEVVTFALFAYRLLLLSGLSILFPDASDYYNVSP

SEQ ID NO: 953490 - protein, 66 aa, Homo sapiens
SYGVYHIGQDGLDLLTFRSARLNVPECCDYRYEAPCLALRLTNFLSFQLTRGCAVLAEYGLDLLTS

SEQ ID NO: 953491 - protein, 71 aa, Homo sapiens
MTCLLSYLTSHLSAVYPDVESHAYKKSYPMTNFCFLAFPSTALSAVDDIQALVSGWLLSVKKSHSPLYQCL

SEQ ID NO: 953492 - protein, 34 aa, Homo sapiens
MGLSSFLHVSYVSRFALTAFIGLHIFPVQDILID

SEQ ID NO: 953493 - protein, 61 aa, Homo sapiens
GGAPDLGLYDRTAPVSPLRCSNLCASMCSAVLGMVTVCMECPVLVDAQWIRGLQQASMCIS

SEQ ID NO: 953494 - protein, 117 aa, Homo sapiens
LLTLQITQNVSGLRSQWIILVIVQSIQALQHRVGKLANQRQTDALAFILLDELIEVHAQQIKRSMQMMDCGRMKYLQHMDDIHSVSYDPCFRRMFQGFEISIRCLPEMESASHFRTI

SEQ ID NO: 953495 - protein, 105 aa, Homo sapiens
DLLKQRMLCTIVLTSKRNSSGTFIVLIRRVDGNSDIKVYMHREQAYQAAIVHNVDSDDLISMGSNDTVRLLKKSDIPYWSLLGESSANSLKDVTSHYETGGHPLS

SEQ ID NO: 953496 - protein, 43 aa, Homo sapiens
HKFKKGDEYDVCAICWDEYEDGDTLRNLPVPCLSRKCETLVNK

SEQ ID NO: 953497 - protein, 137 aa, Homo sapiens
MLFRGSLESDMCMGGGNVCWCMLNRLTLETVRKYFPETWIWDLVVVTSAGVAEVGVTVPDTISEWQAGAFCLSADAGLGISSTASLRAFPPFFVALTNAFTLCFVATASHSRPRSTRTFHKCIRVSVQLEASPAFLS

SEQ ID NO: 953498 - protein, 60 aa, Homo sapiens
PGGAICGIAVSFGALISPGGCSASRPSWLCAGGAPGVSGSALGWGLTPAALGSGRESAGS

SEQ ID NO: 953499 - protein, 182 aa, Homo sapiens
VLRILELNCVWEEACTLVHVEEPHTETRYDRTYLRHRIWDLVVVNSAGVAEVGVTVPDPITECKAGAFCLSEDAGLGISSTASLRAFQPFFVELTMPYSVIRGEAFTLKATVQNYLPKCIRVSVQLDASPAFLAVPVEKAQAPHCICATGRPPVSLGSNPKVIRPCESHCERRGTRVSRAVW

SEQ ID NO: 953500 - protein, 220 aa, Homo sapiens
QADADFVRFCRTMADICMCRLGGTWASSQHGSQAPRCSCPRAPGGSCVASYDVEQGVTFYCGSQPAPVEEVGEAPHLSVHTIMGKGYAPTSERVICHRVAQGHGISHGCHPKKALSRGALPSPEAVIGDALLRLQTTRVGSQPPTTGQLYVPSEEQEQGPKARSQCGTEHLLLEMPAPHEEGHSGEQALVLIAGCLLVTGCPIREEEISHTDVNLASKKI

SEQ ID NO: 953501 - protein, 125 aa, Homo sapiens
LQADAAGWVDWTKKLCNTVRYPNVFGIGDCTNLPTSKTAAVVAAQSRIVDKTFSVIIENHTPTKKYDGYTSCPLVTGYNRVILAEFDYKAEPLETFPFDQSKERLSMYLMKADLMPFLYWNMMLR

SEQ ID NO: 953502 - protein, 73 aa, Homo sapiens
GSVIECLSSTSPGYRAHRTRLKAKGADKVTFYTRKAALKAQNALHNMKVLPGKHYPYTDETCLHSAEERMRVE

SEQ ID NO: 953503 - protein, 42 aa, Homo sapiens
PLYRLMQRLNSRTCRQHEQAQRGYHCPHAYTSQARSGLRRAS

SEQ ID NO: 953504 - protein, 161 aa, Homo sapiens
MAPSTDTDSSDSLASMNYSYHYDTTAFLIVTACGRITDVECICLHLYIPVTCVIVIIPLAWEFKSSMGKIVAGLLLLLLLLLFLRWSLAVRPRLECNGAISTHCNLHLPGSSNSPTPASQVARTTGVCHQAQLYLIVFSVETGFHHTDQAHLELLTLSDLP

SEQ ID NO: 953505 - protein, 48 aa, Homo sapiens
MCGDHLELELRQSCLELAIVLHLTVMTMHWPIVLHLTAMTMHWPSFYT

SEQ ID NO: 953506 - protein, 50 aa, Homo sapiens
LKTYGLAMMTAAGSNRKAQLNARILAAGWGGLRRQHGVQSNLNRAVRAVG

SEQ ID NO: 953507 - protein, 49 aa, Homo sapiens
TSLFYRSDLRSGSRFGADRPATSTRPAKRYVLEARLSNGCLRACVTCNG

SEQ ID NO: 953508 - protein, 55 aa, Homo sapiens
RSAVRQSRVSSVIQRSGVFDSVRCLSSAPQVSGAHQLTHQCFDLIRIFGVPHTHQ

SEQ ID NO: 953509 - protein, 36 aa, Homo sapiens
MCAARLRYLQPVYVSYNSWVRADGQRAKAKACKKYM

SEQ ID NO: 953510 - protein, 45 aa, Homo sapiens
KQTPCALLFRLSKRTFEPQPSSPSSLAQSMSTHLPLQLPFGGAEG

SEQ ID NO: 953511 - protein, 41 aa, Homo sapiens
IPSVDNAASCPGIPHLSNCTQAQAASFHVDSQPVGPEHRHT

SEQ ID NO: 953512 - protein, 60 aa, Homo sapiens
RPGVYRSDSMGRGASCDGVGGVAGTVALVDQEARPALPEYGRDIGETSWLVSRKKTKLAL

SEQ ID NO: 953513 - protein, 144 aa, Homo sapiens
MPSLIIQPTFKGVRPRRNNCLGPSPLAASPAFLGKGQVPQPLLSVSLPLLCFSGDRASTPTPSLRVSTPSLLFWGQGKYPNPFSPCLYPFSAFLGQGQVPLNPFSFTLSGKSRFSRGQGQVPPNPFSFTLSGKSCFPGAGASTP

SEQ ID NO: 953514 - protein, 63 aa, Homo sapiens
MSRSDGCRELPLCLLIRIVMPIANPCAEFTSLLTFLKIFYDHKRLLELSLVKIAPLVVTNKHR

SEQ ID NO: 953515 - protein, 44 aa, Homo sapiens
MKKQNSCMGAGVLFLLNVYRLLTIIKVKLVTQIISWGLSIVPEP

SEQ ID NO: 953516 - protein, 141 aa, Homo sapiens
TFILFTGTPSAPDIEFMKRLTKVVNIVPVIAKRDTLTLEERVHFKQRITAEPAVQRHRRVTPLKEFDEDSEEPAVEPEKFRENDPICCGGAVTQKYPGSNGKEDPWGGRPGGVPSKLKTTTQCEFGLTLRDLSHQDAPSCA

SEQ ID NO: 953517 - protein, 70 aa, Homo sapiens
RRWRVPACPLRGDTDPPLIHLDSIPITDPDPSSCSSRHRRASLGEQWGCSGRSFLRGPALQLKAEEFPSH

SEQ ID NO: 953518 - protein, 112 aa, Homo sapiens
SARFASLLLYFIPDTPLPQALTSSLETPRSVNIVPVIAKGEHHPGERVHFKQRITEILLSNVIDVYPRKEFDEDSEHRLLNEKSGEHDPHLLWLASDHKYQVNGQGGIPFGT

SEQ ID NO: 953519 - protein, 138 aa, Homo sapiens
GSGRLFQLLSVTPFFDSERELPDPLLFPSEAMPRPASARARCGHPLTCAHCLPLPSEMNPVPQMEMQKSPVFCVAHAGTIFFFLSRHSRTVAWAGVQWSDLCSLQPPPPRFKQFSCLSLPSSWDYRRLPPHSANFLHF

SEQ ID NO: 953520 - protein, 83 aa, Homo sapiens
EQVLTLFNSMKAERKEATEEKFETSRDWVLRFKAGSLHNIKVWGKAASSDGEATAHYPEDLAKIIDEGGCTKQQVFNGDKTAF

SEQ ID NO: 953521 - protein, 114 aa, Homo sapiens
MTFLPRAYGQLILLTLDAMLLRFVKARVRKPALPTHSTRTSISRQWEMLKLLPNRAPGLTAAGLLQQLEEAGHRTTKRTVERDPNELSSLFPLHCNDKGSLYGWYWQPGRAIVR

SEQ ID NO: 953522 - protein, 76 aa, Homo sapiens
MKRTMGVNSGPASAYHSRTRQLRDKGGSGVRGALGLGPEVRSALAFTGKRRACLCKAGCRPSSTRKAAHGDASTGE

SEQ ID NO: 953523 - protein, 69 aa, Homo sapiens
STVSELFACNRFIRWTFGPFCREKPDDLLGWKRWLLTDPEDLVGLEALAVNRHLSRPFAVLSGLTGVKT

SEQ ID NO: 953524 - protein, 64 aa, Homo sapiens
LSPVARGWPLDLSIGHELNSCLGDNLEYINTIAVQPVSNTSLKNHVSKPPEDVQRVDPKRLLEL

SEQ ID NO: 953525 - protein, 36 aa, Homo sapiens
MTFFLSFVRQSHSVVCSSDNLHSLQSSPPGFNVILL

SEQ ID NO: 953526 - protein, 66 aa, Homo sapiens
RQATKSSFRCGCVLHRVRGVDQPFAHGLCENIVPWLSESGASSRPSVAVGVEVDQRQGCPKAPGLG

SEQ ID NO: 953527 - protein, 41 aa, Homo sapiens
MARPYVSSVLQVCGRYISRWTAVRAGEELPLTRRIPGAAVG

SEQ ID NO: 953528 - protein, 36 aa, Homo sapiens
MRVHVVGLPDTLTKQQQSERVVSGPPGTQTQLLTLV

SEQ ID NO: 953529 - protein, 35 aa, Homo sapiens
DLRFRAMCVPCPYSEAIVIICFIIEEYKREKNTEA

SEQ ID NO: 953530 - protein, 68 aa, Homo sapiens
EAVIGEQVAYRVRAVEIGNTSFRFDVIAMTGQLCGIDTSLLCCGELTGGEPLSRIEWTYMPGYELNRI

SEQ ID NO: 953531 - protein, 39 aa, Homo sapiens
MRLQLDTARITPDLRREECGEAENCRDALLGNAYEGNGS

SEQ ID NO: 953532 - protein, 55 aa, Homo sapiens
  misc_feature (50)..(50): Xaa can be any naturally occurring amino acid
MSRADIVLQVHIALTFHVSLHVDMIITILGGEGTQVYYHQLDVLTVCTVXYIART

SEQ ID NO: 953533 - protein, 74 aa, Homo sapiens
  misc_feature (7)..(7): Xaa can be any naturally occurring amino acid
ELEDACXTPSDVRTQPGESQVHMSMDVVMGPCADAGVAEQALVLLSCLSDVGQDPDILSNTVVPAWGRQLTAQM

SEQ ID NO: 953534 - protein, 41 aa, Homo sapiens
MSENTFYGAAGVLTDPQLTHILPGAELRILEVRMRTGTTRP

SEQ ID NO: 953535 - protein, 40 aa, Homo sapiens
MAARATCSTVYWSTGIAMNAALPESSLKHIISEVGKYREW

SEQ ID NO: 953536 - protein, 57 aa, Homo sapiens
MRIQSRCKLKGVCGNTKKPESFTEMRRSRTREHRGADTTAGTQRLGNMRGFEPAVRR

SEQ ID NO: 953537 - protein, 59 aa, Homo sapiens
RYLKETKEVVEESENGRDAPANGNAENEENGEQEADNEETKKRKKVGRNEEDGLTTVMV

SEQ ID NO: 953538 - protein, 160 aa, Homo sapiens
MRLTRSTVIALVTTYTQIGFGCRQAIGLRPDGLSGSFLYVAHFTSRSRDLVQEIRPALERLSDVTRETVHLGMMDGTHVLHVDKVDSPERYGISSRIGSRAVPHLTSLGKAILAAESPQFVDAYLRGKGRTASPYRIQNVEDEESGDREDAGKGIQVTEL

SEQ ID NO: 953539 - protein, 104 aa, Homo sapiens
DRLCRVHVGDSRRIPPKGVTSPYGPSRPALQVIFAGGQDRYSTGSDSASFTHTTPVMWLKPELEGPPLEAYTIQGQYAIPQPDLSKLHQLVMQQSHFPMTHGTR

SEQ ID NO: 953540 - protein, 71 aa, Homo sapiens
  misc_feature (14)..(14): Xaa can be any naturally occurring amino acid
MIVSPRYGVLIVNXMPYCVLFTNTDIVGRIWIVKLGYPSGTKIHDCRDPFDVYSIEVQLLRQLRAFLPNWG

SEQ ID NO: 953541 - protein, 77 aa, Homo sapiens
VTLRIPGCRVHVEIGFCVKALLRNSTYVCALIPVLGLDVHLQSIPCRGPVPTLLTHKQVLTTVLESFTASWRSVRDR

SEQ ID NO: 953542 - protein, 56 aa, Homo sapiens
MSSTPKLKQSTPWLPSVRYRLSIVPDQLSISESCRWGHESSYPPEPGTATTIKVAA

SEQ ID NO: 953543 - protein, 49 aa, Homo sapiens
MIRPEHILKTQVSYMKKGPNARGPHSCYEDTSKLHEEVAQVPVVPTPVP

SEQ ID NO: 953544 - protein, 61 aa, Homo sapiens
LLAYERSPEAAGEGRTNRTPKMGEVKEIVRKILVGGKLCPSNERIIKILGKKEIRPVFLIL

SEQ ID NO: 953545 - protein, 42 aa, Homo sapiens
MSRACRLSKCGPVCRSVKWREGIIMMGEVCYVVSMVVDMARD

SEQ ID NO: 953546 - protein, 59 aa, Homo sapiens
RLDAQQPLAVGQRNGLLNLAQPLIGVAPRTVPNETKRTMDHGSRTSAHSGGITSQLALE

SEQ ID NO: 953547 - protein, 63 aa, Homo sapiens
QRWDGEERALLEITRQKEQGCDAKCICCIKHTTPNGKKETLVCKEPLPLKRRRSSEHPLAYST

SEQ ID NO: 953548 - protein, 57 aa, Homo sapiens
MCHWARGTIQCMTIGPRVGPSHAQVTAPVSPKAFTIFSINSSPKSHLTTIHKKFRGS

SEQ ID NO: 953549 - protein, 60 aa, Homo sapiens
LPKIFEHTLRSVTLTARVRGFILEVSETKNPPIPDTVVSFKLFSGTFDSLQALGDAHKIL

SEQ ID NO: 953550 - protein, 136 aa, Homo sapiens
KDAGHSKFAGAGSSALASQEASSEAVLVRIYVVRMAPLPQCSAILTLGTAGVSPADVKPISGSSVQNNNSCMFRFSQPSRPSARGNSGRKDDGVYSRDPTMETQPVFDGDEITAPHSMDYTLGDQTDSKLNNTNIR

SEQ ID NO: 953551 - protein, 91 aa, Homo sapiens
HQATLQESQDVANRFARLRGAEENNVHNVNDHKFIARFFKQPIFCSHCTDFIWGFGKQRFQCQLCCFVVHKRCHESVTSSCPGADNGPHTD

SEQ ID NO: 953552 - protein, 88 aa, Homo sapiens
MDGRSSSSRKLDLHCQTFKGAISVVLLYKMLAEFFQLSLQVGVQISEFSKEEPLNLINRIISPITVVFDLSSFHLSIILGLAIGKGTE

SEQ ID NO: 953553 - protein, 92 aa, Homo sapiens
WRQRLALLVPAGVQWQALGSLQPLPPRFKCFSGLSLPGSWASGCVLTRLGYFGILSRAGVSPCGPGGSQHSGTRGASIAWAIAICKGPELAN

SEQ ID NO: 953554 - protein, 95 aa, Homo sapiens
MARPRTELNMYQMDLIDLYRTFYPKTTKYTFFSLPHGTYSKIKHIIRHKRILSKCKIANILPNTLSDYITIKIEVKTKKRAQNHTITWLGLAIVQ

SEQ ID NO: 953555 - protein, 37 aa, Homo sapiens
GFDSKHIQHHAFSSSWLCNVHTFKAAFVRAAFSHQQQ

SEQ ID NO: 953556 - protein, 48 aa, Homo sapiens
PGNGAVYLRGQKEHTFTIQAYRLCAEGPDGANTKNVPQEPLVHSARSH

SEQ ID NO: 953557 - protein, 133 aa, Homo sapiens
MVLGKNWIYIFRRKKLDPYLSPYIKIKSKWITDLNLRPQTANLLQENIGETLQDIGLGKDFLSNTQQAEATKAKTDQCDCIKLKSFCATEDTVHKVKRQPTGWEKLYETTHLTAIITGIYKNSNILRTKINNR

SEQ ID NO: 953558 - protein, 36 aa, Homo sapiens
ILIAMPMSEDNHVTEIEKCYLCELCPYACALPICNG

SEQ ID NO: 953559 - protein, 56 aa, Homo sapiens
RSIAVYEVLVADVHLDRSSMSPLTSWLLNDTGLKDSGTSCISFSSRWDLTWPLPYA

SEQ ID NO: 953560 - protein, 145 aa, Homo sapiens
MLFKITRACIVHGRRRRAWLSCTASTVLRATVSGFSGGKRLGNLNTGRDTVGFSWRGMCLSGSLYEADMSGSPFGFSCLRDSRPAWNTPSTPQPSRCHIPSLPQAHRGLFLSQGLLAHPLGTHSPKPSKGSQCPRAWPFHGPANL

SEQ ID NO: 953561 - protein, 64 aa, Homo sapiens
  misc_feature (1)..(1): Xaa can be any naturally occurring amino acid
XKSLKLLLLRMKIINIWSNKYTKFFPKKKKNPSEKNVFEFYHVGQAGLELLTSSDLPTLALQYA

SEQ ID NO: 953562 - protein, 34 aa, Homo sapiens
PMRDASIKAQTLKPDQLPSLKGEKGETLDGSVAH

SEQ ID NO: 953563 - protein, 82 aa, Homo sapiens
HRSRYPSDAELCAYYINLTYTGILMFKFQNNEGKCDLWIFLTLFPSILANKCSLTITDLFLYFVVETGFHRFSRDGLDLLTS

SEQ ID NO: 953564 - protein, 43 aa, Homo sapiens
MVAPLHSSLGDKARTRLENYTNKNKPLFFSQKFHIVQRLTGIL

SEQ ID NO: 953565 - protein, 134 aa, Homo sapiens
  misc_feature (107)..(107): Xaa can be any naturally occurring amino acid
TLNYAELCGSFVLFCFVLRWSLILSPRLEYNGVTLAHCNFRLPGSSDSSVSASHIAGITGVHHHTRLIFVFLENPVFYKQGFTMLARLVSNSQPQMILLFHTHRVLXLQVGATTPSLIVVLICTFLIASDIEHL

SEQ ID NO: 953566 - protein, 57 aa, Homo sapiens
CGPLLGVLHAFSRAGRMGRLVPRQHCPHVAFHTRCPRPAHTGFGSQCMAASRHGSRS

SEQ ID NO: 953567 - protein, 57 aa, Homo sapiens
LQKAKQHVHHAAKHGMQSIKCTIHHCTQQSGPINHSTAPFTLSCIPTFTMGVISHSQ

SEQ ID NO: 953568 - protein, 138 aa, Homo sapiens
  misc_feature (126)..(126): Xaa can be any naturally occurring amino acid
ISRTRQTLNYVGFKTSVVKITVDLLQIARERDTEVEPEDVTELLNLIKLVGEELLLMDGQIKWFPEMESTPSGDEMTTKDLLDKAVAGLEKIASNFEGSSAVAKCYQMYCILQRNLSRKKSTDAAXFITVLINCHSHI

SEQ ID NO: 953569 - protein, 124 aa, Homo sapiens
MRDASINSHSESYISSNQGSMGSINDPSNLFCIGSKSLFGGAGCQMIPPKRPSDSTPADYIWNINSESSPEGFNYIKGNGHIRTRESGASQALLTPPLLYTKPLELGRQSLAKGLIWMEASRMG

SEQ ID NO: 953570 - protein, 68 aa, Homo sapiens
CRLEDPMRDASIKIISGGKNKKREARVWWLMPVIPALWEDEESGSRGQEIETILTHMVKPRLYYKYKN

SEQ ID NO: 953571 - protein, 108 aa, Homo sapiens
ADLEDPMRELHQILNMSTIPSLLSAELSFFLLGNEVWLCVTQAEGEGLISAHGSVRLLSTSDSLASASQCSRGPRAIRHHYRAKFLDFKQRGGTTRRARLGRELPTSM

SEQ ID NO: 953572 - protein, 41 aa, Homo sapiens
TASSFAISFSVIMPYGPNIQQGNASAIARHSGHGAILSGSR

SEQ ID NO: 953573 - protein, 67 aa, Homo sapiens
GAYLYTNDIQAESQITNAILFTIATKRIKYLGIQLTREMKDLYNKNYKTLLKEIRDDTNGKTFHTYG

SEQ ID NO: 953574 - protein, 64 aa, Homo sapiens
RRSRGSHVIANTCPSLPSLASATSTFWYTYLSGPSPLYHYTFNQHIFIENLHELGIVLGVGDNI

SEQ ID NO: 953575 - protein, 98 aa, Homo sapiens
MNERMNESTRVHRMESNGMECNGMDQLEWKGKSGINDEWNGMDWNGMEWNQPEYRRMEWNEKQWNGIITNGMERNGKDWNGMEWNGMEWNQLHCNTVS

SEQ ID NO: 953576 - protein, 68 aa, Homo sapiens
RSGMISAHRNIRLLGFNRFSCLSLPSSWDYMMSATYAYTKFFVYFKLEEQKFLPMFGPGLGGETPWAL

SEQ ID NO: 953577 - protein, 60 aa, Homo sapiens
ALPTQHSRRLCVTGSRVVCSQRCVQAPSTLVVLTCGPIAFFISNHCMHGTASRHGGILSA

SEQ ID NO: 953578 - protein, 55 aa, Homo sapiens
MRGLHQMSPFAMTAPNSRGLCTGEGAVSSACEAPDSRVLMGPLIFISILLMEASR

SEQ ID NO: 953579 - protein, 86 aa, Homo sapiens
RERMFTGDIISKTEYRAGLCVALGNLSSRPILDRRARYVMPESHTRVLDKYEVFAAIVSRKLVTGRGTHGKTITDAINIGIGGSDL

SEQ ID NO: 953580 - protein, 79 aa, Homo sapiens
DLEDLMRDASIKVTEEELVPFLLKLFQIIEKEGLLPSPFYEASIILILKPGRDTTKKENFRPISLMNIDAKILNKILAN

SEQ ID NO: 953581 - protein, 41 aa, Homo sapiens
TDASGDTGQVSVVLEKEQAQVSETHKQGLIWEVQEKKQRQV

SEQ ID NO: 953582 - protein, 40 aa, Homo sapiens
NPAVKWSRQKEGNPSYRMRYKFNHQYMSRIKTYYRGDLFC

SEQ ID NO: 953583 - protein, 46 aa, Homo sapiens
SRNSPGDSSLTAQGGGSWQKSVCWSGARAAVVGCGYFNRGGCGARR

SEQ ID NO: 953584 - protein, 63 aa, Homo sapiens
QDFRAHSQPDEPFWWADTTQLFLREHPQSSIIRIGLRVWTRCTQFILMGVIAIFCGIPSVGMA

SEQ ID NO: 953585 - protein, 38 aa, Homo sapiens
CVISSNPSVLFIIIIIFFSFSFFVMPYREPSSELNASV

SEQ ID NO: 953586 - protein, 47 aa, Homo sapiens
GRDFMSKTPKAEATKAKIDKWVLIKRRAPATAKISKRRGDTEGTRHF

SEQ ID NO: 953587 - protein, 35 aa, Homo sapiens
RVHGMLSSSDLRTRRYYCARGVEGGYYYAYRGQEL

SEQ ID NO: 953588 - protein, 77 aa, Homo sapiens
MSVMHVDGCMTEAISLEDQIIHSTNSQLGTVADTHTYTHTHTSQTRRLRVEYTCVYRVFYMLKCSLSGVSPVYELRA

SEQ ID NO: 953589 - protein, 62 aa, Homo sapiens
KPNSEYSAVSQRDETIYVKVFLHSLPSKRILDMSTLVFSYNQATVAQTISHDSYAGTRVNYY

SEQ ID NO: 953590 - protein, 35 aa, Homo sapiens
  misc_feature (1)..(1): Xaa can be any naturally occurring amino acid
XKDELYKGSGQDSRNVHQQHDDGSARGVDFESLGQ

SEQ ID NO: 953591 - protein, 81 aa, Homo sapiens
HSYDRCSRMWDSYLVYLEHVRVEEDRLCRTEVEQSGVPSIKETALFHRGLVFKKWNLTVLLLPTPPPPPHSPYSQSTTAVA

SEQ ID NO: 953592 - protein, 37 aa, Homo sapiens
MAVLEEEDLGGWKVNMFPRISNVSHKKVVLPLVQRRQ

SEQ ID NO: 953593 - protein, 68 aa, Homo sapiens
ISCTCDPPASVSQSAGITGGSPHAQPVACYILEWLITGRPIVSVHSLVKELKVDIGFEMVPNPADPLQ

SEQ ID NO: 953594 - protein, 58 aa, Homo sapiens
MATFQSGITLKRKPPLLAASEPSLRWTAKKPSFSELIDTLVTSTSGTSDLICPDFWSA

SEQ ID NO: 953595 - protein, 148 aa, Homo sapiens
MVFVHAYLIWIRGQKRRGGKFSYLLGVYRSGNLAHQSPANIHSGHIKGKRGCSENAEGNRSEGSWHWAPPSGGTGLISLVAMVTTMMAQGLRKHAQHLQFIFCLRAGRATKQFHKEAAERGVGCLCQAAKSFVFSLLWSPMPQSEYWP

SEQ ID NO: 953596 - protein, 85 aa, Homo sapiens
RSPAVRVNRIRLLQANYSCSIIGSSNTSNININLTSTLIILTILILLTILEMVANPRIGDHSKYDKSSSEVDKFSAKQGIKTTPC

SEQ ID NO: 953597 - protein, 86 aa, Homo sapiens
RVVHILAPGRGYKYDRMKTCLLMRAGSQRPRASKAVQRMEWQVKVQELDPGGEKSLCVNWGALISNVLIDRTSMSDFVVVCRRCHR

SEQ ID NO: 953598 - protein, 149 aa, Homo sapiens
LAVSPDRRPFQPLQPPIEGDVRRVSQSLLHETGLVPVVTRNLLDMGTRCMNVNIHLTTGRSLKSPTVSTMIHYLGPEDSLRPSIWLGWLSNGHYDAVFDHSKPNPEYDNWCKQTQVQRKRDEELAKSMAISLSKMYIEQNAALEMVANP

SEQ ID NO: 953599 - protein, 105 aa, Homo sapiens
MISFDSMSHIQDMLMQEVGFHNLGQLCPCGFAGCSLPADCFHKLVLRVCGFSRCMVQAISRSVILGSGGWWPSSHSSTRQCPSGDSVWGLQPHISLLHCPSRDSP

SEQ ID NO: 953600 - protein, 168 aa, Homo sapiens
CVNGIITNTLMPSNSSQAYSSSITQKSKSNVSSETSYVPSAYEPVKSKASHFLDEWGYRHRVNTPITNGKNWPKQRDCRPHTSLKSNRADIKPQSSEMISFDSMSHIQDMLMQEVGYHKLGQLCPCGFAGCSLPADSLHKLVLRVCGYIQDAWCKAISRSVIQGSGGW

SEQ ID NO: 953601 - protein, 70 aa, Homo sapiens
VRGSRIGDMSRNTRGQPYVLRSLQAKLGCEEKQVSPSRVNKIIKMQKLHIHAVREAAKGFQQLFDSCTIQ

SEQ ID NO: 953602 - protein, 77 aa, Homo sapiens
MVPRHSSRTNFGIFSTAQGFTMVGQAGRELRTSSDPGASASQKAGIKDVSHHAGPHGYFYYYLDYTGRMGRQSGVPS

SEQ ID NO: 953603 - protein, 220 aa, Homo sapiens
GVLEDPGMTTYSDMEVPTYRCPYNTVYKNRKGVSSRDGENFGKQVTSVLQTQGKSWKLDMPEYFSRLGGELNQALQNTRKSCVSSAWAWASEGMKSTADLHQKLGKAIELEAIKPTYQVLNVQEKKRKSLDNEVEKTANLVISNWNQQIKAKKKLMVSTKKHEALFQLVESSKQSMTEKEKRKLLNKLTKSTEKLEKADENYYQKKHGGLFYQIEMVANR

SEQ ID NO: 953604 - protein, 48 aa, Homo sapiens
LRRRHYEMICCSGHEALGFILLFTVSGLTGIVLANSSLDFVLHDTYYV

SEQ ID NO: 953605 - protein, 148 aa, Homo sapiens
MSIHGIYSCSVRALLNIVVQPGYISVLIVVEKESLLCSSLGSRVGIVDLLVVLGLTLLIRMIRASPSIEEKEVYDGHYTGPPFINRVSHQMSRLLGSPPSDTEGLVKSLPSGSHQGPVIYAQLDHSGGHHSDKINKSESVVYADIRKN

SEQ ID NO: 953606 - protein, 56 aa, Homo sapiens
ATSRTQGKIKLQMQEFSGGDTFKKHTTGKDIVGPPTMVKFQKLLQLLRLHFSLLLH

SEQ ID NO: 953607 - protein, 87 aa, Homo sapiens
GTWYRYLCASKQGYQFIYVLIALSSKAGIWFKQRLASMPDEVSTAHLSVGDHKLRDCNGKSGRKQKKGMEGQLVMSFADSDPPYMKL

SEQ ID NO: 953608 - protein, 54 aa, Homo sapiens
LEDRGIQALLNNQLPGGKNRARTHYCKTTPQTLIREIRSMLKTPPAMGDQSFNH

SEQ ID NO: 953609 - protein, 46 aa, Homo sapiens
MVLCWGSMCGCIGCQIEGLSLAVQAGELTAASTSRAQVFLQPQHLK

SEQ ID NO: 953610 - protein, 105 aa, Homo sapiens
MDEVLVVQTEDQTSHNIPFIQNRIQSKALILFNSIKAEKVRKLHKKRLTLAKGGSGGSQEETISTIQKYKVKHASADVEAAACYTEDLAKINNEGGYTKQIYKWR

SEQ ID NO: 953611 - protein, 36 aa, Homo sapiens
SGKWMRYIIIAIPSGAKYVAELLQTLTEGNMKLICV

SEQ ID NO: 953612 - protein, 43 aa, Homo sapiens
MRYLALSTMNLPVYTYHHSQVLSSTVISYEICCTRQSNLSWGI

SEQ ID NO: 953613 - protein, 80 aa, Homo sapiens
KWNRHLSLMVLQELQCGYQGKAISNLTKECFSINFQRTWCPGVGLLADVSQQAKKDSKQVRVILLIWFRSVSPANSHLEL

SEQ ID NO: 953614 - protein, 101 aa, Homo sapiens
SAGYQMIRFRLPSQQGRDSKIAIIIKFSLCIYLFTYLLTESHFFFFLERESLSVAKAWSARALSGFIASSASGVHPKFSLPQPPKYSGIYRLVPSHLANYG

SEQ ID NO: 953615 - protein, 33 aa, Homo sapiens
IHGIRYHYVQCAKTTIIEISPKFTISIISNNAC

SEQ ID NO: 953616 - protein, 104 aa, Homo sapiens
AFTACIINVILSFLGLGCNVFLHLNDLRSFHILNYISVISATSAQFRTLAGEVVSSFGRMKALWLLCCQGSCACFFSSLGADVPSVFKVAALWIFWYLLFNLCS

SEQ ID NO: 953617 - protein, 61 aa, Homo sapiens
MTILIASMMWTMNKNAKGSNYVEKQDNDGGKKFLDAGAQNSSLDCSYPAKSFRPVNFSRFF

SEQ ID NO: 953618 - protein, 47 aa, Homo sapiens
MAYSAHSPFLLLCSGRAILTQLGNLASLVACPRHSTFILFQMDSQTM

SEQ ID NO: 953619 - protein, 77 aa, Homo sapiens
NHIISGHMSDKAKILNPAEEKYFHTVNQEFSKVILELDAISDLEKGLLLYNYDSNTRHWTRPPTVNNGKKRKYIKQY

SEQ ID NO: 953620 - protein, 57 aa, Homo sapiens
KSSAVMGMCAQDQRPVSLVHSQCGPLSDDRHKVMVERVYISWDPVFSCGSPCTIAWL

SEQ ID NO: 953621 - protein, 47 aa, Homo sapiens
VVGRSISVVGAVVGTARLKGISGALGNFSAWVSQATITQLINQSSCS

SEQ ID NO: 953622 - protein, 81 aa, Homo sapiens
SHLDYSSRFEIVSSISISTCYTLYLFLDRVSLCRPDWNAAGDISRLTAISTSQVQAIPMPQPPKYPGPHTCAIMPGQFSYF

SEQ ID NO: 953623 - protein, 118 aa, Homo sapiens
SRSLYEQVVAASILGHFINWLSDEQAVSNEGGQDDYAKDRDAISGHQKGPAYTEDTAVGDGWNFSRAEQYPSLLMIFFLPHSAPMHVDLVRSEGHLHPQGLDGLEHVFFSELHLQARN

SEQ ID NO: 953624 - protein, 34 aa, Homo sapiens
TVVTLVNTPLCCYPQLKSAIASTIPPFLPSLDVN

SEQ ID NO: 953625 - protein, 64 aa, Homo sapiens
RKRKKHRSPSSGERKGNSPSTNEEKNLVESAGEADPKEVKGPETKREKNQYKEYHETRETLWEH

SEQ ID NO: 953626 - protein, 75 aa, Homo sapiens
RVDHASPTHGIPALWWEWIDTHQTCMQKTSYSSSSAYDFYGSSVIRTGKYTINHSYGWSVASSVVNYHHQVIIFS

SEQ ID NO: 953627 - protein, 104 aa, Homo sapiens
PSYRSICTEVNNTTGITHSEKNDKERGIPTSLHLTPKPMAAPCHRVCEHLLHSECAKYIKKHDGLTEQQVQITEIKVICKKRLTISHMKILVYNYKRKPYIIKK

SEQ ID NO: 953628 - protein, 122 aa, Homo sapiens
NELHRFLTITTQDKKQIRYSRNGSKHDYTGSTLSQLLKPTERKDKRIPSSKQAPTQVIVQQLTAYRRDHYGMMLVALPHRWIKHHYFMIRGHWPWLLQHSLAQSQAQTWHFHYQHLEAELIA

SEQ ID NO: 953629 - protein, 59 aa, Homo sapiens
TKYSGLSDGYGSPPTCTGETYSDCLSGMYDHRYGDSKFTVQSTTGHLCPHYRGLPYKCD

SEQ ID NO: 953630 - protein, 41 aa, Homo sapiens
MLIPFNIPVQPFSICSTITGHIAAVSGHTGASHVFLFQGMQ

SEQ ID NO: 953631 - protein, 61 aa, Homo sapiens
ASPVVLCAQQQHHTFRSSLITSHVSCHSSDSTALRSAAFHQHNSQAHQRHPQHKHLTSLSS

SEQ ID NO: 953632 - protein, 50 aa, Homo sapiens
SVWEGHYSSWQHRILNPLSEARDKTHIFMDPIQFLNPCAMKGNFPKLVRI

SEQ ID NO: 953633 - protein, 116 aa, Homo sapiens
RLFTGLDYVNNPLYPTAKILGTAQMQERQQSSNLRGITYDSCELHEKDRGIHSPPPLQKEVQHFSYVSQKVSGFSAVSFNFLCGHQDWPKDKLTRLDLKISTSFIATSRIGQCLIP

SEQ ID NO: 953634 - protein, 76 aa, Homo sapiens
ISKGLQKFAQQWMHMPCRAPQQASFPRSSPHPLSPPIQELTTYEQTHFSPSLVISTLGLITEVTAPAKWSGKFLKS

SEQ ID NO: 953635 - protein, 30 aa, Homo sapiens
MQISMRQEMELAMKMLETDVCEKQDALDIS

SEQ ID NO: 953636 - protein, 120 aa, Homo sapiens
MCIYQRFRVGFLTGLSDSYILTDWPSFQMDTEDAVRNTWRSWGHRDSGHHDEAWAHNLSNYTLPAFYMGNFSIPSGIPDLPQDTFIQFPGWTKGQVCTNGFNLGRYWPARGPQLSLCVPQ

SEQ ID NO: 953637 - protein, 100 aa, Homo sapiens
MMIELTEVLGGVKRRGPGSKSPVFLLSYVTLGVWYNPAELLLPYLKNVGFHPSLPTAVWITEKAPNTVSDHALGMLEICDSEMHGVTRGQITYLRGSELD

SEQ ID NO: 953638 - protein, 70 aa, Homo sapiens
QQFSQLKCKTGDKPVLRVDTSNDSLGTTSHSSLKTQPFLLAATLPERKWWSTISTEQQQYIGSTDVLWAD

SEQ ID NO: 953639 - protein, 71 aa, Homo sapiens
TFGSVYSDRVYVIRRTRAKQEQAGAQCKHIAIGRKPSSSGLQLYKPGPGPLQRTSSSLVAYASTAGGLQNR

SEQ ID NO: 953640 - protein, 52 aa, Homo sapiens
SVDESSGLRCGWCTGQLSAFRTGRSSRVDSSGAYSTAAAVRRRFIHVFHFSG

SEQ ID NO: 953641 - protein, 36 aa, Homo sapiens
APLSSSIAILRGPRGSLPAFSCSKSGTYGSLAISGL

SEQ ID NO: 953642 - protein, 48 aa, Homo sapiens
KYGKREQDYYHYIDKGPFEQGKTLKRMAREAEKVQQLTDDDSSRDTGV

SEQ ID NO: 953643 - protein, 102 aa, Homo sapiens
VFLRLTFTFDIDANGILNVSVCGQRVSGKENKITIIKDTGRFEHEEDIERMVQEAEKYNAENEKQRDKVSIPKIHLSPIPFNMKRTVEDEKLSTARLTMRTN

SEQ ID NO: 953644 - protein, 52 aa, Homo sapiens
KTHFAYALNLPVCRNSWDRAKTNRLGRSSVFYCFNSKLFYGPYPLTFHLQCS

SEQ ID NO: 953645 - protein, 79 aa, Homo sapiens
VSLPVDKSTGNRELDSLSSNRQGAAFEQGKTLTRMVQDAEKYKAEDDKRRATLSSMNSLHSYAFNMKATVEDDQTSRLM

SEQ ID NO: 953646 - protein, 122 aa, Homo sapiens
MTRAGRYGPTLNVVVQGPDSYQAEDEKQRDKVSSKNSLESYAFNMKATVEDEKLQGKIKDEDKQKILDKCNEIINGLDKNQTAEKEESEHQQKELEKVCNPIITKLYQSAGGMPGGMPGGRR

SEQ ID NO: 953647 - protein, 52 aa, Homo sapiens
MTYVSSILPGTFSGAHKAEPADNTHLRVCKAVNPGRTSTLKEDYDEAWTVTL

SEQ ID NO: 953648 - protein, 36 aa, Homo sapiens
EDRSNPRRQSVAVTLMVAPLPSSLGHRARLRDSVLN

SEQ ID NO: 953649 - protein, 96 aa, Homo sapiens
VKWYKLSEMESGPSPRSEMQWSHSQLMATSASQVQAMLLSQLREEDGTTGTYHHAQLMVVFLVEMRFRHMGQSGLELPTSGDLPASVSQSTGITAV

SEQ ID NO: 953650 - protein, 73 aa, Homo sapiens
  misc_feature (1)..(1): Xaa can be any naturally occurring amino acid
XRSSKQGKAMRAGLAQICYCKNSCITTKSSVCAIYNNPFKAITYLGLEVHSPHMYFKVRALSISENQTVQVCS

SEQ ID NO: 953651 - protein, 56 aa, Homo sapiens
MVVGAVHHPGQVIIAEGSHTGMGVLSTCPELGLGEAWGEMEEVFLEVVTLEQVLDK

SEQ ID NO: 953652 - protein, 48 aa, Homo sapiens
RIRYSAGLLMLTMSVDYEQNAKGSNQPEKQGNDGGKKFQDAGDRISSL

SEQ ID NO: 953653 - protein, 84 aa, Homo sapiens
LEPHVIDTEHHFKYRLSSKVGEIKKLWFHRSASNESKLHDQVNPKRMLRSLKNTAESGGRRREKQRIEGKTPHRSAISVLKQEP

SEQ ID NO: 953654 - protein, 35 aa, Homo sapiens
  misc_feature (28)..(28): Xaa can be any naturally occurring amino acid
TFSNPVITKMSAFKSTRRDNVYELLARXVGAPTIF

SEQ ID NO: 953655 - protein, 171 aa, Homo sapiens
MSGWTPKALRHGLHLCICSIQSPQLPSWALLVQSACESLPTEGTKLWWVHDSGVCMMVASSVEAPTPIFSFCTALVEVFQEALLFWQLSVWTSRHFHTSSKIYMKALKPLGYCSMDSLAEDYVEAVKPYSCTLCSSDAICTLCIFQPRSEQELRLLGCRQQYPEAAHSNRA

SEQ ID NO: 953656 - protein, 50 aa, Homo sapiens
TCLPPTEPSIHMTIGDGMTPSVVHECRIPITWHCHILLRHKQPQKHRKQG

SEQ ID NO: 953657 - protein, 35 aa, Homo sapiens
SRVCKAWLTQIHKSRKNLIINDDVLSHSPLDTHVL

SEQ ID NO: 953658 - protein, 37 aa, Homo sapiens
MEAAVASAPALTRYLLQPSDLTAGGLPGFCCPTCQKF

SEQ ID NO: 953659 - protein, 34 aa, Homo sapiens
DHVGGRQNSPTSHESLEVIIALPDTKTLRAPRVE

SEQ ID NO: 953660 - protein, 82 aa, Homo sapiens
PSGRCGAGAGAARQCVLTSTVEFQNVAALNRTIERSRCGLAPFAVAAIPTMPYRPEAFHIKRCMPSAPYVQVNTMIKQHTAV

SEQ ID NO: 953661 - protein, 127 aa, Homo sapiens
AFTDQCTGLQRDESRLLSTSGTGLSLTLSDSCERVTVSLFGVWLLSLSIMSSSAIHIAECVRISFLYQTENTPLYVRTLCLSITHQQTQPVSTYGHWEQRCYRPCDYAHPLESVFSYFGYVRKAVKA

SEQ ID NO: 953662 - protein, 38 aa, Homo sapiens
LISIKREDNYDPIVTIAGIISEWCFRSLRSLVIHIGTN

SEQ ID NO: 953663 - protein, 47 aa, Homo sapiens
RAFSSVSLFDVVILHLLHFLFSSAFKNLCKPSFWPMLRIVGHKQHFD

SEQ ID NO: 953664 - protein, 68 aa, Homo sapiens
SRCRNKKGAMVYHREGEETVDSNGGHKNAESLGLKYEMVVCCVNQSFLKNEEDYFGSSLTNFDMQVKA

SEQ ID NO: 953665 - protein, 58 aa, Homo sapiens
RIPSFSTGIYVTCTALYANYTSLSKGLISTLFFMSSSNTVLLVCRTHAYSVIPSFVAL

SEQ ID NO: 953666 - protein, 48 aa, Homo sapiens
FPCCACPETKTARDAVSSSQNRQKNNLCDLLIAGPQVNALQSPEAFQQ

SEQ ID NO: 953667 - protein, 140 aa, Homo sapiens
FVPSRDLLPPANVVTFTVQAPSRFSCALSLTNDSGVARVGLRSRPRAESGSGQGFSICGQQDLLQLHCACSFWDSVTTSPFPGLTGLVQNRLPAVAFLGRLHLRPIVFLFAEAKEWTGTEIRLSSPSCSLRSVAISMSRA

SEQ ID NO: 953668 - protein, 106 aa, Homo sapiens
ACMWGNLGHGNSPVLRFRDSPASGDPACSASQCAGITGMSHCAWPVHLTFEFSYLIRLFLAMTDSQISLVFDDLDSFEECRSGILVRVSLFWNLSGVFLIRYTFLA

SEQ ID NO: 953669 - protein, 48 aa, Homo sapiens
TARDMSPVLSKKILSGCRDSVLRYIVHLDNKEWACPEEDYHDSPKSAR

SEQ ID NO: 953670 - protein, 40 aa, Homo sapiens
AGSVLDGSVHAGSVTAGQCHTPASVNRAARCKTRGQCQPT

SEQ ID NO: 953671 - protein, 42 aa, Homo sapiens
NSKWGYLVAWVRICFVVAVVWVAAVVMVRFPGPGTYAYCGCS

SEQ ID NO: 953672 - protein, 44 aa, Homo sapiens
MAAPETYGSPQARDPMELQLQAYAIVTPDPSSICTLCRSWPSLR

SEQ ID NO: 953673 - protein, 67 aa, Homo sapiens
RVIRRSHQTMIGFNHITNNQIRIFIRFKIGSNRKVDVIMQDIYSTDRELKRYFNFRVEFLKTDLKFF

SEQ ID NO: 953674 - protein, 44 aa, Homo sapiens
SNNHKMPINLSHAYRLITEYNSKSILMKLDLRLHFGLNLEAVKA

SEQ ID NO: 953675 - protein, 45 aa, Homo sapiens
MRPAVILHFLRKLCLVQLRLWCIHADVSTCLKLSTRLSLGMHRIH

SEQ ID NO: 953676 - protein, 67 aa, Homo sapiens
PGSADPGVLGPSAPSLLKSRTGSDRGGSTLPEDALPQDGWALCLRSGVGGQPSAAAHTLPSPDLHRG

SEQ ID NO: 953677 - protein, 35 aa, Homo sapiens
STPSNHIQCAIKSLSRITEIQQCGGLPCESGLAHA

SEQ ID NO: 953678 - protein, 43 aa, Homo sapiens
SIVSPPLPLYYLSLLKMIQIGLDIGWLTPCNTQHFVEANAVGD

SEQ ID NO: 953679 - protein, 32 aa, Homo sapiens
MSANLNHSQQTCFNIVSHGQQACGVTELAIRQ

SEQ ID NO: 953680 - protein, 40 aa, Homo sapiens
DVALNGICCTLSHERHRPMQRDSASRQEYRGPAVNIKANQ

SEQ ID NO: 953681 - protein, 69 aa, Homo sapiens
RIAPTEQQSLCDTSLDCCLDNQQESMYRNPLMGEDGLRPISLAPIKPASLFDTSLDCCFDNNMSQCIKS

SEQ ID NO: 953682 - protein, 122 aa, Homo sapiens
PKLQCQQERDELADEICQQHVAKEPWRYTEKRRLDGPHSPELEERTLEEDQGNTAADQLSRLKKANLQIDQITTDLNLERSHAQKNDNARQQLERQNKELPVKLQEMECTVTSTYKGLHQRP

SEQ ID NO: 953683 - protein, 36 aa, Homo sapiens
YRCRAWCPADNQNFPQTLLLYGPWVSLCSVNAILDH

SEQ ID NO: 953684 - protein, 42 aa, Homo sapiens
MCEFMTINSFPEKCSQRRTWLMPVTPSTLAGQCSRRNRRGLL

SEQ ID NO: 953685 - protein, 73 aa, Homo sapiens
APIRPLSRYSKSMQFTEHRNMIDPGISSSVTYKHQTLFQSQRTTIGHFVLFTFNKPALEPQTSYFQYHPFLAL

SEQ ID NO: 953686 - protein, 97 aa, Homo sapiens
IAGAFTSEQYTIIRITGRRYTGNQFPIDTDSGAVVSTRETVYRLWDYKARLPAPGNTLWPAVVVHSPEVRSSTSLATVVTPISTKNTNFVGHGGACL

SEQ ID NO: 953687 - protein, 52 aa, Homo sapiens
RFLVLLALIGVILTAPSAYDKQTYKSLIAYSSISHIALVVTVIFITNPLKLH

SEQ ID NO: 953688 - protein, 48 aa, Homo sapiens
EQLYMHWRRFTNSYTITGRSYDTNSYDQCTGLSYYTNSYNHAVAVVLT

SEQ ID NO: 953689 - protein, 82 aa, Homo sapiens
AYIVRSIGSVVGERIALGEEKALELGKPLTSASTASEGARIQESLFSLMQMAKTSSGARQAARQGPAVHLGDDPPDQLGPTW

SEQ ID NO: 953690 - protein, 41 aa, Homo sapiens
LAGLTSADLTGRLLNHVTRAVQSLWKWGFKTMPFRLCAMVA

SEQ ID NO: 953691 - protein, 125 aa, Homo sapiens
MVKATASALKCAGSVRRWPYRRGSSWKKQHEAQARSREGNYTSRSRHSRNPEAANFDRGLNQQLLRKPCAKAFQRISELQRTCGRTYSGKLAKNSGKAEYIEQVVYTCEAKVQKMFKKTLDGELE

SEQ ID NO: 953692 - protein, 38 aa, Homo sapiens
AYVCGSYGPVLNHCGTRAAVLVEVGLQDHAIPAGAMAA

SEQ ID NO: 953693 - protein, 49 aa, Homo sapiens
LHVGVAPHVSRVAQACVGVLLSSLVGGSDPRGHACLLRAQTPTCRHPRA

SEQ ID NO: 953694 - protein, 51 aa, Homo sapiens
TTDPKMYFHHVTDRSSRKHELFYKRYPALALNRWSVMYLVSDSAAQTRAMK

SEQ ID NO: 953695 - protein, 57 aa, Homo sapiens
SLPVGFYPSSWRTTIPASGFVDGVSPPRFSTGYFPLRNRIGILVETHSVAHRTPDHC

SEQ ID NO: 953696 - protein, 37 aa, Homo sapiens
ASFTLTAITITARRFTLTAITMHWPVVFTLNSYLPCT

SEQ ID NO: 953697 - protein, 63 aa, Homo sapiens
LPGDTRLMRMPPVVHDWMSAAGGRRSANGKERLQTDLPTADPKALVWISALQTIQKPTVATTV

SEQ ID NO: 953698 - protein, 54 aa, Homo sapiens
HVVEGDSFRRNYAARARPQMLMLHRVMRCSMSIARIVLPRYSYEMAGATVDADH

SEQ ID NO: 953699 - protein, 139 aa, Homo sapiens
RHQLPITSQIHCHKIDITSHRQSSTSRAYDEHSNYDPQHDPYRPNQESYHSQRANYSHQTQDDRRDVSRSGADNRGYGGSQGGGRGRAVYDKDGRGPMTGSSGGDRGGFQNFGGHRDYGPRTDAASESDNSDNNTIFVQ

SEQ ID NO: 953700 - protein, 55 aa, Homo sapiens
LSRGTEGTQITTTISIYVNELTSLSQVEVIFSIVLADIARAEMLLEEAKRASKSA

SEQ ID NO: 953701 - protein, 41 aa, Homo sapiens
  misc_feature (3)..(3): Xaa can be any naturally occurring amino acid
QRXFTALDPSPNGKQLATVSWDTFLMLWNFKPHARAYRYVG

SEQ ID NO: 953702 - protein, 55 aa, Homo sapiens
MLKPRLYQEYKNKRGVVAGAGNSQLLWRRDGSLELEEVGVAVSRDRAAALHPEVT

SEQ ID NO: 953703 - protein, 71 aa, Homo sapiens
SPTNNINIIQHQHNSSSAGHNSFNMVFAGTFVQSVQVMASAGSAMSTSVAFEATQHHTRNHVAASPPSTHQ

SEQ ID NO: 953704 - protein, 152 aa, Homo sapiens
CPCTLALKNNEVGETVAQLVISELSELTSDPAAHPPKCAGVIGCKPPVPYLRCTFRLRKPRHREDRSLAWCQDRPVLRQPFLQDAPTVWALGSSPAFPEAVVMHQALLLGAAVEGCVLGCGVYPLLGRWLSPTSCLPVTKEGAKVPYSQVLV

SEQ ID NO: 953705 - protein, 38 aa, Homo sapiens
YEQAKSTSSNSQRKGNATATRHAQQVPGNTTDRGHPLS

SEQ ID NO: 953706 - protein, 144 aa, Homo sapiens
YSTVSACGHRVRENENKITITNDQGRLSKEDIERMVQEAEKYKAEDEKQRDKVSSKNSLESYAFNMKATVDDEKLQGKINDEDKQKILDTCNEMINWLDKNQTAEKEEFEHQQNELEKVCEPSHHQACTRVQEACQEECPGVGG

SEQ ID NO: 953707 - protein, 49 aa, Homo sapiens
GTASVHFHLGLHLHCLGRLLLSTGLRVISVLLVDGGFRYLSFNAYSWLG

SEQ ID NO: 953708 - protein, 146 aa, Homo sapiens
DINVSASYTRVGNYKEAYYHYSDGGCKSKEDIERMVQEAEKYKAEDEKQRDEGVIQEFIDVHSAFSMKATDEDQKLQGKINDEDKQKILDQDVMIMINWLCIGIRQLRRQNVNINRKSWRKFANPIITKLYQSAGGMPGGMPGGRR

SEQ ID NO: 953709 - protein, 103 aa, Homo sapiens
SEISVLDNPGSLRGFSIYTTVPGSFFKAWRLGEARTGGMGCGEVQDNKTAHQDGGCADKLKNVTLTLRNLEVPPPRRLRGEEPHSGKFRARMQDTFLNQNLTA

SEQ ID NO: 953710 - protein, 120 aa, Homo sapiens
MLARLASNSWPQVTHPLGLPKCWDYRRELPRPTKYVSNYGDQKKVELLNDKPRIEFCILYELTLHDHISRKRKTDKICHHQIVLPDMLTIVYTTVKLRSLRMNDEIKISTYWGKLNISGL

SEQ ID NO: 953711 - protein, 53 aa, Homo sapiens
RVSDAMYASLGNGYFERVRLTFHKIGHGHRAAEETGLHLSLPRTCLGCSGMPK

SEQ ID NO: 953712 - protein, 105 aa, Homo sapiens
QLGVGSDMDLGEIKELISTTPEEGTEDNLIEMSVSEPVPDNEEEDVEEAVRENTLTLGNLAEGFCLFKIALDFFYDMYPSTMHALKLKQTVEELVLYRHIFREIK

SEQ ID NO: 953713 - protein, 120 aa, Homo sapiens
PVETPDANPATIRSKSSTIFGIPIACTPQVAYKALVCKLVCKEWCIMRVAAVDSALKELLERCAPDIGDRLPAERDIAAQMGCSRQTIRIAFTKMEHAGLIWRHVGKGTFRGPAPLDVPL

SEQ ID NO: 953714 - protein, 37 aa, Homo sapiens
RYERWVSEHSFIVFTAAPQILHYCLSSASRQVSSSIR

SEQ ID NO: 953715 - protein, 118 aa, Homo sapiens
RTLINVASSNYVSLPPWYHSYLLFIPTYILQISFCLHCVCVCVSYRFEGAHQLETITPMFITCRRERFISYKGLQPRMVAIMTGCRSVPYCQGKRQALPGREDEDRTEKLSELTTYTY

SEQ ID NO: 953716 - protein, 35 aa, Homo sapiens
CSVSPRRTSVDLPVFEMLLAPIPLLGLTSGGTALD

SEQ ID NO: 953717 - protein, 71 aa, Homo sapiens
ISVKECAFMAATQGLTLPPAIIAELMPLEVQMNFIHENFLLVLTRELGVDIDRNPELSGMVRSINKFGQLP

SEQ ID NO: 953718 - protein, 88 aa, Homo sapiens
IQNMDKIGNKSRLCKFYHTTMCIYEKQKTRTFAVQSTVTSYVITQTKVMKSQMKMAGASVYHSNNTAGSSQEDGSTKDITNNAELPEG

SEQ ID NO: 953719 - protein, 70 aa, Homo sapiens
GQQERPRMMGTYRGDPNWFMKKAQAHKREYTESQLQEEKACHMDLSDGTATEGPPSAGMTGYGRPRQIIS

SEQ ID NO: 953720 - protein, 38 aa, Homo sapiens
SQVTWTSQEEIGPRGPTDCGWVTEVTMQWIVHVLLLDD

SEQ ID NO: 953721 - protein, 33 aa, Homo sapiens
MESPSCPSPQMCAYPVQRLLLTASLLTFWNPPT

SEQ ID NO: 953722 - protein, 57 aa, Homo sapiens
QHHILTDGSPHQSQTQALVLEEESEWLDRQDKPTSSRDWCDPTASPVPGDACRHPPP

SEQ ID NO: 953723 - protein, 66 aa, Homo sapiens
LFPSREGVVLMGKNIMMRKAIQGTVENNPGSEETAVLIIRGNVGFVFTREDLTEIRDMLLVNKVPA

SEQ ID NO: 953724 - protein, 38 aa, Homo sapiens
PCSDSSRISKPRTENQKLPESADCFCIVSTGQPGEPGS

SEQ ID NO: 953725 - protein, 46 aa, Homo sapiens
DSGCVCIDCEQTTYMVLQPAFWVAHNLVISAKMDISNKGTFSGPLQ

SEQ ID NO: 953726 - protein, 68 aa, Homo sapiens
RSAHGLAVFESEHLPTHGGSLRVYAQRLDTGKHDVTAEVARTLDEEQQAGMTGAAFYERFQQQAERIK

SEQ ID NO: 953727 - protein, 35 aa, Homo sapiens
QIGENKYRFGDSQQLRLVRILRRTVMVRDTELKFV

SEQ ID NO: 953728 - protein, 53 aa, Homo sapiens
AVFRRLRIRNCGDIFLGLMASGSDLALLPFYGLKSCSHASPWEAARVNIPFAQ

SEQ ID NO: 953729 - protein, 75 aa, Homo sapiens
DARLKEPDTAWRASQSSAFFLTAPPQPAKSAASGCTSRARVTVPIEPHSCPVQAALGASVANTHMHTYNALRLQK

SEQ ID NO: 953730 - protein, 44 aa, Homo sapiens
MSEDNATEEEILIYLEKTCDWLSETEHVCVHARLIVDSLPPLII

SEQ ID NO: 953731 - protein, 41 aa, Homo sapiens
SEVQKYIDYVRDVAAADELLLEQRLDISRWVPEAFGTSDAV

SEQ ID NO: 953732 - protein, 69 aa, Homo sapiens
ALGMKKLELCKLLVGSKTVQLLWKAANYHEIQQFHFWIPTQENQKQGPGIDICISMFTAALFTTAKKWN

SEQ ID NO: 953733 - protein, 33 aa, Homo sapiens
VSPGQVSSSRTRRKPLMSSLNALAQGQLILILE

SEQ ID NO: 953734 - protein, 66 aa, Homo sapiens
SLHFGLVNGVIRDGTAPSWISAWRATPPWKTCDRSYNPKHQAQSDDSLTTILENNMAFSQAVSGLN

SEQ ID NO: 953735 - protein, 66 aa, Homo sapiens
GLLHDIDHADRMPTLLVVLNPEQVLKNEKYVMKITGDDDAGKAQLDNFINPKKAYPVIATTSELMT

SEQ ID NO: 953736 - protein, 101 aa, Homo sapiens
MRIWFNDEPLQCAEATSVADLLTQLEQQQPGVALALINASCRMNSGKIISYRKAIKSCFFRLSLEADMLRIADKTFESHLFTGTGKFAAPDVMVEAIRASG

SEQ ID NO: 953737 - protein, 41 aa, Homo sapiens
SEDSHAEECCWRLSELLHKAMNPNSPSSSSCTAPPVKAHQH

SEQ ID NO: 953738 - protein, 161 aa, Homo sapiens
YLQFSTKTVSTQSHTNTVINIFQHISKQASQTSTRQAKSFLIPSSHNVVCQFSSLKSLIKQSKHNFKTFMQLHHKSKKLTRFLNHQHAKQKSVFAVCTVSQPSMDCKQWGVQGQQSSSRFKFIHGKQQFSITHFSVSLNCTVFHHPVYNQCTINVLGLAIC

SEQ ID NO: 953739 - protein, 72 aa, Homo sapiens
PCACSFKYIDSLLSSPLLSHVHAHGHGLLFLFFPGSPLMQGEVGLYLRHLGSIETPLLDSPASACQVPAITG

SEQ ID NO: 953740 - protein, 148 aa, Homo sapiens
GVIQMLRQEMSSHTECDGSACQRTGDAGMARQVDVRFCLPPNYLYPPERHIAEAYLLRLWSYLAWGCKGKGYPQVNCCSPVYAEFCCEEGETLPSWILPKYFVFPSVTTVHRLYGRNVFVFTPAVILYTKVVLRECADVRDKRMKSCW

SEQ ID NO: 953741 - protein, 36 aa, Homo sapiens
RIPLEEEPESSAQRVNLEQIVDFGHVNRHGNCVRRM

SEQ ID NO: 953742 - protein, 102 aa, Homo sapiens
MPRQFKKDLDSYLKTRSPVLSLSGLRSNLQVSNEPGNRYNLQLINALVLYVGTQAIAHIHNKGSTPSMSTITHSAHMDIFQNLAVDLDTEGRYLFLNASVEV

SEQ ID NO: 953743 - protein, 136 aa, Homo sapiens
TGLSASPCGCVLGLASFSPVPSCSSVLASVAPPALVSRGVGLTALRHCAAPAPQFLLLATGRLFCELRKSCCLVSPAPQLCEILAKITERFIKLNLMVNDDTEIKPVRIFTVGTLRPRKLGASSSNSSACTAPYGS

SEQ ID NO: 953744 - protein, 112 aa, Homo sapiens
WENSLTLLPRLESSRGMSAHGNLDLPGSSDPPASASLVAETTGTHHHVQLILKFLVKGRFGHVTKAGLGSRGLSNAPAWASQSAGIMGVLSYHAQPCATLMWRGLSRLAWWL

SEQ ID NO: 953745 - protein, 107 aa, Homo sapiens
DISTLRDPLYRSSGSNKAIQEPKGVFITEMDADFGKQVTSVLQTQGKPGNSICQTYFIELVRVLKQALQNTRKSCVSSAWAWASEGMKSTADLHQKLGKAIEMVANP

SEQ ID NO: 953746 - protein, 210 aa, Homo sapiens
MGISKHNHAFQQSPSLTHSSITQKSKSNVSSETSYVPSAYEPVKSKASHFLDEWGYRHRVNTPISNGKNGPKQRDCRPHTSLKSNRAVIKPQSSEMISFDSMSHIQDMLMQEVGFHNLGSFAPVALQGAASLLMAFTSRCCVFVAFPGAWCKPSVDLSFWGLEDGGPLLTAPLGNAPVGTLCGGSNPTFPFCTALAEILHKGSTLKQLLL

SEQ ID NO: 953747 - protein, 106 aa, Homo sapiens
WRQINTEGPRTDVRIIKYTRTVKEIHQEMDENFCKQVTSVLQTKGKPGNYDMPEYFSKLGVVLNKALQNTRKSCVSSAWAWASEGMKSTADLHQKLGKAIEMVANP

SEQ ID NO: 953748 - protein, 137 aa, Homo sapiens [sequence omitted]

SEQ ID NO: 953749 - protein, 48 aa, Homo sapiens
VAITAGHRTHAPNGKRHPSAISTIKLHSTLIIFTILLLLTIIEMVANP

SEQ ID NO: 953750 - protein, 97 aa, Homo sapiens
IAAGKRIVPGNPIFKPSDLVKITHYHKNSKGQIVPMIHYLLPGPSHDMWEFKMRLGWRYSQMLSAVILYLLTNLSLTLPPLYPSQPLVIFCSTLYFS

SEQ ID NO: 953751 - protein, 65 aa, Homo sapiens
ISPRGGGGAWVSRLSLCVPVGVGVGVPVVSGGDGCRGWGLCAGGCRGKGSPYMMVVLGVDVGFCV

SEQ ID NO: 953752 - protein, 108 aa, Homo sapiens
EDPQAFTACIINVILSFLGLGCNGFLHLNDLRSFHILNYFSVISAISAQFRTLAGEVVSSFGRMKALWLLCCQGSCACFFSSLGADVPSVFKVAALWIFWYLLFNLCS

SEQ ID NO: 953753 - protein, 64 aa, Homo sapiens
GAQGGAVALNEEFLINYFTDKAASYTEEDEYHTAKDCLLVYSHEETESLNASIGCRTFIEGELD

SEQ ID NO: 953754 - protein, 76 aa, Homo sapiens
GALKMDYEEVGVRFCKNDGVRKNARNTHYPFLLALQHVMLPEFQLPAYLTDVKAFWFDCIHLSNHVLYHVYLPISQ

SEQ ID NO: 953755 - protein, 134 aa, Homo sapiens
MSMRRADAPSMRTTMMPCRLLLKATDAVHARRAEYFDGSEPVQNRVYNSLKVWSMHRRPGEMSLELTFQSTKAVYDRLLDLLFATPQIVINYAMFLEEHKYFERRFIGVRALPSRCSSGPTCPTSGAAILFHNR

SEQ ID NO: 953756 - protein, 194 aa, Homo sapiens
RSESGSTHASPDHTEPSCHFTSADHLITHRKFRSENAGWRYRLLGSRAVLPAKARPAARSTVVARVPATRRSVRAAAAAVVVAEPTQVDYSSRFSVFPMEACDLLGGDACIGEMYPEAKLAAAAPEAAGGVHGVERDYLSYDDPKTVFPGEACDDLGGEFCEAPYLDGVFQAAGATPESWQIHPCLSRNELVSQ

SEQ ID NO: 953757 - protein, 201 aa, Homo sapiens
GWYACRYWSESRVDPRCRDCLTREQSRGRNGVWDNLGELSNIAQLTGLDAVKLISLIVRAVSRARVHKRNCRRFAQHLKLIGGLLEQLRVSELRKYPETREPLEQLEDALRRGYLLVNSCQDRSYLYLLAMGWNIVYQFRKAAERRSTITYASSRSSRSSDNARIRDRLEYIERTKVNYFFDEDDKKVQDARRILTVHESY

SEQ ID NO: 953758 - protein, 124 aa, Homo sapiens
AIMSSFQHDFSFAIHMSVHYLGFPPGIIITQFSSFPITPLFAPSFHAICQLTHFPSFFSAPKLCAPSMLPFNLAHSPSRMSFSPFPVPQHTLIKCIIPDLPFPTTPNVPHALSCLTLGPILHFP

SEQ ID NO: 953759 - protein, 89 aa, Homo sapiens
TQEFTTQQLSVLRCRVYSPVLFYSNKLAVSLTKSNSSMNCDTKLAGVLHIFKSENYATLSPYTLCIIFSIDYHIFNNMKTVLLYLDNYS

SEQ ID NO: 953760 - protein, 69 aa, Homo sapiens
ELLKVHKKEGTLFCRKDILFKITTTLGGWGIKEEYKKSEEDGGRDATLSSCEKPINLTARCDGSDASNI

SEQ ID NO: 953761 - protein, 160 aa, Homo sapiens
YLRIEVSFDYVMPMVYFNCLCCGQEYGKTRTRLLSLMTRACVRKEDIERMVQEAEKYRAEDEKRREEVSPKNSLESYAFNMKATVATIRNFNAGLTMHDKQKLLDQCNEFIDWLDMNMTAEKEEFEHQQKELEKVQQSPIITKLYQIAGGMPGGLPGGRR

SEQ ID NO: 953762 - protein, 36 aa, Homo sapiens
MSTGEKRTRLLSVMTGAVGGKEDIERMVQEPDNRYK

SEQ ID NO: 953763 - protein, 107 aa, Homo sapiens
MLVFGPHWDTGQSFCDSHVCTLINLYAFSLCAFFFLLRWSLALSPSLECSGAISAHFKLRLPGSRHSPASASRVAGTTIACHHARLIFRIFSRDGVFTVLARMVSIS

SEQ ID NO: 953764 - protein, 40 aa, Homo sapiens
ICGDTVIVNGGSDSGDGNGSGNGGDDGDDNGDDGGDDDVI

SEQ ID NO: 953765 - protein, 110 aa, Homo sapiens
HNCPTSLYGRAQWYLPISRQGLAGLELLSLSDPPTLTSQSAGITGASHCSEPIGLFIYTLSCNLHSHSADRERLLLPHTLRNPRHRRSANMLTSSCTGSASTPYPELSSH

SEQ ID NO: 953766 - protein, 63 aa, Homo sapiens
MDSKGYRVRILALVVRILTAPTMPRTDGSCSLSRQVLGFAADQSAQAMEGQSYCSVLMQHIHA

SEQ ID NO: 953767 - protein, 55 aa, Homo sapiens
MRLRHDVGTQSSVFRHPASTVLLLDMTYKVEDEAQLNWYGSKSADHGKHISRDDS

SEQ ID NO: 953768 - protein, 97 aa, Homo sapiens
MHCCNYLRTCPQRNAAQCVRRTRLNPNQIRKPHEPQLHKCTTHSQVTAHPPATRRSYSSTTLVSHSFRALGGEPEAEGKERVVVLVAHVQGQMSPPI

SEQ ID NO: 953769 - protein, 70 aa, Homo sapiens
TAPLSYDHASFQSMGFIATLLQPLIGLMTSVYILQNLSLTLTNGEDMSPVCRYICARYPSQVGTCPIYLD

SEQ ID NO: 953770 - protein, 126 aa, Homo sapiens
MPLTIHTAELIHQAVSVWPKIPTINHIISMNQSAVVIPDSQISYQAGYSKGLYINAQEPRITGPIFLWAPVKPLLHSQTTQNGVGHQRILVKIWPLAFTSKSLYPSDLCGYQKQPSDPGHQRLQFR

SEQ ID NO: 953771 - protein, 41 aa, Homo sapiens
MPELIPAAYSFLGTVRREGLILSPWLEYSVIIIAHCSLDLV

SEQ ID NO: 953772 - protein, 119 aa, Homo sapiens
VFPSLIATIKLVFSLALHGWFNVIHYINRTNDKNHMIISIDAEKAFDKIQHPFMLKTLNKLGIDGTYLKIIRAIYDKPSANIILNGQKLGAFPLKTGTRQGCPLSPILFNTVLEVLARA

SEQ ID NO: 953773 - protein, 36 aa, Homo sapiens
YIRVGSSSRGSFFVWVVLRWVVLQVGLLLAGVISKK

SEQ ID NO: 953774 - protein, 37 aa, Homo sapiens
YPWVVLTGLEEAAEAETAQDNSQAQDQEEKEEAEKEN

SEQ ID NO: 953775 - protein, 103 aa, Homo sapiens
SQYCTFAFPIFLSALRGLSLVDSSSSGTIMPEERMTEIERETETEMRDRYLLQLNENAPERERGTRDHCPTPSVFNGDEERYRYWEYAERGYKRHRARREKEE

SEQ ID NO: 953776 - protein, 61 aa, Homo sapiens
TLEVSDKQPISTINQQVIITLTVNLNIGMLISERLKKSKMELGKSYPACLPYNITSVHHQY

SEQ ID NO: 953777 - protein, 45 aa, Homo sapiens
VIISPLTFPRTLIIFTSSNSTDYPSKSLSALIQAYVFTLLVSLYQ

SEQ ID NO: 953778 - protein, 126 aa, Homo sapiens
FLLKPCGAYRLSCEVSGFSIDAYKLNCVSCQPRGKGLEWVASIYSRRGYVNYAELLLRAVFTVSGGFPEASVYLPMNFLRDDDTAVYYCVRQGIQHYDYRLDAWCQREQPVVVSSGIPRPAPRSSP

SEQ ID NO: 953779 - protein, 53 aa, Homo sapiens
DLEDPAVTGYRGSVCMASRSVSMIAETIVEGGSRRSRCTCNRSQVTAGREFGG

SEQ ID NO: 953780 - protein, 57 aa, Homo sapiens
AGVKKAHRYRPGSVALREISSVYQKSTELLIIANFPSSVWCEEIAQDFHTDLRFQSA

SEQ ID NO: 953781 - protein, 35 aa, Homo sapiens
GGVVSFYYPLYGSPAPNISSTTEYSPPNDDELNYT

SEQ ID NO: 953782 - protein, 38 aa, Homo sapiens
VCTKRGLLPAHPPLTAELTVSGTNTRLLTYTAKPSTHD

SEQ ID NO: 953783 - protein, 100 aa, Homo sapiens
PSRSRARDVLSAGPMRSKHMVYKPPPGGDSVVCCATNVAKTSLTIPGIKYVVPGRTVMTRYYDRVTGVSSFRVTWVSQASADQRAGRPIRRTKVRAPKGT

SEQ ID NO: 953784 - protein, 114 aa, Homo sapiens
PFTCQTSNACILQASSVEEQNPPVSRRAHSSLDLDIQYEYSREMRGLTILLTFWVYTMEVSERLHSVYTGLLAAKRSSRRRFLASYDVWLFRIIVKQNSPSSGLFTLLSREREL

SEQ ID NO: 953785 - protein, 82 aa, Homo sapiens
GFWHIHVDSITMNGEAIAMLLRAARPYVDTGTSLLPGPTSPIANIPELTSEPERTQTGDMAGSACSAISGSLPPDNRIFPPF

SEQ ID NO: 953786 - protein, 53 aa, Homo sapiens
PYHDQHKLCPTIAQPLYYTQHNLCPNNQHNLCSHNEHTVLPLQPSTTSHSKDQ

SEQ ID NO: 953787 - protein, 66 aa, Homo sapiens
MIPGPQFITTSVFAAPRVARPIPHGGQHAKDSQVQQQLIAPFAEDGSDRTLGAQRIQLIDGGYERT

SEQ ID NO: 953788 - protein, 97 aa, Homo sapiens
DYPSWVALLVRDMRQTVAVGVIKAVDTEGCSAIRQPARHSSSPFNVSPVTPVPPECLHSCRREGSCISGFQGYEPTPPQSGAALDSWVMSSSRQVRR

SEQ ID NO: 953789 - protein, 60 aa, Homo sapiens
LGDPPMYLKGGFFLRIHPDGRVARGPGEERPSHQATTSSRQERGVVSIKGVCATRNLAIK

SEQ ID NO: 953790 - protein, 73 aa, Homo sapiens
MNLIQHLNTLGYRQVDVKDEKQLLINLKTQIEQANGLSVLSENEWGQILNHLKAGNSFNCAKVLRHRFPVNFD

SEQ ID NO: 953791 - protein, 84 aa, Homo sapiens
IIHNRQHNLCPNNQHNPCFYTQHNLCPNTQHKLCSHNEHKFCPYNQHNLHSTAHHILCPYKQHKLGSYQQHNLCPSPQYGAQGY

SEQ ID NO: 953792 - protein, 60 aa, Homo sapiens
LPDELIKAAMLDGAGYLENLLAIVLPLSTPILVVTLIWQFTAIWNDFLYGVVFSGADSKP

SEQ ID NO: 953793 - protein, 40 aa, Homo sapiens
TGSGKKSDPHIKLQLPCKRERQLCLSTGVCANRYLAMKEG

SEQ ID NO: 953794 - protein, 34 aa, Homo sapiens
KAHIEGSLLVLVPAHQALFPAARAPPWPMVFACS

SEQ ID NO: 953795 - protein, 45 aa, Homo sapiens
RGSPCAELPRTESARVTIRKTIDTIIATRVIEDDLPLLYSDRDFD

SEQ ID NO: 953796 - protein, 52 aa, Homo sapiens
EQGSICKGIRRNRSASKLREDVPNQKSDPSDTKVKDFATTQVPIEASSETTT

SEQ ID NO: 953797 - protein, 44 aa, Homo sapiens
VYIGSSDRRAASRCVRLPPDPPGPTLRRRASRTRDLWICHFRGL

SEQ ID NO: 953798 - protein, 42 aa, Homo sapiens
MGDVGALALGGALGTIAVITRRMILLAVMGGVFVAEALSVMA

SEQ ID NO: 953799 - protein, 37 aa, Homo sapiens
GYIHRDIDNTERTQMDDMLVRCSAISSLPEIVFTING

SEQ ID NO: 953800 - protein, 186 aa, Homo sapiens
PTAPESHIGKDEEIPDSSKISLGCKKTGSKKKSSQSEGIFLGSESDEDSVRTSSSQRSHDLKFSASIEKERDFKKSSAPLKSEDLGKPSRSKTDRDDKYFSYSKLERDTGMYLPDVDQKESDGGKDLTLGLREALELIYPIPGQNDLIDYDSDRRYHRSSPYRERTRYSRTYTDNRARESSDSGGV

SEQ ID NO: 953801 - protein, 107 aa, Homo sapiens
PLLVHQHNLCPTTSTISSPTTSTTSATTTSTTSAPYKQHNLHSTLPAKPQLLQAAQPPVLKLLPATSGTSPTLPKSTNQELPGTTATQTTGPRPTPASSTAPKVTEL

SEQ ID NO: 953802 - protein, 42 aa, Homo sapiens
HTDRPLEAVSLKSLQKCEIALEKLKNEMGVPLPHRPRCHRPK

SEQ ID NO: 953803 - protein, 95 aa, Homo sapiens
WTDWSILLLVAAATVTQREFRLKQSGGEVKKAWDYCESLLQGSEYTFTVYYVHWLRQAPGKGPAWLGLVNPEDGGPIYSRIFLGRLTITAVRRVT

SEQ ID NO: 953804 - protein, 70 aa, Homo sapiens
MLPFQRLVREIARDWKNNLRFQSATYRCYCREASEAYLVAFMKDTNLCAIHAKGVNNYAKRHPASTPNTW

SEQ ID NO: 953805 - protein, 89 aa, Homo sapiens
GSYLLILWRSVILRRYQKSTELLIRKVPFQRRVREIAVTVKNNLRFQSADIGALQEACEAIWIGLIEDTNLCAIHAKSVKIMPKDIQLS

SEQ ID NO: 953806 - protein, 57 aa, Homo sapiens
PVLLKPLARMALYLRGERNLIVTGHGTVALREIRRTQKSTELLIRIVPFQRLCAEKL

SEQ ID NO: 953807 - protein, 41 aa, Homo sapiens
MCVCKHWLSRDLMALVLGWYTAPEWHMLLGRDTSNAPVVVS

SEQ ID NO: 953808 - protein, 42 aa, Homo sapiens
WRLKPLAVVRPLSVRGDRNLIVTWPGYLWSLRENLDGLSASP

SEQ ID NO: 953809 - protein, 98 aa, Homo sapiens
LGTLRILAECRVMWKRRQLRGARRLHASGQIIRQRTAKKRDLGFAVRIPVSPEVDRIKSLLRKPQCLHTRMRRSLLPEPGRVLLLGAHPPQFMIMGDI

SEQ ID NO: 953810 - protein, 118 aa, Homo sapiens
MACRGAGVQGGIGQLQRRDPLAGHTTQMCEHRWAHPGLGDVVELGNSPMGRFNGAELNGQRTAVCQVGNISEACNGVVFLLGYIYVFDLNVQAQGCFEYTNTSINPPQNTLKAQLNIR

SEQ ID NO: 953811 - protein, 72 aa, Homo sapiens
MECVLVSAGMQWLLSISPGNALGWKDANSTEFDHTSVHPVVGLITEVGRRHRAPVETPYLKPPDLVRAPWRP

SEQ ID NO: 953812 - protein, 89 aa, Homo sapiens
MSLGGGEGKLCGLTDFISLMLLRADVGGKFEHFHNLAGFINDGVVGGLKIDGLSLMRSCAQIARLKKFLPLNSAKNLDFLDKNYRNRTF

SEQ ID NO: 953813 - protein, 79 aa, Homo sapiens
  misc_feature (1)..(1): Xaa can be any naturally occurring amino acid
XYVVVDITCDVMRGYSMTRGSFGKQSFEFCEEYGCNVGNLKELTEGHHQEWSLRFNLTQHGIPHPARILIHNEDRGTEL

SEQ ID NO: 953814 - protein, 81 aa, Homo sapiens
EDSLSTNVHLVHHQAVGQVDFLVGAQAGGGEEFVIGCTEHRVGLRAVVEAQHVFCFYFAHSADVDPLIVHTFISNDWLLLC

SEQ ID NO: 953815 - protein, 166 aa, Homo sapiens
TVYPDPPGKIRYQRFKDYGCIACHQDVNIGGNMFQKFGVMGDYFKARGKPLESDLGRYLLTQDEEDRHVFKVPSLRTVARHWRRYFHDASAKTLEEAVDVMFPYPVGAQTVPGRQGADNPVSQDPDRRMGGDSVMRALSRRGTSQILLGLITLCLCSNLVNEYLTS

SEQ ID NO: 953816 - protein, 72 aa, Homo sapiens
ALSRMWSSAMVSTLLAKIFMSPWIHKGSFPTGFSSQKSHSFSAEQKYGKVRLGAVAYTCNPITLGGRGGQII

SEQ ID NO: 953817 - protein, 44 aa, Homo sapiens
MATFATPSIGGVHSRETLSQSHLSMGAQVIVKPCQQDYDLVSSI

SEQ ID NO: 953818 - protein, 61 aa, Homo sapiens
HECTRHSGSNFAGVRVAITSCTRYSSTASAMYKPRISLRAAKIACWLTRRSVLGFATSSAS

SEQ ID NO: 953819 - protein, 39 aa, Homo sapiens
SSTECSKRRIFSSVRSFASNTAMNAHPPVLEAERTNRRE

SEQ ID NO: 953820 - protein, 44 aa, Homo sapiens
KPIALPLSKPGRQVGRHAVQALGGTGTGALFRHSLENAQLTELH

SEQ ID NO: 953821 - protein, 46 aa, Homo sapiens
LTTPYTGTCYAVCYGLLYYVYVYYGLLTHDTHLTNLTFTFVTYTYY

SEQ ID NO: 953822 - protein, 164 aa, Homo sapiens
RPSVRDARIWVGLYALIIGTALYLGSWLPLMLVGLPSLYGAWLGYLFGISQHVGLAEDVLDHRSNCRTIYMNRVLRFIYMNMNYHLEHHMYPMVPYHALSQLHEEIRSDCPPPYANLWQAYQEIIPTIWRQRSDPGYFSNAPPVARELAPAGLRSNPNNPSDLQ

SEQ ID NO: 953823 - protein, 84 aa, Homo sapiens
IVARFPYRLLLNHSADVFMRYLPKTRHGQDIRQAHAPVRGITVGNSSDYHHGVNRGEPLTMISAAMIRKNAPQQLWMVCRVVRI

SEQ ID NO: 953824 - protein, 59 aa, Homo sapiens
LLFLCLEQAAAAFQHMAVLIPYISPSGSVQHSGSVECIQHICAPQGSFAHLVMAKHAQF

SEQ ID NO: 953825 - protein, 93 aa, Homo sapiens
  misc_feature (8)..(8): Xaa can be any naturally occurring amino acid
MLLQTGSXLGETEAPGDSYSKPVKGRVWGSSSGIHSQLQPLLDVHLDLSSAIFVKRFEGTKHCVQPDRAADEVSKSMFHFHLSSVANHVIEMS

SEQ ID NO: 953826 - protein, 42 aa, Homo sapiens
MIKLCRDYIRITFLILKFLKTVSGSIFVAPFSTYHILGYLKG

SEQ ID NO: 953827 - protein, 53 aa, Homo sapiens
EPPPCTAPGMKAPFPSYIKVFNLTTCNHQVRSRRLELFQNNTERTPGQTVFVA

SEQ ID NO: 953828 - protein, 35 aa, Homo sapiens
PVTTQIASVCKCMHRQATAWHAVLMPYASSPGLLW

SEQ ID NO: 953829 - protein, 69 aa, Homo sapiens
QLYAYYSSHSQFVFTQRKPSWEWRVEHAEEHSQIVEGIMPAVDHLQLTAGWHQVATYSQIHVYGPQVYK

SEQ ID NO: 953830 - protein, 123 aa, Homo sapiens
SAYSYRSSDPDMSGLSAHGLAFTNAQCSYTTAPHAQAQFVASCNKDTLSIVYLQPTPPPVLSTGSLTQEASTTTTECVLSGPDTPRTLALPQGPEGVDCGAKRTNSPSPKGPGSLGLLRRLLA

SEQ ID NO: 953831 - protein, 32 aa, Homo sapiens
RYKTEVKWVWCNYCVSQGECVICVLEDDTISR

SEQ ID NO: 953832 - protein, 145 aa, Homo sapiens
MKDVAYISELKHKKDNKLGLSSPPASVCKDFRDTILTDNYRELSQRGQVTRVTNASTSKEPGRIKRRGERWVPQARTPGTECLPADSGVCSTKYRAKACSIFTVIRSLWSMAGAMAPLPSKFQFNLELRYQLSIRGTEARIRNSM

SEQ ID NO: 953833 - protein, 137 aa, Homo sapiens
ILVLTDEQRLYISKLKTKKAKKLGLRSPPARVCEDFQDTIITGDYLGIYPQEDRSIVGRMSLLQRGQEEQRGEVEDGSPQGLHQGQNGCLLLWSLLQQVSGKGLLHLHCDKILWSMAGAMGLFPEIQCNLELRYQLR

SEQ ID NO: 953834 - protein, 135 aa, Homo sapiens
MRYSRTDNTSVKLRIQIIYKTVAFYIPITSRWKATSKRQSPDQNLTTHTQRERENGEEKEKSPKNISNQGGGKALQGELQNTDDDKPDGKTFHAQIGRIHIIKVAILAKAIYRFNAILTKLPMSFFTELEKSYSE

SEQ ID NO: 953835 - protein, 80 aa, Homo sapiens
SDIQIISQTQAIFANPRRVDIHIDISKAISNINKPNNELTYFLPNPVLCQSMLTLSSQNMRHCPWALSLPHPLTSHQHEL

SEQ ID NO: 953836 - protein, 87 aa, Homo sapiens
DVTTAIPQKPSAWDDFDYEMLLLMEKMTTHDHRDHPNRCPNTKPKHPSSSGSLSDADLADRRIRWRSEKRGSDVLCRQPPRKTGDAA

SEQ ID NO: 953837 - protein, 92 aa, Homo sapiens
MSCQSVSQSVSRVRVARGTQRFPSPYLPPHNTVVPVVPFHGLDSFRKQVSTESSEVTRVLMPAHKSMVLHCTDYTAFDFEATHIISTILPSI

SEQ ID NO: 953838 - protein, 141 aa, Homo sapiens
LYHATDREIATGCPGGGGEMVSRTECTLMTRSLVEMLREEPEGKVRKPVITGVDIVMNHHLQENKFSEKKANRMYIKDYMKSIKGKLEEQRPERVKPFMTGAAEQIKRILANFQKRSSSLFGENMNPDGMVALYGYLVGVG

SEQ ID NO: 953839 - protein, 64 aa, Homo sapiens
MCCNAEEWNGMEWNEMAWKGMAGHGVDRHGVAWIAVQRNGMGWSGMTWTGTDWPALEWHGLACT

SEQ ID NO: 953840 - protein, 75 aa, Homo sapiens
PDIACACDLLSIYGMLEFCDHCSKKFPVPWTLSLQEESNATGAKMMNILRPKMILYETVFYLDQNMNSCEISAVR

SEQ ID NO: 953841 - protein, 35 aa, Homo sapiens
RGFPVDDLSEHYADLRMYVAPEPHQQANQYWLARK

SEQ ID NO: 953842 - protein, 67 aa, Homo sapiens
  misc_feature (39)..(39): Xaa can be any naturally occurring amino acid
YQDTYRQHLHGVSCLYMLSSVSGWLSVIAGHQGSLEKRXEEELREQIYLLLLFVETESHSVTRLSQC

SEQ ID NO: 953843 - protein, 34 aa, Homo sapiens
MRARVTSSPAQEDRAKDLQDVSLITTKVGGPKTI

SEQ ID NO: 953844 - protein, 35 aa, Homo sapiens
MGLFTSVECIRNLVTRTSVLFSPDAVLGRILVEQP

SEQ ID NO: 953845 - protein, 49 aa, Homo sapiens
SRGSHSYHGASSSDPECRLRQLTCAEKSQTCCCESSGTEGCTLQSHRDR

SEQ ID NO: 953846 - protein, 62 aa, Homo sapiens
MHTPQPIMSVSVAEHFSVEHFLTVHPLKTYGMLHLHGGHNHEGISRFHFVSSFDEHLFQWFQ

SEQ ID NO: 953847 - protein, 39 aa, Homo sapiens
MIQRVSQFYLCSLAGAHIDMVRRVCKTQAAETSGPLVTA

SEQ ID NO: 953848 - protein, 63 aa, Homo sapiens
  misc_feature (2)..(2): Xaa can be any naturally occurring amino acid
AXYATINFLKWFIDEQVEEDAMFDSIIQKLRRIQNDNNALFMLDSEFGNGHLRRKRKHKGTLW

SEQ ID NO: 953849 - protein, 41 aa, Homo sapiens
MAENKNKNKHWRYCCSGPSDICLYETAEIWLPTENDIGMGT

SEQ ID NO: 953850 - protein, 84 aa, Homo sapiens
  misc_feature (21)..(21): Xaa can be any naturally occurring amino acid
  misc_feature (66)..(66): Xaa can be any naturally occurring amino acid
DQRVYSPSNTNYLTPTPHNHXQQRHLSSEPLSRIKTLTLYIIFLTIFFIITFTGTELIIFYIFFEXTLNPNLGIITDEGTRQNA

SEQ ID NO: 953851 - protein, 111 aa, Homo sapiens
QAAEIILNKPGFKYKAFCNQVSSLGLLSFRFFMPPLPVLICQIICWFGPSYLGDVEDYLESKASVTKRREDFLYVPCLDKYQGKIGNEFNADSCVILGGGPFDQAGLGIIN

SEQ ID NO: 953852 - protein, 96 aa, Homo sapiens
MEGYEGELVAGTSLIILVHLVAGAECSRPVCGDVEAQGKYKVLKNVLSQFALKFPESFEDRFLLLFLRQSLALSPRLECSGTIWADCNLCRLGSSD

SEQ ID NO: 953853 - protein, 42 aa, Homo sapiens
MDTIYELLTRMASLGLTLLIFYYYLSPSLGHGVLLAGSSSPT

SEQ ID NO: 953854 - protein, 77 aa, Homo sapiens
RGSHANNLQCRRWSAGNLLGYKDADSSSAAPMFVYSGVCRMGLKITRKTQGPPFSQISLKIEGFSIVSGQVTMGSLA

SEQ ID NO: 953855 - protein, 36 aa, Homo sapiens
YTPPHNPFPIHQRTSTQNIQLRVSIIPHHSLSSVLG

SEQ ID NO: 953856 - protein, 78 aa, Homo sapiens
RYVGVELERYLNSVAAFSPTLGVTTYLLYSTGFFLVSTELFLFGLTVKFTRGFRGFCGSPFTVEPTDFYFWTTQTTHH

SEQ ID NO: 953857 - protein, 34 aa, Homo sapiens
MWDVSLVFMVPASPVNYNLWVSAGPNMKYELQLA

SEQ ID NO: 953858 - protein, 49 aa, Homo sapiens
MAAVVTDYYNLCNLTNWLCYGLYGRTAIIHPMWVIEEYAKILRTWVWFN

SEQ ID NO: 953859 - protein, 95 aa, Homo sapiens
  misc_feature (74)..(74): Xaa can be any naturally occurring amino acid
SGSTVSRFKAGCMVAHDGGACMQAHCFSEFFDNGPIVGTKAVFSGGQASLGHRQGGMAIQGVFSPLLAMFPRCXSISQSGSVVAGSFKFAVSQAH

SEQ ID NO: 953860 - protein, 34 aa, Homo sapiens
MISHCWVVHSVGCCMQHHLSGGAGSVVANHSNAF

SEQ ID NO: 953861 - protein, 53 aa, Homo sapiens
MGDRSVRSSVRSQFICLGIYRSVGVELERFLNWWLLLGLLWFGELLLNTTAEE

SEQ ID NO: 953862 - protein, 44 aa, Homo sapiens
LFTCVDSKHTGALCPTMRQLLQQWAQGQHELGYKKAAEAPQEAE

SEQ ID NO: 953863 - protein, 46 aa, Homo sapiens
WVSISSCSSQAMRSVSSGIIITLFPFKPWFMFRVVLVTLLIHSILM

SEQ ID NO: 953864 - protein, 51 aa, Homo sapiens
SSASSHNSIKQVKHALAKACVVHACPHFSTAALASLMWQHHTGGFTGAASP

SEQ ID NO: 953865 - protein, 51 aa, Homo sapiens
KPYHINNGCYSQERRCLFNTAKTTATPAVRTAYKFCTKIMQSLGLKEVKSK

SEQ ID NO: 953866 - protein, 38 aa, Homo sapiens
  misc_feature (2)..(2): Xaa can be any naturally occurring amino acid
YXVRVVVLDVYQLTYVPNCEYYVTDYLLPYVKLNDTGY

SEQ ID NO: 953867 - protein, 84 aa, Homo sapiens
SQLVRCYTLSTGGTVSCDSIMVDQSCTDETMYPSPIELQKSNQTDPYQEDTLKSRDLQKLRISSAYYAAAYLGTEEGVPSYEYT

SEQ ID NO: 953868 - protein, 32 aa, Homo sapiens
SGLEAREGHSRDPMWVTAPVLTEEFSFRPPGY

SEQ ID NO: 953869 - protein, 47 aa, Homo sapiens
YEILSTEHLWTISPSFDAYKGNSTHNTLFKPVAMNDAATSFLFTFIL

SEQ ID NO: 953870 - protein, 38 aa, Homo sapiens
FYEDPTGYRGQPRLATPVTVVFLFAVALSLELRNINWV

SEQ ID NO: 953871 - protein, 44 aa, Homo sapiens
QCGQRKSLVLVHVRYGLVDYMLCEVIILTRSILVHIFCTSTRLR

SEQ ID NO: 953872 - protein, 42 aa, Homo sapiens
APVSVHSHPHTFLVFVCQLQKNFQIRISACSSSIKDMGQHSH

SEQ ID NO: 953873 - protein, 42 aa, Homo sapiens
SAGDERHPLNRAGCAFHKRCPYATARCSSEEPLLRPLDNRQV

SEQ ID NO: 953874 - protein, 139 aa, Homo sapiens
YPGTKGARRTGTEPKGMPKSLQVFPRSRSAGAGANHRVLRSPDVQGSRKTGRSGPEPRQGGTTLFTAASQSGLGGCLDLERPEARIAQTPKAGLLISDLRPPEAASSQSSYANRSSFDLLPREFRLVEVHDPPPPFRPP

SEQ ID NO: 953875 - protein, 40 aa, Homo sapiens
MGYDWTPLSQIRPVRNCYWQLPLEPRVVPRDSLVPRPFCP

SEQ ID NO: 953876 - protein, 42 aa, Homo sapiens
KLNSEQPKAICDGFIVVKVTKTWCSMTIRVHPWRRSSYLSFD

SEQ ID NO: 953877 - protein, 34 aa, Homo sapiens
KLNSEDTSLQDSTYDLPKAHVESPIAGSIVLVGT

SEQ ID NO: 953878 - protein, 75 aa, Homo sapiens
TNNSSTAAITNFTGVSILSPSYKPSEYFESPFTISDGIYCSTFFVTTGFQDFTSFLASDLSFICYTFRGTELSFV

SEQ ID NO: 953879 - protein, 48 aa, Homo sapiens
MSVRRIYHSRLVYEYCGKYYLPIDGGFDSGFRGVISGVRKEVSSLLML

SEQ ID NO: 953880 - protein, 44 aa, Homo sapiens
MCGFDSRNFNTSRMECVSITLSSRNFCSIHVPLYPGRSVWEIPS

SEQ ID NO: 953881 - protein, 38 aa, Homo sapiens
SRNVLEIHGWHFSELLKKFIGEQNHVSWGPTGCLRWGT

SEQ ID NO: 953882 - protein, 107 aa, Homo sapiens
AFIWSLELFLINELLNMRNINFVIAVVRNEHTVPKRLYRMMRSCIYYLSRIREDPLTSRPAAPCRLGTGPLVDNRSRLGEPRGLCKPQAPPPIFQAHSTDSNSAFGT

SEQ ID NO: 953883 - protein, 51 aa, Homo sapiens
VKIVCTGLTYYSLEPMSNAPIGVGQVVLAAGRLKKTEAGYRYNTASHVILN

SEQ ID NO: 953884 - protein, 105 aa, Homo sapiens
LPHVTIRGGTRPRLVMRFIDHQQIEDRDGSEMVVARQRLHHRERGAPGPGFVLGIEHGGPDARIHPCKLGEVLAGQFIAMSEDAGLGIWLANKLPATADSMMVLP

SEQ ID NO: 953885 - protein, 72 aa, Homo sapiens
MTIIECPFSLRDIILFENYPPPSLTPEAYTSQINRTGNDQRCPCPRTQFDARKMHDTEAGSGGSHLYSQHFG

SEQ ID NO: 953886 - protein, 63 aa, Homo sapiens
VLHLITRMSHQQQMTYNSGIYFLFYTLVSSLPLLIALIYTHNIPSAHYNILLLTTHMPRELSE

SEQ ID NO: 953887 - protein, 75 aa, Homo sapiens
DAYHTVSGVVQSWLITTSASLVHAILCLSHIEELALQVCITILAHYVLPVDTGFRHVGQAGLELLTSRGPPTSGS

SEQ ID NO: 953888 - protein, 57 aa, Homo sapiens
MELVFLFFFFFFFCLLAISRAAPVAYGGSQARGLIGAVDTGLRQSHSNAGSELRLLR

SEQ ID NO: 953889 - protein, 86 aa, Homo sapiens
VVVCLGRSRWSPQGAQAGLGEQLVTVAFGGCACPATGKGGCQSLALAAGQWLWQLVAVGVVAVLVQHFGQGAAASGASSQRRTCQA

SEQ ID NO: 953890 - protein, 116 aa, Homo sapiens
MVQEAEKYKAEDEKQRARWCHPKQSLESYAFNMQKPVLQMQHTSQARITMQANRRFWHSVNDMINWLDEDIRLLRRQQFDHQQKELEKVSNPIITKLYQSAGGMPGGMPGGEEVGT

SEQ ID NO: 953891 - protein, 112 aa, Homo sapiens
VSLDISLSLWYTQLSLRVIRRSPGIIDNEQYYTTDHGRSTSEDIERMVHDAAVSHTAADEKQRDKVSSKSSLESYAFKQCKATVDDQKLQGKINDQDTQKILAKCNEITHLG

SEQ ID NO: 953892 - protein, 71 aa, Homo sapiens
LYPLITARRVNASNTPLTAVTSPADAHNHYINIAPGRMACCHRLPGNIQRMARKVFPTAIPFWHPFSRIHQ

SEQ ID NO: 953893 - protein, 160 aa, Homo sapiens
WIVHDTNELVAAHIKVKMQTIHLIERYAIGDLSEDMQQLPGEKADITAAMNQVKHNLSTMNTEIKQLAQAAANGDFTARGDAEQFQFDFRIMVESLNTLMATADGNLQSLSALLQSIAAGDLTARMSGQYRGVFAQMRDDANATAEQLASIVGRIQIAAD

SEQ ID NO: 953894 - protein, 79 aa, Homo sapiens
NNSQQWYSQALIHYDQHGSFDLLRFQNWDGSPLLRQLVVPRSREVTILIAELQCGQPIRHSALQTTTPGLKRSSSLSHS

SEQ ID NO: 953895 - protein, 146 aa, Homo sapiens
MTLTIWYHMMVEEANGERRKDGLIRRIILTSVEIKETSDPAIVICWHAMLNSIVQMRPIKWYDHMYRLPERGYIIHLDDFHNLGSYLQFPGSADTATQRHPEENADGKCPQWLEQQEGSTADGFICDLAKTQLSDFLLFLRPTNQD

SEQ ID NO: 953896 - protein, 182 aa, Homo sapiens
MKKEEVVLIGTGTYSGYGISLPACNASRQDYHLWTQGMPYPLSRYSTQHYLCPSTHFTGKEVRQWAHAHGIHWSYHIPHLPEAAGSIEWWDGLLRSRLQHQLGSNTLPGRVTILQKTVCALNQRPRYGIVSPIARIHRSRIQGVDVKVAPLTMMHSAKCLLSVPTQYGSDLLVIYTPEGRRC

SEQ ID NO: 953897 - protein, 85 aa, Homo sapiens
VASFTWGDRPVYPDSRLIIVELFHHGKGERLSSLEQALTQDMGLPTCCNASDKTTIYGLKECLIHYHGIPHSITFDQALTLQVKK

SEQ ID NO: 953898 - protein, 84 aa, Homo sapiens
MGATLTHSLDLCCMPPQMTNLYSHHILPQRIIIQFKHDAAPNSASPVLSCRATLESTGSFYRVYKNLTVANILIEPLTSHHTAK

SEQ ID NO: 953899 - protein, 51 aa, Homo sapiens
MKLKESSAVDHAYHPSTYVMPRRADQQFETPLANMVKPRLYYTYKYRHGMV

SEQ ID NO: 953900 - protein, 81 aa, Homo sapiens
TTDEHPYSSMTLDHVYQWRKAFRRNMAENWTEMRMKSSWMAVLQHNEGETAIYEATRWDVTDGCLDIVRGSIPQSSCYCCD

SEQ ID NO: 953901 - protein, 32 aa, Homo sapiens
MQDATPATSSQVALPGYHRDHELHALATNPYY

SEQ ID NO: 953902 - protein, 67 aa, Homo sapiens
LVFPIWTVAGRTPLCIPYCQWQLGLFPSFWNGGSFLIPCPDPLSIKAPVPSALACHMLLAGSIAVAS

SEQ ID NO: 953903 - protein, 111 aa, Homo sapiens
MHSIGRTLGAAGGEGRGKSGFASPLDAGKAHVLSNKAMQVLQAVSTPRAFIYMDSTTPRFQTMILEELHSTKTGSINGVNTMRIGGSSSSTVWLHLGQKGSRGADAITCCC

SEQ ID NO: 953904 - protein, 46 aa, Homo sapiens
MTCNCIWMNTTFFSYTMQHAYDVMNTTFFSGDPTRCLTLQCMQCLC

SEQ ID NO: 953905 - protein, 187 aa, Homo sapiens
SSFLPPFIASRSNNNGISRSVWQYRRYIDHDQRAIAYAKLDYRRLEPNNAPLFKGVVEPLIPLLMLGPDGVIFHIVQLAAVYRNGLLLYQAYGRAIIQLRSSSLLNPRLSQAWDAERDLFFYGFGSRKVSGLFEESRRLDTCHLLFFPEKGSDRDCIQSRRFPFSRMSDATDGMHIFRASLTHRIFI

SEQ ID NO: 953906 - protein, 36 aa, Homo sapiens
FSPYIWEYNKYAYIYHCHMPYYWNIQRESSVRENRN

SEQ ID NO: 953907 - protein, 42 aa, Homo sapiens
MKRSRSTIQRHNLRVYLELITCGELYQVKELCIEQLQFPYFP

SEQ ID NO: 953908 - protein, 119 aa, Homo sapiens
LLPDTRTRKGCPLSPLYSTYTALEVLARAIRLEKEIKGIQIGREEVKLSLFADDMIVYLGNSTISVQKLLALINNSSNVSGYKINVRKSVPFLHTYNVQAESQFKNTISFTVATRKCNT

SEQ ID NO: 953909 - protein, 89 aa, Homo sapiens
NGIDPHSLFWIKTRLPLRLCVGCFRGRAPDASVGRQVSYAVNGSSAFFYWSQVDSGVIAVARLASSAVVEVDVDPLRKLTLHLRTGHYQ

SEQ ID NO: 953910 - protein, 133 aa, Homo sapiens
MPLNLTTPYHMRYRVFKLSILMPINSLPCPPGMNQMSATTALQTFDIHPFPGSVGAEIIGLDLSRPVNEQDFARIHRAHLDYHVIVFRDQRITPEQQIAFSRRFGVLQIHVLKQFLLANHPEILIVSNIIENG

SEQ ID NO: 953911 - protein, 108 aa, Homo sapiens
TFKRLRLEIDFLVKKKRKKYHQKVLFKNEVYFKATQLLKDLHIYLLLPSSRFYLPRSGISTTPQDFRLISYWVLNDNKEQKPDHDKTHKANHTVVGFSATPARYIWAT

SEQ ID NO: 953912 - protein, 58 aa, Homo sapiens
SLPKLRVNDSGLTRGSDIAIGVYDRFRCVLASVIDEYYLYFVLLKVFKLSDGFVKNWY

SEQ ID NO: 953913 - protein, 53 aa, Homo sapiens
QWTHRSAQIICHVEKTSYIVSLELGKELLSCSITSSNPVLVSWGGLRRSSSPM

SEQ ID NO: 953914 - protein, 66 aa, Homo sapiens
GRIYRHPPQGIPKNSSPTTKIPLSGKHCLASLNMHLKQRQLRFTMLPYWTTPLPSLRPLTNTISKV

SEQ ID NO: 953915 - protein, 51 aa, Homo sapiens
MESFKCGSRWRSTLELQGDFVAKLECGLHLAVDDSSPRCNLNLTLVNSPHG

SEQ ID NO: 953916 - protein, 34 aa, Homo sapiens
SFITEQIPRTFTNISVTFSPTNGKDHVKTSIKLG

SEQ ID NO: 953917 - protein, 33 aa, Homo sapiens
LSQERIRPLKVLGLQAVSHGARLCLGFLLNIMF

SEQ ID NO: 953918 - protein, 41 aa, Homo sapiens
IPRRCGLVEPGYRGCGNGLCSIFVVTNSMRLVRWHPGMSDS

SEQ ID NO: 953919 - protein, 49 aa, Homo sapiens
MPPESSSPSDLIYGLNDRPKPLPAFLAALQHVLAAFVGIITPPLIIGSS

SEQ ID NO: 953920 - protein, 57 aa, Homo sapiens
GRLLTAPPHYSARLNGHPVLTVCFSSSTVPHPPSRMKVLLPFHELLLHFLLGLVTIL

SEQ ID NO: 953921 - protein, 53 aa, Homo sapiens
LEVDSEDPPPYMEITNGFKINTDEDYTSLNSVNGQIEGLISPDGSRTNPARNC

SEQ ID NO: 953922 - protein, 45 aa, Homo sapiens
SCELYICFTSYSDIRTNYNVYSHMGESDAKKMGTEPRHHVTSWIF

SEQ ID NO: 953923 - protein, 34 aa, Homo sapiens
ERDSNIDIVQFLVKYRKYLTAISCLIRVTDTRFT

SEQ ID NO: 953924 - protein, 58 aa, Homo sapiens
YFWQAITSTYTLKLGSIGPRLGTNSRVGIIIPIPAIPPPPDKCHAATSYSIHSPSNIK

SEQ ID NO: 953925 - protein, 38 aa, Homo sapiens
RSITSWKPCCDYEHYSDITYWGYPNKEYEVVTEDRIFL

SEQ ID NO: 953926 - protein, 40 aa, Homo sapiens
SPVPEPSQQIRAGEAPEWMIQQIGPKLDGKIPASRAQEFS

SEQ ID NO: 953927 - protein, 101 aa, Homo sapiens
TGVSHQLRLVRILRSTDYGSRRWRMDGLGINFEMKNDPCRARGRTNIELRAKFILPEGASQGMTPFRSRGQKVQTIFPGSFPLLVPAPVLVQSNHSCTSMP

SEQ ID NO: 953928 - protein, 62 aa, Homo sapiens
RRGLYYHRLLFLNTKLTAGHSGIRLLSQHFVEADGRRITRRSAARRPRPANHGQYPRVEPGT

SEQ ID NO: 953929 - protein, 43 aa, Homo sapiens
MVRSIACQPTAVTRLTHVNSKPALKGYLSSKFDTSWSIACFHV

SEQ ID NO: 953930 - protein, 77 aa, Homo sapiens
MAVLVFETEAVLVVVTGAGSSSMNRRLCCLYQLEVLRGLCEWRLCCLKREEIVLDCKGQRLVAGCRRQKIVLDNAII

SEQ ID NO: 953931 - protein, 35 aa, Homo sapiens
MHTTCFLAWVLTTSLMSAGKKYNSGGICPVTHHRQ

SEQ ID NO: 953932 - protein, 50 aa, Homo sapiens
SISSRIPLYPGEGSSYKCEFRSIRSRKRLSPRPLLHDLAVASTQRGTDAR

SEQ ID NO: 953933 - protein, 92 aa, Homo sapiens
  misc_feature (14)..(14): Xaa can be any naturally occurring amino acid
MLLPIMLCDFEQNXEYKAPKYPRKSFISTISFDLSPVLTYHAELPDSRLFFPILVHYDLHRIELLAFWLCSSPYYRPLDCDFRSPHLRLSLL

SEQ ID NO: 953934 - protein, 35 aa, Homo sapiens
VAYISRYFFSFSRHRRSICFWCFSSRACAIHLLQL

SEQ ID NO: 953935 - protein, 114 aa, Homo sapiens
MPRYLNSAPYSTICFILYPRILAFTSFSVVCSPDICNPLISQGISKTWLFYYVRFLQREGCIVVKVPADHIKCSINTLLLHHRDALTAQGRGLDISCTRETFMTKMVKVTHNQC

SEQ ID NO: 953936 - protein, 57 aa, Homo sapiens
RLSTNCRGKRLCWSAEWRLCWIVGAEVVLVVGTGLEVVPGPEVVLAVEAEVVLACRS

SEQ ID NO: 953937 - protein, 86 aa, Homo sapiens
VIWHVFGQITRGGSLVVRTSVILTIICGSDKITQAGSAAVHVAYGVCTGVLLGNITACTAACQMVVFHLKSTPWIKGQKGLIKVIS

SEQ ID NO: 953938 - protein, 153 aa, Homo sapiens
DISMTRDGCVANGRTQVLQLETWGSCIMYQVARSVANLSANLRGSQSFQENQLSGKSCRLPYCSLNYPVTLLPRWKKPGGSDGGGGNKTHSLWQAPPGKEGSEGVARPDILEFLGHFGLGFGPSSPETSYGGWGSMDLNCSQRSPSITFFTGK

SEQ ID NO: 953939 - protein, 77 aa, Homo sapiens
AVSLKLYRELSWVKGVRRIKLGFSLLKLYCRAVLDLQKSCKGCNRQFPCPSPRFPIVNIFHYYGTFVTTKKPTLVTH

SEQ ID NO: 953940 - protein, 65 aa, Homo sapiens
VSLREHEVLAVMGSGGCSLSASCTRSPIIRKKSLRRTLSERALPEGLSMKKHKLNPASNMYFPRD

SEQ ID NO: 953941 - protein, 34 aa, Homo sapiens
LIQEGAVSCLDSGEDLIGVRDASNLTSVVSEDAC

SEQ ID NO: 953942 - protein, 43 aa, Homo sapiens
GDPISIPTPILIYSVTLKYIFLYLPGYRNNLPGYSPPYPPRDT

SEQ ID NO: 953943 - protein, 70 aa, Homo sapiens
MDNRSENKNHPGKTTPGLDGFSSKCIHHSTSHFCHTEKDAVSQSYKSSVTIVYQMCIAFQSNNHFFTQRI

SEQ ID NO: 953944 - protein, 107 aa, Homo sapiens
TQLRDTGRPLRLPRNAKCYTPVWPRPTRSRSGIPNGNAPALVASLLPLRESSLSARTAWLLTFGGAELPTQSRAGLTGASLEAFPQLCKNLAQLPGIGVGDPRDTGF

SEQ ID NO: 953945 - protein, 56 aa, Homo sapiens
LYPVRTLGYAGWLPEQTCRKEEALRCTPSDQAVLNRAFFPCFDTACCEIQCIQLLL

SEQ ID NO: 953946 - protein, 67 aa, Homo sapiens
IKLVTRMNRMTRDSHCPVPNYRSENHEPRDTALGRNQLRGKKTLLTLDSRSGHGERDMSRCKGYRSS

SEQ ID NO: 953947 - protein, 110 aa, Homo sapiens
KLPATEASMIVRPKPNVLGILFSLKGSIAKRIAWRSLLVTLLASVIVLVETLHPAYFSKVNATPFTLLGLSLSIFMSFRNNACYDRWWEGRKQLGQMVIDVRSLIRETQV

SEQ ID NO: 953948 - protein, 165 aa, Homo sapiens
MRIPVSPISVQQGCIVRGYAYRCRQAPPNRVAVRTRKTLRNGFDGGPAKAQELSDLTTLIATLDKRVGDLLASQTERLIKRCQLSGWCKQTNLALIGQISLNSFCDNFLCLEEIFHVVRLRKFDQRNAEESSHEILMTLTNTLLKSNAKLLYQELCRYRPPEGFQ

SEQ ID NO: 953949 - protein, 64 aa, Homo sapiens
LEYPLYLPRPFREFQNAHRQLDDKTAQVEDFLQFRLWCKWPTDVIVANTPSDRTSFRDCTAGAI

SEQ ID NO: 953950 - protein, 33 aa, Homo sapiens
  misc_feature (19)..(19): Xaa can be any naturally occurring amino acid
  misc_feature (31)..(31): Xaa can be any naturally occurring amino acid
PLGPNWKQELVNHEGLPIXCVHTNVVTVKFXVV

SEQ ID NO: 953951 - protein, 54 aa, Homo sapiens
TKTQPTDSNVNLLWQHLHRHTQDQYFAFFNPVKLTLSINHHRPGVLDQPGQHSE

SEQ ID NO: 953952 - protein, 38 aa, Homo sapiens
AHNIFYRNFFCSRMRSLSFCLALLGRICRLNCNMFRRS

SEQ ID NO: 953953 - protein, 41 aa, Homo sapiens
LYLICYYKIFKALLVKLLKSHESRHPVNRADDPRYSRVPVT

SEQ ID NO: 953954 - protein, 47 aa, Homo sapiens
TFYDIGVRRVARYMTFHVIDIPVCWRVAALYDIPCYVIFRCAGAWPE

SEQ ID NO: 953955 - protein, 92 aa, Homo sapiens
LPATDSASHYLAEAEQLCRNIGIIDHGTIVENTSMRNLLGQLHVETFLLDLKNNLSVAPQLLGYPSRLVDSHTLEVQVGKAMGITTLCVARR

SEQ ID NO: 953956 - protein, 185 aa, Homo sapiens
TCSYWARVLLATLLLATLRSGHAPSGHAPSGHPPCIACKTVIRCAARHMCSVYVADSLNWLRSSIEIELNSANDNPIIDAKKNVCLHGGHFYGGHIAFAMDSLKALVANVADLLDRQLALLVDVRYNTMACRATSQAPPVDRAMINHGFKAVQNRRQALEPPKLLKNTMPASVYSRSTECHNQDR

SEQ ID NO: 953957 - protein, 117 aa, Homo sapiens
PRRIDPLQFAYRPNRSTDDANLNHTALTHLDKRNTYVRMLFIDYSSAFNTIVPSKLETLGLDPALCNWVLDVLTGRPQVVRVGSNISTPLILNTGAPQGCVLSPLLYSLFTHDCVPR

SEQ ID NO: 953958 - protein, 103 aa, Homo sapiens
MNWGGISIDESTGLMFVNDMRMPLRMSLVRKEDMGKYKISTDEVPGFMGHGTPTICRPVRWSNTLIFMQSALGVPCNRPTFGTMSAIDLKTTKVGMASTNGNS

SEQ ID NO: 953959 - protein, 70 aa, Homo sapiens
  misc_feature (1)..(1): Xaa can be any naturally occurring amino acid
XIQRSQNNVLKNINRGLYKLLDLSVTDSSWPIHYYYFNSKSGCIIKSRNRTATLEAIDIKPFASGRSRVQ

SEQ ID NO: 953960 - protein, 122 aa, Homo sapiens
PSLLEYPLLLTTRRCRDLSLAGPARIAEDQCVKRTALVGFLNWLLKLPAPALICRRRLGNWSRTFSLKARAASSAASPKSAQVHVHLTGNHFRNLLQRFPAAGSAARCPWQMPTPGCLGQKG

SEQ ID NO: 953961 - protein, 55 aa, Homo sapiens
MRSWILSELTGTQNSALAYYSRHEKARGLGGLLPQINFRSEPEHFQIRTNRRGQK

SEQ ID NO: 953962 - protein, 37 aa, Homo sapiens
YDGQITLIPNPEKRYYNENYMASISDEYSNTHILLTC

SEQ ID NO: 953963 - protein, 194 aa, Homo sapiens
TTLAARTTYSRATMNQPPDINQYRPPKRHVGWIAVIIVTALVVALVIVARRVTTEPANPVTPTPSPIATSASSTPTPIPASATAVASSLPFSSKDDDTEGRWSIDHVEWGPNTVTLTDDHSAVTKGSLTDYTFFIMENQSTDIHQASQPPYRLTGTGVSQGHKVHGTITIDCPRTDATVMLTHGSGMSSPISAL

SEQ ID NO: 953964 - protein, 75 aa, Homo sapiens
MIRLECRTMLIPPGQSQLHGNFCLLSLGSFLCLNPRIAGTTGACYHAQLIFEFLVETGFHHVGQTGLKTAHLKLS

SEQ ID NO: 953965 - protein, 62 aa, Homo sapiens
RHSPCDTGLWNDAQVGSVAHITDAVTSLAARLLSSWCHAGGKASTEKWWPGFHGGVIPPEKG

SEQ ID NO: 953966 - protein, 54 aa, Homo sapiens
QHIITSLSSTITSITTSIRITITTITSTTTITIITTTILFTITTNKNGHAPPPT

SEQ ID NO: 953967 - protein, 56 aa, Homo sapiens
GAVCLPMSAESSVRVHVLQSGEMAGLELGAGGLVLGYLVACAALSSGGLQLILLGA

SEQ ID NO: 953968 - protein, 40 aa, Homo sapiens
VIFLCCVNEPSSETQAAPCDNVPSRISGVIQDFRGSVRDR

SEQ ID NO: 953969 - protein, 183 aa, Homo sapiens
NWCAVTCRGYWQISVDSITMRRRGHLLCLRCAGNLLTPGTSLLTGPTSPIANIQSDIGASENSDGDMVVRLVTHQQAVPDIGFTQSMESSTPVATQWLTSCRGKGSCIRWLPGHEPPQRNSGGALGTWVMSFLRPSVEKIGPKKLYTDNPFISNQRCAERRERENSYKKNCIQTSFCFQPTCI

SEQ ID NO: 953970 - protein, 38 aa, Homo sapiens
LPSCFRSLLTAESVTDNTFSSTVVHWSDSSESRYGLKP

SEQ ID NO: 953971 - protein, 81 aa, Homo sapiens
MGLLARHLRSYCTMVPLIRKKSLRRTLSERGLLKDFLKKQQPQPSQKVLPPVKGSHTGEMNSPWKNYLNIGVLRHYRASEL

SEQ ID NO: 953972 - protein, 136 aa, Homo sapiens
STRKYILAKKLPSGMTHHFHSLSLSLHTGSLNWVPVTCRGYWQITVDSIIMNGEAIACLEGCQRICYHTAPTLLDLAQSSPYCQQSMSDNGAQRRTHDGDIGGQLAQTIKQPAPTIVIHPSNGSPSTPVPPKCPTS

SEQ ID NO: 953973 - protein, 45 aa, Homo sapiens
NGNRHHVRLPVYVMNDVNATKVITTTATLGHLALMVDRRRGPEKP

SEQ ID NO: 953974 - protein, 67 aa, Homo sapiens
PHSMLTGCCYRRRLLQITVDSITMNGRGIAALRAAERYVLTPGISLLTGPTSPIANIQSGIGASVER

SEQ ID NO: 953975 - protein, 82 aa, Homo sapiens
MACQLTTMCHLDVSLGSAFSLDVGKCGLVAPVSREVPVSMSGLGALSAGDVASSVRGDAVHGDLPVTLDGNRHPVQTSSVER

SEQ ID NO: 953976 - protein, 71 aa, Homo sapiens
SQYLDGTGTSSDFHVYVEGVMPPNDHHCCHIWSSVLLMCRHDEEVLRNHVPWFHDVCQMTGVAAVREEMLG

SEQ ID NO: 953977 - protein, 191 aa, Homo sapiens
PRREQVLLSMGYRSFGAVGSVYRRRRVMGQWANGRVMAGIAWIVVAAISALNVALVVETVMGAMIPEVKFCGDNREMSDKLRRVTTSNPTPTPAHELANDLATAFRGHPAGVAILTTMGVAGPEGLTVSSLASVSVVPAVVSVSLGHDLDDSGRSYRGIARHRPHAVTRIALASLMTSLCQGPVTLRARVG

SEQ ID NO: 953978 - protein, 37 aa, Homo sapiens
PASSSAISALLTVLALSIFPGPPRPPLLPPICAIKGP

SEQ ID NO: 953979 - protein, 40 aa, Homo sapiens
VLKRLSNLWVPSVYCSSLAAATIDRFNPEDSSTYQSTTRQ

SEQ ID NO: 953980 - protein, 53 aa, Homo sapiens
WCESRRSPGHISLSYLAGPHNTSHSARLPLHIKRSNTLRLTHRSTLSLDNEPH

SEQ ID NO: 953981 - protein, 97 aa, Homo sapiens
MSELTSIEEAFLALPCMRSGQQRVLRSDASHACALVLQRVALEILEQRGHQQADHDTVHHDTVHHNTVHHDTVHHDTVHHETVHHDTVQQENSAPRN

SEQ ID NO: 953982 - protein, 63 aa, Homo sapiens
VSTFRTRKHGEACLVSDEEEKTLVECRSCLTCKSDVRPGYSALKDNSNHLVSWFPSESFPSGI

SEQ ID NO: 953983 - protein, 37 aa, Homo sapiens
HHLDMAKSIYIPYITTLPSTHHPEVTSTSTTSITPQT

SEQ ID NO: 953984 - protein, 45 aa, Homo sapiens
ALNSARIYLSPLTRLSNLLVPQSTAPVLPAPTTTCFNPEDSSTYQ

SEQ ID NO: 953985 - protein, 55 aa, Homo sapiens
VVWGTGLIDGDDDVGRLLVAEQLTTMLPSEFSLAPSVALGCWRMGLVVAGQQTRC

SEQ ID NO: 953986 - protein, 40 aa, Homo sapiens
HETIHYHLGGSVYAVPTWLAQLHLESCRFLMAGLKIRGIP

SEQ ID NO: 953987 - protein, 71 aa, Homo sapiens
GLLYPLSGLRVARACRSSSSHEECLVAYSVVLVESNVLGVPAIASDRRPTWSRQGNSCLKKKRVKSIQEDL

SEQ ID NO: 953988 - protein, 86 aa, Homo sapiens
MSLSKAAIASFDVDAQKSFTPLCPNELPVSGVDGIGAELNYMAFSAGHRIGRLDAQTPQAPWVVCSAQLDAETHRPGTATHCTTTQ

SEQ ID NO: 953989 - protein, 46 aa, Homo sapiens
YVIAHMIINDEYGLEVLVMVMVRRVYREEDSYEKDYGMRFACVRKY

SEQ ID NO: 953990 - protein, 35 aa, Homo sapiens
MIGYVALDKLLTFGVRSLIRYRAKIPELNLIGVWK

SEQ ID NO: 953991 - protein, 80 aa, Homo sapiens
MIDIKPVCDPVWYMMNIISHQYRRGEIDARNAVMLEGDTSQRSAGVQCFNNPALCGKTSWFVVDADNHRVNTPHLWIDTS

SEQ ID NO: 953992 - protein, 128 aa, Homo sapiens
DPLHPAPQTTYLESLNGSSVRILVGEAISTYNSVNVGWEFHSQHNTFWFLGYPYIILGQSSPSVTQFGTRAHKFTHRGDKEATQLLACVPVHERNNRVTRFTVTDHHQTVKEVTGWATDGDVLRSLVS

SEQ ID NO: 953993 - protein, 35 aa, Homo sapiens
MENTKARRGGGGPDPSVIFAAESDRGGTGYIALQT

SEQ ID NO: 953994 - protein, 155 aa, Homo sapiens
MAKHGSELLLMMRIEELLDGCALANECVTAILRPRGEMSQRAVLTFVGDPFHKVAAEYYVLHVKASASSTSFMDILTMEDSSHGEVSAVGRVQARHHVLGIEDLRATKLEPTALGGVHQALGLCTLLISKIREEYPVIRIMITFSVVPSPKMCLD

SEQ ID NO: 953995 - protein, 44 aa, Homo sapiens
TRCMDTEPRCQHRCDYRTRGIVACRSKNEAEAPKFTLTQAYHYI

SEQ ID NO: 953996 - protein, 113 aa, Homo sapiens
GYGGSLSLLLTSWLTPKSLCNPMLPYQASTKTLLYRVPLPLCTVCPLIKFWETESFSSPDMSAVAMDRTHCGVTLLAQAIPPASGVAKTRGVHHQNLTNIWYIVRTLVSLTTG

SEQ ID NO: 953997 - protein, 44 aa, Homo sapiens
GSIGFLRRTIQKNRPSHLFLSQYDSCRVIIDKITRKSCATLCLL

SEQ ID NO: 953998 - protein, 70 aa, Homo sapiens
VSGIMAAIMRVVSGAVRPVHSYFRQASSCVCFSVHTSLVVMDQNSFLSVRSLAYGSNIPRYLSPYCKVSR

SEQ ID NO: 953999 - protein, 47 aa, Homo sapiens
LTLEDSRPLSVGLTVVTAGSGSLRMCAPFPVNTQWRVMPDLYFYRDP

SEQ ID NO: 954000 - protein, 79 aa, Homo sapiens
IPRLSVTRCQWTGTRLGLFSHDNSVPAVLALFAARGALVAGSGKVHLSKALQRERAGNRLLTSFHFLIEGAGSSLVWAH

SEQ ID NO: 954001 - protein, 69 aa, Homo sapiens
RVSVPDDKVLMHCSEIRNLLARVSLMFPSAKSLTDPLLPDHGSTMITTAVLSSDNGPLSKRPWSGRLLD

SEQ ID NO: 954002 - protein, 78 aa, Homo sapiens
RDPRSSDVLRDLQKVLTIETVYKQLDKYLQLRNVIKRLQEAKHSELYMQVDLVCNFFVDTVVPDTSGIFVAPWIWLFP

SEQ ID NO: 954003 - protein, 46 aa, Homo sapiens
AGKWDLLLASRGKRLGTLLNILNDIGQPPRQKNYLVHDVDNAEAGE

SEQ ID NO: 954004 - protein, 56 aa, Homo sapiens
TRSEYDLTCHLTWPREMPQVSPSPGLPSMWGDALFNGPPDRDLVWLATWVSMCPAW

SEQ ID NO: 954005 - protein, 55 aa, Homo sapiens
MGQSRYLLGAVNAQPKGLLGHAYKIGGSTEVLAPVPLRHIGQAEAQIGPHTLTDN

SEQ ID NO: 954006 - protein, 67 aa, Homo sapiens
MGGLGCADSTCPCRSPGADGCSDGLVFLVYLDPAASSVCVLWLTMLPAGTATLLAAALGEECTWCIR

SEQ ID NO: 954007 - protein, 40 aa, Homo sapiens
MLWGRLLYKSPITVLVTGLRNCRAPVKVNENVLHESICGY

SEQ ID NO: 954008 - protein, 45 aa, Homo sapiens
IPTACCMCRGCCTLLGEILMPAEIPQCVRQVTLVPHQHHVHVILS

SEQ ID NO: 954009 - protein, 39 aa, Homo sapiens
RTRIDRWIALSQENGGVTGTSPHCKIPLKGDIHMNVSTR

SEQ ID NO: 954010 - protein, 42 aa, Homo sapiens
YYPLYLLHNELTRNNLCNGEPKLMTPENQTSYLRTAKRAHVV

SEQ ID NO: 954011 - protein, 82 aa, Homo sapiens
RPDVVCGIPELSDLENLKYVYDALEASGYTANATTYFTRLIESSLGSVAQSSINVIHNLAQMKFTGSNARLPLSLASRAHAT

SEQ ID NO: 954012 - protein, 131 aa, Homo sapiens
RGSRVCRVDPKNLPRVCTLVLSVSSDAGLGQTFEQSQCAHCAVPMVPLKASARARVLREELALYWKLVEESTLTNQMRLVLVKRESGRPLYLRLVTDHLRLFTLYEQVSERLRTLPCTVPLLLIHSLAQAH

SEQ ID NO: 954013 - protein, 33 aa, Homo sapiens
SRVCYTWPDVAHAGNDQIRTPALINFRMVVAVP

SEQ ID NO: 954014 - protein, 38 aa, Homo sapiens
VPFVIVYSDTSNTWYEAQSQITENLQLSYTYNCPHKDG

SEQ ID NO: 954015 - protein, 66 aa, Homo sapiens
MSRIVRYGCPHYVSAYNIARPTRERGTTMVAYRRGRTGPWSGTRSMVKTSLCRYSKRDSRLVIDAH

SEQ ID NO: 954016 - protein, 37 aa, Homo sapiens
CRSVAATPRCRTSALLNFLMVARLCVPVADHWDDERI

SEQ ID NO: 954017 - protein, 161 aa, Homo sapiens
IPRRVLVGGYECILGTVVDDNNLLVVRDSGISGKERSQGMTSVDGLSSWMLFSLMRNLWENANYKEHTQSRMMDVSIRLGGILTERRTVNNPKDGSFAQWVPQPSTYTNCLNLRYLSYLRRITMATTHHQRGTPNLSHEGLNPGSRTLLVGEQSYSWVNSD

SEQ ID NO: 954018 - protein, 68 aa, Homo sapiens
DFKVRFWKSNTIEYFRAIPNNELWQSTSLRITDEVSRGQNELYHTMYCISHMNCHMYIQLTHLRVEEQ

SEQ ID NO: 954019 - protein, 34 aa, Homo sapiens
MAVSRPVRMSLRERPMPDNLPSLQTRATSSASES

SEQ ID NO: 954020 - protein, 45 aa, Homo sapiens
  misc_feature (42)..(42): Xaa can be any naturally occurring amino acid
MPKICFFIFGEELQLEKRDSLAALYNSHCSPVSVCFLIKSFXWNT

SEQ ID NO: 954021 - protein, 46 aa, Homo sapiens
TTCISAGACCPSRLGVCCADLAPLLSCWLPLTQPGCTNVFAARAGP

SEQ ID NO: 954022 - protein, 34 aa, Homo sapiens
VLSGLLQPSPIDDHPPSYTLTLGDKKGGKEGARM

SEQ ID NO: 954023 - protein, 46 aa, Homo sapiens
MYAPDRPWIKLSLPQLARSSFAVVYILLQVHRPDADYRSCPIQPTV

SEQ ID NO: 954024 - protein, 86 aa, Homo sapiens
IESVCTCVYTLTGTLLPVCTNATESNFIRLSQCRSQVESIPITACFRHRKKGCGRYSKEAMLSSFSIISKTKKPNLSPSFVFQNKK

SEQ ID NO: 954025 - protein, 71 aa, Homo sapiens
  misc_feature (1)..(1): Xaa can be any naturally occurring amino acid
XFVSWACVLVRVVLDSIDGEDDVCGSAAGVAEQLTTYVPSEFSLAPIVASVSVVLCRWWQLSEVHQCTTVP

SEQ ID NO: 954026 - protein, 63 aa, Homo sapiens
MCSVHCHAWVVGLLSFFYHNCASSAHGNFVDYPWAVVGNGRANQEPTNKMRLREPKPRMARWL

SEQ ID NO: 954027 - protein, 91 aa, Homo sapiens
QVTENSSDLSLGHVTRALCRGIVLNHALHGYPIQQLQEWGVDEGDGHVGVLLSRNDVLKQEVARGLTLCPYPEGRMWMQLSSGSSGHSFRS

SEQ ID NO: 954028 - protein, 93 aa, Homo sapiens
LIIQSPSGWSVVICVTPASPAIITNSPGRPIIICITPGRTVIICSSTRKSIFIGTTSGPSVIIQATPGDTIIIRSKRRLSLFIVTPQAPQPST

SEQ ID NO: 954029 - protein, 109 aa, Homo sapiens
MILDNVNPNDLFPTEKKGLSVLGTIEYSVQGSTEFEGAFIATNERIILNVDMNGEFYYRSIGYDEVEKITYEDGRIHFTFNIGPMPMKDIQKGDAEAFVQFVKDKINIQ

SEQ ID NO: 954030 - protein, 77 aa, Homo sapiens
VDILTANEKNIISKAWDNRYGVLMVSELAEALSGQKLGNELYLGSNVQEEVGLRGAHTSTTKFDPEVFLAVDCSPVD

SEQ ID NO: 954031 - protein, 122 aa, Homo sapiens
VLKDYRANQDFWVLTASKLPESVFKDMMHSLYANAILNLGQWRKACDIYVKQGDWESMEWAMRNYRNLAGIKRIYKEDPNSPTLTYLLHYFVNGGYGWEYNYESSLKADRRRGREFSSSRRP

SEQ ID NO: 954032 - protein, 112 aa, Homo sapiens
PRRHQRPSSVNHAGGCDVLGLSRQHGEIVLNHLVGQRLINDRRKSRERQRLARIQHPSPVHRHRFLILGPNMFDEKTETEDLNQWNRLERLFAIASLINPIDHPSYNAWCAS

SEQ ID NO: 954033 - protein, 57 aa, Homo sapiens
MSSDYIFSPEKVADMFEAIAHTMPPYQQIYEACRGDSSRPDMKQEDYHLAALVSCRR

SEQ ID NO: 954034 - protein, 132 aa, Homo sapiens
VREETAASACGTYGFSREQEQQEQLIYSDEGIVGQAAQRDRLIRLDDVPVDYFKVSSGLGEGAARSVLVVPTSDDDRVNGVVELGFLRPLDERDIELLELIAGNIGTSIEAARYRQRLQEVLAETQQLNEEL

SEQ ID NO: 954035 - protein, 57 aa, Homo sapiens
AHGYFILQQLEIESRDQALYGPHQRTGSTDPKGNSGTGDYMGATCHASIGGTNVRSI

SEQ ID NO: 954036 - protein, 52 aa, Homo sapiens
MEQYHTEELTQCCRCTLCTAKSVSSDMPKRQILGSGKLELSCMEGSCTCSFH

SEQ ID NO: 954037 - protein, 77 aa, Homo sapiens
MGIGNIFLNITGTKTQVITALRIKMPEVSGEIAFNFSAILAAAITSDKVDVSKKADAMVVLVSNQRLMKNTGINFVD

SEQ ID NO: 954038 - protein, 49 aa, Homo sapiens
IGTQCVSRMWNVSSDESTWEVKTRRLKVTQVADSGQRLVGQDSGRGALV

SEQ ID NO: 954039 - protein, 56 aa, Homo sapiens
RLEHPGLQVSGTHPAKSVIANVWGPRKLDGVVKAVATTVHEHQRALGFQVDQVCGT

SEQ ID NO: 954040 - protein, 120 aa, Homo sapiens
ISSSTVTNLISLINQIVEDAAMKISDMPLVNSVIERLHASQSRLLNGDNSALAVLRKLNSLNRAGEVVFSGLMCFGVYPQQFFPQLFIDVAKHPGQQKSADPEVRFDHRKVCEGHIKGRR

SEQ ID NO: 954041 - protein, 61 aa, Homo sapiens
RLEDLVASEAEEEAAKEDSEAEEEAAEEDSEAEEEAAEEDSEAEEEAAEEDSEAEEEAAEE

SEQ ID NO: 954042 - protein, 37 aa, Homo sapiens
IEPGRYVSARLTELGVPMSVTVMVMLYIDYEISHVQM

SEQ ID NO: 954043 - protein, 71 aa, Homo sapiens
NKHNICSHNEHNFCPYNQHNLHSTDHHILCPYKQHTYGSYHLAQSTAPHNHAQSTAPYNPAQVDSSRRRPC

SEQ ID NO: 954044 - protein, 44 aa, Homo sapiens
IGPQCSKKSMHKDTRCTLVIGAEVDREEVLRNQALVPDVVKDGC

SEQ ID NO: 954045 - protein, 33 aa, Homo sapiens
EHTMGYPYPGPKVCPPSGMPYPYSQISRTLGSP

SEQ ID NO: 954046 - protein, 41 aa, Homo sapiens
GLSGRSTKALGTESMSSGSSQRRPCHRLHIAPGLWLDPSSG

SEQ ID NO: 954047 - protein, 47 aa, Homo sapiens
GKELARARARAGELLAQVGLENCADRRPHQLSGGQRQRVNIARALMN

SEQ ID NO: 954048 - protein, 66 aa, Homo sapiens
RTHTPLVTTKKRDVRSAFISSGLFSTKNLVSYLRLQKENFQECDRRADTDEDVVAWEKSRGLTMQG

SEQ ID NO: 954049 - protein, 55 aa, Homo sapiens
MRTVDILNLSDNQPIEKYHVVFFPACILLYDEAWGMVYENVGAYVTQTIWQLIPV

SEQ ID NO: 954050 - protein, 92 aa, Homo sapiens
SYKHLHSRYQYWRVSPMDPTQHATYSLPPRDQDTETTAVGATHCARFLEPSPSIYRQDAAGKKTTANSRRLMVRTDDDIYQNLLAPKLRGIR

SEQ ID NO: 954051 - protein, 65 aa, Homo sapiens
  misc_feature (37)..(37): Xaa can be any naturally occurring amino acid
MPIGLSQWAVNFLTSQEGGRSSWFHSLEWSKGSTHIXGLSEHTQSVYPFHVHFHSSRPGDFPSAE

SEQ ID NO: 954052 - protein, 68 aa, Homo sapiens
FAESQDNATAYQPVRRSKYYVSVKTEQQINMMSTKYNSRDVQTIASLTDKLIMPSDNPNVTSKTVRRC

SEQ ID NO: 954053 - protein, 116 aa, Homo sapiens
MLLEKVSVKDIEQLVADGTIYGGMIPESKGSNKRAARHHTRSNDRRWYPFKNENRDFFDGNDNYIYLCTIQCRNIEKERMIVALFPTYQRFPLAVQQAEGTTVVDTNGKTYLDFGS

SEQ ID NO: 954054 - protein, 70 aa, Homo sapiens
YRNLVFINALNDTAGSRENLSRLSCSVAAVVINAPRTIQCHVCCKAICDHVKHIWFGTPEGEFVSMGCYL

SEQ ID NO: 954055 - protein, 30 aa, Homo sapiens
MTGPNVSVVETGNGKSLREREKTWIPDDER

SEQ ID NO: 954056 - protein, 70 aa, Homo sapiens
MNEFLIVLTQYLRLMPSVDTTELCLNSTLCDRGLMPLVTAVGVDAVLVLFSKGAEGQVSETGSLSLQEEQ

SEQ ID NO: 954057 - protein, 46 aa, Homo sapiens
MPKNSIYTLEQILTRLSILYSLLALIIAVFLGEYPSRSLTMQVLRS

SEQ ID NO: 954058 - protein, 53 aa, Homo sapiens
LHINSSLYQEECYGLELCLCKVVYQNGCWKSLPTTTAGTLEAWSRVTTVKGVR

SEQ ID NO: 954059 - protein, 46 aa, Homo sapiens
QVNSYDNIKDVTIHKVEAGQNVGRGNKENIDLKERPDMVAYACNPS

SEQ ID NO: 954060 - protein, 107 aa, Homo sapiens
MYVTTQESSELVDNYVIMMIPFRDYSSNSYLQLIREDSINHCKNEDASCLSAKSVEQYYGLGKLEKGEPLVAKSNDNAKSLTRNPGEESEISPPDSPQNQAHRSLVP

SEQ ID NO: 954061 - protein, 103 aa, Homo sapiens
YRWNAHPRDTADIGRVVSTMEEWHVLQLRTFLLCHSQLLITFTSTLTELKEWLLPVLSSTSCFFLGDNVCQKWEREGQKVCYTNSTPPKMDWRFFMETKNGDR

SEQ ID NO: 954062 - protein, 94 aa, Homo sapiens
SVPSETAMTSSRHTPFGGFKESGNGRELGEDGLKAYTEVKTVTIKVPQEELVKSSMSREAQITDPANSTIHLRPSALPKLVLRAIEHLFLMFQS

SEQ ID NO: 954063 - protein, 96 aa, Homo sapiens
PARSPGISYYTSQESIVDVRRCCEKMLNQNNWKLFTVNDVSYMLQKIYVICLAEPRVPLCLDKAVRTEAEGEEEGRATVNQDTRLDNRVIDLRTST

SEQ ID NO: 954064 - protein, 96 aa, Homo sapiens
YHLAVPGYSYTTGRTNFDPSSSGNLNDSVIRHARVCSEVNKTCVLNYSHKTHTTKMENEECNEQRERKKEELASTAEKTEQKEPKPLEKSVSPQNS

SEQ ID NO: 954065 - protein, 108 aa, Homo sapiens
MESGARYQASREGPLSRMRIITTDQAPPNAFTLSAFAHDHSTTLERRYQQSPVTNQYTLASMAPRSPCRLGGCRPPMCGSRDWDKAGVRSNEIRERYGGAGPGGGGYA

SEQ ID NO: 954066 - protein, 57 aa, Homo sapiens
SSIRGALENLFSTLVSTFLCKLLSLNHHTQDLLIHICWKVEREARIEPPIQTEYFRS

SEQ ID NO: 954067 - protein, 88 aa, Homo sapiens
RISPFLLTICCHHVCLAPGSCAGVPLNTVRDVLGPGSVAMSLRYAHLVPTNGEKPLAKLNEKPALRLRCAYSGAAFTLPDIIPITPHN

SEQ ID NO: 954068 - protein, 69 aa, Homo sapiens
RIYSASSRDLGSRSMVDRRTCKRRGLHNKKNWRRTDLWLATISRYRNNYEKVWHNRHITVRVFQENDLV

SEQ ID NO: 954069 - protein, 51 aa, Homo sapiens
GENSVGDPLLLLVGVTGTPVVCVLLRILLSTTASEIVIFHKLVTSDARSTF

SEQ ID NO: 954070 - protein, 115 aa, Homo sapiens
EGTPFRKRQSADYSTASHGISASTVTGHESQPTQGAAQVDDTSGQEPSRSDFTDLNADMLHAIMELVSDGIWDWNANTGFVYRNPGYTKCSGTPITPWKNSVYTWENVIHPDEYP

SEQ ID NO: 954071 - protein, 101 aa, Homo sapiens
MLQGSATAQKDSDPEPKEVVDISSDSASSSSSDSDDDIPIGLLYRKPIKIHPRSNKNKKKPSQSSSNEQVGHIITQKLGEMAEYERRHSLIVSSAIKPDNF

SEQ ID NO: 954072 - protein, 34 aa, Homo sapiens
MDAVTEIYVLLIIMEVAQSRKLQYANYSLTYSDG

SEQ ID NO: 954073 - protein, 36 aa, Homo sapiens
RILSSREEAQEDNEGICWSWLVISSLGYSHTLGYRA

SEQ ID NO: 954074 - protein, 66 aa, Homo sapiens
QRTLCVVYDGGLRTEGRLVVPDDLQLRRELISEAHRTRYTVHPGTTKMYKDLKRNFWWKRMRRDIA

SEQ ID NO: 954075 - protein, 70 aa, Homo sapiens
VCVRTFSDFLVRLLRGTPMCSIHACSRFAPITAMVASYPTHSSAASHHCSVTYHSWTTTDTGWAPELARL

SEQ ID NO: 954076 - protein, 66 aa, Homo sapiens
MCGVMNRHNRKDIPKGINGHDFILVAIDYFTKWVKAQSYAVLKATHVAKFIPNNIMCWYGIPHSIT

SEQ ID NO: 954077 - protein, 88 aa, Homo sapiens
ISCGAACLTRRERGSMLKEGGGEDDRGRVDLPSHHHSRYTSGPLHQTQNPPESRIITTNLATFTAPYRSNPTASAAPQASHLRYTSRF

SEQ ID NO: 954078 - protein, 74 aa, Homo sapiens
LAALRILVGHCSCAVLQEDLSFQLSLKCQRRAPGSPETQAWRLILREKGGSSLADDLQAILVQQSYQDVERAPM

SEQ ID NO: 954079 - protein, 32 aa, Homo sapiens
MRPVYVVQLWGFKMVQLVKAGMNFQSVGCLAS

SEQ ID NO: 954080 - protein, 65 aa, Homo sapiens
MMVHQLLSLSLFMNEKIVVSSWYIGAAFHSLKKLSATILSRRMIWNRRLRSPLSSSCTFHRHNTT

SEQ ID NO: 954081 - protein, 74 aa, Homo sapiens
LSLLNSSFLKPFILLMVCKQHQNVRSTSMYMTFLALIRPQRPHPQGTCRDFGRSLRWHGGGSVCCSTLRFSLGD

SEQ ID NO: 954082 - protein, 65 aa, Homo sapiens
RSSRILEIVWCYGYAREAGMNLGMSETPVRRRPLVANEWSISLVKTRSRILVANPTSMDHVAKSY

SEQ ID NO: 954083 - protein, 46 aa, Homo sapiens
LTDELSELGRANFNERISVRLNKFKPTKGYDRVGEEALTEEEGDIE

SEQ ID NO: 954084 - protein, 50 aa, Homo sapiens
TGSPECVVLWISTNITINVHPRARDTNYVQTRGNRYSMYVYVRIRTTHTI

SEQ ID NO: 954085 - protein, 90 aa, Homo sapiens
LVVIRIITFSQVNRCFPGSDGRTEHFVPAGVAVDETGVGFQSQIPSLTSSMMACSMSALRSVKSLLEGSWPDVSSIACSLRGLALMASYC

SEQ ID NO: 954086 - protein, 51 aa, Homo sapiens
SNNVEKVNPGKCPKNHKTMSPENDVSLPESDVIPVNFLVNDRKPISYVHNT

SEQ ID NO: 954087 - protein, 50 aa, Homo sapiens
MIYRALPAWSLLVCFKTWTITCEKFDKCSDTIHSKEWKPKVRSIANSDNS

SEQ ID NO: 954088 - protein, 70 aa, Homo sapiens
RIRNVWCYENRTVVKHIYIVFGIRPNYDFWHSHGEKPFSSVEDVVDDHDNDNDDDIDDIDDEIEEKEVPQ

SEQ ID NO: 954089 - protein, 107 aa, Homo sapiens
MVGAALPGGSGFHKPTDCPPAKSPREAAKLLIPLGPDCRVFLIVNSCLGCFSLLKLETQGASSTHCLPPLPAGVSGPRVSAGSPGGWGPMKPNIKSQECHVHGSAYG

SEQ ID NO: 954090 - protein, 121 aa, Homo sapiens
YRILGIVWCYGPILFGYLNGPIYRGVSFLFFPKRRMPFMGETFNKTKSPTINSRGLRLWSAELFFLFGAVLIRSRIKATFSVVSLTSSGPNKILSSGSAQHIGDLQGLPYRASYGAMSMVD

SEQ ID NO: 954091 - protein, 50 aa, Homo sapiens
HTQCKQLMHHAFRAFQWPVVFTRQATQLMHPCIPGIPVGLSVLHHSRHTA

SEQ ID NO: 954092 - protein, 76 aa, Homo sapiens
RISELCGVMPKNIVLIKTTSSHCIAAFFELSGLNEGTPLLIASTPVIAEQPEANALNKIKTPYPDEKKCSADACSR

SEQ ID NO: 954093 - protein, 73 aa, Homo sapiens
AVHFSYFSPTLSGFLCSPTLLISISPTLHSPCLTLFPYLFFLSIHGIALHVSPAPALLHPSAASPSGSRSSQL

SEQ ID NO: 954094 - protein, 120 aa, Homo sapiens
  misc_feature (28)..(28): Xaa can be any naturally occurring amino acid
  misc_feature (34)..(34): Xaa can be any naturally occurring amino acid
QCHCKVFVIAIWSRASEARTKGDRFSSXLRPYGXAACIVCACWLRSFDEVIFHGCAALRIHRIYPSMSLCTMLGAVIPSFGVPSSVHMPLMVILLGLASGLNGFASRKSRRGREFSSSRR

SEQ ID NO: 954095 - protein, 36 aa, Homo sapiens
DLQILFRETEGEEYLNRGGGGCSEIVLQPGHRARLS

SEQ ID NO: 954096 - protein, 109 aa, Homo sapiens
STLAKAPKGSAVFLSNSGTEANEAAIKICLARKNGRIIALNHAFHGRSLGGLSLTHKIAYRQPFGPSAVDVTFIAPEDPDALASELDRGHVSGVFMEPIQGEAGVVPVD

SEQ ID NO: 954097 - protein, 143 aa, Homo sapiens
MELPPNAVTYYWTFKIDGQNKVTETKDPSFPKIAGEYVSLTSKTEMPPIHDFYIQDKDRTTDYLEEFINKDKLLMVISYRLDRANQEAFKAIKPVTDKAMKNGYTVIGLTSQMEKAPYIVKKYELNFNFYYNDATTLSTRPRI

SEQ ID NO: 954098 - protein, 36 aa, Homo sapiens
LRTLYSATLESHHNPSLNGCKLYVPLSSCFDRLSSQ

SEQ ID NO: 954099 - protein, 160 aa, Homo sapiens
ESLHGFSCGTATLLNRTFILPVGAVLYDPDSWDEEKQEYTRISEPAQVKPSTPPPSGKRPHTYAQTPPVHPVLAGFLLLTSNCPSPAALPYAEYDPPLSTMTGEPHASGAQHRVGLADSLRIVILFFPLAAQLGNLKGKLSSFHTWVWAIALLGIVTAVD

SEQ ID NO: 954100 - protein, 81 aa, Homo sapiens
DPCLARWSRHDHCGRAITPRTANPFTSPSVPTATYEDIIPVLHMYKLKLRDGEELDHKACKCPLPYVERVNLRAWGSPWIR

SEQ ID NO: 954101 - protein, 142 aa, Homo sapiens
DISRAGLSFSMQTAKDVTVTIGGKTQKITAVGTVADALKAAKVEVDSSDAVNPGLGTPLSDGMKITLTMVDQKSQKRRVAVPFSTKKVEDSSLPKGEIKVITKGVNGINEETWTVVFKDGKKVSEKKVSSVDAAANLVVVGA

SEQ ID NO: 954102 - protein, 30 aa, Homo sapiens
MALVSGTESCVVGKATLVCAEPSSPNGGPK

SEQ ID NO: 954103 - protein, 139 aa, Homo sapiens
MRRRVEASYVGVYACLLSTALITAMLFAFMMMTGLGSLGSKVGSAVGLSPSYAACKAQYQKSIETGSDVNPKCQEVMEKAGELMMPTIFQVLSVLGKIPGLKRFVDVEASIQERTNEVIHEVVGAFDDFVKVPVDAAAN

SEQ ID NO: 954104 - protein, 139 aa, Homo sapiens
ILDREVGNHKLHKQVAIVAAGNLETDNAIVNTMSSALISRFAHFEVKLKNDEWLDWAASVGIDFRITSFLGFKPDLLYTFNPDATGPYAAPRTWDMLSRVVNGNPIDSDDIPLLASMVGEGVAREFITYTKLYKELPVD

SEQ ID NO: 954105 - protein, 61 aa, Homo sapiens
MHKEPRKVREFRRREQEILDTALKLFLEQGEDSVTVEMIADAVGIGKGRRGREFSSSSRRP

SEQ ID NO: 954106 - protein, 90 aa, Homo sapiens
YIALISYTARNLARRSAVDFPWGLPHDVIWGNSIMRGNGGADGRGCLCIASWLRIIGALHQQYERFRVLAFHRESGDGVRPHLGGRCLST

SEQ ID NO: 954107 - protein, 70 aa, Homo sapiens
MARRTRGKTGAPVLSSLEGPFLITGDVRDDAKAMGCPRGTDPEAGLQGRVRPEMKLGDLSQGFSLIQGHA

SEQ ID NO: 954108 - protein, 55 aa, Homo sapiens
  misc_feature (29)..(29): Xaa can be any naturally occurring amino acid
  misc_feature (40)..(40): Xaa can be any naturally occurring amino acid
  misc_feature (49)..(49): Xaa can be any naturally occurring amino acid
SRLLLDRTKDDECRNETDKRICLKEGVRXLLDIREQGPEXFAAQFIFIXVESEKG

SEQ ID NO: 954109 - protein, 65 aa, Homo sapiens
MVSYIVKVTDSIRFLPKGKRAQIVTVTRSTHSRTHALNTHMAASQTTVCYCILDTVHSLLLFEST

SEQ ID NO: 954110 - protein, 61 aa, Homo sapiens
GAGYQKCWGGLSTLDLAVRWEKPNVRQWDASCVPIIKLYCDEIAIFLQIQGSSDNCPWGRR

SEQ ID NO: 954111 - protein, 39 aa, Homo sapiens
IFGRHSAPCLPGLVSPHSCAPVIPHASGSHSAGLPGVSP

SEQ ID NO: 954112 - protein, 101 aa, Homo sapiens
RRPDLVIIGALIVANKTLSPQYFIWWAAPTAMILDRVSAEAKDPGDSDALSWARTWCWIVAVLMAVTTFMTQQVYPLHYQKILGGSSSTGWLLVSRNMRRR

SEQ ID NO: 954113 - protein, 74 aa, Homo sapiens
MAPNSGIGGFTPKPIKARPEILNINFTKICSNKCHNVTDEMWHNVMYCNLELRHPTKWRKFKNGCVIVSRAKVD

SEQ ID NO: 954114 - protein, 55 aa, Homo sapiens
VECLVVFKSSIRVFFFKQAIFFVVISSMSCLHHLLSVPPRRIAPLRPAHAVAFSV

SEQ ID NO: 954115 - protein, 102 aa, Homo sapiens
AFLLLVYPMSEYEGALDSAYYHAESSIQLTNGNEVKSLLQMLLLHAIPEPVISDKKAFDVAKRILKLDPNNNVARNVLKDTAKRMDNIVVDINELNKHRDAR

SEQ ID NO: 954116 - protein, 146 aa, Homo sapiens
ITRKKQKKIRRVQHWCNCKLYVKYAWYEFRAMVKDKVNDYGKKILELLEQKGSVSMNDDIFPLVEKEFEGQVIGAELYELAHQYISQLLYGVHTAGVAVIAVPKFAAGQQFGQMVVADVIYTKVNDTPYDFMQELRNSYGRRGREF

SEQ ID NO: 954117 - protein, 44 aa, Homo sapiens
MLLCEADGRRIAWALEFKATSEPVITMCTLRLGYIRRTLSHTKN

SEQ ID NO: 954118 - protein, 43 aa, Homo sapiens
PRAVCMASSASTFGLWYNAALVPAYVTPGAIHLNPAFGFSETL

SEQ ID NO: 954119 - protein, 135 aa, Homo sapiens
LTAPWMQGATTLIPGRRQSAERGYVSCPSHTCSAVAGLEHQLRLFADPITVTPSSPCALGPAGQDVSKLQALTELRGSLWKVTELCAQNRVGGVCAEVALCVGTVCDTNTALDRHLSRDLLASNPKGTTVAVHET

SEQ ID NO: 954120 - protein, 51 aa, Homo sapiens
LRRESAVAPRCYLPQRVVSPGLGGVVRLGSDLLGRCARQGGLIGLPTSVIE

SEQ ID NO: 954121 - protein, 94 aa, Homo sapiens
MGTNGVKLYAVEENRMECKCKERNGLEWNGIHWNGRECSVMDRPGIKWNATVSNGIKMYGMECNETESNVIECNGIKKMDSKIIDWKGWVSSRR

SEQ ID NO: 954122 - protein, 107 aa, Homo sapiens
MHDRYTCAVGFLVISSDSHRCFDSEFFLIVVRKTLDLPFEQFLSAQFGGNKYIAIVYAAITTVHLQSFTIIPNRALAPLNTNFPFPLSPASHSPFCLSECDYSRFLR

SEQ ID NO: 954123 - protein, 35 aa, Homo sapiens
CTGLMALADFSSHRDGPAERQARILQSTCSEDPVN

SEQ ID NO: 954124 - protein, 112 aa, Homo sapiens
STLKLNNVVQLVYFATMQSRGALLSLVLMIGFYSFFINRGKLAKRFLIFIVSALLVSATNIGLSYVTSIYISSGKATVLDLNKGQSYAETDSSVIKKTGELHLIETTPSGST

SEQ ID NO: 954125 - protein, 44 aa, Homo sapiens
LEHPLIGSSTISDFRFEAKVLIVENFNKLEWLYGCPTLRIEETI

SEQ ID NO: 954126 - protein, 38 aa, Homo sapiens
MAHVVSPELVTICLYPGIGSRTGNLCVCQLTTHAHVPL

SEQ ID NO: 954127 - protein, 118 aa, Homo sapiens
  misc_feature (13)..(13): Xaa can be any naturally occurring amino acid
MSKPFEHIKNMEXLIKEETDWLAQHTNEYETKTYQEHMERYESLTNRFEQLEGYQYESKIKTVLHGLNFTESDFNKPINDFSGGQKTRLSLAQMLLNEPDLLLLDEPTNHLDLETTVD

SEQ ID NO: 954128 - protein, 173 aa, Homo sapiens
MGSRPSSPWIALRSTDHFWRAAAQFECAWSASLFPDISIVSALGKSAGPGEENYNDATGQLLTEMLHNLDFCDILVIGGDLDPRQECLELNHSELQQRDLDATKFYCRLLPSTVWAPIEPLLSRVLHQIRIPQLASGFPLAPRYRIKCSELNGALTLAMSSNLEVSIPSSKNQ

SEQ ID NO: 954129 - protein, 41 aa, Homo sapiens
GAHTHIQLCNSRLYRANLRLGCTPRHIVHILIVYSRRGREF

SEQ ID NO: 954130 - protein, 82 aa, Homo sapiens
VALAVVLGTISAHCNLCSPRYKIVSCPRPPAYRRITGMCQQHLANLVFLVQTGFLPVGQAGLEFLTSGDPTVLDSSVLGVRA

SEQ ID NO: 954131 - protein, 65 aa, Homo sapiens
STLEWKRRVWYSTHCKGPRSKCGIVDYVLVSRSVHRHFMYRVVNMEQLPVGIFNLLSVSCLIRNR

SEQ ID NO: 954132 - protein, 78 aa, Homo sapiens
ASTDLFVQTARHNTSIHRLITQWSWRFFISRHRSLLCDVVLHKKLTTSCSAYIPPSSANPDEGYKVSASTHVKTLGLP

SEQ ID NO: 954133 - protein, 85 aa, Homo sapiens
STIKGIQISKEEVKLSLFADDMIDYFENPKDSTRKLLGLINEFSKVSGYKINVHKSVALVYTNSNQVESPNQEVNPFYNSWKKST

SEQ ID NO: 954134 - protein, 52 aa, Homo sapiens
LHYRSRGALVLKFDYPKSTHHSCSAYIPPSSANPDEGYKVSASTHVKTLGLP

SEQ ID NO: 954135 - protein, 38 aa, Homo sapiens
GRDLDLAIFSGWPQHGRSPFLKEKACEPQNRRESEGPP

SEQ ID NO: 954136 - protein, 109 aa, Homo sapiens
SRNPKLICQICILRLGTFLKSKWASKAWKWTCAWRLEGCGDSPAGYSPAGQSLHQKMDSSPLANVRGAAGHPPPRLGGQKPKAVQVCGTLELERWRRERRNLVVVVVGG

SEQ ID NO: 954137 - protein, 77 aa, Homo sapiens
RYDTYEASDLHSSDGYGPEYCPLDGELTRDRIRVRKLYRKYNLSAPATMSMDPSDEGDDDSDDLMGVPRRELLAQIF

SEQ ID NO: 954138 - protein, 102 aa, Homo sapiens
MPNRDLNAVRKITRIRKPPRVPQHRKLLLHPGLAQGFSTQIQTPVLDVPRHHQALAAKEIRYSPRTDIPTSRATHLGAQILTKRNNAGQCTPGVLRKHSLMG

SEQ ID NO: 954139 - protein, 49 aa, Homo sapiens
FIQKLREGGYSYEDLVEGLHDRTLYYALTANPSVSETRRTEEGGPCEEA

SEQ ID NO: 954140 - protein, 43 aa, Homo sapiens
EPYDILVLSSSSIELLLLPSCTGTHDLVITRRVHTGIISFENA

SEQ ID NO: 954141 - protein, 38 aa, Homo sapiens
MWRVHPGWTPKSTSSSSTMEGGLANEHLVQKDPEDHSP

SEQ ID NO: 954142 - protein, 43 aa, Homo sapiens
MVFLNVDVPVGCESFIFPVFLSLWYSCYCQHLSFVCEIVYPKE

SEQ ID NO: 954143 - protein, 79 aa, Homo sapiens
TRILKQMFSEHIEDEKNTESQERFILTTDDASLDRDDKQNQNCNAARKRTTVNRIEQHKKYQRVRERIFARETGQNGYL

SEQ ID NO: 954144 - protein, 46 aa, Homo sapiens
FHAFSRSDKDALKPCSPSKKRTASRKGRHRRCATGSDDERTTIKKG

SEQ ID NO: 954145 - protein, 50 aa, Homo sapiens
MHPLESQSVADERSPIIVRDSGIQGVEELQLEVAALMLRAGCRNPVWFYF

SEQ ID NO: 954146 - protein, 36 aa, Homo sapiens
ARCTSYMGQTPGTPVDPGRKTAHRRTEEIEGHMTPG

SEQ ID NO: 954147 - protein, 102 aa, Homo sapiens
PILVSVISLNALLPVHIHIVNDYHISQNLLVTISNNAAIQFGNDGNLAITNYLRSSVVYGCRRGLPNNLTSSSIETLNLRYHCLPRTAKTDYVAADASEDTD

SEQ ID NO: 954148 - protein, 47 aa, Homo sapiens
YLWPPRVDAPMFIMGDEPLVSSDNQTSRLISNASCTTNSLSTPWPRV

SEQ ID NO: 954149 - protein, 56 aa, Homo sapiens
LISEIHPSSNKMSARSREVATPTAITPSHVAAAAYGGFTYSRLQAHPVELSRSSSM

SEQ ID NO: 954150 - protein, 66 aa, Homo sapiens
SLIDKEQSHGELEVVVRKPPYCWLPTLMVLWLWRRHLPGIYHSSCVSSDNLANSHCVAVLLHLCFD

SEQ ID NO: 954151 - protein, 45 aa, Homo sapiens
TPPILRLQIYPKLYPSIYGERISEDSDNVRIENARLEPFSSTSIL

SEQ ID NO: 954152 - protein, 36 aa, Homo sapiens
ITPKASAVLRKEERVVDAKWRIRGATNDRDVLTSYL

SEQ ID NO: 954153 - protein, 68 aa, Homo sapiens
CRTSTERGGYSATMYTRITARSDVISLDWPSLSIPEDIDMALLTIKPLVNWHYVVPGRVVRLELIADP

SEQ ID NO: 954154 - protein, 69 aa, Homo sapiens
DIKSKLEKVGNLIIRPYSSKNFAAHELSKLTHDWAHSSSCCINHQCYSTLHTTDFKISQSRQSGLACPL

SEQ ID NO: 954155 - protein, 47 aa, Homo sapiens
EYCDIKCTEYSVDMWSSGCMLASMIFRKEPFFHGHDNYDQLVRIAKV

SEQ ID NO: 954156 - protein, 77 aa, Homo sapiens
  misc_feature (48)..(48): Xaa can be any naturally occurring amino acid
SLVSKVKCEASLPGKDYQPTCLWGFLEGGKDSCQGDSGGPVVCKWTAXKELSPGVMAVPKRTSLEFTPRVYNICEMD

SEQ ID NO: 954157 - protein, 50 aa, Homo sapiens
MIFYSIYARDYTGTEHIQSTINMSLDSKTVIYTIYTLDYSNHIFLKAMYT

SEQ ID NO: 954158 - protein, 46 aa, Homo sapiens
MGALASTNSYKVITEDCEVQFPLAHCLIWGSQSPGGCSLSCRVLCS

SEQ ID NO: 954159 - protein, 117 aa, Homo sapiens
MTCSNKTWMRLHRDDPKYRDGVEAFLNFAEFSIKRDKMSGPCMKCENLYIEDRTIMQTHFIVFGIRPDYDLWYFHGEKRPRSNDINDDTDDADNDTDNDDIAKHDDVLQQDDEIENH

SEQ ID NO: 954160 - protein, 93 aa, Homo sapiens
IDHLAQKATTNITGVWLQFYHPGQRIYVRVASRVFMVLEKLGDNQMSLIIVWICGVRVVCWQDMIFRKEPFYHGHDNYDQLVRIAKVLGTEHL

SEQ ID NO: 954161 - protein, 94 aa, Homo sapiens
MFYDEAYYSLSDLNLCDLVLLIFRECSSAALCEVVIRCDHMKIAQRVLPAWWEDSASECDTIPGRQCMASCFSLVNQNDDVTIDLNSFKSYFYN

SEQ ID NO: 954162 - protein, 84 aa, Homo sapiens
MTQSIGHPQDLMIKGDLSRFRGLDVLQDELDAAVQHLDGAVLCYQVFSLSGVLSTACCCHSGYVVYTNAFRFLCGQSVGQLSKQ

SEQ ID NO: 954163 - protein, 58 aa, Homo sapiens
TVLSTYQRLTGTEGYCSLFHYLRPSVKKGQAGLEFPLQPSVNESNRIHEDAGSIHDES

SEQ ID NO: 954164 - protein, 37 aa, Homo sapiens
SEETGHAIKCMQLTDCILYSCRTVPTRKYVRQAWQKA

SEQ ID NO: 954165 - protein, 45 aa, Homo sapiens
MDLVTPVRRQAMPFKCIQLTDCILKFPHVPTIKYVRQAWQKADVN

SEQ ID NO: 954166 - protein, 44 aa, Homo sapiens
PAVMSIDQIQAFGRVDLALMIGDRSCLSSACSCADRIRQHFRTV

SEQ ID NO: 954167 - protein, 37 aa, Homo sapiens
LTGIKRADKPLVGGFLDPKIEPGDVVTLYGTDQDLQR

SEQ ID NO: 954168 - protein, 65 aa, Homo sapiens
VAFAAVGQLLVGLCGRLEDKSLQLHALDMAWPVVLTSVPGPFDQSPFLINYLIVQPGATEPRNSL

SEQ ID NO: 954169 - protein, 50 aa, Homo sapiens
MLGEQAMPFKCMQLTDCILKDFRISAHQNLCPTMPGSKADLQNLIVPATG

SEQ ID NO: 954170 - protein, 41 aa, Homo sapiens
MPYKCMQLTDLILKVSAQCPPEVCPTSLAEGSTSSTHLLSR

SEQ ID NO: 954171 - protein, 55 aa, Homo sapiens
MSVSARLVGHLLVGTVRTLEDDIFGLRALDRGMACAPHVECQVPSTQMPVFLTQL

SEQ ID NO: 954172 - protein, 50 aa, Homo sapiens
MAYLQHIRLLAHSTVSPMLVQAGLAHSRTSRCICRALSLPNSAGHHRRAA

SEQ ID NO: 954173 - protein, 53 aa, Homo sapiens
MPFNVHAAQLIASSSFRTVATISMCDEPRRRPTSVLMSCPGYRTLLRHPSRCY

SEQ ID NO: 954174 - protein, 31 aa, Homo sapiens
MEGWCRHVVHNAGRLSHLAACLGQAPGQPPP

SEQ ID NO: 954175 - protein, 118 aa, Homo sapiens
EFRRQVGHGLGVDVGLTNRRQAHDGFLQRHGFRGHELRVQPSRQFLLLGRRLEEGPGTYVLIPLLHALFPIRPKGDGAMRHFGVPSALTTGRPGLVMSAVNAVYQKICWAMLPWDGTG

SEQ ID NO: 954176 - protein, 74 aa, Homo sapiens
LYNQLCTPSVCLTARRSKIWQKPLMIFIGSLRFKFRDLRKGVVRDTAESNADINGGDGTFLTVQGRQQLAHLHP

SEQ ID NO: 954177 - protein, 39 aa, Homo sapiens
AQCVASLPQFGFGRHFHSPPTPFYLPTLHTHYHVLYWTP

SEQ ID NO: 954178 - protein, 66 aa, Homo sapiens
VSVTPWRRFCCSSVPLIVFQTTNSVSWAGLAFFVESLPRYLSFPVCGALCDKYPAVRILHISQVYR

SEQ ID NO: 954179 - protein, 50 aa, Homo sapiens
MLSTATLIEAANEREEATAIAVALRLALEAPGAGVQSQAALITPDRGLAR

SEQ ID NO: 954180 - protein, 50 aa, Homo sapiens
ITTIINIKPPAITNTKPLFVCSVLITAVLLLLSLPVLAAGITLLLTTNLI

SEQ ID NO: 954181 - protein, 80 aa, Homo sapiens
APPVVLLRFVCAVSRVCAVCACVCCVFVCVLCARVCAVCACVCVCCAFVCCVLVCAVCACVLSTPSYTTPTGYPRSNFVT

SEQ ID NO: 954182 - protein, 65 aa, Homo sapiens
MKLCGIHLPEEVHPCYEEALLGSSDEYAVLIKAADTMSAFMKCVTEKAAGNDEFNAAYDSIYKRW

SEQ ID NO: 954183 - protein, 135 aa, Homo sapiens
MSGEGQAQEALPQSGALDPELKVSPKEAGSMGSRMAELCQWEITDPEGNKIKGTMADICPGEETGVPSEESGLLALTATRREFFPTAPEKPLCLLVHGPLDHFFPESKIPCPQGKQASQYFHSRRCQRTTRTFRA

SEQ ID NO: 954184 - protein, 47 aa, Homo sapiens
TKSCTRMRQTEKLKHEKKKAGCEIRRRSPQLFPGAKQGKNRLISLSR

SEQ ID NO: 954185 - protein, 57 aa, Homo sapiens
TNNPSSIQIPNYLLEQHMKANYGTQWLHQREVWTSVLTVRVSYSHSVGCSPVENSAF

SEQ ID NO: 954186 - protein, 41 aa, Homo sapiens
MDLASVRRQATLQVLQLTDFLLKFPHSAHQKSVRPAWQKAD

SEQ ID NO: 954187 - protein, 66 aa, Homo sapiens
GFGRVDLHLMFRRQAMPYQEQCSSLIASSSFRTVAHHQVCPTEPGQKADFKYLILHAPGATGDFVH

SEQ ID NO: 954188 - protein, 52 aa, Homo sapiens
TLLYIVLMSALPACSDILLVGTVRKLEDELQCSCMHLNRHGLSSSLQCNVHS

SEQ ID NO: 954189 - protein, 51 aa, Homo sapiens
IDQNQALVDGPCTPVRRQAMPFKCMQLTDCILKLPHSGHQKYVRQAWQKAD

SEQ ID NO: 954190 - protein, 185 aa, Homo sapiens
RCVCVLEQIAQKLGLPQLEEQRWARHPLVYLMEAADDICYALIDLEDGLEMELLEYAEVESLLLDLVGDDLPQTYRQLGPQDSRRRKLAILRGKAIEHLTNAAARAYVEQQEALLAGTLPGDLVEHMHGPAKRCCNWMPRTLARKKIFQDKRKTLLEIGGYTTLEILLNAFCGADLKQHGGRTPV

SEQ ID NO: 954191 - protein, 64 aa, Homo sapiens
VIVSVELILSTMIGAEMRLEALGDLGLAAPRPAEEHMRRLTCSRAGSSGEASMPAKPVGAPKNT

SEQ ID NO: 954192 - protein, 33 aa, Homo sapiens
LIEGLPADCADFLTELTAPVNASRGWTDDTGCY

SEQ ID NO: 954193 - protein, 54 aa, Homo sapiens
VEEPIEALMSSSASALSNGLTVPEGRLTSACDRRQMAWFTRRRGDTSTACRLTV

SEQ ID NO: 954194 - protein, 37 aa, Homo sapiens
LPGSYTVRSYANIVPIAILVFAACDTVVGLALLVSIS

SEQ ID NO: 954195 - protein, 116 aa, Homo sapiens
  misc_feature (48)..(48): Xaa can be any naturally occurring amino acid
  misc_feature (80)..(80): Xaa can be any naturally occurring amino acid
  misc_feature (94)..(94): Xaa can be any naturally occurring amino acid
EVRYRFVNITQPEVGVLVGKRPVKFLREWADTCGPEHVRVIPGLTSCXDGGIYAVDSSYPRCTVCGPLPLKCHVSTKTGXDAESVLMGKRRCPXRGLINQRNGYEMRLPTFGVPMY

SEQ ID NO: 954196 - protein, 85 aa, Homo sapiens
RRISAGAGGCAQLWREEGGILGRGSRMNKALPEGESELVSGFNIEYAAGPFALFFIAEYTNIIIINTLSTTIFLGTTYDAFSPEL

SEQ ID NO: 954197 - protein, 90 aa, Homo sapiens
MQVGVLIYAGLCGGECFMLLILTLVLLWGDRLVQLGVRTSVICWGFFEVVGVELERFSLTWWLLLGLLWVYDFYLSLTRFFPMCPKELFL

SEQ ID NO: 954198 - protein, 64 aa, Homo sapiens
DRYNRRGFMIHGHRVLDPELCSNSVVQWTVGSHQDITEDSFTLFWLLETRIDRGGGDWRPNLIT

SEQ ID NO: 954199 - protein, 41 aa, Homo sapiens
VRYRSAQCQYAILTSWSRHMNIVVEEETDTTGGCGNGLLHS

SEQ ID NO: 954200 - protein, 58 aa, Homo sapiens
LVRYDINTILTRPPSATQTIIPKPTPQTPLPTSSPNDISYFAYTILRSCPLTNYGGVL

SEQ ID NO: 954201 - protein, 54 aa, Homo sapiens
SHPPEDRSVELFSEAHFSRYNCIFILVVQPSSRTVDFPTPSSNLNNDRVPTLEI

SEQ ID NO: 954202 - protein, 75 aa, Homo sapiens
YELAWPCPQYPPVKAHRPQTGLDGTEAGSLIYLALQLGCFALTKFSLGFLLGHHHCAHCCALQRLMGPETFINEP

SEQ ID NO: 954203 - protein, 82 aa, Homo sapiens
MNYRIDGCMECRELNRINPNEWNGMEWNDNVMEWNESTRVQRNGMERNAMKWNHPEWNGMECNGMEWNGNKQSAMEWSEMEW

SEQ ID NO: 954204 - protein, 37 aa, Homo sapiens
DSKRIPHCSGHPREQYFMYSCDGRHFWCLPAALTQDQ

SEQ ID NO: 954205 - protein, 46 aa, Homo sapiens
IILLQATGGPPLTGGHHIDAALRAYTDRIAHYSQNSWTHAILQTQP

SEQ ID NO: 954206 - protein, 63 aa, Homo sapiens
GSGGNSLPVVPDTRKAEVEGSLCPQGVLGCSALMRNRVSALSSASNIGDLPRERGTTRLSKEE

SEQ ID NO: 954207 - protein, 67 aa, Homo sapiens
  misc_feature (41)..(41): Xaa can be any naturally occurring amino acid
  misc_feature (46)..(46): Xaa can be any naturally occurring amino acid
ALWSPPQHITKCCTSSSRTEQDTMATHIISRVKLTCLTTVXNRSSXVPYIVGVNKIQRLGEILRSQM

SEQ ID NO: 954208 - protein, 35 aa, Homo sapiens
LHSAHSQHGLTYSQQHMGSGQLVLVATQPQHISIG

SEQ ID NO: 954209 - protein, 43 aa, Homo sapiens
CLLWYSSVNFPYRFMLAHILPPDPTDFDRPESGPGDHRRITPP

SEQ ID NO: 954210 - protein, 64 aa, Homo sapiens
ALVVSSAGAVRVLVVPATREAEAGGSLESRSSGLSALCRIVLSALQFGINHGDLPGAGDHQCCL

SEQ ID NO: 954211 - protein, 57 aa, Homo sapiens
LGNLVVPAPGAHHIDAELSADTQIGIAHYSPELLDSSDPPASASRVAGTTGTRHRAR

SEQ ID NO: 954212 - protein, 79 aa, Homo sapiens
PLTLVYSSSRKQQNVDQAVATAARGRGCCVTGTVCYVRERRRTRERLVAMACEASVAVSDILVSNAAVNPFLGSLLDVT

SEQ ID NO: 954213 - protein, 36 aa, Homo sapiens
RRLPAVVYTPPADSSRMWPRRCHACKGEGLSVTGTV

SEQ ID NO: 954214 - protein, 44 aa, Homo sapiens
NHRIFVLLSYLLDCSLAVKHAYANALSSDSDRNYRTFELLRYAL

SEQ ID NO: 954215 - protein, 61 aa, Homo sapiens
ITSVTSTPPIHKKSMNYDKELVNNVYLCFTLNMGSVVMSALVLKHFFTTNDYDVIKTSEMD

SEQ ID NO: 954216 - protein, 61 aa, Homo sapiens
PTGAPISCGDQWFVRFPQPEDGGASPALVSEARGISVGSRLPAFVNCSSRHICLFSQITRG

SEQ ID NO: 954217 - protein, 42 aa, Homo sapiens
HRGSRALTPHVMVLLAQHLARHRLRDASFWNHCPLPGGQETQ

SEQ ID NO: 954218 - protein, 46 aa, Homo sapiens
GSPDFLTGAVCAVCSSVCCVLCVCVCAVCACVCVCVPCVCVLCVHE

SEQ ID NO: 954219 - protein, 33 aa, Homo sapiens
PLPQSAWKCTEWNAELILCGLQPLPRLQHPLRI

SEQ ID NO: 954220 - protein, 46 aa, Homo sapiens
HQRQLCGGALRLSPAWRQALYSSSWLAGDIFLLIFLLVLLILLILI

SEQ ID NO: 954221 - protein, 35 aa, Homo sapiens
LDGSPDSMRVLPGAYARACCPSYSGMLTVGGIVLM

SEQ ID NO: 954222 - protein, 43 aa, Homo sapiens
AGAVAPWPDVRPSRLALVLAASRQRDLPPLVLPPGGTCSLPAP

SEQ ID NO: 954223 - protein, 38 aa, Homo sapiens
DGGVTIGTRFITLTGLCRRCPASYPSVVGVRRQASPSS

SEQ ID NO: 954224 - protein, 64 aa, Homo sapiens
EDPRSLGNQVTLLIILYTPGSLAFGDSSGNCKWQCGKIIEPSEYTCVNSGQNTKFIPCGDIQCI

SEQ ID NO: 954225 - protein, 80 aa, Homo sapiens
RIPRSPRNHQTQAENRTLSELAAHDPLTGLGNRRSLQALSQALASRPAPRRPYAVLMIDIDHFKAINDQHGHARGGAVLA

SEQ ID NO: 954226 - protein, 38 aa, Homo sapiens
RQGIEPQKQSPRALGWACSMSAHPICANLGATSSHLHD

SEQ ID NO: 954227 - protein, 49 aa, Homo sapiens
VIAHDIHLITKGFIIEDQHARMYSLDMSAIINFNDNFLSINFFNIERVS

SEQ ID NO: 954228 - protein, 74 aa, Homo sapiens
AAAVASSRLPPLPSDTSLHSRVLCVLCVCVCAVLVCVLCSCVCCVLCVCRCGAASRLRAFSAGNCAVRFAAGGS

SEQ ID NO: 954229 - protein, 43 aa, Homo sapiens
HMINTTSTSEELTIAGMTFTTFDLGGHEQARRVWKNYLPAINE

SEQ ID NO: 954230 - protein, 43 aa, Homo sapiens
RSLGKSYISIPILKSTHTYMHPRSYTHTTHSTRMNTAHTRAQQ

SEQ ID NO: 954231 - protein, 48 aa, Homo sapiens
QLNDSWFHTHIKVNHQPPAHHTLSPISTNPTSIANPTKTLTKTSTPDP

SEQ ID NO: 954232 - protein, 79 aa, Homo sapiens
AVKVYIRGSRKIHLAIILCCVQSVVSQQCATFQPKVALLSSTVINLFRSYLPFHTFSHVAPPEFGFLCELILFAKDQML

SEQ ID NO: 954233 - protein, 37 aa, Homo sapiens
ESSAPYRRPLSSDARSMTGNISSVSYHLLLILEQVGH

SEQ ID NO: 954234 - protein, 66 aa, Homo sapiens
MVALHRPALGAMTVGLAVVVALGGGTGGEGEGEGDKDKKGCGLPGQPKCAIDETGTPYGKSAYGEL

SEQ ID NO: 954235 - protein, 57 aa, Homo sapiens
GLSLEAEEHQCTHLAGAMDAGAVAGSTPGGKVARGACLGPRCRGTWQAAVEWRGEAA

SEQ ID NO: 954236 - protein, 38 aa, Homo sapiens
RSLGHSLRCYLMVSKKKWLVMDKFSTASPKVGGFSKVS

SEQ ID NO: 954237 - protein, 36 aa, Homo sapiens
MFNTTTNPSYSFTHSTNPTSIANPTKTLTKTSTPDP

SEQ ID NO: 954238 - protein, 58 aa, Homo sapiens
MHFNAAHSPVSTVTWPVLSLQHHAMASHLCSPSHHGSIPLQFMVGHPLSSRTLPGHAT

SEQ ID NO: 954239 - protein, 46 aa, Homo sapiens
  misc_feature (1)..(1): Xaa can be any naturally occurring amino acid
XGRYGFQAETKRGAEETLGAKSEGRGEGALGHGWNYEIWHKVSCTL

SEQ ID NO: 954240 - protein, 45 aa, Homo sapiens
DPFMNLVIDECVEIGLVDNSNNIGMVVIRGNMYYYVRSLGVDTVG

SEQ ID NO: 954241 - protein, 150 aa, Homo sapiens
TDCETPHNQFKLFMSGLIYPRYKPKKIALSKTEQCLDSLALRQIPNFPECILLKTTKVENGRQLTWKLSLIPLSLSLSESVIRMRGKCSLPMYRTFAVDGVLDSLRVMALKNIWAATEDFVSNFSFQATTHSGSQQPSAPREAVGGKYVD

SEQ ID NO: 954242 - protein, 57 aa, Homo sapiens
GILLHIVQGKVSRKNGLQATGQRRRTNQKIRRRRRKKKMKIRRKRMKMKNKWVSFND

SEQ ID NO: 954243 - protein, 79 aa, Homo sapiens
GDILECCHRRGHMLDIESFSSQTGLESDMALLCSWPPTCGITRIRGNSYQSLTDPIELLDRLLIVSNNPYSEKDTKQIL

SEQ ID NO: 954244 - protein, 64 aa, Homo sapiens
MSEDPGRTGRILHRWSLNAENTSPITFNFKNKAERIPGQNISQGEKVPQNRDLVTGEGSTVVGG

SEQ ID NO: 954245 - protein, 113 aa, Homo sapiens
KEYRQMYRTEIEWEDGRKAGTSMYLQNQIGVVIRIQRYNGVSPKVRKVLQLLRLRQIFNGTFVKLNKGSINMLRIVEAYIAWGLPNLKSVNELIYKRGYGKINKKRIALTDNA

SEQ ID NO: 954246 - protein, 50 aa, Homo sapiens
  misc_feature (6)..(6): Xaa can be any naturally occurring amino acid
PLSSYXDIAMYRLNRWGCRSGLLLLQTNWVAPIEFMGGKVEGVRFFGFGQ

SEQ ID NO: 954247 - protein, 44 aa, Homo sapiens
MGMETYHISNAGVRYEVFSLAMCMSWSERNRRYAVRIHKNREVI

SEQ ID NO: 954248 - protein, 35 aa, Homo sapiens
MLAVVVRSFFIAMCMSWSYRNQAYAVRIHKNREVR

SEQ ID NO: 954249 - protein, 78 aa, Homo sapiens
GSGSGQYRDLPYYITDKFRFRIGTDTTSLIDVTPALYAARCCLVQSCYGTNAIRVPLLPQLLALTVRCEYHRSPTLSR

SEQ ID NO: 954250 - protein, 39 aa, Homo sapiens
MSVRIHMNREVRKQVLVKSCKPVSAVKPVIVQRNTAANQ

SEQ ID NO: 954251 - protein, 114 aa, Homo sapiens
MTIDQIVKAYARIGKSYFIEDEYQDADPFLYSKISGQSTDIPRCAQDIAMPGQRNISCKEQEAAGLSTKPLIWTLCREEQTATAVVCSKRVTYPAGPMIRSYYTKTSHESEPRN

SEQ ID NO: 954252 - protein, 34 aa, Homo sapiens
RASVCFCFLLLLPCFCRFLLLLLPASAASCFCPS

SEQ ID NO: 954253 - protein, 44 aa, Homo sapiens
SSTASASAHDMLAHLPAVTRPVYHFPVHTHLHVLPASASRALGE

SEQ ID NO: 954254 - protein, 37 aa, Homo sapiens
HRVRFCFCRFLLPASAVPASANPLLPASALVFQVLVR

SEQ ID NO: 954255 - protein, 39 aa, Homo sapiens
VLLFCRFCSACFCFAPGFCFCLFLLLPVPASAGFCFCPG

SEQ ID NO: 954256 - protein, 53 aa, Homo sapiens
LTSVSYTLETQHDTRPAIINNILFPKPYLSGRSRKQPSREGQKQEAGFGERQK

SEQ ID NO: 954257 - protein, 65 aa, Homo sapiens
SARPFCFCWGWWVLIFPLLFFPFFFPSLIFCFLLLPASCFCQESCADVVDPAQSLAWQGVLRLRN

SEQ ID NO: 954258 - protein, 60 aa, Homo sapiens
SHDLEEIGQLLINSSDEEEEEEEEEEEEEEEEEEEEEDFEEEEEDEEEYFEEEEEEAEAE

SEQ ID NO: 954259 - protein, 48 aa, Homo sapiens
PHKPVKFRDQRIVARQVGMAVDGRSRRHKQEAEARRQNQEAETGNRVW

SEQ ID NO: 954260 - protein, 46 aa, Homo sapiens
GPYQRRCRLGRVGFHEQLAIGALLDLDFAFDVLPLADEAGGRLRVD

SEQ ID NO: 954261 - protein, 35 aa, Homo sapiens
TRTLTRPAEAGSSRSRRAEAGSKGLVADRKRQKQE

SEQ ID NO: 954262 - protein, 54 aa, Homo sapiens
PRPEIKKTRVKLPSGTKEGYLPQANRAVFVFWLVNSLVDKPILKAGRAYHKYKA

SEQ ID NO: 954263 - protein, 135 aa, Homo sapiens
DPRLLFCLEHSQYERACKLLLAARKYQRTPVELCLGQNIALTEEIAEKMTVAKDSSDLPEESAAGAALADSRLLLRQGSYHLATKKYTQAGNKLKAMRALLKSGDTEKITFFASVSRQKEIYIMAANYLQSLDWQ

SEQ ID NO: 954264 - protein, 43 aa, Homo sapiens
QLRGGAGSLLVGVLESFSSFWASAYKEVIVFTFHYPGSGLAFV

SEQ ID NO: 954265 - protein, 33 aa, Homo sapiens
LPALPVVLVRRVLVMGQKQEAAILLKQEGHKQE

SEQ ID NO: 954266 - protein, 59 aa, Homo sapiens
FLLLPLLSSAKVAASCFCPYFCCFLTSASMRSVGFRELTSRDESQLTPRVLVGVPELDI

SEQ ID NO: 954267 - protein, 35 aa, Homo sapiens
RSRKQGLGEGRSRKRQKQEAADRQKQEAAGRQKQE

SEQ ID NO: 954268 - protein, 42 aa, Homo sapiens
LTKTWQKQEAENHIYILENNITGVKDMTDAIVPCGQQAGQHR

SEQ ID NO: 954269 - protein, 34 aa, Homo sapiens
MTLRFITLTVLLSEVSCPPTPACWECDARAISLL

SEQ ID NO: 954270 - protein, 51 aa, Homo sapiens
SPALAEAGSSHLQNHEGMKQRSHIKELGDGNSFAKNGRNAKPDCIITCDGK

SEQ ID NO: 954271 - protein, 77 aa, Homo sapiens
LHQTLVGRSMEAGTKYEAAVSRKTEQNAREALTNTLAEAGSSMMNKHEEFRWMILRIRRMADRMDANAINVPGISMT

SEQ ID NO: 954272 - protein, 49 aa, Homo sapiens
MGYLILMLCKCKHFRIYGKLLDATENCGCNGLRKIVDDEIRLKNWAIRG

SEQ ID NO: 954273 - protein, 49 aa, Homo sapiens
RIPLGNRVLGAQCATSLLQVLEARRQWTLLRQGSAQLHVSPSVWVPETQ

SEQ ID NO: 954274 - protein, 99 aa, Homo sapiens
  misc_feature (6)..(6): Xaa can be any naturally occurring amino acid
  misc_feature (60)..(61): Xaa can be any naturally occurring amino acid
  misc_feature (80)..(81): Xaa can be any naturally occurring amino acid
IYKASXGDRDIWFHKTVLGQPEEKALYWFCSQFEGLDRGTLLLSKTKPKIASKTLVGAPXXTQGSLLHGARQTTWTGVHXXVAVCQTPGHHLFFLQPSS

SEQ ID NO: 954275 - protein, 34 aa, Homo sapiens
MFALLPFLLLLLLLPASALPASAASCFCRFLLLP

SEQ ID NO: 954276 - protein, 58 aa, Homo sapiens
PRNSDFSRPGAHLCAVCAVRCVCAVLVCVLRSCVCCVLCVSQRGCITYECFLGWELSM

SEQ ID NO: 954277 - protein, 59 aa, Homo sapiens
MCFCNLNCSNTDAGSPALNQQSLSRCKSCTIKHITPDSEISFRQRCRLKQTQTIRYPQT

SEQ ID NO: 954278 - protein, 35 aa, Homo sapiens
ESEGRACTQREVFWAFAAGHLLQEEVVVIVGLRDE

SEQ ID NO: 954279 - protein, 78 aa, Homo sapiens
GSTSANSRRVYKSAETWECELSGNKQQVVWESFQKSHVGYAGMGPGCAEARGINMSWSVSVASQSRCAVSRTVRARLN

SEQ ID NO: 954280 - protein, 55 aa, Homo sapiens
ISSYRFCFCRFCFCFLLCCFLLLPVTLSYHFSSFFLASCFCFLLLLLPASAPPHA

SEQ ID NO: 954281 - protein, 60 aa, Homo sapiens
TSQTGCCVCCAFVCVLCSCVCCVHACAVCCVCVAAVDAYKYDVLFMDGTLRCNDLPQVDA

SEQ ID NO: 954282 - protein, 49 aa, Homo sapiens
WTTDGHHLYILTLTDEQFLVQDQFPVMPVSTLCAEARKRRRRLLTHYVK

SEQ ID NO: 954283 - protein, 49 aa, Homo sapiens
MAEAGSIRDTALAPSTMKIKIIAPPEREYSVWIGGSISGLLSTFRQKQE

SEQ ID NO: 954284 - protein, 38 aa, Homo sapiens
GSDGHDGDDTMVVVMTVMMVVAMMTMVIVVVVVMMVMM

SEQ ID NO: 954285 - protein, 48 aa, Homo sapiens
DASRFNGKTSVQINAMSYRLGTVENAMKLLRAQTQWIQDKGAVLSVFC

SEQ ID NO: 954286 - protein, 57 aa, Homo sapiens
CFCSQDQRFSCQLTATSASQVKRFSCLSLLPASAASCFCKMAASCFCRFLLLHLSCL

SEQ ID NO: 954287 - protein, 34 aa, Homo sapiens
VRFCFCLLLLLPLLFCCFLLLPLPASAASCFCLP

SEQ ID NO: 954288 - protein, 76 aa, Homo sapiens
PTTEKLETALSSQRWLVLHPAKEVDVVLETLVVVVEVVSVGMTTSVVEETSVGRGEALVGSRGEMVDTGGSGDGYN

SEQ ID NO: 954289 - protein, 33 aa, Homo sapiens
VPFCLCRSASACFCCFCFCCFLLLPNVLQVLGE

SEQ ID NO: 954290 - protein, 34 aa, Homo sapiens
LLPFLFCCFLLLPFFCCFLLLQLPASAASCCFLL

SEQ ID NO: 954291 - protein, 64 aa, Homo sapiens
ACLIGYTNQRVYQMEVVIRHNWFPVDLVHRLSMLCGDLHIQVGQLKNQLELLFQECSVVLQIEF

SEQ ID NO: 954292 - protein, 41 aa, Homo sapiens
MSQPWSLRPLESRRSLETLGLRDSFSASQSPGHELRTLRAV

SEQ ID NO: 954293 - protein, 38 aa, Homo sapiens
PLSPLFFCFLLLAFPASACFLLLPASCFCQSYLPGLGE

SEQ ID NO: 954294 - protein, 35 aa, Homo sapiens
TSSTRSVFTENVPLKSTDPNSSKPGCNAIKVSLET

SEQ ID NO: 954295 - protein, 37 aa, Homo sapiens
LLLLLLRFLLLLLPASALQDPAPKIHLIYCPRMAEAG

SEQ ID NO: 954296 - protein, 65 aa, Homo sapiens
GGPQKLIRYIDDQVVSTKGERFKDVRNPQAEEMNATYINLKPARTYRFHVRHSPDSALRLLGSDP

SEQ ID NO: 954297 - protein, 49 aa, Homo sapiens
MSYLSSSKGGSRSSVIGRTLSSISFLTSTSISFSSSTLARLLFTILSLR

SEQ ID NO: 954298 - protein, 100 aa, Homo sapiens
VPGDPAWDDLRADRDRFTVRRASLCVAELHVYFTLELKQMQDKYSKSGIACFLTEDDSYSGPQGRREYEQPLSGESSGNSVQLALEGLFGEPLESISTRV

SEQ ID NO: 954299 - protein, 81 aa, Homo sapiens
ADGICCRATTEECGNCTTRSNRSKPINKSSRSVGKSINALESLDVAPGLEELEMGAQRVQVDDKAMINCRADLNQLVPFKY

SEQ ID NO: 954300 - protein, 46 aa, Homo sapiens
LGSRRRDGDRGRSRNQQKQKRQNQEAEKQEAARSREAGSCVRAECR

SEQ ID NO: 954301 - protein, 81 aa, Homo sapiens
IPGRAFNLRGCYPSWTFVKLIIHVEWTGKHPYRETQGHHSGQGESETSEREGRTYVGVVNGAEMNWHPRELKEIRADPLQS

SEQ ID NO: 954302 - protein, 113 aa, Homo sapiens
SSISKSKRKSRDGKNQEAQTLILFMHQTHNPSFIHGKKISTIHHTYKEQIHLPSMDNTDIYRAHKFLQVFACRQMSNSSISNNSNHVHHAQQQQCQVQSLHMHFSYPNPSKQM

SEQ ID NO: 954303 - protein, 43 aa, Homo sapiens
MQQTQSLRLRTSPIQDLQLALSTTAASTPGGAVFSRAHVPPHL

SEQ ID NO: 954304 - protein, 59 aa, Homo sapiens
MQIRAPLALALTIYPMRIDESIHLQLRHKYGDQISRFRQCDPPISITDTLQLLLLLDSV

SEQ ID NO: 954305 - protein, 41 aa, Homo sapiens
VFLFCLPATAASCFCRFLLASCFCPSPDPDPGQKQEAAGSG

SEQ ID NO: 954306 - protein, 138 aa, Homo sapiens
LEDLRATLRIICADGAHAASLVVYAPVGCIGCSQGPWRLAFQVDLHVSDLALPLCRLQTGIQGAFGMPPGTVARVHIGQVIMSIRTTLQNMEHVIKALRRAKFTFPGRHKDVVLQPPFSHLCPKPPDSGSLPLSLHSR

SEQ ID NO: 954307 - protein, 43 aa, Homo sapiens
LSVQPLHYVYGHADLTLLDRTTVVTELTIGDGLLLGLTGALCT

SEQ ID NO: 954308 - protein, 63 aa, Homo sapiens
EHKEVVEAVTYCRDTTHGWFWGIVGYVEPPRGLRAPSRLSLLSTSVMKCIRRFYKTWHTSQKK

SEQ ID NO: 954309 - protein, 80 aa, Homo sapiens
AAVSRNIRLFLVSPLLFLVLLHNWGFNYTLVLKVYFDYINLTGGVFGRKIELLRRDDKYEAEIAAVNTKAFIENDDVFAL

SEQ ID NO: 954310 - protein, 72 aa, Homo sapiens
IHWPSFSTQEPAYNDATASKGGRLDVGKHFSTEDMYSGRENMKECTSSLAIRQYAGQNHSEMPSHTSENGNH

SEQ ID NO: 954311 - protein, 116 aa, Homo sapiens
YLVQEEESSSSFQGVFCLLACPQFGSPSSMLLSYTFSLTHFCSHNTHIGLLHLLKLLFLKISSNNHVVCYAKFGKYNVRTTARWLAEVFQRKREGFLCGVLTTSVSCSPLRSFIVN

SEQ ID NO: 954312 - protein, 49 aa, Homo sapiens
SAPLPASATRPCFLLRFLLLLLPASAASCFCLLPASALSKENKADFKLY

SEQ ID NO: 954313 - protein, 35 aa, Homo sapiens
MTASFTNLCQQAELDVYDLMRHSDLGGRLQTRLKY

SEQ ID NO: 954314 - protein, 51 aa, Homo sapiens
MFSLIRRLCDLASTLLDRSPTDAALCILLQVAAPMRACVLEPGRSVGRPVC

SEQ ID NO: 954315 - protein, 45 aa, Homo sapiens
YPRPETEEEEGLRITEVLPTWQKQEAGSGRSRKQKKRWRQRQKQE

SEQ ID NO: 954316 - protein, 38 aa, Homo sapiens
NQLVPVHGIPVDTNIFSSQLASHFLLPVSALGHVLGEG

SEQ ID NO: 954317 - protein, 35 aa, Homo sapiens
MQLSTRSHSHTFAHIKPILTSASAKAVISKDLQVI

SEQ ID NO: 954318 - protein, 42 aa, Homo sapiens
YFNIRLFFMPCPSQLEEDEEGNQVNSAGQKQEAGRSRKQAEA

SEQ ID NO: 954319 - protein, 56 aa, Homo sapiens
KVEHKKKRTFRNFHLPRLCDLAPAAGRSPTCMQLMHPVQVRAIARRARTWGSAAGQ

SEQ ID NO: 954320 - protein, 38 aa, Homo sapiens
MSASALLLPASAPPSPRPLALGGAEAGSSRSSEVAEAV

SEQ ID NO: 954321 - protein, 72 aa, Homo sapiens
TRGFDAGRGTNSWRSSVAPISDESSTPGYYTTCQFEPGLLSSRYKAWLSEPSTECHTTDASTLHTSNICPEP

SEQ ID NO: 954322 - protein, 45 aa, Homo sapiens
PRGKSGGTTVQYYRRYYQAVLQAVLQCGTTVQYYRRYSQGSTTAP

SEQ ID NO: 954323 - protein, 79 aa, Homo sapiens
EDSPAVYRRYYMRYYRRYYRRYYRRYYRRCYRRYYRRYYRRYYRRYYRRYYRRYYRRYYRRYYRRYYRRYYRRYYGRYY

SEQ ID NO: 954324 - protein, 94 aa, Homo sapiens
KDLRDRTAGHKEEPSIRDEDRRSQEEPGFGSGCRRTVDHPGRTGGVSGRRLIPGVGMAAAGLLIILVDGEVSVGGALSRDGDGCRRTVDDPLQS

SEQ ID NO: 954325 - protein, 45 aa, Homo sapiens
LDFPRRYYRRYFCRDYWRDYWRDYWRDYWPGLLAGLLVGTTGGTT

SEQ ID NO: 954326 - protein, 45 aa, Homo sapiens
EDTTTHKTGCEGCRSSRQIVVTEEAIFGSQEFKKNQGTVLKLTRA

SEQ ID NO: 954327 - protein, 40 aa, Homo sapiens
PARREKSSEVDIKWMSEFQHAGGAMGSQDKWRWLAMIVRG

SEQ ID NO: 954328 - protein, 81 aa, Homo sapiens
VLQIWDQKRNIRALMGIRSAILHQRGHGSCEVSKLVPMCYIPSILLTASSRDRIRGASCGHSICSSPGLMRSSWLPVRDPS

SEQ ID NO: 954329 - protein, 102 aa, Homo sapiens
LTLSVLLSDPGPGKYANRAALHKTDTYHLATGPELSVHLEGTPKLCVHRDQEGLLALEVHSKFLTILETIQMDGLPKGAHSRTLKDPTVHGQVEKPPQQDPG

SEQ ID NO: 954330 - protein, 68 aa, Homo sapiens
QLGTAQAGTTYGRHSPRNSTEHMLVTEDPYVLSLPGSYEVRSSIPPEFRVRANVMTRVLWKEDCPHTA

SEQ ID NO: 954331 - protein, 59 aa, Homo sapiens
TDPQADFILTIIIINFEMFIITIVIIITLSITLCIIFTNTLSINLSIIISITLSIILTI

SEQ ID NO: 954332 - protein, 90 aa, Homo sapiens
LGDGLDLRSQGVSIRAFSTCAVETAKLGASGLLQGASFPAVIRLIPHTVLTFVFLEQLRKNFGINSAILTSRGNGWAARPDTLGSSKESQ

SEQ ID NO: 954333 - protein, 70 aa, Homo sapiens
PVCRRNGGHTESSEFLNVLSPGRHIPNCDKKGFYKKKQCRPSKGRKRGFCWCVDKYGQPLPGYDTKGKDD

SEQ ID NO: 954334 - protein, 64 aa, Homo sapiens
WVQVVLSWNDRGNVKMLKTAAEIVLTNESSSTKDDDYLPSNTCWDGVILLVVRMLHVMHILGSV

SEQ ID NO: 954335 - protein, 53 aa, Homo sapiens
INPLKILNKTNTNSLNTSHIKINNYNKTLRTKMNENLCASFIDPTILGLPAAV

SEQ ID NO: 954336 - protein, 73 aa, Homo sapiens
MHEPVSGPYNCRGPGDTRMHRALSGGKCEIRPQAGPPGSPLQPVGSSKLSLSASDPTPALAMLSSLRRYTAFL

SEQ ID NO: 954337 - protein, 69 aa, Homo sapiens
PRLSGPQLCWSPSVWSGVVLGPQLCWSPVVPGPQIVLVPSCAGPRLCWSPVVLVPGCAGPQLCWSPVVL

SEQ ID NO: 954338 - protein, 71 aa, Homo sapiens
  misc_feature (2)..(2): Xaa can be any naturally occurring amino acid
DXGYCCISCQGKVKPERISWRPTGSKKKNEPEDEEEEELEEDEDEEARRMNDDRHKWAILLMSAWNQCVVR

SEQ ID NO: 954339 - protein, 40 aa, Homo sapiens
TGKITILDDELKRRDNRSEERTTAQKLLDYKTIHPDLQPP

SEQ ID NO: 954340 - protein, 30 aa, Homo sapiens
MPNYSADTQIGIAHYSPELLDSSDPPASDL

SEQ ID NO: 954341 - protein, 53 aa, Homo sapiens
NSTPDSVRTTHTPPMKKFPYHSTQHYLYDMSPYPLQFSSIPACKPVRVPQLDI

SEQ ID NO: 954342 - protein, 43 aa, Homo sapiens
PRRNDDTISSYNHHSNIALESLVAISTHSSITRFIKGSNPLNI

SEQ ID NO: 954343 - protein, 97 aa, Homo sapiens
SYPGIQMYRTEIRMARMATKAHTSMYLQNPNWRKSSESAGINYSEPKGTKGVAASSTSSNLQRNLCAAHTGYALTMLRQVDSYIAWGYPHCKSVNAT

SEQ ID NO: 954344 - protein, 68 aa, Homo sapiens
CTVLVSSGTGSGDDEAIVFCEFFDHGPFGSKSRLAGAGLLGRGGCDGIKGVSHVSLFHVRDTIRVLVR

SEQ ID NO: 954345 - protein, 51 aa, Homo sapiens
TVCSVNAGDCNGYRDISYSNARVSGTKFFHSDVYEIGRSVNGEGSVARNSV

SEQ ID NO: 954346 - protein, 42 aa, Homo sapiens
MGLETCHISYAKVSGKKFYHSEVYTLGRSGIGGMLFEFIITG

SEQ ID NO: 954347 - protein, 56 aa, Homo sapiens
IHCNSRRLYVTTGLLNRIVSTGFLIKKNSQQNQSDNSLKLAYQSANKQNVWLSSWR

SEQ ID NO: 954348 - protein, 55 aa, Homo sapiens
MTSTSRPSKSVVTMAVLTCGSDIARNLDKAERESLLLRATYLNKLDSPGYASIKL

SEQ ID NO: 954349 - protein, 36 aa, Homo sapiens
ITKTWNSTQHILSPSTLLLTSLSYEFDTGRLEAGSW

SEQ ID NO: 954350 - protein, 45 aa, Homo sapiens
TGCSGTELCYGYWLCIVYWFPPGKRENSKGRLVDSGQWIRVLVTG

SEQ ID NO: 954351 - protein, 37 aa, Homo sapiens
DGSPRITAYPESLLSLFIMLFIYFKLAGDDFMSIYER

SEQ ID NO: 954352 - protein, 65 aa, Homo sapiens
MCTHLVVHISDVDVQSDSDGGVWLLCFKDVTVIISVVANNNLLHVLIGGGPAYQSRLAGSLWNLF

SEQ ID NO: 954353 - protein, 35 aa, Homo sapiens
SSLSYEFEQHTPRFLLADTSTDWRYQITNQYRCIT

SEQ ID NO: 954354 - protein, 89 aa, Homo sapiens
MLDDTPSPIVTPDALTSSQTDIAGSRDLSTSQYSGVLLVSQCCSKGPHEEQVMRDSPGKHFCTTEQHEAHVALDTAGPIGQQEYLRRDL

SEQ ID NO: 954355 - protein, 47 aa, Homo sapiens
GTAYPRFRYDQTLYTSLLKNFLPLTLALLIYMSPYPLQSPAFPLQTN

SEQ ID NO: 954356 - protein, 53 aa, Homo sapiens
MLWSIQSSPYESTVYPRFRYDQAQYTSYDINFLPLTLALLILYVSIPITISSI

SEQ ID NO: 954357 - protein, 43 aa, Homo sapiens
YSTQDIFVTKTLASMLSWYFEFEQHTPDSAANHYRENQPRKPG

SEQ ID NO: 954358 - protein, 35 aa, Homo sapiens
SQTLKLHRRSHSHNRPRTYILITILPLQTCTGGNQ

SEQ ID NO: 954359 - protein, 80 aa, Homo sapiens
MTRYPLGYRVMISGRSSHAYSKKAWNLIASENICYPAKLNNGHVEDLVQRGVKRIFDPCIRYEQVSVADADAHFNCPVVA

SEQ ID NO: 954360 - protein, 43 aa, Homo sapiens
SARLIVRKQGLSYQPDGVKGIKGPHWFLDPPKATASASFMTPR

SEQ ID NO: 954361 - protein, 46 aa, Homo sapiens
LKSWRQTTACMPIVLVIKFPVKIFDNGPYRYMQARYMQARYPGTCK

SEQ ID NO: 954362 - protein, 41 aa, Homo sapiens
LEEVDSTERIFKTDNLTSFIRQLNLYGFWNTSLPPLCLLCA

SEQ ID NO: 954363 - protein, 33 aa, Homo sapiens
ALSLLGTWDLSTKLSGKQWGLRSAQQASALLSR

SEQ ID NO: 954364 - protein, 31 aa, Homo sapiens
MVVFAPLACTPPLCSPAVHLLCAVHLLCASP

SEQ ID NO: 954365 - protein, 41 aa, Homo sapiens
TAGRQHSRWCYNFYCTLQCTTVAEVPLLLSTSSVLSTSSVL

SEQ ID NO: 954366 - protein, 70 aa, Homo sapiens
LLGCLVILVGLLASGYRHRHPHHLQLARLPVSCLSFLIFISILFLTITFFFLLLFLPFFFLLLFLLQHSP

SEQ ID NO: 954367 - protein, 47 aa, Homo sapiens
VQLAAEVILKDPRFCSGCFLSSAPHQYPSSPMTLIPMKTRDEAVLRD

SEQ ID NO: 954368 - protein, 64 aa, Homo sapiens
IELVPVIPIQSNATINGQTDVGVYAHLDVHSRSNSMPRAPTHRGMQRDIISSAVAQPRAANHDL

SEQ ID NO: 954369 - protein, 34 aa, Homo sapiens
KRPLESGIEGLKDNLLAYGTSSLTATKQLHRPSG

SEQ ID NO: 954370 - protein, 39 aa, Homo sapiens
YNRAPYRIETSCGKQYKRPQITPCKLAVVVYLYTGLGFD

SEQ ID NO: 954371 - protein, 78 aa, Homo sapiens
DFPYRVLPRFTSLITTTESTSHSPPRLHFCDHHHEGITSHSTPSFHFFDSPPLKNTSYAYSQASAFIDSEADRGPLSQ

SEQ ID NO: 954372 - protein, 57 aa, Homo sapiens
RFCFCLLLLLCFLLLPQVLVRFLPSQVMIQSGLAIAPVLPASAVSSGSSSGSSSTFA

SEQ ID NO: 954373 - protein, 32 aa, Homo sapiens
TVCPSQDLLTKTCSCFCLLQMAASCFCLLTKT

SEQ ID NO: 954374 - protein, 39 aa, Homo sapiens
LVKGILLPLLSVTTKWDSYSDNPLLLFTITLLLSDTLYG

SEQ ID NO: 954375 - protein, 50 aa, Homo sapiens
HPYCFCQMRLSSYCIWRRNIRRKEQIWAASCFCRSTANTTLNRARVSVLI

SEQ ID NO: 954376 - protein, 34 aa, Homo sapiens
LLLLLLLLLPLPASAVNTKFKTSSDVGHGFLSYG

SEQ ID NO: 954377 - protein, 35 aa, Homo sapiens
CLVVSRMDVPERKTVVVLSPQFQLLVVSSFLGPAR

SEQ ID NO: 954378 - protein, 46 aa, Homo sapiens
GEGQKQAAGLCFLLLPLTKTLLPASAFLPFLLLFLRFLLLPCQTVS

SEQ ID NO: 954379 - protein, 110 aa, Homo sapiens
GGGKVTLNYHLTWSGLSYATGGMKSRKSIIHALTELRNMAWGLQDSSGPQANPLLPRQLLVQFGHIVIPLGLVTRASHRGPELILFTEGRHLEFATVVSRSVAEDGLVTL

SEQ ID NO: 954380 - protein, 35 aa, Homo sapiens
MPLLLLCSASALPLLLPASAASCFCRLLLLPLTKT

SEQ ID NO: 954381 - protein, 44 aa, Homo sapiens
MSCGFLLLPSCFLLLPLSCFSASCFCRFCFCCFLLLPNGRFLLL

SEQ ID NO: 954382 - protein, 38 aa, Homo sapiens
FCRSCFSLLLLPLLLLLLPASAFLFCFLLLPPLQVLVR

SEQ ID NO: 954383 - protein, 61 aa, Homo sapiens
LELYLRIREWHYISILNKIATILTEQQQGGRKFVSREEASHTTFPGSLIPSLACHLETETE

SEQ ID NO: 954384 - protein, 38 aa, Homo sapiens
LRIPRRCATVSVGGGVDAFYRPGQVAHADGGELRGNVR

SEQ ID NO: 954385 - protein, 50 aa, Homo sapiens
MCRWVDRSFWGLAHLLQLQLGWVSSVAGVIYINTQTKFDDPVDPVSMVRA

SEQ ID NO: 954386 - protein, 42 aa, Homo sapiens
KEASSCMQQSVDRLLGKQRGRWTHPRMTTTSRKSPLVHLESE

SEQ ID NO: 954387 - protein, 55 aa, Homo sapiens
ASCFTSRVRIFSIGYGSGCTNCCFDTSFHVGIRRINNHRHNCTTIIECDPSCSFL

SEQ ID NO: 954388 - protein, 130 aa, Homo sapiens
WHGDTAKIWRQYYRYLVKVYVPGKGIVRNLVTDPYSVSLNTDSGRSYIANLQNARLKPDGWDRQDRPDRVRQPTDMAVYELHVRDFSINDASVRPAYRGKFMAFTEKQSDGMRHLEALSKAGITDIHLLP

SEQ ID NO: 954389 - protein, 78 aa, Homo sapiens
WTSRACAQQHHVASPPLGALAQRDEQVGTGDALGQRLAQETAGPHHRHAVGEDEIGLGVALAEFRRGIQAHHMIDVGR

SEQ ID NO: 954390 - protein, 46 aa, Homo sapiens
LKHVGAFRIGRESVVVGGGHPYSHSRFMEGSSTIRMPRRYSDYADA

SEQ ID NO: 954391 - protein, 48 aa, Homo sapiens
QLGTRHDTFTVLTADQAPGVFASTVLPQLAFVDAAVGYDPNNVTVSFT

SEQ ID NO: 954392 - protein, 192 aa, Homo sapiens
YLPAANPSIQKWHNIPRLTVSMCATEICQSSGYLRGPALQRWGLERKRGSIWTEDAHAQVVAEVSAQATTQSPKVRPPKRGAPRLRGGDFPPSRLLDTEASPALPEQPFLLALFPTSRLQSRELPGKLVDPSGGWATLLESIRQAGGIGKAKLRSMKERKLEKKKQKEQEQVRATSQGGHLMSDLFNKLVRA

SEQ ID NO: 954393 - protein, 110 aa, Homo sapiens
YSGAPCLVQRGVILCWLLLLTLWLPWINHRITYAPVAEELAQQLPNKSYCIEAYIGPSQRSSFAYFGKIQFATFSDHECGYMLLQSSRRHILKTELPAPYQPEQWDQVWS

SEQ ID NO: 954394 - protein, 77 aa, Homo sapiens
RHIQDKEHPLRPGRGSSLQASSLEDGRTLSDYDIQKRVDPAPGPVSEGCLLISSVMAFAVPSDGITLHYSHWPLIDW

SEQ ID NO: 954395 - protein, 51 aa, Homo sapiens
MRRRRRQPLAAGEGASGHRVLADRFTAIQQAVAAPASRPADALRALFDEVE

SEQ ID NO: 954396 - protein, 113 aa, Homo sapiens
TGVVKYILEIDEAECEISLLNVRSTHIGGVSAFRWALWLHCTHLKCHRLQFLELLKTRDTLMDATCRTRRTTLFSPGFILHFSLVRLQYLRIHSKEVKLSPQSNLGRALALIR

SEQ ID NO: 954397 - protein, 31 aa, Homo sapiens
MGKRCRGQCHQHIQQRLLTGLGNDEAGVVVM

SEQ ID NO: 954398 - protein, 48 aa, Homo sapiens
LSAYDKQTYQSLIAYSSISHIALVVTAILIQTPWKLHRRSHSHNRPSG

SEQ ID NO: 954399 - protein, 57 aa, Homo sapiens
GIMSHQMKDSFSAHKDLSHFAQLVLGLIEDKPTDVYGNKLVRHFNLQSPPGLLVPGD

SEQ ID NO: 954400 - protein, 73 aa, Homo sapiens
MSLLWCPAPFLAETSSGGGGGPHTLLPLHPARCCCSVPAVRALVGEDVATLRPGGDGRLPGFAESRLWVWSER

SEQ ID NO: 954401 - protein, 81 aa, Homo sapiens
MDLGRSDTRIRLGRKLLADEHLPERWGGASSSPVPATLISRPPADFSSASGSLLACERPPQIGEVIRTVLWDSRITHNREL

SEQ ID NO: 954402 - protein, 122 aa, Homo sapiens
MHSGHYSARGSASCTPKKPSPAVKLHATQPPLHIGATLHLHVPKYTDAPLSTFRRVPPWREWKGSLGPCLLTNISVDARRRRSACLSGRGAAVLEASDFNLTTSHRGIIWGADFNLEPLTAS

SEQ ID NO: 954403 - protein, 82 aa, Homo sapiens
GSLVRSDIRLGKGVTMACCGPRLSWWDLSLWKLLRVNPGLLSGGRRTLSMCWEASWGGGGQCGRLSSQLVLNGPGTDSRDSV

SEQ ID NO: 954404 - protein, 46 aa, Homo sapiens
PPLNTVMLIDELIKRKDYSLQLYPGQAHGPRGDAMIWSLQKARWEF

SEQ ID NO: 954405 - protein, 72 aa, Homo sapiens
AYSTQSWLPMPTGPESGSQIALTRQPNGSNGSLVGDYQTDNGMWLREPQTSLAYAYARGSPRAETDTLGGPS

SEQ ID NO: 954406 - protein, 71 aa, Homo sapiens
HRSTGGKGYAHGDTFGRIGQLFSRFMDDASAHYVENLADAIEDPERQLDVSFELPARLEMTSLLQFIAGGL

SEQ ID NO: 954407 - protein, 57 aa, Homo sapiens
WRVLLDEALHHLPGIVGREQGIGWPGGAEGIPEAVVDEHLAIAHAGEAAAGTAVGVV

SEQ ID NO: 954408 - protein, 33 aa, Homo sapiens
MFSRMPDMRAQNIGHNDQRRCVCDRNREHATGA

SEQ ID NO: 954409 - protein, 56 aa, Homo sapiens
YRTATASQCMHDVLSSLLSAAAWSLPRLVKISLGINYLCVKFMGIIHCINQTNNKG

SEQ ID NO: 954410 - protein, 79 aa, Homo sapiens
KDKIDLKSHIYHITTDTQIHTQYTFPMIMYNRSTHLSLSHCSPMYAAPIHLDLAELSLTEMRHSWEAPTNTRLFGPFIR

SEQ ID NO: 954411 - protein, 127 aa, Homo sapiens
MCQPRHKRTDTHAHTCTHSTQTHGTHTHTHAHTDTHTLIPPPHPHTHYRLTHTPHTHTPHTGSYTHHTYTHTPITPTHTPTHIHRHIHPTPHYTYTHTKYRHTYPTTPAHITHHTQTHLNTPIHTPH

SEQ ID NO: 954412 - protein, 140 aa, Homo sapiens
MITYKKQNGTWPKNVAQLAQPFPDNILGETAPGMTRMFPALLAMHQQGEMGNGKNRNEGARAISDSTQGKNAAFVDTLGGKPFLQDRLEIIVDKRRHKLALISGNTIIRNYEVGLGGDRTPEGSFVISDKVVNPNGRSNG

SEQ ID NO: 954413 - protein, 37 aa, Homo sapiens
PDHDDGIAVNYDERDVILVAVSRAGKTPTCIYLALHY

SEQ ID NO: 954414 - protein, 36 aa, Homo sapiens
LPDSLKMWKSFALAPQGTPVRIGKELLPETAVIPEA

SEQ ID NO: 954415 - protein, 91 aa, Homo sapiens
VPFTSGAARSARVSISSASPGDADGAHRRKRVRPSGSGRAPKVKGSGQAVMAFVLAMWVALSSTRLWPWTAASFAPTGAAATGAEVSSSRI

SEQ ID NO: 954416 - protein, 84 aa, Homo sapiens
YGQVEAVRQAALRSPVGYTDPSPRVSSERARGPRTNYYAGVPANIAPHRRGSSYRFLYNFYRSLAPWSPVGSSSFAFVIFDLID

SEQ ID NO: 954417 - protein, 161 aa, Homo sapiens
FVRNRCRVCLSSRVCRTREVFCGPAEYYRFLCVTYPRYRLRYQKLRCCMPDRNWSSPCRITVSLRCNELISDIPFKHTAIGQACVHCLIEQPDTLFRRNLIAQMDCRIFIHREMQMKHVHLWCSRVGLELWIVLQNSEYIPGSGKVGGHLCQLLIKLHCRS

SEQ ID NO: 954418 - protein, 63 aa, Homo sapiens
SIPRPYVEPGLSHLSYSLNARLTETTATFGSLKPPVRRSHTLMSNRFPIDVFICLCVSIGPYR

SEQ ID NO: 954419 - protein, 85 aa, Homo sapiens
VESHGAPAALLGRDSSRYCCSHLLGQGQPVATPEVMAGGEDEPPEALGGQPPTLSACHLRASQVWLQHPLQEVFLFTPARSMWSE

SEQ ID NO: 954420 - protein, 37 aa, Homo sapiens
WSARDIGLSCFHIEVVNPIVDLASRIGLRVLSRGSEG

SEQ ID NO: 954421 - protein, 67 aa, Homo sapiens
VPVIIEEVCGAALGNTSRGLQVCKTLYSQQCCALTQTGNCQSPQAPSIIFHSYTMLLMFLYLLTTLS

SEQ ID NO: 954422 - protein, 71 aa, Homo sapiens
IQRMTSWRCTRWYDWLVTSCLPLPLLGTSLHISFHVLQHHVAVPIEGLHAAQEFLILLRQWMSTCARPDGG

SEQ ID NO: 954423 - protein, 73 aa, Homo sapiens
RSSRDASIYNLVLSQTVSLSIFHDRFAPFPLVELVSLKQNCVGEFAIPFSLEFTFICPHQLQGLLYISIGLIE

SEQ ID NO: 954424 - protein, 70 aa, Homo sapiens
HDTIELGTSIRQIESWPLTRAHGSTALVRTVTLSPGTEKVHGTLSSPSLLVSNDDWYTGLPSLRLWQEMA

SEQ ID NO: 954425 - protein, 92 aa, Homo sapiens
MTLQDSSFVLIFLLLLLQQSAEPAAGAVKSWCAAEYGYSPTSMYTGKLANTLCEVVFQVNFPFSSLITLLSRSSSASIPTLSKIFLMSLALI

SEQ ID NO: 954426 - protein, 79 aa, Homo sapiens
CTYTLTSVLYFLKPHSEQARIVLIWYSLLFHCCPETRMPLLADDGPGPGNWVHPELCEGLGFHAQQAPAHPPPPSPLSE

SEQ ID NO: 954427 - protein, 58 aa, Homo sapiens
LFTPSKRIASYPAISQYFDELSILLTILFEYQCSFIRFIVILTPAICSGPPIPFGPYR

SEQ ID NO: 954428 - protein, 75 aa, Homo sapiens
VDCCDLRRISLTMRVLGSHRFCDSEEIFILVLIASLVNNLHSTHTPTSSILTPVPVIHSEFRTFVLYLFISMVSI

SEQ ID NO: 954429 - protein, 65 aa, Homo sapiens
ISIRSYESHSWFMSFKYLWLLKSPCLTTGRLSNKGFDDHRNPKPSYFMSAAESCPLANLTAIGFD

SEQ ID NO: 954430 - protein, 91 aa, Homo sapiens
MNWNGMEWNDFGIEWNWTRQWNGTGTGMEWNGTGMEWNGTRSEWNEEGLMTGFDGHQTLSSNPVIKPFIKPCHQTLLNSLFKVLFNFPLGF

SEQ ID NO: 954431 - protein, 92 aa, Homo sapiens
VIAFGQCPWLMPGSSMAMMPEDLWSYHVAGAERGHGWTCLPFPSVHLNTTDLDSNECVYEFALFEFVPLIYQHFWCLPVIKKRVVVEPVGLM

SEQ ID NO: 954432 - protein, 122 aa, Homo sapiens
KPVINTLSSNPIIVSCGWCQAGPRYRTWLLPADDQPSLATQRYLNTVTVFQIDPSVLLEARMARPCSWDLNEGQHLYTLDGGDIIHALCFSPDRYWLCAAPGPSIKIWDLERYEGFDDRVPS

SEQ ID NO: 954433 - protein, 74 aa, Homo sapiens
QYPNLVLSISNKRIVRCTLMKQDKYHLRLVLAALRLGPAMPPFFNFFPQNAPAAGTLSTCTKLLKMCCKVSSFQ

SEQ ID NO: 954434 - protein, 66 aa, Homo sapiens
MRGVTVRRRPVCCWHESAEATSVVLMAPQPQINSGSRHGATQGVACQAMRTLAARPSWQASGRPAP

SEQ ID NO: 954435 - protein, 84 aa, Homo sapiens
SNPYLQLGSSVWTVKVLQLLLNCLMSMMCYYRFGQVYTEAKRSPGFDRVRNADIGIQDFELDFLQDSIYHRTLAGQDIQRHGSE

SEQ ID NO: 954436 - protein, 40 aa, Homo sapiens
MSPGTLHFFFFFFFFFFFFFFFFFFLFLFLFFFLFFFLFL

SEQ ID NO: 954437 - protein, 75 aa, Homo sapiens
  misc_feature (8)..(8): Xaa can be any naturally occurring amino acid
  misc_feature (63)..(63): Xaa can be any naturally occurring amino acid
VVSTRIPXYHPTLIFISRRGGANPGSRTLTLLPPSLSFSSSLVPPPFVVQWESDQVGASGLWXLATRVLHWGRVE

SEQ ID NO: 954438 - protein, 34 aa, Homo sapiens
DKPITLLTPPQTPHSNLKSEDNQYSYPFTIIGPY

SEQ ID NO: 954439 - protein, 65 aa, Homo sapiens
DPRHETLVINPHRNPSQTLIKPVIVKPCFLVWVLGYYTKLYDDLIYWGARRFCVSYALIFSCSVS

SEQ ID NO: 954440 - protein, 43 aa, Homo sapiens
YIIKRGGIMRLEDFERTLKVTYMTLLQDHYILTTTTGEASGLP

SEQ ID NO: 954441 - protein, 52 aa, Homo sapiens
IEPVPSIRAKYLVQCHTNFKPVKWRNNMFKNCICMGGNMYLYDWYEDRTFEM

SEQ ID NO: 954442 - protein, 35 aa, Homo sapiens
MNELVAGPNTPVGGGWRPQFGGFAQRGGMALGKCS

SEQ ID NO: 954443 - protein, 37 aa, Homo sapiens
TRKRLSREEQLYNHHLMKGTLNWVILASQWPQLALIE

SEQ ID NO: 954444 - protein, 44 aa, Homo sapiens
MSSGSLFITLFLNWCCLCFIAFAYSLKSRDRQIVGDLTGAPPWG

SEQ ID NO: 954445 - protein, 33 aa, Homo sapiens
RFTFKEVCSVTHTGEMQGVEEARRYCDVLTSVI

SEQ ID NO: 954446 - protein, 82 aa, Homo sapiens
QNAIVWNITRIACLKEFADHAAEIELLSTNDKNEMGSSPISINFEVPFGPSGLKVRYLKVFEPKLHYSDHYVLKWVRYIGPY

SEQ ID NO: 954447 - protein, 55 aa, Homo sapiens
IQSRIITLNSGLYVSLLLASEYIESPFIISDGIYALNIFCSHRLPRTSRSLLGYR

SEQ ID NO: 954448 - protein, 58 aa, Homo sapiens
GSQLIRYCGAVRLRLWGHELMRTDFRFISGSQRFVIIFYFYGLLMREVGGSLCFGPYR

SEQ ID NO: 954449 - protein, 52 aa, Homo sapiens
CSIHKVKLPAGINEFSRALKHGKELVNCFKLAHKYRPETKQEKKQRLLALIR

SEQ ID NO: 954450 - protein, 44 aa, Homo sapiens
VIQRPDQHIEMVIVVHAILRYTRSIHTFFFSCMHLPVRSIHTLL

SEQ ID NO: 954451 - protein, 35 aa, Homo sapiens
VVLHYSVLGTARYLSILCIYWLDEVSLVLFFALML

SEQ ID NO: 954452 - protein, 68 aa, Homo sapiens
MEIPAEISILLLGVAHFKGQWVTKFGRQKDFPEDFYLDEERTVRVPMMSDPKAVLRYGLDSDLSCKIA

SEQ ID NO: 954453 - protein, 62 aa, Homo sapiens
VVIKLVPSAYLDDLCHSIFLCALVLLYILCKYHGIRVQGERKCLTFYLPKFFIVGLLWLAYR

SEQ ID NO: 954454 - protein, 56 aa, Homo sapiens
STSVAEQYGASVQRASTAERHACWGYVVLLRLLGVCCVALLLRLLTLTDARLLMLR

SEQ ID NO: 954455 - protein, 38 aa, Homo sapiens
MASIEPTSHTAHTFLLGYVVLLHVCVQVGACVCTCVLR

SEQ ID NO: 954456 - protein, 118 aa, Homo sapiens
MNLSYYYKRGEIQTNNCYDLLSCLLLMVLPDYTSLCESPVRECSWCNLCRVSSWNLCSHPEIQNGQLAWFDCFPLISWVLNSIQAYFEDIASLVPDYFNKANNRNKVSHTNFLVSQCI

SEQ ID NO: 954457 - protein, 79 aa, Homo sapiens
PERCDRSRRTHALIRGCSFMKPILPMILAAFICHLPRCLRARDFADGGLYLEGPGLPGSMLSLTMYAMDSVHLLQHNHR

SEQ ID NO: 954458 - protein, 33 aa, Homo sapiens
DIGPVSGQSAVGSPAGGLLCWKKTEVLRLLSLL

SEQ ID NO: 954459 - protein, 71 aa, Homo sapiens
FSGAGWDANNRLETTPTGYVWKSVAGPTTFRYIGTHSGDQWREVCEDAPLLMLLMLRLLNSVTDAPLLTAY

SEQ ID NO: 954460 - protein, 53 aa, Homo sapiens
MIHSIWYLDKGQRVNKIESFGKPGKLQSAGQFRAVIDQLGPYRGGSFIKSTVQ

SEQ ID NO: 954461 - protein, 49 aa, Homo sapiens
KHTLHTQAPTMTTRMHSTHEHSTHTNTQHNIPPQAGPLRLLSSVTDRLL

SEQ ID NO: 954462 - protein, 34 aa, Homo sapiens
ADPLKGRRATPPRAAPDKLHPSPKCNIGLKLGTE

SEQ ID NO: 954463 - protein, 32 aa, Homo sapiens
MAPSESARIRTPPGLRTRASFTQHTFGFVRVV

SEQ ID NO: 954464 - protein, 38 aa, Homo sapiens
MAASLLVAFVFEASTPRPLAAVAAPLVCPRRNKSVGLI

SEQ ID NO: 954465 - protein, 98 aa, Homo sapiens
RQDPMSSSDSSDSSFFSSFFSSDCSRCRTSNRGCKVLVCSRDGYSPTSMYTGKLANTLCDVVFREVSIQLTDNLVEPVVVRLDTHAVQDLLDVLGPYR

SEQ ID NO: 954466 - protein, 39 aa, Homo sapiens
SLGILQSVTLCLHAVSLWKQSTTRSSTKLTQSHKIIYHV

SEQ ID NO: 954467 - protein, 48 aa, Homo sapiens
TAKGLHRTTHSNSMLYMCYFIVVLEDVEDFQILAIKYEEATLLSSVEI

SEQ ID NO: 954468 - protein, 66 aa, Homo sapiens
RCPLRSDGSPAAVLDATRETSARFLALVVSDHTGTVLLRQSGLNLCRQCFRQYAKDIGFIKLVSLN

SEQ ID NO: 954469 - protein, 68 aa, Homo sapiens
MRPYSKIQMTTKIRMVWKTRQKAKNRKVIYVHLTKYARITGSTIERQCYKTYQVNTLKTKQVIMEALK

SEQ ID NO: 954470 - protein, 33 aa, Homo sapiens
ADVCDVLLYEWGFNREYYSIVNVKESCGALMRP

SEQ ID NO: 954471 - protein, 80 aa, Homo sapiens
YRKSRYQARAFALSSTTVTSLTIQLSSPADISVGCIIRLSHPWPSYNILCDDFYHFSNLSWVGAGMDAKEASVLVAVVVS

SEQ ID NO: 954472 - protein, 56 aa, Homo sapiens
MCLTVNGNAYSNRRIYTAVLQVALACDIDVALELSAIEQHKECSPVANALPYRGGI

SEQ ID NO: 954473 - protein, 63 aa, Homo sapiens
DGTVTDGTLALTSWPMITVDYTNAFKIDLAHHWPSYYISQMNWFPVANNMVQYVSMTNRIRWY

SEQ ID NO: 954474 - protein, 51 aa, Homo sapiens
HPPSPGLAARLTINLIDQPNYNTALFDTAGTPDGNLLLSINNPFLNPRGVC

SEQ ID NO: 954475 - protein, 66 aa, Homo sapiens
  misc_feature (39)..(39): Xaa can be any naturally occurring amino acid
MEIVRRDRPIRAGAPYIGPSRACVYWLWFYKIRHRYDWXAFYTIFAARVLQVPLYFAVFIKRHVAS

SEQ ID NO: 954476 - protein, 68 aa, Homo sapiens
MLWSCCAGGVLAPVFDATAEPVAKTTMAQAAPILRDWKDFMTMPWEKGRKQGREQVQSHDLTSPTWRL

SEQ ID NO: 954477 - protein, 54 aa, Homo sapiens
MEHLTLFLIKKTHKHDPQPEDPNSRPSSPKPAQPALKMQVLYEFEARNPRGRGV

SEQ ID NO: 954478 - protein, 78 aa, Homo sapiens
MASQCRMQVPAFPGSKQVHRILHGGQSLPCKQVAACMLLPEGNPIVLEHCGGQSSQCAGATAVKRLVAQVFTTALALL

SEQ ID NO: 954479 - protein, 62 aa, Homo sapiens
HCQIAALVDREARRGIKAGIGANPIGMPGTQYSASQQGQRTGRADLLDGLGSTGRDFHIAHV

SEQ ID NO: 954480 - protein, 38 aa, Homo sapiens
MTKSSRYPRYASEIGHLANNCPALRKSEIEYYAMLALI

SEQ ID NO: 954481 - protein, 106 aa, Homo sapiens
  misc_feature (98)..(99): Xaa can be any naturally occurring amino acid
KAISVVFSKTGFRNIGQAGLKLPTPSDPPASASQIAGTAGVSRHTRPGSDFCLRWFDTDLVPAPRVGRQPPLSPASFSCFLPTAGGSERWDDFPQVTXXTGFWPLS

SEQ ID NO: 954482 - protein, 48 aa, Homo sapiens
VAHEGVEEGYRGKYGPYYKDFRGIHSRTMGMKLWYATTDFRALTVDIP

SEQ ID NO: 954483 - protein, 49 aa, Homo sapiens
MGHDQSNNVLHLALRKMYVTSSCCVKDYTQIHKWRLSYSLRKCSVGLIE

SEQ ID NO: 954484 - protein, 77 aa, Homo sapiens
LVMSRRLIHHYFSFINRECLTKNYNVIGLFCNIIFSKVNSSTLITFGMIFIFPFSCVKLFSTKLIYIRYSSSFWPFI

SEQ ID NO: 954485 - protein, 100 aa, Homo sapiens
RAGTLISGHAGMDEYMQEVHEELTRGVELGSYLRERSGRIGAWMSVSWKLRTFLWPPRTHTPAAFPGFKNYPETFLKVSTDGHLASQSQRAQVSPGNLHT

SEQ ID NO: 954486 - protein, 55 aa, Homo sapiens
DPGLDYCAVQSMFKPLFVVIFRVSWEFCTTQVSFSFIGEGVIKTLFTPASIDLAY

SEQ ID NO: 954487 - protein, 101 aa, Homo sapiens
MRARACVVNLSVLKLIYASSPGGLLRLRTCHIYILIVLRLSLFEFLSPQIKALYRFALVPASAASKEYARFPCMSLLVTVIDRVCACVCVCVCLILSWPLS

SEQ ID NO: 954488 - protein, 44 aa, Homo sapiens
VFTRGSVPSIRAKLLMNRQELTWCLCSLARNPNAFTLIYPLALS

SEQ ID NO: 954489 - protein, 54 aa, Homo sapiens
MLRIGTHAFCIALYLCALGEIIHNLNNEQDIRKIGGLLKTIPLTSTSLTIGPLS

SEQ ID NO: 954490 - protein, 76 aa, Homo sapiens
MPYPLHHSALSCSDVRSSIYLITRFVVWAPEPGMPTSLLLHIPLFSIFGPANHSGSFPHSSFQKFVCFWAPNWPLS

SEQ ID NO: 954491 - protein, 68 aa, Homo sapiens
MIEFDRWYPCDKGQSRRRFAKHRRVMDGVSPTSQATALAPNLRQNPFHYHIHRRKSNFLPTTLSWPYR

SEQ ID NO: 954492 - protein, 69 aa, Homo sapiens
YPRIRATVRVRESHPPRYPSPPLGDRERNPLHGPELCIRVSEDSPWCVLLILNLMPLQVPFTTASLAYR

SEQ ID NO: 954493 - protein, 37 aa, Homo sapiens
SYSSYEKTSTTHPSITYISMSPVPITSLQHSPLGPYR

SEQ ID NO: 954494 - protein, 30 aa, Homo sapiens
MLPIPHPFPIHLTLDKGQKSSGAMLALSTS

SEQ ID NO: 954495 - protein, 121 aa, Homo sapiens
YPRYGGKLASCVSEKDLCGRNKESLIWLTHDARTMRYPDPLIMVNDSIQIDFQTGPITDFILRSTLVTLVLVFVPENLGRIGVITNRERHPGSFDVVHVKDANGNSFATRLSNIFVIGPYR

SEQ ID NO: 954496 - protein, 37 aa, Homo sapiens
IANKETNSELVCQVPWYKLGSGFFPDSSNKSPVGPYR

SEQ ID NO: 954497 - protein, 71 aa, Homo sapiens
LQIELELGTLDKGQSPSSLWLVQHTGSEVYREWVGVWWSISVCHADGGRGDRRQGGQSHKVHLCHGVKDGS

SEQ ID NO: 954498 - protein, 88 aa, Homo sapiens
MLRTCSDDVDGRCSSASVMDLQVAQLLAERASNETSKFMELVGSEAQFFLSKVGRSSISVLICDSFMPAMRLIFHTRAFSLALYLALS

SEQ ID NO: 954499 - protein, 61 aa, Homo sapiens
MATMKKFSSWQSELHRNWNSLSPFRYGQQFHSLTKPVDLAVIVWHLPHKTQVAATFFGPYR

SEQ ID NO: 954500 - protein, 55 aa, Homo sapiens
MARTPLDLIFRFVSAKKLDIRGVLVSRCLSPGCWSPTEKFPIPSQPICSVLGLIE

SEQ ID NO: 954501 - protein, 84 aa, Homo sapiens
TIELGYARSGPNRTVLEITELEPPRSVTQVSFQINVLLGLFDRASVIRVSPYLMESAELISPGWSALKRCLLLLSLCDIVFPYR

SEQ ID NO: 954502 - protein, 74 aa, Homo sapiens
RIRAKLRRVHKNLIPQGIVKLDHPRITWISLVILFECVNLVRWQTEAPPAPGKKLPVLQIKVVVLPLRMPSAGG

SEQ ID NO: 954503 - protein, 65 aa, Homo sapiens
YDSELSTLDKATRSVFASHEEASFTEFPAILQCYTLEQNYAKIHFTIIFIGVNLTFFPRHFLGLI

SEQ ID NO: 954504 - protein, 48 aa, Homo sapiens
RAGTLDRAIGCRSQLYVWDLLEYVGVELERFLKLVAAFRPTMGVWPYR

SEQ ID NO: 954505 - protein, 40 aa, Homo sapiens
ELCTLDKGNAAQNPPGTDLLTALCQESQCFHSYLPFGLYE

SEQ ID NO: 954506 - protein, 44 aa, Homo sapiens
YPDKGQPDSNGQSAKRCFLVMDAYEEVPRLKLDDQQCCVNCRLV

SEQ ID NO: 954507 - protein, 71 aa, Homo sapiens
LDKAKLNHWWNPIYYRKYKNQLGVVAGACIARYTVRLNHVNRLSLASGGGRELRSPPICTPACVKISVPQS

SEQ ID NO: 954508 - protein, 111 aa, Homo sapiens
MASTSEQSEKDLWWAQGGIASSGDLMMPASIRYPDPLIKVSDTIQIDLSDWPDYCISSSSTSGYLLCGLFRDNLGRIGVITNRERHPGSFDVVHVKDANGNSFATRLSNIF

SEQ ID NO: 954509 - protein, 34 aa, Homo sapiens
PQRKLRWVDHLKPEVRDQPDQHVVKPRLYLALIE

SEQ ID NO: 954510 - protein, 58 aa, Homo sapiens
MRRVLLHQQVTLATLPIPCAITSSMIFPFSSLITLLSRSSSASIPTLSKIFLMSLALI

SEQ ID NO: 954511 - protein, 96 aa, Homo sapiens
SQVSSDSSDSVLLLICSSPLLQQWAEPAARGCETWCSRNGYSPTSRYTGKLVNTLGYDVFHVCSIQLTDNLVEPVVVRLDTHAVQDLLDVLGPLIE

SEQ ID NO: 954512 - protein, 42 aa, Homo sapiens
AECAQTGHEFLSSNDLSASAVSKTLGLPSVSHYDLALWIKLI

SEQ ID NO: 954513 - protein, 102 aa, Homo sapiens
MRANRDTSSCLIRIIWESFIQVLYWSSDQSGIEFFIFSISFSYSTILALERDTHVRTRFHIFFFFGIHRGVIFFILKHGNLQRIKLLLKVIHQASLGHIGLI

SEQ ID NO: 954514 - protein, 49 aa, Homo sapiens
MAIIGGFIHRCRLFSGYTLDETYAKIHFTIIFIGVDLTFFPQHFLGLIE

SEQ ID NO: 954515 - protein, 68 aa, Homo sapiens
VNLLPITDLLVLTYDVCARSLNGDSLGAPTVRDAYQYPDDVDNLRSYILPPLFLEPGDLRLLDVGLSE

SEQ ID NO: 954516 - protein, 51 aa, Homo sapiens
AKYPRISAHQELTLATSMSYSFFTAVFNLGACGLIGGAILIKSDPSNACNA

SEQ ID NO: 954517 - protein, 102 aa, Homo sapiens
VFTNKPIAECLLRVHAVQAGGGRSPSISLCDIVLKYSAYVRVSLGGSKSSRVVGFPKSLPPHQNTPRVLLGGPNISSALGPVGQEMVIYHPALARSKGHHVA

SEQ ID NO: 954518 - protein, 78 aa, Homo sapiens
YPSVAKERVFIEASRLLFCPVCDVVIPDTLCDVVFRGRHEASPPASSGRQAHCQASLREGEREREDSLSRAPGLGPYR

SEQ ID NO: 954519 - protein, 80 aa, Homo sapiens
  misc_feature (75)..(75): Xaa can be any naturally occurring amino acid
MELVPGDTPLPTPTGCIPICRRPQHSVPHHQEPPSSDEAVVDRHGPEAASGEWEHGAWAQNHENIGRILAGTLAXIEGDP

SEQ ID NO: 954520 - protein, 56 aa, Homo sapiens
MACNATYAVNHYHEKNSYLAILSLPTNLLDYNITATELIIFDIFFETTLIPTLALS

SEQ ID NO: 954521 - protein, 45 aa, Homo sapiens
NIRVPFDRGDLVGGTHWNGDACVCNLTNELIERPGSKPMDTECSG

SEQ ID NO: 954522 - protein, 35 aa, Homo sapiens
TNSSWYRSHFCIPLEMDLFEYRLLLLRIMQFITGD

SEQ ID NO: 954523 - protein, 60 aa, Homo sapiens
MIESSWYRQHGEASRVGGTAGARHQARLVFVFLVETGGFTMLARMVSSPDLTIHFLGPYR

SEQ ID NO: 954524 - protein, 49 aa, Homo sapiens
MVAVALVLHVTGICSSTSFIDIRPRKTAVTVRYLADGGVSQAGIMFLVY

SEQ ID NO: 954525 - protein, 108 aa, Homo sapiens
LRTELVPSDKAKRAYDVRVLIRSSVGSSVSYVKRNSATSLDCAPTNRERELGETVVRQVSFTLLMMCCCHGNPAQYERNRRFRHLVYVLWLRSQWGEATICGIMTERL

SEQ ID NO: 954526 - protein, 34 aa, Homo sapiens
VYTSSEIYDQDHSGTSTVCFECEKTLVVILLEAR

SEQ ID NO: 954527 - protein, 40 aa, Homo sapiens
MHPNLPNSLSPRGERGVNSRRIRVPAVHHGSSEDWLSCHL

SEQ ID NO: 954528 - protein, 39 aa, Homo sapiens
SARSDCSPGSLYLVMSLPMSLLHWMEENQAVASSHPLRG

SEQ ID NO: 954529 - protein, 134 aa, Homo sapiens
LEDPRWPTSGRKHNPQTLALKCMQLCQSRWLQGLMLSSAAGTAPSPRHGPQKSDTCSHVALHNQYTAQHTSLTDTVSLWDPVSMSMGLGPDVDRKTPGNPRPFRSPPRKVTSSTHFVGSAAHEVAARSVLSPQM

SEQ ID NO: 954530 - protein, 79 aa, Homo sapiens
MTCLGIPGLHFSVVHARHIITTHHHSPSKERMLQNDILASTMDHADQSVAIRDGILCPRSSPGPLVGSLTHSTFARAVT

SEQ ID NO: 954531 - protein, 36 aa, Homo sapiens
TACSVENAWEIVMGYGDSVVSPYATVSGKNPLFIGR

SEQ ID NO: 954532 - protein, 60 aa, Homo sapiens
HVYTVELTDLYRLINLIPRWNSYLQYKVKISNKFYESIADIRYQLQGRFLFEGLFHFVGS

SEQ ID NO: 954533 - protein, 76 aa, Homo sapiens
ATKWEAARVAEQLYSLTCEGLCVEWLRRYLVKREWRLLQRADPPKTHLTHHPISDHEATLRCWALGFYPAEITLRG

SEQ ID NO: 954534 - protein, 59 aa, Homo sapiens
KPDFRNSMSKSMWMFPSPDLTAVPAMTYVTQYEMCGCQVTQQDAEAMVQIPQFAVPRLQ

SEQ ID NO: 954535 - protein, 74 aa, Homo sapiens
CHEVGSTECVQSFGVLVKGGRRSFHTRTTQIKIWMPGHSRPYAVLIPSTFVVQRRTETRNSVIIGLYAMFLLFN

SEQ ID NO: 954536 - protein, 39 aa, Homo sapiens
CPTSDLINYSMHFRKIALATCSREACTRLSRLSTVKADD

SEQ ID NO: 954537 - protein, 35 aa, Homo sapiens
PPCMYQGGEVEHERTFYDPKMVNYDLGSANPEVNS

SEQ ID NO: 954538 - protein, 61 aa, Homo sapiens
MYRDRACMYPCIFRALHLPGTEELILRRLCIKLWFAHRFQIIDRSIPPDTWGYRVFEVRNS

SEQ ID NO: 954539 - protein, 33 aa, Homo sapiens
VIYRATVARVDAGKGPFDTTALDSCETKVAGHS

SEQ ID NO: 954540 - protein, 126 aa, Homo sapiens
RIIGHDEDWISVEGTDAEEIPVVAHVSADTKEWVEKLTEFVSDLMPFFTFRYDVYSSYIGVVWLYIVAPLRISVVDQFVIERLSTELGIILARTKLPGLTPSDFTKQCLPGGLCVGEQSRLKLKRI

SEQ ID NO: 954541 - protein, 73 aa, Homo sapiens
NYIKLHIGTKQKAHIAQTFLSNKNKGGGIMLPNFKLYSQGYSNQTAYYRYQNRCKSNGTEQRPQKYYHTSTNI

SEQ ID NO: 954542 - protein, 72 aa, Homo sapiens
HKRKVDAKIDGHIFFRMEQIKKTKSYTVKGLGLKSVKFTAPPHTPTEHVHPVRGNQSLPVNHESFTKVWYTE

SEQ ID NO: 954543 - protein, 88 aa, Homo sapiens
GGPEDKQQILLLSLHGLIGCISRGHSGSPYLADILTKVAYGSSTVWPTSPTTISFPSSRMMFFLSSLRQKSTAFLRFFTSSGVEDLRT

SEQ ID NO: 954544 - protein, 101 aa, Homo sapiens
MCYFAICCCLLLVGSSLPPALLKRQSSGSGSGWFPQGTPQWRASQCLGHCVPLRPCTRAGCKPRGLTVPRVGEQELVCNKPSWMQEPSVFMQRSSMSWGRR

SEQ ID NO: 954545 - protein, 83 aa, Homo sapiens
MMFTVVVEHTAVCSQVSTAQVKLRVAVVTPISTGSADPQKLISNEVLGPGHAWVLSGLGSSILRSSVASKFWKVVLNLRLSGS

SEQ ID NO: 954546 - protein, 70 aa, Homo sapiens
MEQQRIRLTFIVDSLKQLWQPLARFDYAAAPWSIGFSRCDSRDSSDQVIVAKGMRAVKGKTWAHVLGEVY

SEQ ID NO: 954547 - protein, 124 aa, Homo sapiens
TLKDFSHHSVIQGQIERESFSSSYNRKIDDGDGNALDCKDHQPVPQVNGFLISSWLQSFSISLDDQGLVHLIHKYLEHPLLLQPRHRYFLFDNRVLVDHQYNIYLYREGVLRTASEPYHVDNVI

SEQ ID NO: 954548 - protein, 36 aa, Homo sapiens
WLDTFAQKRRMPSMPESSSVAPGLHGAYVSGHYVSG

SEQ ID NO: 954549 - protein, 45 aa, Homo sapiens
YSELEFIDGIVRHTTSGHGRTRTKSSLYEKCICYLLHASGHYVSG

SEQ ID NO: 954550 - protein, 37 aa, Homo sapiens
MCYYPCRSGHYVGHVAGHVVAGTYDEFELEFIDGTCT

SEQ ID NO: 954551 - protein, 38 aa, Homo sapiens
MIPCIVPGDFCVFVIVSRTSNIRPPARLQAPHFWHFVG

SEQ ID NO: 954552 - protein, 38 aa, Homo sapiens
VLRCSRNSGFTWVYYVLYVSGHRTRSGRIYVLPTLRSG

SEQ ID NO: 954553 - protein, 44 aa, Homo sapiens
WTVADTYWRITYRVGNIYTYVSGGRTRTGTCVTYPFGPATTCPA

SEQ ID NO: 954554 - protein, 49 aa, Homo sapiens
AGLYRIDRLIALSRFRARRHYVSATWPDTYCRHVRTRPIDEFELELRVR

SEQ ID NO: 954555 - protein, 64 aa, Homo sapiens
DIPRLGKTGLSLPTTEFGPHYPSILHPERQQQLLWSIPFSFIEKKFAFIVHFNEFLAASGYVSG

SEQ ID NO: 954556 - protein, 112 aa, Homo sapiens
WRTRRTRGGDKMKPRLGTEVRQAARARMVSGPGESCKPGDARGWSASAPGNTHSGHYVSGHVAGHVAVSVCVLCARCVCCVCMCVRVLCVCVLCARVCAVCACVLCVCVCCA

SEQ ID NO: 954557 - protein, 105 aa, Homo sapiens
MQWALRNGVVEGITKRSLKAHTETDSPKHLQCPPLGVGLWVILDSSYSNPSNSCETEAPSYEDHILRKPDTQTKPSLRIPRFPKGFSTCSLSPHFTFPEHIFHEL

SEQ ID NO: 954558 - protein, 49 aa, Homo sapiens
GPYCCVTRGSDGWRPHTTPLSGIGFLADFGVGSGECLRAYARGTLYVSG

SEQ ID NO: 954559 - protein, 38 aa, Homo sapiens
TEEVLGSLHSNSARPEPGGPSQPDARVLCVPNTRYVSG

SEQ ID NO: 954560 - protein, 77 aa, Homo sapiens
TIDQRSEMRSLRITHITLYPHCESVLYERAVRHLSHGWSWRNESGLLSLTSWDRHLLESLTLAGVSMNIEDCAYVSG

SEQ ID NO: 954561 - protein, 45 aa, Homo sapiens
VYALTGRRIGHPSVLRSRTLSVAKVLVNVLVSRAHGGRGTESSMA

SEQ ID NO: 954562 - protein, 79 aa, Homo sapiens
GKYVALFQTISKRELILRRWALKLLFASTDFTALTVLYPRVVNRKTPVGFRRPGIASVFKPNVGTAHECKTSCDVRSTW

SEQ ID NO: 954563 - protein, 62 aa, Homo sapiens
MDEVVAGHVIGVLRCSRNRGYAVRIHKNRGGEKKGLGDKTCCVEFRGEYVRVRPQRSGYVSG

SEQ ID NO: 954564 - protein, 59 aa, Homo sapiens
ILPRIIYIQDKMTGTLENQFTCPFCNHEKSCDVKMDRARNTWSHLLYRWGTEVGTDART

SEQ ID NO: 954565 - protein, 33 aa, Homo sapiens
PVDEQKSHREGPRRVLRRCDFCYISGTPITCPA

SEQ ID NO: 954566 - protein, 55 aa, Homo sapiens
TRYRIDMIDSSFSIPVGWSVPGQNPRLVERFVWLIPDNERDSGMLTSYVSPTCPA

SEQ ID NO: 954567 - protein, 50 aa, Homo sapiens
WRTYLDRWVVWSMVLPEIRGYQLLKASYYGPYSSYVIGHSASELQGSTCP

SEQ ID NO: 954568 - protein, 83 aa, Homo sapiens
GHCPLDRFSANSVERDITAHCQSAPYHVYGFDPGPVSVLVVIVPAILQKCPVHHSELDFIRRTCVSSTCSAMGILSSLPGVVL

SEQ ID NO: 954569 - protein, 47 aa, Homo sapiens
LTFVPICPAVKAIIYQYMEEIYHRIPDSDPSSSKTMQIISTIRTRMF

SEQ ID NO: 954570 - protein, 62 aa, Homo sapiens
VLKNVCNQVEEPTITVMYRNPVIIEGWCCILHDPDDEWVKKKKARIPTLPTIRSLPNRDTNV

SEQ ID NO: 954571 - protein, 95 aa, Homo sapiens
CNILPMECNGMEWNVMVMVKELDINPQENGMEWNGKEWKGDNQNGLEYNEVNGIESNQSECYEMKWIRNGMECNGMEWNAMEWNQPEYNRMDTNV

SEQ ID NO: 954572 - protein, 40 aa, Homo sapiens
GTPPSTELHLHSNLKYPSKLYPFRFYGGFIAQIWLIKPLA

SEQ ID NO: 954573 - protein, 56 aa, Homo sapiens
MEPGCSDSVHKNNSGCFAETILSTRGVAEAVCLEGSPMGAESPHSHGSGHRRRGVG

SEQ ID NO: 954574 - protein, 94 aa, Homo sapiens
VSERIYSYPRNKINTTTLLEEEAETCQVVRDKPSRELHPSLNSTGNPKKGNLKSFWVGELGAFHQQGAVVKDIVENPSSLDRVFPLDILVCNMG

SEQ ID NO: 954575 - protein, 75 aa, Homo sapiens
EYPPEINTEQYTTFTSHKEVIATNGSLQLELQYLIIERQLRILTRFKQYISHYADINKIASFKLSSEARKKIFYT

SEQ ID NO: 954576 - protein, 125 aa, Homo sapiens
SLHVCKHQKLKKHIHQICTSHDILRIIHLTTKPHKKRTRTPSYMIGIRCSPVPYLATVHWIKGQPRQQAITSEDTDQYDLEALYDVTQCHVPHSLLQGGLILLEWPVQLLHNADRQHNIYSVSIV

SEQ ID NO: 954577 - protein, 88 aa, Homo sapiens
VGGSSTLYTDVHRLPRKTACGSWVGVPQALREHLKNPEIAQKIQKLMDVGSCCKFGDDIVIPPSLHASCSRIRRMDGITSCISCTSRI

SEQ ID NO: 954578 - protein, 34 aa, Homo sapiens
TGGKSMTTKPISVETPIVFMEMCPKMIELGTRAR

SEQ ID NO: 954579 - protein, 148 aa, Homo sapiens
SVSGCGQEYGKREEDDYQYSDKGRRARKTWKVWSRKLKSTKLTMRSRGTQVLIQDITVHLLCLHQCKATVENETPSRQASTMRTNKKHLDQCNEIINWLDKTSSTAEKEEFETSTERAGRELATPSSPSCTRVQEAWQEECPGVGGGY

SEQ ID NO: 954580 - protein, 112 aa, Homo sapiens
VPKTLDGALDAQSLSNVDNFLAKKTEESADARRQADMLQNEAQTLLAQANSKLPPAPKISAHSTHMKHNQSIHRSIKLKNSARLEGEVRSLLKGYQPAKWLCIAHACNRGGY

SEQ ID NO: 954581 - protein, 66 aa, Homo sapiens
VEKSLIGMTKVKVGKEDSSSAEFLERRRAALGKVPSEDCKSSYHVQDPDVREFLEKEELPRAVGEE

SEQ ID NO: 954582 - protein, 109 aa, Homo sapiens
MYLREEVTFYLTLLRFAKACLFLINKLPSIDQLSLQIMGGEAVRQHILSCSIHGWHQLNKIDSSSNCFCCFHLPSPSYKFAHHSQVTLFTESRWGGVVQHILYVDYGWH

SEQ ID NO: 954583 - protein, 66 aa, Homo sapiens
LCDYLFEDSSQLNTSEEINDYVNEKRQRKPEPAVSHIKEAQKFQELVKMVSSLAGRAPADTGWVVT

SEQ ID NO: 954584 - protein, 190 aa, Homo sapiens
KSTRNTSQIRTLSNSRGDREAFLPELVDESCEIRATAFNEQVDKFFPLIEVTQVIISRKAPEDSYSSGSQLFKIDDEMTFNNETSVMPCEARPSFTYGSALISPGMDDLLERRSKDSLVDIIGICQSYEDATEITVRSNDREVAKQEYLLDGHLREGGDCYTVGGPMLINLMVLDRPCWVSKEPESLISV

SEQ ID NO: 954585 - protein, 36 aa, Homo sapiens
DSEDPVKATAWLYLTYRRQTEGYCARTYVIDGLYAV

SEQ ID NO: 954586 - protein, 52 aa, Homo sapiens
CNSYPRCRALRIIVNAVFTIAVGTCTPYYRERDLGLDRRDWDKNDPTGDVSS

SEQ ID NO: 954587 - protein, 95 aa, Homo sapiens
GGALAVLSDGAALPRCCYVDGGYVRGVTAWLTRLDGLFVVGLMSWRVGYLISGAADTDIADTVVSDCVNGCCVGICSGVSSTDEQEGYNSYAHSA

SEQ ID NO: 954588 - protein, 101 aa, Homo sapiens
YVLCWETHPHSTGECIKTRLINQLPTGEVHQFLSLYFLFLGNGVKLYRPVGGRGHNLSSGQPPPPRFKQFWCLSLPGSSDNGCPPPHRANFFGIFIRAIQP

SEQ ID NO: 954589 - protein, 49 aa, Homo sapiens
MILGAEAQSPLVGLEADLLLTLLRPLHCMTKGGGNSQKNMDQDLKKCGR

SEQ ID NO: 954590 - protein, 42 aa, Homo sapiens
TDNTNLTYIPVLPMQSPKQTQLPFTLQISLSCLHSFLYFLTV

SEQ ID NO: 954591 - protein, 135 aa, Homo sapiens
YEAMQERREAENMAQRVRLLEDGGGSSPLGPPQLLLTQDFVAASGCRFFLVSPNRKRASSNNQDSKRRGHTDFNLGLFHLFDRRDLPYLSWVTKCSQFLLTILYFIFRPTISFAELMITSTGRGWYSWSKLLLTR

SEQ ID NO: 954592 - protein, 69 aa, Homo sapiens
VGDFISKRKKKYIDDHGSQIFMTDNNFKSLRLGAGVHTSNLSTWGGRGRWITGGQERETSQELETIQPR

SEQ ID NO: 954593 - protein, 102 aa, Homo sapiens
MKVLPVSRGGLDDRFEGPYRLGHGGLAVAFRIEKSAGAHCSLSDSLEVTAYIHEHKCGQTSHSEIFVISQGVVAYTCVPVTQEAEVGESHEPMTEPLRHQPG

SEQ ID NO: 954594 - protein, 31 aa, Homo sapiens
MADYYAEKPAPIKGMCWQTVKLRAAGVTYLF

SEQ ID NO: 954595 - protein, 41 aa, Homo sapiens
MSLNWTWLPPYSTEQVNKRYLYEEFCCAIILGLISETNDGR

SEQ ID NO: 954596 - protein, 71 aa, Homo sapiens
ADHRGVIGMKTVDYAEIIPKRNDLRLVCAGLPKNSPGCRYRLMLSVSWYTALMVPSPPLYPSLSTHQQFNS

SEQ ID NO: 954597 - protein, 62 aa, Homo sapiens
TEVWEERRAAETVTTGGIIFQTHLKEKYSKQQSSHVGSGPKGKGGETPSHVSVKVGRLGYSS

SEQ ID NO: 954598 - protein, 80 aa, Homo sapiens
YTHQRIYPYLVLVVHTVNLNIRAPGTEQGGVSLLEHPQGDNRSDLCKLKSVVTSIRGVKNHRAGCLPCMQHIKYTTKLTY

SEQ ID NO: 954599 - protein, 114 aa, Homo sapiens
ASGKSSVAVAGGRKYKAGVKKVLHYKDRVWVERSAAETVTKGGIMLPEKSQGKVWQATVVAVGSGTKGKGGEIQPVSVKVGDEVLLPVVWRHQSQSRCTRIISYQEMVTFLDSS

SEQ ID NO: 954600 - protein, 138 aa, Homo sapiens
MKQVHCGFHLKMKDSDQGQWLMLSTLGGQGRWVTGGKEFETSLIRTWRNPCLYEKYKKRLGGCGRYVPVVPAIWEAEAGELLEHQRWRSNESRSCHSSLGDRVRLSQKFFFLEFKMRKQREPFPLCGNTSWESLGRFS

SEQ ID NO: 954601 - protein, 71 aa, Homo sapiens
LESENLEILESAGTSEYFGQYPDDAHKKSYWSISDFGLLALGLVRIMQLVRVVQISFSKTLKYETLLVPRI

SEQ ID NO: 954602 - protein, 61 aa, Homo sapiens
PTLLTLGHAAGSEIEIWIPKHNRSLDNKVSQEYTMTQQYRNLRKLFFRFLSTMYEVEYNSG

SEQ ID NO: 954603 - protein, 57 aa, Homo sapiens
WKQCLVWWPKREGKVTIWAHGNLNLPGLKVILRPQLLKLAETTGTSHQAQLILVSRW

SEQ ID NO: 954604 - protein, 39 aa, Homo sapiens
IWITADQNITKVNSTEMDIKSDLVRPDGGGGHLYNVSRS

SEQ ID NO: 954605 - protein, 109 aa, Homo sapiens
QAAHITVDNKNNETQLESPETKTEHSWSIASKKKVLCDSESELIVFLNKQCQVRLIEDYLKESNNQYPKVKDKERILKSMENEKKEIMYNVSSDYIWQQTCQWKKARRQ

SEQ ID NO: 954606 - protein, 44 aa, Homo sapiens
RSGYGMKQMRRLEDWTTADFRTKKKKRKQVGSPDEPDSKPPYDS

SEQ ID NO: 954607 - protein, 45 aa, Homo sapiens
AAHDGTLSRPSFLGMESCGIHETTFNSIMNVCTWTSVIDLVRQPH

SEQ ID NO: 954608 - protein, 53 aa, Homo sapiens
LLSLENQLLLITADNATQINVILGAVFALVFLVSSPLACHMALVAPAPLNGQL

SEQ ID NO: 954609 - protein, 58 aa, Homo sapiens
PVQHGNRVCQVACVTCVAIFVVLHRSPHLGQCLTWWHTATGPQVISLCNTSHSSNSNH

SEQ ID NO: 954610 - protein, 47 aa, Homo sapiens
SPSENLDMPLSFSAVSILSSHKIANFQHNICSTSPHHSSLCSKSNAA

SEQ ID NO: 954611 - protein, 47 aa, Homo sapiens
VLQVARIGVATGRISLSFLTSTLISFSSSTLARLLFTILSLSVSIIG

SEQ ID NO: 954612 - protein, 109 aa, Homo sapiens
LPVLQPFYQIVHIHLIYSSAQCNLANSLPFYQRFPSPNSMVSSILCFCDLSTAVVPNLLCTRDRFCGRPFFHGPRGVVSGLNCSTSDHQALESHKECSHAQFAIGFVLL

SEQ ID NO: 954613 - protein, 53 aa, Homo sapiens
YRKQLYQVTVFSRQQCIVRTKLYYQCFFIVETHMLKFIGHNDKEIDIGVKEIS

SEQ ID NO: 954614 - protein, 68 aa, Homo sapiens
VQATSQTNTISTTYWLIENFSVDSGGHGGDMYLYHLLSCTHKQDHIGHCRKQTLEPALLQKQCPMGKE

SEQ ID NO: 954615 - protein, 108 aa, Homo sapiens
DLCPDQHADENKAFNFIGNFKESRIKTLKQFVGRTITGDEDMALPDTILEDKAQPKQWLPKGGSGSVKAKTDWSRAKVMATVFGEVQGILLVDFLEKPRKILLIIRGF

SEQ ID NO: 954616 - protein, 37 aa, Homo sapiens
FLRASRLYSANANGAKRSLSQLRELQIANLPYPPYEA

SEQ ID NO: 954617 - protein, 36 aa, Homo sapiens
PSDACVVQALELPADAEAALLEMTPGSYTGLAESLA

SEQ ID NO: 954618 - protein, 34 aa, Homo sapiens
  misc_feature (16)..(16): Xaa can be any naturally occurring amino acid
LEYPFSDRSPVMRPLXSYGGGGAIRETRSVSDQR

SEQ ID NO: 954619 - protein, 69 aa, Homo sapiens
  misc_feature (3)..(3): Xaa can be any naturally occurring amino acid
GLXLEVPSDRSAFFFIIIILIIVVIIIFCVSEVISLCTYTIYNGILIKVQESHLDLSTREKLVFFDAPP

SEQ ID NO: 954620 - protein, 34 aa, Homo sapiens
  misc_feature (31)..(31): Xaa can be any naturally occurring amino acid
PQRIPFSDRFSLIALSLDRVSLDRLPPEYEXKVY

SEQ ID NO: 954621 - protein, 96 aa, Homo sapiens
GLVRGRRPILYQHYSDFSVTLHVIFLSYQAFGIIYPYKKVYYSGEKEALGYHMVRLETMTFIGFLGFIGVSTPYIYRYRIDVDTRSIFHLRYHNHR

SEQ ID NO: 954622 - protein, 50 aa, Homo sapiens
GEGLHRSSQQFVNAMKSKVEKQNSLVLKNMLLHVHITEPPYSTTPRYIPY

SEQ ID NO: 954623 - protein, 36 aa, Homo sapiens
MWCVWNTPALVTLPIISNGTFKINKKRNGGPEAAPF

SEQ ID NO: 954624 - protein, 42 aa, Homo sapiens
PRVFRSLSCLDSCFRPSSLDMYAKMMCGIFMPPVSRREINQI

SEQ ID NO: 954625 - protein, 115 aa, Homo sapiens
ARGRLCTIPFIWQSSSGGLAWWMWLLIAFETLRSDLVFTTCVLLFGRLIKVDHLWLRRGVLIESQIMPLHSSPGLQSVTLSLNHNCYRLFIVSFLDPLLSYASNVHVSCGIAYRI

SEQ ID NO: 954626 - protein, 35 aa, Homo sapiens
ILATPTHAAQHNTTSTHQVIYPMYQHHTHTTLAHT

SEQ ID NO: 954627 - protein, 48 aa, Homo sapiens
RRQLHPPHPSSAQHAYAFPLLAQLICTHVFAGPIQSISIQAKHCMCTS

SEQ ID NO: 954628 - protein, 49 aa, Homo sapiens
CLACVISHTRIPIFGDYPVIIALLALSSQPRVFPVLPCQVLEGVIVSVC

SEQ ID NO: 954629 - protein, 79 aa, Homo sapiens
RSLAAIPFFAASYTQPLFIILQLDLTTTSPTAHQSSLSLTARSCGPRSALYQILHCLSHLLYMRQKVLDYCFFFQPLTH

SEQ ID NO: 954630 - protein, 54 aa, Homo sapiens
LVTKYFSSYYFMFTSLLIFKKLSMKSFEKEDTTLFFSRCEIAIMFLMDLNILVK

SEQ ID NO: 954631 - protein, 60 aa, Homo sapiens
PLIEYSQVSSVMRLGHWYMVAAGRQSVSAYHYTVCPHTLAAKGQGTVWSPARYLAFVQPI

SEQ ID NO: 954632 - protein, 137 aa, Homo sapiens
QKRKPHSHSEDALILVYCMSTATQELFHRLDGLSRNPHTICRLSDDNATLQHILSLAHKSASSCRCPLSRSQRRRVPSQEPVHGQSGHLRRFPRHSQSGSDLAELRCVNPLLVSSLVSFPIMMVFSREADRIISGHC

SEQ ID NO: 954633 - protein, 69 aa, Homo sapiens
IPLIGDEYYLILSKSTLDELCLPTFFLTWTCLRLMRSRSSSSFDALQRTAEMCSEDDWHDWQMPLASLM

SEQ ID NO: 954634 - protein, 131 aa, Homo sapiens
INLSVLLCQYSYAYTYLPSKRDIFLLVEIHTYTSNYDICKEITTCEETQDSVAQTPNVPYLGSRCGGCEEEYITKLRRIEEVREICNGYLIDCMQRVLINFCCNLCKEISQKPCSIKVIMNGLYQVDTAFL

SEQ ID NO: 954635 - protein, 77 aa, Homo sapiens
SHTRIPRRSSISSRCANWMSYNKNYTFLSAIFAVRFWYLFSHWDDCFFFLGDASRGLKFSSHLLSEILYHDRTYSSN

SEQ ID NO: 954636 - protein, 38 aa, Homo sapiens
HRSWQMVCPNIHCHRKIECRDDSNQAYGIPLLNQCMAR

SEQ ID NO: 954637 - protein, 36 aa, Homo sapiens
MARCNTRKHIPRTTTHPPDPKRPSITGIILFHYAQK

SEQ ID NO: 954638 - protein, 33 aa, Homo sapiens
TIFAQAGTTLKCAPCFLSRQPRSTYASLGGGEC

SEQ ID NO: 954639 - protein, 113 aa, Homo sapiens
YGINSFVMSLSLDPANISVLVIACTCCDSNSVCIYAERNFYDGMTDTWSVTDMREATRLYLPRTESRALNGHTPQFKRFLIRFTIHHSAKQPRDRQGYRFTIHFINGETLYIH

SEQ ID NO: 954640 - protein, 56 aa, Homo sapiens
VHKSKARKILTQAVRYTERPLPLGRRNTNKVVTSPLQAWPEGEEEELEGDEEGEDE

SEQ ID NO: 954641 - protein, 62 aa, Homo sapiens
  misc_feature (20)..(20): Xaa can be any naturally occurring amino acid
MAQAAECRAQVLDVVQNRPXRVPAVDVEDIGEAIFEDPSNGDLIGLICLLLLRRRPNSGVRL

SEQ ID NO: 954642 - protein, 92 aa, Homo sapiens
MVREIQSAVSAGVMGIDKFSEEVRRGMSEVQQVGEQLSQIIHQVQALAPRVLMVDEGMQAQATGAEQINHALVQLGDASSQTVEPLRQASFA

SEQ ID NO: 954643 - protein, 52 aa, Homo sapiens
WAKVNIQLGGKGKPGPNEGQWRDQNCLKKSSAGGNYGQVISTSFGGPEHQKD

SEQ ID NO: 954644 - protein, 98 aa, Homo sapiens
AHWDWVYDHRTSWAAAAYGCAGVSATIYFKVQKHDGHDEIITRVPLKKMVERIRKFQILNDELITILDAYLKSGGGEGALVEHVRCFQPSIHQSLASS

SEQ ID NO: 954645 - protein, 54 aa, Homo sapiens
ITAPAHKGMMRLLSFCELLRYCPIWVQKPVSGGRPPMKRRVDGIKGVSHVRLFQ

SEQ ID NO: 954646 - protein, 87 aa, Homo sapiens
PRLHVFVTRSLLGHSRRLLPYASPLNIPSPHSSPIDISYSPTRFLRSVPYLLGLLPHSFIYQPPYYLIILAMAIPVMSGRCDYGLSL

SEQ ID NO: 954647 - protein, 91 aa, Homo sapiens
WSSLARSPDERLSVNTGLTNEDDSLTIFGGGRAGPGSYTLLSARLGQLQVPGPVWPSQHGEVGLGPGLGLARCSVLGAVSGGHLQTSARLA

SEQ ID NO: 954648 - protein, 64 aa, Homo sapiens
MFGRTQTTTYLPSPKPIKIKNYNKTLSNQMNENLFASLLLPPTIPSAYPAACTVSFIFPHSIDP

SEQ ID NO: 954649 - protein, 69 aa, Homo sapiens
GRLLQDPLPVVAIRNCLEDRSLSLQEEFSRDVKALERFLQDYFDGHLKRYLKSDPIPESNDGPVKVVVA

SEQ ID NO: 954650 - protein, 37 aa, Homo sapiens
LVDLIAGSPSKSRRVTMPPMNNAVVCKQEADAAPWMY

SEQ ID NO: 954651 - protein, 59 aa, Homo sapiens
ITCDWDVYSYSLSSGTPLPLMIISGNHRTLVLISSSEVQSMKFAQRLAMQKSHGDLTGK

SEQ ID NO: 954652 - protein, 102 aa, Homo sapiens
MHHVRMHASHCSFVNLTVLLASKILLILKFKDNLSSRFHVKNKRARGWVRWLTPVIPALWEDTVGGSFVAQEFHDQPEQHIETLSLRKYHKNKIESLWRFHY

SEQ ID NO: 954653 - protein, 57 aa, Homo sapiens
LGHTHIRKPTTTLIHTHHTTINKPGYSNPPDDQRTVYTGFRHKTKTSLAHFLPQGTP

SEQ ID NO: 954654 - protein, 53 aa, Homo sapiens
NVHWLTFMPWSLRIRYHTEPLTQSGEWLSGRNSKLTSSEIIDLGYLELIRRDE

SEQ ID NO: 954655 - protein, 54 aa, Homo sapiens
GHVGQKVTLHDSLMEEAMPPLTGPAGEGTESTRTSLDVDIVMNHQLQEPSFTKA

SEQ ID NO: 954656 - protein, 102 aa, Homo sapiens
VRRRSTVVRVSLRLTLSRVTYAVTVLNLHRLQRASVSLCTLGIWSCLSYPEPGFPGPCNTQAALMPLGTWRSSQEVQACARNLWLSQSSKAGAVPLPPTDST

SEQ ID NO: 954657 - protein, 58 aa, Homo sapiens
FGLSLPQCSWWPTCMLIMPGSDLRAPCPPSSMAQLEHSEPIEAEPVALSPVPDLKSTP

SEQ ID NO: 954658 - protein, 55 aa, Homo sapiens
ASITGILSHSFYSKDHIIETQHIIHKRRKPIPGFLITNNNFPRIPLTNNNSPPAY

SEQ ID NO: 954659 - protein, 52 aa, Homo sapiens
MTHIRDPVECGVVFTAYEPPGSSLSLSLVQPEYQVRGALDDIFKNQQKGLST

SEQ ID NO: 954660 - protein, 37 aa, Homo sapiens
IIAGVTNSSQVPVAQFSHAQQTTNCSILFQCINNLPS

SEQ ID NO: 954661 - protein, 33 aa, Homo sapiens
PRLRNTTFWTLWIEGSDFFDSLLQKLQVTYKFK

SEQ ID NO: 954662 - protein, 100 aa, Homo sapiens
ALYGTHRKLWYSSWGLPLSHRWALGAAGDQVRLRGDIDLGHVSVLTHDWEMAVYLTGQCVSCQKHDPFFSFVDKYLNLYHPAPNLLLHHRFLDAVTTVEF

SEQ ID NO: 954663 - protein, 142 aa, Homo sapiens
MVELRLLQNVELDEYQSPSLSNALYSSEHALHPNESADETVKVDVHVFVCVPHGNDVIELAVEVESCVFDCFSISYLLMAPDWSVSYFFVSFLPGLNLVPEVVELLQVSFPEPSVIHERNHATAGLQCEPVCLQVLVFVRSI

SEQ ID NO: 954664 - protein, 53 aa, Homo sapiens
LAQVMKAGIQQTNTKHQNQSNSKRPQAAANSITFCNQQVPAPAAHQQQPTTSV

SEQ ID NO: 954665 - protein, 100 aa, Homo sapiens
LSTRGRKPYEMCYCQRSFRNQSRLAVTGEFTVVEKPYRCDQCGKAFSQKGSLIVHIRVHTGLKPYACTQCRKSFHTRGNCILHGKIHTGETPYLCGQCGE

SEQ ID NO: 954666 - protein, 43 aa, Homo sapiens
RGSPPHWICGDDNCPPSSFKYGVYSLPRWGTGGISISHFQGGE

SEQ ID NO: 954667 - protein, 42 aa, Homo sapiens
MADSRVYKAAFELRSFQFGSFQVGSFQFGSFQFGSFQVGSFQ

SEQ ID NO: 954668 - protein, 47 aa, Homo sapiens
MANLTQGEEQGYLRVTTVDSHTSDSDVPSGVTEVVVKLYDSDPITDN

SEQ ID NO: 954669 - protein, 51 aa, Homo sapiens
MLALGLLQCSEARTTGDISGGEAEPRAHDSDSTTLTEHTLTEHTRLKHTRL

SEQ ID NO: 954670 - protein, 76 aa, Homo sapiens
MAKAEGHETRGHLQIQNFILQNGLKVGAGDNVIVQYYLRGLRQGLHGTNEVHNGLRIIALQQVSRPAVALPANQHT

SEQ ID NO: 954671 - protein, 111 aa, Homo sapiens
MIRRRETITYTMLRCVIQEPTYRDNRVVYGGGAAEIILMPLAVSQEADKCPTLEQYAMRVFADALEVIPMALSENSGMNPIQSMTEVRAGQVKEMNPALGIDRLARGALAR

SEQ ID NO: 954672 - protein, 149 aa, Homo sapiens
MRHIKLVNAFTKQQTTNGKINWEWYGLKQFGEDRSLNGKLEDTKYGKAKKRLEKIGKLEDHKHTFRRKKINLNLTSRQQKYQRQARKQKAKGKMYNLRRKLEDRNKIANARYRQEFQIATETTSYDKSRRSIEDRQISRQTSDTIALTK

SEQ ID NO: 954673 - protein, 91 aa, Homo sapiens
LYIVEGISSGYTYCTDSHPDSILTSKSFLHSTVHRPTCVDTNIKATPITDRTYYKDPLLCTNMQLENQRRETNESKDATKNQRKDLKSSAK

SEQ ID NO: 954674 - protein, 133 aa, Homo sapiens
WDQLLHSPFSHPAQDQPRSPVPSAIFRPIPYVLIAQTNPVAGSQSLSSGAVATTTSSAGDHNGMLSVPAPGVPHSDVGEPPASTGAQQPSALAALQPAKERRSSSSSSSSSSSQLWKGELCKGSSAKGSSAKG

SEQ ID NO: 954675 - protein, 65 aa, Homo sapiens
MVSSSIAGLLVQEMSSCSRFKTESNHGSSPNDEVTDGEDESCDSAGGHEEDEDDEEKNCSHKDDS

SEQ ID NO: 954676 - protein, 71 aa, Homo sapiens
QPNDIASRHCFGCSLDQWRSLMELLVNNGADVNYQSKEGKSPLHIAAIHGRIRHAPRSYIQNWQRDLIVPT

SEQ ID NO: 954677 - protein, 50 aa, Homo sapiens
PYRDIQYIYGVSLLIFNIETKKEKHIIFYRVLNRDTMPYGSVPVFYINLL

SEQ ID NO: 954678 - protein, 38 aa, Homo sapiens
NLVDILAAGQAHRALSQSGRVGGRMQSSSLKQRLSTTR

SEQ ID NO: 954679 - protein, 105 aa, Homo sapiens
  misc_feature (79)..(79): Xaa can be any naturally occurring amino acid
  misc_feature (85)..(85): Xaa can be any naturally occurring amino acid
  misc_feature (95)..(95): Xaa can be any naturally occurring amino acid
  misc_feature (99)..(99): Xaa can be any naturally occurring amino acid
MRVQHVPWFSAGFDRHITIFSPEVRLYQVEYAFKAINHGGLTSVAVRRERIGAGNCFTQKKVPDTDILDSSTVTHYIQXITENIXLCDDRNDSCXADPXVQRARY

SEQ ID NO: 954680 - protein, 68 aa, Homo sapiens
GWCVRKSRLSEYGMVPSHSEPGLRRSDSLLSFRLDLDLGPSLLSELLGVMSLPEAPAAETPAPAAGCH

SEQ ID NO: 954681 - protein, 38 aa, Homo sapiens
LKNKVVRLLVAKSARFLKSRKGVGGYRQQDGCHSAAIG

SEQ ID NO: 954682 - protein, 52 aa, Homo sapiens
  misc_feature (47)..(47): Xaa can be any naturally occurring amino acid
MSAIELRAALTPVQIFPLFLCSRFFLSTFSPNGFGPTVGNGNLIYTXSSWAG

SEQ ID NO: 954683 - protein, 73 aa, Homo sapiens
LCKLLSQGPNEMYKYNEENYGVKTTYDSSLTSYTVPSEKDNQKSIVRESCGAAPLAREIESSTQYRLRAAIGR

SEQ ID NO: 954684 - protein, 34 aa, Homo sapiens
WRKYLYQKIMFGKRRKIREANRLAEKRKAHDSGE

SEQ ID NO: 954685 - protein, 114 aa, Homo sapiens
MNIDAKILNKILPNRIQKHIKKLIHHNQLGFIPGMHGWFNICKSINVIHHTDRTKDKNHRIISIDAEKAFDKIQQPFMLKTLNKLDIDGTYLKIIRPIYDKPTANRLPLGVPSS

SEQ ID NO: 954686 - protein, 62 aa, Homo sapiens
MVLPAVNPGFEHWVSKGWSPCLLLRRLFTASEVARLAEKGQVTHAHVQSPLTNVGIAPCCHM

SEQ ID NO: 954687 - protein, 79 aa, Homo sapiens
MQNDVVTYLDMTDVYILTTRSHVQEWEVLYIKWRGGRRLRDIILFFYFPEGWQVSQQREKVLFAHGLLGSDISQLQAAI

SEQ ID NO: 954688 - protein, 41 aa, Homo sapiens
TIAWVTRDPVLLTSDSCRQHEDVIQHCQRVKPIIDLVHKVI

SEQ ID NO: 954689 - protein, 57 aa, Homo sapiens
GEYSRSAMLSRKVMYNEDVLSALNSNVEKKEEGDGSRYVLQNHVGGDNELAATGASY

SEQ ID NO: 954690 - protein, 151 aa, Homo sapiens
MPRVALLLDPSSTLRTSGVSRRVLLSRVRPGFPYCSQPNKLTARYRNVTGCFAGDWACRMDSRRMRRVQVVQADGVDPVGIRQVLAGFANSAAAVPRLLDNVIRLLIGGAIQRFNDLLGHQFEHAASKVFIGVNAIWQCQQAGTKGSRSSE

SEQ ID NO: 954691 - protein, 61 aa, Homo sapiens
GKGPELTMQKIGQAKGGTRAQAKPWGQVQIYQSQDPHRTEPEPSQYLPSANWLPSWEASAG

SEQ ID NO: 954692 - protein, 81 aa, Homo sapiens
RDPAYVELPKSRFESGLPGQCTQGLSGHYWICSCLTVGNPKKRGLPDETQVEDSIPNMCSAVILYTGIAFKKNVALSPILK

SEQ ID NO: 954693 - protein, 70 aa, Homo sapiens
HVCHVRKHMVPTPRHAFTCETAEKSFKRSMSLKGALTAALQGEKPYRRENCNERFQYKYQRRSHMSILIG

SEQ ID NO: 954694 - protein, 118 aa, Homo sapiens
MRGEYALALMRVSTTTDMITTFGASAECPTNSLNASSDITTSKAQPLLIKTCDFAVCFQNQEPLRVLGNTRRGFFPGSRLRRLRRRWFRFESSGRRRRGEHCARVRVGMGISGAVPLK

SEQ ID NO: 954695 - protein, 40 aa, Homo sapiens
MGYSPNEPLNFHAMYQPFREMIHEAQQAMDIQFHSPAFQH

SEQ ID NO: 954696 - protein, 37 aa, Homo sapiens
HAWSDRSRSSVFCPGAEALPNATTLHCPGSVRLLSLD

SEQ ID NO: 954697 - protein, 66 aa, Homo sapiens
QPCEWQGNFGARGQGQVNQGFELPNDGFFSLSADVGIQESSNVAGAVPDRTSIYFRQNGQPDPRET

SEQ ID NO: 954698 - protein, 79 aa, Homo sapiens
YRASNESQPPAAGAATYVRLEKQVHGQGTKEQQAQTESSASSILEALKENYKVHPAHKVAMILDPQQKLRPVPPYQHEE

SEQ ID NO: 954699 - protein, 76 aa, Homo sapiens
MSAPCARSRYAFRLWQLVNFTFAYHFSRRTDFGRPRPGMHFSAVAPLLKVSGYQLAFNVLNFFSRNLDNVLVGKYL

SEQ ID NO: 954700 - protein, 125 aa, Homo sapiens
MRDVMECGVCRSIRRHGPERIGEGGCILKTVQHVEHAEAFTGVRRNGEHAHLHTGFQLLVGIRHVLRQRLLAGREKQQAPLLHLSARLSFIIRPGFAGAIAEHVHRLADNARVAHADFIQYQEAV

SEQ ID NO: 954701 - protein, 33 aa, Homo sapiens
LLDIEHFFKDICPPFTVLHLCFSFFSCTYQEKK

SEQ ID NO: 954702 - protein, 61 aa, Homo sapiens
CIGVYETMTERRFGYENFNDEGDLGVKGDERRNVKERDVEPRIPYLQTTLDLDIAAETLRC

SEQ ID NO: 954703 - protein, 59 aa, Homo sapiens
ALRADAVGGHVERSSAGSAIWLRQQQRRDARQQFQRPQRLDDVVVGAGAQAFDQVVLAG

SEQ ID NO: 954704 - protein, 38 aa, Homo sapiens
PTNDGEIQNQDGPDLSLFLKKGYVREDVCAGSVREDVC

SEQ ID NO: 954705 - protein, 67 aa, Homo sapiens
SLCHFMSPWYSLSSSLAKVHGVTAPGSRERANINTSLCESFSRTILRVQVEVVLELFEPFKRVERLR

SEQ ID NO: 954706 - protein, 43 aa, Homo sapiens
MLATIYAVNTLDRYVSSSYTYSLMELRSCYGYIRSVTPGLVNM

SEQ ID NO: 954707 - protein, 135 aa, Homo sapiens
  misc_feature (90)..(90): Xaa can be any naturally occurring amino acid
MIDILKKIEEGVHRGAVVTNPTKNHEERVRSLALLSGVEDPSITAELSGVGMQNVAWDPTIAVALGVGWVATPLDLTPKPRNLHMPQDRXKKWQKAKKKKKFRRGFTNHQYFCPYFREPPDSYNNFDQGLKGKMA

SEQ ID NO: 954708 - protein, 58 aa, Homo sapiens
RAHILEKYALFMVFMDHHASIFVLCNSLYRPGISGAECNLLPMPSAEPVWLSGCQAVS

SEQ ID NO: 954709 - protein, 36 aa, Homo sapiens
LENKYSAKVSAQLVKEAAAIGYKRKRTKEFKKFLVP

SEQ ID NO: 954710 - protein, 57 aa, Homo sapiens
LLTHTDVACKVERYKNNKNSSVKKAKGFMLMQSSTEFVKPQYASLSLPAVAAHASNI

SEQ ID NO: 954711 - protein, 46 aa, Homo sapiens
MLGLLERQAIFYSSPANPGCGRRSNAMSVYFWVPRKSRIRSEFHNR

SEQ ID NO: 954712 - protein, 44 aa, Homo sapiens
GNTSSPGPHNTIIFAGYTVIVAHVQLSILIRPDLAGDLQVLSYM

SEQ ID NO: 954713 - protein, 128 aa, Homo sapiens
DDRKAFVERHALQDDQGNRLNVTLSRLRKTMESRLWKLSGGDIIEVSSVMGHTPGVADNHYLKINDEIKVDGATFVGEAFPDKLRGINVIPTPPGGCKDSLYGSLAPKDGVNHCSEFIHCLGCPSYAI

SEQ ID NO: 954714 - protein, 113 aa, Homo sapiens
DLALVSARSWVIYYDAGHCLYIGPGFQVTGFAGAHANAEHHDVHQHHKPEHQPEQATEIYGGVNLDWKTEVDISYPLNGGGRKRGVLTPPVLKTATSAETRNNVAMVGKRQAC

SEQ ID NO: 954715 - protein, 33 aa, Homo sapiens
SALVYENSNKALDKAVLKSKDVKLAEAHQQDVC

SEQ ID NO: 954716 - protein, 131 aa, Homo sapiens
MAHELYLEYPLLSSYRSDQMTSRRYRSPFLIFSGLSGLVRSWLVSMRMPAPPYRRAQLVASLTMAGSCRRSSSARITSASSHLRVRHSRVMSSAVVVNDRPGKPAGLIRSIQLLEVFRNPYWNWLCERLAF

SEQ ID NO: 954717 - protein, 168 aa, Homo sapiens
MRTKTRPEDKRMATQEVIEIYLYSKSGSLGNIEHLHRRDGMHIFAPSAYPDATHRARIKIIDTNGEFQLLIRLAGIVSHVEALPVSVEPGFGPGVHRHVGRILGVEIATDVARRDAQAAAAGEEHVGVVLTHSLLGGKRLEALSFTVVVPGLEGIFINSSPIKARRLS

SEQ ID NO: 954718 - protein, 110 aa, Homo sapiens
VIHSWASIRYKTLLKRDTCTRVYIAALFTIARTWKQSKCPSTDDWIRKRWYIYTMEYYSATKKDDIMPLASNMDRTKESHPECNEPDKTKKIPYDITYNWNLISSTNEHL

SEQ ID NO: 954719 - protein, 33 aa, Homo sapiens
IPSPTPNLTASTTSSVITSGPGFYHVSHRLTFC

SEQ ID NO: 954720 - protein, 41 aa, Homo sapiens
TVMQQTPLVQPLCSYNLKPSDIHYTLPTPSGSLVPKNYTAS

SEQ ID NO: 954721 - protein, 80 aa, Homo sapiens
AHLEPVYCIQQLQHSSTTYKREMAFKRYVRRKQARNVPGFTDYCDLNKDKVISLPELKGCWVLARRGRSSKEQKTQGQVE

SEQ ID NO: 954722 - protein, 39 aa, Homo sapiens
TDFIHTSGVSRPTSAFKRCWFVIGITADDSSHCFITLTH

SEQ ID NO: 954723 - protein, 112 aa, Homo sapiens
  misc_feature (33)..(33): Xaa can be any naturally occurring amino acid
DHHRDWAAGTCWPYIFTCTGAPRLLGTNEIPTXPLRSRFSKQGSSRADVRDHQLAVSRLKILSEDVDGDCREQEPTYEGGDIRIGSRHRVTRSSERAGWDRAGPLYLDYDCW

SEQ ID NO: 954724 - protein, 77 aa, Homo sapiens
LRYNDDIRGLGCGCRHISALLQLLGLKDQVNTVGLPSEPRQGLEPHRPRILEETEWPPCCAMLAHCATLFISSRVAG

SEQ ID NO: 954725 - protein, 114 aa, Homo sapiens
PDPAHKWWWAYSILRSQYLSKVSPRPPCTGVIVPLAAERWNSRSSVDTVPAAPLCRGVSSVARLRGTEAEAPQGGRMFLIFVQCWAPQEGKGSSRTEEISELMAGAGPELVVFA

SEQ ID NO: 954726 - protein, 59 aa, Homo sapiens
FVDAQPVYNVSAGVLKVSIHIWVIFSLVGLGVQWEPRVSQHEGAHSGDNTTAQLLKRLL

SEQ ID NO: 954727 - protein, 55 aa, Homo sapiens
IAATTFTAGDEPFKRYVKREASPEMLPVFHRYYCDLNKDTVISLPELKGCLGVSK

SEQ ID NO: 954728 - protein, 72 aa, Homo sapiens
MPLGKLVHATGFLQNAIVHLCLRDSEIISLVSCQTLHKSGRNPKYTYHRLHGGIPLVEDILLGDNLNLLDIL

SEQ ID NO: 954729 - protein, 123 aa, Homo sapiens
ASRIVTDTRMDMSVSNCCAAGTKDFSQVNEQHVPGSSFTARVTGDDSMLQCPTVKVGSAADIPINISEADLSLLTATVVPPSGREEPCLLKRLRNGHVGISFVPQETGEHLVHVKKNGQHVGS

SEQ ID NO: 954730 - protein, 57 aa, Homo sapiens
ANHLNAPSLPNKLSPKCSGTFSGSANATSTAHRTHYKHSVHAAFDHHHGSSYPHHAT

SEQ ID NO: 954731 - protein, 126 aa, Homo sapiens
MDCAKTFSSFNTARLTLLAFLNHSKAFHNALKYARTKENSNMQRQILMRTGRNSPCEGSMPGQARPRPALDFYSVLNKNKTVKHTIHHANAIHARTLGASSQNEVTCVQESMYENCHMSSNSFVAV

SEQ ID NO: 954732 - protein, 64 aa, Homo sapiens
LIQISLSVSCLRYRIEEEEEAFTSLLKSNGKLQTHASECDSLKFYPLGTETVSSFKPRDIPNII

SEQ ID NO: 954733 - protein, 59 aa, Homo sapiens
PAEALVWCFAQSVRHSGGAYNATLSVHQLVENTDETYCIDNEALYWHFASRTLKRLCSG

SEQ ID NO: 954734 - protein, 173 aa, Homo sapiens
ENRIPRIQLTTDVKDFFKENYKPLLNEIKEDTNKRKNIPCSWIGRINIMKMAILPEVIYRFNAIPIKLPMTFFTELEKTTLKFMWNQKRAHIAKSILSQKNKAGGITLPDFKLYYKATVTKTPWYCYQNRDIDQWNRAEPSEIMPHIYNYLTFAILEKMGKTEEKKTKSTIKD

SEQ ID NO: 954735 - protein, 115 aa, Homo sapiens
ECVSLLKSEETPGCSRCSPDALRGPPTLLHHLLMSSYVAGYLDGGSGPPTDTLAVGDHGKAMPSGAIPVPASGHDTLPQQRLGQAPSRGRDDVLESPAASRPLPEGHPQGLPGGW

SEQ ID NO: 954736 - protein, 76 aa, Homo sapiens
MDMVSNQHPMVWRTEGSSYERNTVGNPRSATSVMAEPRIKGKPAITETSISIISKINDVQADFQKPGPFSLLTLVG

SEQ ID NO: 954737 - protein, 43 aa, Homo sapiens
DSTDPIPLFVMGANDEKYDNSLKIISNASCNTNCLSTPVQGHP

SEQ ID NO: 954738 - protein, 42 aa, Homo sapiens
VGRHDVKDLTKILRNLRLQIKHFESLEAELKKMKSKNNDRSG

SEQ ID NO: 954739 - protein, 37 aa, Homo sapiens
TDSNHCSSRSAGLRSVDTWLRVLAKPQNTAEVQKVQL

SEQ ID NO: 954740 - protein, 47 aa, Homo sapiens
LILNHCSVNSHGRDTVLAYSNSVRRTPRLKSSGVGSIESQNPNWGKS

SEQ ID NO: 954741 - protein, 55 aa, Homo sapiens
LRSYTVVIAMGEYVLLTLSNSTHDSKLLSGSIRGQNRTGQKQQPSRNNLLSQFQL

SEQ ID NO: 954742 - protein, 99 aa, Homo sapiens
SHGCNMRSMTTAQDISNASDSNAETLAKVIHDNFGIVEGLMTQSCITWHPEDWGWPSVKLCVMARGLQEQFIPGLYWRLARAVGKVIPEAVNREAQLAL

SEQ ID NO: 954743 - protein, 37 aa, Homo sapiens
THCTFGSIKSKARLQVLKCCCRRGFSQLSLLYVKRSY

SEQ ID NO: 954744 - protein, 54 aa, Homo sapiens
MRTYDNSLTIISHASCNTNCLGPWARSSHDNFGIRGSDSLTTVPMRIHCHPRRT

SEQ ID NO: 954745 - protein, 48 aa, Homo sapiens
RPLFDIGITRQSLLKSEETTWCSDVAQDALEWALRRLFTTFLNSQSYL

SEQ ID NO: 954746 - protein, 42 aa, Homo sapiens
ELHMKVTLEVGKVIQQRRQSKGLTQKELGTKINEKPQVIVDY

SEQ ID NO: 954747 - protein, 53 aa, Homo sapiens
  misc_feature (1)..(1): Xaa can be any naturally occurring amino acid
XLNWTGAEEKKSERRDKEIELVIHRLEATWAAKEESETGCRRAAYKRYYGDKY

SEQ ID NO: 954748 - protein, 43 aa, Homo sapiens
DLNQLSSTSPGSEDLDGRNELLYDYFTLACAQHSARARWDVQV

SEQ ID NO: 954749 - protein, 68 aa, Homo sapiens
  misc_feature (55)..(55): Xaa can be any naturally occurring amino acid
HAASKKLVIVGMVLWETCLLIVFSKDQFRRSTSLLVFENYIADIEVDGQQVELAXWDTAGQEDYDRMR

SEQ ID NO: 954750 - protein, 50 aa, Homo sapiens
QIDVETSKKWAAGQNEQHSITKNTANAGPGRQSELHLRQGDPGRWARLIQ

SEQ ID NO: 954751 - protein, 83 aa, Homo sapiens
LRGDGYVVVTKQSSSQHACRDGRGAVIEQEGRSIATGDRNVKAQSQTDRVDPGTLRGYYNQSEDGSHTHPEEMYGCDVWPDGP

SEQ ID NO: 954752 - protein, 66 aa, Homo sapiens
  misc_feature (59)..(59): Xaa can be any naturally occurring amino acid
ASYVVTNQFVSRQRRREYEDGAGRMDRAGCADIRPDTRFQTNDRLPSELRNWRYTTERXRSHIIQR

SEQ ID NO: 954753 - protein, 46 aa, Homo sapiens
AAEHQVYKHFTDIVYNWSLGLFKDEDGHTVAGPMGNFFYAAYPLTE

SEQ ID NO: 954754 - protein, 34 aa, Homo sapiens
KLIHLSSRAASLLQLEFSRLEPTCCIRKKLVIVG

SEQ ID NO: 954755 - protein, 85 aa, Homo sapiens
VATLDDTQFVRFDSDASSRERSAGAWIEQEEAEYWDRADTRSPRPTHRLYRENLRTALRYYNQSEAGLTSSRGCTVFDVGPEGRL

SEQ ID NO: 954756 - protein, 56 aa, Homo sapiens
MKCVKYLLYVLLLAFCCLCSGTDMPWVVGAQLVPESDHNPGGYPCALLYATWYINT

SEQ ID NO: 954757 - protein, 65 aa, Homo sapiens
STDVNTLGILSYRDYPGLSAMGHTCIHKAYLNVDSRHSISKQSAHPAKRSLACMEAAGLAVTQGH

SEQ ID NO: 954758 - protein, 74 aa, Homo sapiens
RRIGFGSEQLDTNDESPVAISLSYIFTYISQPLTKDVNLTGITFIKLATTGTRLAQIQTVGTNRQRLNRVLMGP

SEQ ID NO: 954759 - protein, 36 aa, Homo sapiens
LEDPLGALETSDTEFMPAGNPFCGKRYDKRLRMLNG

SEQ ID NO: 954760 - protein, 47 aa, Homo sapiens
QQKSTDPSYKVKAPPDIEQNEKATSAIFFFRVLAAKSVINHVFPAGV

SEQ ID NO: 954761 - protein, 45 aa, Homo sapiens
VDIVTVLRVWVSFNSNAGLKGTGSLRVDYSLLDLFLPLVAAARTR

SEQ ID NO: 954762 - protein, 127 aa, Homo sapiens
PGSSEANLPNPYLSYPQYLPLLPIILFWISNMLIFILFLCTLHPSLSLLSLRLTLTPVGSANYLGCTAARLHRQPPLLQSSQNFILICYLSQHNSHKNTCALPADRVRLISQTSIPYKATPFLPRHG

SEQ ID NO: 954763 - protein, 53 aa, Homo sapiens
SSLTDPRWWALVSLASYGIAEAGELLAIRVCGDCPCAEIVPLQSSLSHRVGTE

SEQ ID NO: 954764 - protein, 73 aa, Homo sapiens
VLCTIPGSSEGVWDLPYREKHLNLVHHLPLVHNYVCHEHFCELVIVLQIENISLFVPLILDTIIFMVFSSSSS

SEQ ID NO: 954765 - protein, 42 aa, Homo sapiens
VRLGALNSSRGYYSILMNHCQYPSWSERACQSCVHFYPYLSD

SEQ ID NO: 954766 - protein, 70 aa, Homo sapiens
YNLLFSMTAGPCESLRSSRSHSGSLLSDLIIAELKVCPTPSESPLSLLLLLSDRSRDGFRRSNFLIVVHG

SEQ ID NO: 954767 - protein, 41 aa, Homo sapiens
DSEDPYEREERNEIKAQTSGNEIERKRRNGEEEGNGLTEEL

SEQ ID NO: 954768 - protein, 43 aa, Homo sapiens
DGAMNQCEPMVGCNNETGRRTNAESKEEDNFETNYTSFLYNLR

SEQ ID NO: 954769 - protein, 99 aa, Homo sapiens
FLLRTVCKAWTSLTDEVTNLNDYRESVFKTPAQLYHTWIAMTERTRKHLRSDAEVDGEDAAGGRRWAQVQKQAESNSIMKEKMIKIPDDLQKTELFSIG

SEQ ID NO: 954770 - protein, 107 aa, Homo sapiens
LNSLAGGVSPISSNLVETRAFAMILGRGMINGTILSNMASTDTPHGPPWTSVQLTGRNTHICPLQASSEGQSLSFLDDMLRSLESGSTFAPLRVGGIYLAVSTGPAQ

SEQ ID NO: 954771 - protein, 121 aa, Homo sapiens
DYRTEPRYHLHIPIQHDYMESILENPVHDLGSMGPSRLPFHGRTRLEGIHMVRSSPAKTQAYPQPHISKSTETEATTVVTVAREATDIEKQALPTEGTRKANQGLKAILKPSICTVRVGPL

SEQ ID NO: 954772 - protein, 92 aa, Homo sapiens
LLCLWSSLAGSPGDTYEQYMPKTSPAQYAYYYTLLIQLLDQRNKLPLGLHAQSYSIVHFNNRVYDLDVGSGHPDCAAAIKGSFVQRLMSYVI

SEQ ID NO: 954773 - protein, 94 aa, Homo sapiens
LRQLTIKAEGRSPDLCHLVPTWIRQLCLSSYRNLLCLQRKDEETDLERFRDMLKTTLLDGDFTDVAQAGCDLHELRQSVRLEPPNVLGLQGVSH

SEQ ID NO: 954774 - protein, 69 aa, Homo sapiens
CLLVVSARIPGDTYGRHTLSIGAWMATSDRIYKDNTIMTLINRKQFIVYITRIETYNKKHYYETTRNIS

SEQ ID NO: 954775 - protein, 102 aa, Homo sapiens
MDNRSDLTKHTYAITPMKRPMEEDGEEKSPSKKKKKIQKKGTGRARWLTPVIPALWKAEVDGSPEVRSSGERSSQLDFLGRVKTWRTFLSRKRIVNAPISTL

SEQ ID NO: 954776 - protein, 91 aa, Homo sapiens
MKRPMEEDGEEKSPSKEKKKIQKKGTGVSHCAWPCCSFLCVHVYFMFSSHLYVRTCGIWFSVPVLICLDNGLQLHPCAAKAMISFLKKYLY

SEQ ID NO: 954777 - protein, 34 aa, Homo sapiens
RTPRNGTCVGYPVSRVHDNASGAPRGVEGVGNLR

SEQ ID NO: 954778 - protein, 103 aa, Homo sapiens
MVFIGVNLTFFPTTLSRPIRKVCSQESEVMSVRQYVVWKYVVRKYVSQPYVVRKYVVQTYVSGVCSQKYETDVCSRTYVSEVCSRKYVDGTYVDGQYVVRKYV

SEQ ID NO: 954779 - protein, 136 aa, Homo sapiens
IFRDYILRDYILPGLHTSGTTYFRDYILPGLHTSGTTYFRDYILPGLHTSVTTYFRDYILPWLHTSGTTYFRDYILPGLHTSVTTYFRDYILPGLHTSGTTYFRDYIYRYYILPLPTYFGRIHTPDDQNTAATYMG

SEQ ID NO: 954780 - protein, 89 aa, Homo sapiens
YIRVTSILPGDYILAGDYILPGDYILPDYILPELHPSGLHTSMITYYRTTYFLNTYFRNTSFLTTYFRTTYFLTTYFRTTSFLTTYFRG

SEQ ID NO: 954781 - protein, 44 aa, Homo sapiens
RFLPCIYRDTTRNRAYLTNWTVGTNDWYTTRRYDFGLDDDTRQL

SEQ ID NO: 954782 - protein, 39 aa, Homo sapiens
NCKANSKPALAQPIYRHLQQTLIEGYKVSASYPTLRRSG

SEQ ID NO: 954783 - protein, 35 aa, Homo sapiens
MSQRVNCKARSTAKRVNCKGASTAKTRQLQQRVNC

SEQ ID NO: 954784 - protein, 35 aa, Homo sapiens
YKSPLSPRKITVTLQVTKRDPGRWKQPRAGSPLET

SEQ ID NO: 954785 - protein, 65 aa, Homo sapiens
MQSYTILDITVIIQDLYPTTSFSCSKVLVDADFYSLSPSSDFHACCQADPSWFGNVSVTEQQEEL

SEQ ID NO: 954786 - protein, 52 aa, Homo sapiens
LCSEGLTIYKGQRWYEDRVWLSVVCKPIYVGAHVDGGNMDVEASVRKEKSGG

SEQ ID NO: 954787 - protein, 71 aa, Homo sapiens
MRGTATILPLAGTAPALPTLLSPKTYPLGLDDYPRVFTPFSNRGGTWYLLMLWWHCVARCADSGCADASWV

SEQ ID NO: 954788 - protein, 63 aa, Homo sapiens
LLNPASMVPHTFVITVTGGEDLRHIDIAVQLKGALAPEVLVFQVDVILRLGAETDVFAANQRE

SEQ ID NO: 954789 - protein, 62 aa, Homo sapiens
ADGSTQSSSFTELKTRRLELTGHITTKEGILQHKSFRNLHAASPRLVVRITSSPYLQSGMQH

SEQ ID NO: 954790 - protein, 111 aa, Homo sapiens
YAAQTQDSHYIPHNGVNQQEAITLLNIYALKTGAPRHTKEIYLALKRELGSQYQSIAGDFTHPIFSMGSDLPYKHHQQQTPSDFNLLTHDQMDPIDIYSTFHPRAAACPIL

SEQ ID NO: 954791 - protein, 38 aa, Homo sapiens
ENIRSGGHQRIASHGHVGIAAYQLAMRYKENSKVDSIG

SEQ ID NO: 954792 - protein, 133 aa, Homo sapiens
SAITMEITTKTLKCFSLKSVYQCSNLNQSTQHTKAQKNGKAVLKIIQGSLSMSILFLFLIPKEAILSIKRLISVMTCNSIEFNHHLSKYLTFDFVRSAGRKDQRARSKFRQAFIKPAGCFITDKGGSSSQLTE

SEQ ID NO: 954793 - protein, 36 aa, Homo sapiens
EDPPQMESPQMESPQSGIHLACWFMRLGASRAGDST

SEQ ID NO: 954794 - protein, 105 aa, Homo sapiens
YYKAVLGLDDEESASKSVKRIYYLDVHVHGHSYCQKVERNSVTDKQESTAGNRNYLWEGPDIQVSINFTIAITSMFTEIRETMITEAKTFQLRDEESYLSKNSED

SEQ ID NO: 954795 - protein, 63 aa, Homo sapiens
  misc_feature (29)..(29): Xaa can be any naturally occurring amino acid
  misc_feature (44)..(44): Xaa can be any naturally occurring amino acid
  misc_feature (63)..(63): Xaa can be any naturally occurring amino acid
MISAEKRRNTRFYKAPGKFTKAKKLEGVXAVRPDLMMAAKPCFXSHRAETQHVPGDSNCGGVX

SEQ ID NO: 954796 - protein, 39 aa, Homo sapiens
IWLYEHPNTFDTVDYTEEKSFGMNTGKVHKSKQTDKALL

SEQ ID NO: 954797 - protein, 84 aa, Homo sapiens
RESQLILDCPLISEFPGNSYLPVGMARIYRSKNDTKSPLSCRLQRIMNEINEDMTEINLTDIARLNEVNGLNINNFQIQITLHI

SEQ ID NO: 954798 - protein, 32 aa, Homo sapiens
MSRERARPQDELIIKGEEWENEAHPPRMRLHA

SEQ ID NO: 954799 - protein, 38 aa, Homo sapiens
CRIPLSSVPLAPQPRHSHSVLILRFLSFTRAVITSSPT

SEQ ID NO: 954800 - protein, 85 aa, Homo sapiens
RASLYYRPFVDMPSDDQCCPLVQLGLSCVSRILYLSIVPTPYLACAHEMYKVWGTLTALLAVVVCCHKRAGQAVTHARPGQVSAH

SEQ ID NO: 954801 - protein, 51 aa, Homo sapiens
MQQGNSTATHLRGQALHSGLTKFFSIMPGMTATMAARPNSALHKGLQLRVH

SEQ ID NO: 954802 - protein, 56 aa, Homo sapiens
MGIPRTEENTEGMDGPHLSNLRTEENTEGMDGPQLSILRTEENTEGMDGPHLSIPR

SEQ ID NO: 954803 - protein, 40 aa, Homo sapiens
CRYFTLQEQIEIVASGDHLAHKAYTIYLSAVCAYSYPELI

SEQ ID NO: 954804 - protein, 40 aa, Homo sapiens
MLQMAFHDRVLDHPTFEDMQVLDVREKQRPKFPEAWKLNS

SEQ ID NO: 954805 - protein, 38 aa, Homo sapiens
MYKRKPCIRHATIKTKAELNLKEFYTSNDCFVNWAPPE

SEQ ID NO: 954806 - protein, 63 aa, Homo sapiens
APACVANNLHTSLHAGRMGLSMSVVTAHWIWNAMQLHPLSLSKTTNSRARYSKKRPVKSHVLM

SEQ ID NO: 954807 - protein, 66 aa, Homo sapiens
  misc_feature (19)..(19): Xaa can be any naturally occurring amino acid
MAIRTGARRVTVVRIWILXPACQCAKATGKRVVVKIREVGNMLFYWNLLPTDDVLHTDPSSFIFPS

SEQ ID NO: 954808 - protein, 54 aa, Homo sapiens
MLRYVVLSIDRCCLSTSNNPLLDMLIYRCRGTIYKAQIDHDDMRGLIRHLKDGD

SEQ ID NO: 954809 - protein, 56 aa, Homo sapiens
DGRLRYNCNSEIHCYLAASTLLLYTLKVRVNEVLLWGLEGWNLILGVLFNVRSGLA

SEQ ID NO: 954810 - protein, 54 aa, Homo sapiens
KDSELCLTVAINQHLYHGDLMRRRESGAINPDEFEFIPTAPDSAIPNNGPLEHS

SEQ ID NO: 954811 - protein, 120 aa, Homo sapiens
MILPLLYSTYAIAWSRWSLSLKDAMCRENTRTPVQTQRHGPAGTTNNESAPFNTSLCKIGCLGEAGTSRQSQQVIPLLAHKSYPQLPTLIKYYGVTNLPGPSPKLHTSHLERSSYRYRAT

SEQ ID NO: 954812 - protein, 41 aa, Homo sapiens
VKIDIIEDPLLLYDIVHVGIGVHWAERARSPAHQEQTDQST

SEQ ID NO: 954813 - protein, 33 aa, Homo sapiens
FSRRSDERRHRVRLKPAYGSSRQRTDSALPPSG

SEQ ID NO: 954814 - protein, 172 aa, Homo sapiens
DYDLQIPDEHRCYNPLTKYWLTESNEHIKQILHHDEVGYISGMQEWFNICKSMDVIHHKNRIKNQNHMIISINGEKAFDTIQHPFMMKTLSKIGIQGTYLNVIKAIYDKPTANIILNWEKWKAFPLRTGTRQGCPLLLLFFNIVLEVLVRAIKQEKEIKGTQINEEEVGRVC

SEQ ID NO: 954815 - protein, 42 aa, Homo sapiens
SQTRGSLLLSLEKEMCQKMEDDGSTVLGLVEILCREGPCVGV

SEQ ID NO: 954816 - protein, 105 aa, Homo sapiens
MPMLSTLDNRARFCLKQIKTRQNSRRSPRTNPSSHWLRHTVPDQEPKNKCNKTKDTYIRLTLNYKASTQQAACLSHTCKDPKDAELCLGRETPEKTLVAVQSEPD

SEQ ID NO: 954817 - protein, 95 aa, Homo sapiens
PETNSSLDDECKESPEQQQPYAKKSKIAIIREKHTALMTPIVFALEHVRSITADPEETPHEKWFQDKYGDAIKNALRITEDSIEPSQAWEQLDSI

SEQ ID NO: 954818 - protein, 33 aa, Homo sapiens
MLHKSKEIFSNTVAIQKYKLVQSSQDKQYGNRL

SEQ ID NO: 954819 - protein, 68 aa, Homo sapiens
IIDLYRGSVTSLRSIGLSEDVISFYVTEKIDGKLLVQLTDEILSEDFHLSTLQVKQIMQYINGWRPKI

SEQ ID NO: 954820 - protein, 84 aa, Homo sapiens
SHANPVWILMELCPLGAAEVILASTDIQFGSRIFDTCYAYQLSTALASLESKRFVHRDIAARNVLVSSNDCVKYRRLWIIPIYG

SEQ ID NO: 954821 - protein, 63 aa, Homo sapiens
DAIVNLGVTCAVVLRKLRSSRAHLHEFLEFTGVWDWGLMNGISHKLSPRGDADYCLVLVNLSF

SEQ ID NO: 954822 - protein, 48 aa, Homo sapiens
LILRALFYCTEKPQLASWGMRAEMIPKAFESSVKSGVYSRNPFPAIYS

SEQ ID NO: 954823 - protein, 69 aa, Homo sapiens
DLVPSLFTHEMVALLLITRCNSSTGANVLLYYVVLHPCPPPYPCVANSYLRTNISAQYNYIYLQYEESL

SEQ ID NO: 954824 - protein, 59 aa, Homo sapiens
ILEDPLYLRAPDVAKISLEVIHGPLVREPTVSNTLLTTPDRLLANIISHNYYSYPTLST

SEQ ID NO: 954825 - protein, 86 aa, Homo sapiens
LDSNFLLLIVHSNRTGFLMLTERKILGSIRLLQRPNVVGPYGLLPPFADAIELFTKEPLKPATSTITLYITAPILALTILFYYDTA

SEQ ID NO: 954826 - protein, 45 aa, Homo sapiens
HAMNCLKRRRILRYSTPYVGSLSPDSIALSLHLTNIPRLTITVLP

SEQ ID NO: 954827 - protein, 44 aa, Homo sapiens
CGRLYTDPPDFPGRTSLLDDLASWTRTIRSLAKYKRVLLGPLPP

SEQ ID NO: 954828 - protein, 126 aa, Homo sapiens
  misc_feature (86)..(86): Xaa can be any naturally occurring amino acid
RIPLYREKCGLRSNYPCILAALWQKPLGTEEMRVAYVQKCKAQIILSRHPLPVCCQPSKKHVKATPSFERTEKLEKRGTLKGGLRXLPEHSAIQDILAWVLGTRTLAFEASVVRSCCCPVVASPEP

SEQ ID NO: 954829 - protein, 90 aa, Homo sapiens
DPPVIRGASITWHHRPDMSVNRNSLLEESSETDTDVAGQWIEKAENPESMVFAKAKRKSISLMSAYGTGTVALTCYPCHFGRLRHEDHEV

SEQ ID NO: 954830 - protein, 36 aa, Homo sapiens
GSPMSLVFGNVLRVALECRAEGGVAPKTRTVRDITP

SEQ ID NO: 954831 - protein, 70 aa, Homo sapiens
LDEEEETENQRGKRLVPILSLSWEERWVHHTVGWCIFACLHLQLHWHHGTHVYNLSDAIWVARLDALDLS

SEQ ID NO: 954832 - protein, 33 aa, Homo sapiens
ELGPTSSQTSGRWCGERLHVIVMLTRWWRMVSA

SEQ ID NO: 954833 - protein, 61 aa, Homo sapiens
SSLTPQVLRRDPICDYNPCSRCSMPTGAVRQCHISMLLITFLTLKASSSLPPSPGYSSPGY

SEQ ID NO: 954834 - protein, 49 aa, Homo sapiens
CIGELYPGEETKLTRTQSAFSPVSFSPLFTGETVSLVDVDISQRGLTSP

SEQ ID NO: 954835 - protein, 66 aa, Homo sapiens
VHNRPQGYILITILAVSQARIYERSSQICFIILSRGFQYSTPTNSFLMTCNWLRYPRLTPHYLPYW

SEQ ID NO: 954836 - protein, 73 aa, Homo sapiens
VVEGILTDIITDKLYNNDFSVNLYAQDIQVSSSGHLLVDYDPLYFQTGFEMVLHGCSLPGRKALGHLDLGRDF

SEQ ID NO: 954837 - protein, 98 aa, Homo sapiens
YYGHAHEFPSMTALSLAITLICIPVTGHQKLGVTITSSMMAKQGLHLSSLSTLFLVFRLHCFSAGRMTHFFVISYPTWPFQLLESPLCDADRAIDLLG

SEQ ID NO: 954838 - protein, 79 aa, Homo sapiens
MSSMNLLEQFRFIRAHVRSRKRDGDLYILAQNFFYEEDLSLKSYTEYKSVTYSDSSESKIVTLFFTLCAQTPHVCDLLI

SEQ ID NO: 954839 - protein, 161 aa, Homo sapiens
YKLLEDKLKKKHLMQKLANWQMSFIYSTCKAKVSKNPEKPKNRQVRDALYTHTRGQGPFHWSSTFLFFVHQNQHALTTLEKVWGEGSLRARSSHNATPFVPATALLETYPTAVNQKTAKASGTKLVTNALLIIVHMWNLPFKPPFQGENSHYYILPPFFNL

SEQ ID NO: 954840 - protein, 49 aa, Homo sapiens
IPILLHNEFDYITLQGAAKAKTRQTPAPPYYQHNALAKPFIRKLSTRAI

SEQ ID NO: 954841 - protein, 92 aa, Homo sapiens
QLDLHLGNLQANCLSQTCYADTQAFTPSPKILKHVLRNFKVDGKVSVNGETVHREDEKERECPTGGYLPDPVTSVPEWFEVCGPEVHRVSTG

SEQ ID NO: 954842 - protein, 30 aa, Homo sapiens
MRKFKRKSLCKQPPRSDLNYPRIHDLVIND

SEQ ID NO: 954843 - protein, 79 aa, Homo sapiens
CPRNGNVTRCFGVLEILVLPPFVTCSNSTLPLHYHFLDFFLVFIFRHIILQLVAGGKFHRSATFGLLCSSLAPALNQRF

SEQ ID NO: 954844 - protein, 36 aa, Homo sapiens
IPPHIMHKSAPYRRLLLGSLLFIAVIALLGWDTLKS

SEQ ID NO: 954845 - protein, 37 aa, Homo sapiens
HVDREIYRCGASMIMALISTSHWLNIVSGSSKRYGSE

SEQ ID NO: 954846 - protein, 31 aa, Homo sapiens
PYRLDENWILYDTTDNQLSCWTEKLQSQTCT

SEQ ID NO: 954847 - protein, 107 aa, Homo sapiens
SRYLFSLQSQISFSFFFGNRVSLLWPGRELQGLISASGQPLVPSGVQVILRASASAISGDYGLGAPSAQLILVLPVRRWGFLHVWVRVGLRTPRPQGDPPTFVQPIM

SEQ ID NO: 954848 - protein, 76 aa, Homo sapiens
IWLDEGKRDTLVPVLKDTRIELVRDKFGDSRKDAGPKNLVQVGAGSKSSPCALTQPLIIVQQLIFGNTEQSTAFVN

SEQ ID NO: 954849 - protein, 59 aa, Homo sapiens
VESTLPVYPSYELSPGLYSCPAQKNKSAPCPSIIPSHYSLSHETEKPMTPSCCLLDETM

SEQ ID NO: 954850 - protein, 103 aa, Homo sapiens
MRLENRRKAISKKNRDLNRGIQFAWLDPWQALMGILWMRCEGELKRGLWIKSKKKSRSLPSSMQPSDGKETPGRSWDSLSGDAEPDAPLHLVPQTQLDGVGVA

SEQ ID NO: 954851 - protein, 112 aa, Homo sapiens
MAKQQKLLVHLHRRRSSMLILTIADQLFPTRAAIWLMLPIHSAPTDRGVIRRVLLPSSAPDIAETLRLVLGWAWTYVIVAELIGASSGIGYMIINSQALMATGQIIFGIIVI

SEQ ID NO: 954852 - protein, 50 aa, Homo sapiens
SSVPPSGHAAKGMFITDTMSSLEKYDDGRVMLGDAYPKEDMKHGRVISCS

SEQ ID NO: 954853 - protein, 54 aa, Homo sapiens
LVEPTNDVNVRGSPVATKNVESVDAVGDGRREHSKYSAGLEEGKIETQKIVISS

SEQ ID NO: 954854 - protein, 69 aa, Homo sapiens
YWVIRSHRPVWESCMGKPDSGMERTTAHFVLQRLGSTLTNLLLEIIDRYSTPRMPWHDNCLCSLREGGS

SEQ ID NO: 954855 - protein, 48 aa, Homo sapiens
MLPFDGSSRTFRWKQLQAGEEGGPYSSFSSMGASTAACSFACSSSKRS

SEQ ID NO: 954856 - protein, 78 aa, Homo sapiens
  misc_feature (66)..(66): Xaa can be any naturally occurring amino acid
  misc_feature (72)..(72): Xaa can be any naturally occurring amino acid
  misc_feature (77)..(77): Xaa can be any naturally occurring amino acid
DHLGTECVIEDGKCCSFINLATSFFFHKILSSFSFRDIFLLSRFTRVFDVTLFGEQHLSLFCATLXLPGRTXYRSSXI

SEQ ID NO: 954857 - protein, 54 aa, Homo sapiens
  misc_feature (3)..(3): Xaa can be any naturally occurring amino acid
  misc_feature (23)..(23): Xaa can be any naturally occurring amino acid
LCXGQVEPSHIAEIRTLTKTIAXYPPQSSAGPNGYSLKDEDVLQKLPVCTTGTL

SEQ ID NO: 954858 - protein, 89 aa, Homo sapiens
MDGIKISQWLGLQDFDLIKKFFGARARYAKVLPGAVERRMTKFYAHEKLVKEKSLVHDDGGYLTWVRDMRKHGVLSQAIQQPPFLGRDL

SEQ ID NO: 954859 - protein, 88 aa, Homo sapiens
  misc_feature (49)..(49): Xaa can be any naturally occurring amino acid
LRTVTEAVTTVTNDEAPEYDTGRCNSEHFVHERRLVDVQNVCFQEKVTXQGKRCSGNLLQEQLQHAHPQELARLTNGSRYPQLCIPGQ

SEQ ID NO: 954860 - protein, 36 aa, Homo sapiens
MSSTSKSPTITRDKHQAQQHWQLNNAYAYATTPHGE

SEQ ID NO: 954861 - protein, 70 aa, Homo sapiens
VDGSSLRAGMLARKGRLKILSVFGPGPSLRPQNVTAGGRAVATHNFCHVLSTSPTELGSRNSEYGEDWKA

SEQ ID NO: 954862 - protein, 38 aa, Homo sapiens
EHTHRLYKVLFNMICLSIYCYMSDDVLMCDIILQAVKV

SEQ ID NO: 954863 - protein, 70 aa, Homo sapiens
  misc_feature (64)..(64): Xaa can be any naturally occurring amino acid
LEDPGRKTWRSCVLGQVEPRHIAEIMNSSLDQSQWYLPQVLCWTQGQILKDEDFLQKAAGGTKXQLVLRS

SEQ ID NO: 954864 - protein, 38 aa, Homo sapiens
MKLKCGPYNEDERDIEDKKSDSRDTEVTDELDSRAARS

SEQ ID NO: 954865 - protein, 36 aa, Homo sapiens
IPIISLTNGIGPRYYIVGNQELTAMIHDGTGRGDIR

SEQ ID NO: 954866 - protein, 65 aa, Homo sapiens
YEAYWEAQETYNHGRRLRGSKQIFTWRRRRERETAKGEVHTHTFKPHQILWELTHCHENGKGEIW

SEQ ID NO: 954867 - protein, 33 aa, Homo sapiens
MRGDSKIPSQLYKKHVSLNVVFTVLSIAIIYGP

SEQ ID NO: 954868 - protein, 105 aa, Homo sapiens
LFSLTPTNIYKHEHHPEKYGLIKMNYIRQQGIILEKEIYDLSDREFKIAMLRKLKEIQDNSREIIQNSICINLTTKIQRTKSEILRVREMQWHILNERIRDLLSN

SEQ ID NO: 954869 - protein, 53 aa, Homo sapiens
  misc_feature (15)..(15): Xaa can be any naturally occurring amino acid
LTAGSAEEKKCFEFXPLLTRHDVTTCFKLKNLNVVYDSRTKKYNAILITCENN

SEQ ID NO: 954870 - protein, 139 aa, Homo sapiens
RWSSKVSNNSGSSSDFKSSNNSQPPDNPELQKIHIFQKSMPFRDNSMSSNEDSKLFQLKSSSSRHTPDLPATYWIFHTKSRLFQRKLYALPTKAMSSRKSTSSTGLQVFQTIHVFQKILVFPYIYSFQNIRVLQEIRVF

SEQ ID NO: 954871 - protein, 35 aa, Homo sapiens
MPATTQGRSNIHQIKSKRQLEPYVEPFIHGPIIKD

SEQ ID NO: 954872 - protein, 40 aa, Homo sapiens
MQIVMALHSKAVGSSMLPGNAQDVDWVACRIVNSFMQSVS

SEQ ID NO: 954873 - protein, 34 aa, Homo sapiens
CCQSLDCKLFKEQRRIFSVSCNFSKVFGSTLYPV

SEQ ID NO: 954874 - protein, 76 aa, Homo sapiens
  misc_feature (39)..(39): Xaa can be any naturally occurring amino acid
  misc_feature (59)..(59): Xaa can be any naturally occurring amino acid
DTSLSSVSNHRLREMHHAVTMLIRVKTSDDQTSCHHLLXKKDAEHASRCKLLQLLCSTXLKVVSFLLFFDILRTYR

SEQ ID NO: 954875 - protein, 65 aa, Homo sapiens
MRTPPESTTCITTCVTPPESHHLSHTYLSLNCLIMSERSFDFNSTHLRIYLSGSVKSKDLSDIIK

SEQ ID NO: 954876 - protein, 36 aa, Homo sapiens
SHVNMQYPTTLASFWLELPLSDYSPLIIRCSSLSLT

SEQ ID NO: 954877 - protein, 68 aa, Homo sapiens
  misc_feature (21)..(21): Xaa can be any naturally occurring amino acid
TLEDSWQAKQDNTTCEGIREXFIRSIPLQKLWLPPPLEVQLQSRKIFPLGFLFDTPLSLDLTTGEKPA

SEQ ID NO: 954878 - protein, 39 aa, Homo sapiens
RKGPADRGRRQELHGGLKELYKRPGWLLQNSLQSVLHVL

SEQ ID NO: 954879 - protein, 44 aa, Homo sapiens
MAIEEAGKTVGPRTQQLGAGAGGPLLDQHPRKQCPRALPDQSVH

SEQ ID NO: 954880 - protein, 105 aa, Homo sapiens
MYPQFRELGAAYAMDPKSDAGIYWTGLFGSNKVERRPNPANNDGVQIDNEIKVLQGDNCAELNAVIPGLLLVGLTLQSKTIRSKQGVNPIMNWLQGSSEMAERVR

SEQ ID NO: 954881 - protein, 50 aa, Homo sapiens
TTNTFDVRSAWHFGQFLASRTAGVGLPIRPSPLKCGIPRGFIKVQSFILR

SEQ ID NO: 954882 - protein, 41 aa, Homo sapiens
KDPPSAKHKMIAPRCAIAAGKLAMRGPSAAASNTLSLACSR

SEQ ID NO: 954883 - protein, 67 aa, Homo sapiens
RLSKKATEYGQKIIADLNKLTLDLVANGNLNSKAFSKFSAHSSDQAKLLRVLTALDYMFEHKDKDQS

SEQ ID NO: 954884 - protein, 32 aa, Homo sapiens
  misc_feature (1)..(1): Xaa can be any naturally occurring amino acid
XFVNHGDSSSPSPRRIHPVDEHQEERRSQQSG

SEQ ID NO: 954885 - protein, 118 aa, Homo sapiens
DDECTSVESWPVSPGTSIEPETIPSTPVKPQLIPVEPQSSIRPDLPPTAPIAVAIPDPDAQSSRRKISPAAEAAALKALGDATPDFTAFVQPRKKKKSVLNNMNRIRDAVARQVIPVC

SEQ ID NO: 954886 - protein, 146 aa, Homo sapiens
SALDDECVKMQTSRKVKASTASKYPIESIVGQISLVFYLPEDVHVGATRSEVLFAWGAPRSYVGDNTDGSLLWLYEGVIGKEQTITENTQNSLFKKRSFHMLVNNTYTSDSLSGSNSSVGYVWLSLKHGKVTHLGMIAGHGLASFC

SEQ ID NO: 954887 - protein, 84 aa, Homo sapiens
AELCAREPTAYARTTGDPRRSAKPINSASFMLMLPDPSKSANVGLFENLNDNSKSLQMNAPYSHCCYRARRNVFQFIFSFLHIR

SEQ ID NO: 954888 - protein, 130 aa, Homo sapiens
MSAAVANIDLSLSVEFTDNTSCSIWVDELYSCMKARLRWISLNERVLLARGDALDLNWQKPLRIYSVREVPVPVLLMVHRTNRVLLNTTCDAFYVEIDELKTLVEPGKVLTDADSLEAYGKDWTKHFAPA

SEQ ID NO: 954889 - protein, 149 aa, Homo sapiens
LTKCFPDSVLASSIASRPSRTERGVCSVRNKVAGSEIPVNFAEIVFMHQRLLEKKARSFVDMWKRLANAFGEQFCTHLVGSTLVNRNNPSTTLSSDQRWIGQTQAAVEGSQFAVKIHHCPKLRIQPAFDRWFSNHIDLNPFATGVSCPE

SEQ ID NO: 954890 - protein, 56 aa, Homo sapiens
DVRRTVRRCAHDLHRPLCGGLVVAVLHHRRFAAGFLLGLVPRPQDFFLVGAGADAA

SEQ ID NO: 954891 - protein, 218 aa, Homo sapiens
MWYPGCERNAAYRTRFPANLDADSFQFSLRLLDCSHALRGNASWDALRTASKGGRRASRAAFPRRAWERSGPWILTQGPFALRQCLRRFGFQLAQRTVQRTEQRLEAGGSDVFIDPHTMHRAFAVHAQFNIGRRLGIGTRTNRVLVVVHDLHANRQAGHQGFQRTVAFAFPVQVGFALTPAGNFDLDKAVAVFFLQAMADQRIRRVGLQVFRCGRRRS

SEQ ID NO: 954892 - protein, 98 aa, Homo sapiens
PLLRNVSTQRVCPSGPGCSRSSSARCALRQAQLKPTRKNATGEDRKGNSIKASTSIADNPAPGGNTGNHRNASNPSANANIPVFMDHPFPVIHSVLAG

SEQ ID NO: 954893 - protein, 90 aa, Homo sapiens
WKLPPGVQTHEDSLTVRLHRTQHRKTSTTLGWLDKSLYRVTESKESHDSHGHQQLSSRDGVDLSDKDSTIYLVIPAESGEELMDSGSSGL

SEQ ID NO: 954894 - protein, 55 aa, Homo sapiens
MLICMGCFEDTISGIRGVSKPSGLGKMVDDHDGGPTFSRQINEGKRHPSSWRVIE

SEQ ID NO: 954895 - protein, 56 aa, Homo sapiens
SRTSQEIWVYAKCLPDEDGPEFPLNCSQYCQDNPTAQPFPKDRCYSFTNGIHSCVT

SEQ ID NO: 954896 - protein, 76 aa, Homo sapiens
GARKATKADTEGKTLIDYLMPGRIPHTFLHNKQATEIRIPLLKDELWTLDSLFLKTSHETKISYSKKPQPSTYVCS

SEQ ID NO: 954897 - protein, 33 aa, Homo sapiens
KRYQYETEKVLAAVYKALSDHHIYLDQNPTLDR

SEQ ID NO: 954898 - protein, 45 aa, Homo sapiens
TTPIASIVTGVEEGRLIFDNLQEVLLPEPHLARHPGYSSSRSTMQ

SEQ ID NO: 954899 - protein, 85 aa, Homo sapiens
NDTVQREKMVRYLLVSAAPDGGGGLHMEDKSTGVGTALMYVSLRILGVGPDDPDLVRARNILHKKGGAVAIPSGGKFWLAVLNVS

SEQ ID NO: 954900 - protein, 159 aa, Homo sapiens
RVHDEEVRDVGCCVPFVAKTPKVKGNTSHNDKWDRIKLKSFCTTKETVIRVNRQPTEGKKIFAIYPSEKGLLPRIYNELKQIYKKKTNNAIKRWAKDMNRHFSKEDIYATNRHMKKCSSSLVIREMQIKTTMRYHLTTVRMAIIKKSGNNRCWRGFVTT

SEQ ID NO: 954901 - protein, 46 aa, Homo sapiens
RTILASKVSALLLHPAQASIAHSRIGLTGLPIVPATAHNASARVTQ

SEQ ID NO: 954902 - protein, 45 aa, Homo sapiens
TDVVFGYTTAMAIEAVSCGMGVRVEVLVSVLVGFAMAAGLVLPVN

SEQ ID NO: 954903 - protein, 35 aa, Homo sapiens
PEQSMAIEEYPEAWGSRVEVLVSVLVGLAMEVGLV

SEQ ID NO: 954904 - protein, 66 aa, Homo sapiens
SIPWVVYAWPYIVGGAIGGDVDRRVYRLQNMFLYRRYEGTPGPLSYEAVASYCAGEQVGGFSCTMS

SEQ ID NO: 954905 - protein, 74 aa, Homo sapiens
SFRQHLLSGDSPDSIYCTGDFTGQRDPYIYCTGDFTGGNIIPINIITIIINITIIIIITTIIPISSSIIIITIM

SEQ ID NO: 954906 - protein, 118 aa, Homo sapiens
MPGSLAWSRYTSRGSRFRGRYIELSNEVVRLIGVYRYTEQAPLEGYEDTDQSSFECQAVARSVLASSCVDLTVEVYGLNIVGYSNPSLGLSYCVSKYVNATIVVYFVSTVVCNNSGEF

SEQ ID NO: 954907 - protein, 39 aa, Homo sapiens
MAIEEYTDSIGGIRRLSLGECYGEVSDGRRIVAAGTNLE

SEQ ID NO: 954908 - protein, 40 aa, Homo sapiens
FYCLCTLSANVMVNGKPVNLGFGIQLDKKIMTDYAPRAPK

SEQ ID NO: 954909 - protein, 36 aa, Homo sapiens
TGTTILPPSIPTKTLTKTSTPEPHASGYSSIAIYCI

SEQ ID NO: 954910 - protein, 35 aa, Homo sapiens
GNARLAIEEYPEAWGSGVEVLVSVLVGFAMEVGLV

SEQ ID NO: 954911 - protein, 104 aa, Homo sapiens
IVRIKSGKRNMSACVKWVLTIIPVYDYMQNVHGKEIEQKKTTVKVPGKRPPRATSACAPISSPKTNGLSKDMSSLHISPNSDTGLGDSVCSSPSISSTTSPKLD

SEQ ID NO: 954912 - protein, 90 aa, Homo sapiens
MIDVNAKQDFLALYSLLRSCIIVVQMMILYPSRYLSRMVWVYAQSLAGYNKFLENALRDTRQLDTLGTYSYGMPVTPWDSGLVSSCPVKS

SEQ ID NO: 954913 - protein, 35 aa, Homo sapiens
GKEINSIELCPEMDITYMTTKQTKCKGIQLRKNSL

SEQ ID NO: 954914 - protein, 72 aa, Homo sapiens
MCFISPGPLEVIGQDRAVVLVFTPSVQISRLKNTIKSLKQQKKSKWNISWKKNVISFPRDMTAEFGGHSDIE

SEQ ID NO: 954915 - protein, 68 aa, Homo sapiens
SISDLHRLTFEAIYVFQEFLHFTLGDQPGFRYITRRLCARVTGRDCWKPCEWISLRKARRKRKVGKSS

SEQ ID NO: 954916 - protein, 61 aa, Homo sapiens
GTVDLEVKEGDGGYDGGDYAGYVLFFVNSSTYGPIWVKYSRLSGGLGLSTGTRTGGMRISS

SEQ ID NO: 954917 - protein, 68 aa, Homo sapiens
IVSRERCTGYDRCGMSRQVVTSQSSGDRSEPKFGSVMATMALAGRDHQEPCMFLIAIYKAIKVVCLEK

SEQ ID NO: 954918 - protein, 142 aa, Homo sapiens
HRHWDTHIFQHQHGDAHYSSTDKGHRHGTLTIPALTRGTDMGTLTIPAPTRWHRHGYTHYSSIDKAHRHGYAHYTSTDAVDAHYSRTDKGHRHGEAHYSSTDDGDAHYSSTDMGTLTNTSTDTGTLTIASTNKGHRHRPLEV

SEQ ID NO: 954919 - protein, 73 aa, Homo sapiens
MQYSVWALIGSRLSQPKRQETAKASLKLRGKLLSPHPSESLLEPPGELCSLDRPAAIGHLPSLGPQHRGAQVT

SEQ ID NO: 954920 - protein, 76 aa, Homo sapiens
PCDPLLTWLGNDSTAQTTWTLSGNVTKSLPASALSLMIPGDMFAVSRLGSPMSPHSLYSDRSSSGDSSPSRDSSAA

SEQ ID NO: 954921 - protein, 49 aa, Homo sapiens
MKGMGGDGDDMEIFMEEMREIDEENLGSYQLQELSSVSIMGELSQITID

SEQ ID NO: 954922 - protein, 37 aa, Homo sapiens
DRRHMQILHSHATDRILEQLPKEFEMELIQAIPFQIH

SEQ ID NO: 954923 - protein, 105 aa, Homo sapiens
PENRSRSVLIPGPLTYCQTETSRTILFPSLLIFLPPQVLFSSPQLQMTSLSNLHPLCGSFPTNIRIRTNLSHIQKRILPPYFPLEVGSSESQPPSLLTWVPSIES

SEQ ID NO: 954924 - protein, 35 aa, Homo sapiens
MKGGLRWTRKYLHIKTREKHCQKLLGDDCIQLTEL

SEQ ID NO: 954925 - protein, 107 aa, Homo sapiens
MLPNDYWLTRSVLHVHFTYAYRLYRRPLLTRPYERRTHEDTDNRLKRSLQTMTDGVTTDRFFLESTLSLNRPLDDEQDLPAPRIHTTYDRALLLRLKMNGELNQLKV

SEQ ID NO: 954926 - protein, 47 aa, Homo sapiens
RTHTFFHLIISENLTKYGRLFSQFGQGHESIFTGVKGSVVGTFVMSL

SEQ ID NO: 954927 - protein, 108 aa, Homo sapiens
VRREVREGMQSQLGYTSNKIKTDKNSVGFSQLECDQQQCQPAPQVTWASDGQKRQMRPGQQAQRQHANTGRGNSCGMARHHCLGTAFSTQTHINTRGSSTESTIAGRA

SEQ ID NO: 954928 - protein, 62 aa, Homo sapiens
DVWARLTQRLGGPRRLDHVTVTLRRYDGTTDDTRRQTLSTLRRRTLTLTLTHTRTTNTGNGD

SEQ ID NO: 954929 - protein, 104 aa, Homo sapiens
GSSAQECVCPVGTGEYRQALAALVNPSRKRHESRSLSYSSMLRSLTTGSAVILRLAASCLDLILPGDSTRLNGVIWSSDTEIRGGSWSQLCDLGQLLGVKEQAV

SEQ ID NO: 954930 - protein, 43 aa, Homo sapiens
ALAKAPACDLQQWRAGYRVIVFFSQAFSYNASGVTAARNSSIH

SEQ ID NO: 954931 - protein, 50 aa, Homo sapiens
  misc_feature (3)..(3): Xaa can be any naturally occurring amino acid
WWXLVTVNTTPGGYSRTTHDTDDDTGHTTSRTTLPRLRGTRASTFVHHWS

SEQ ID NO: 954932 - protein, 52 aa, Homo sapiens
TLVQKAGGFGGGNTRCLQDEVYLFSEVQWPVPEGESNSGEIIEVRDGNCYYT

SEQ ID NO: 954933 - protein, 48 aa, Homo sapiens
MDRAGSHNPKRINAGTEKQMWPGLDDSCLYSQHFGITGIRGILYDVDP

SEQ ID NO: 954934 - protein, 32 aa, Homo sapiens
LFMELRRQDVLVVNNNAQQETRTDSLGNFSLK

SEQ ID NO: 954935 - protein, 37 aa, Homo sapiens
ASGGNAASGRACSHQAGHAAIRQGMQHPGRGIPLEVA

SEQ ID NO: 954936 - protein, 60 aa, Homo sapiens
SARNPRQYDIATVSDTAYRTCNVISSTFASRANNTYTNSFSVLVSVPLQDSAASLARYNP

SEQ ID NO: 954937 - protein, 54 aa, Homo sapiens
TAFLIPLPASPLPHGNVHTHSHSLSLTLISKVLTFTLSTDSHSRYSIYRGSSQS

SEQ ID NO: 954938 - protein, 37 aa, Homo sapiens
MIELGTTIYDCVCVMFASIPGFQRILYRILTEQGGMS

SEQ ID NO: 954939 - protein, 49 aa, Homo sapiens
STRNDTEEYLYVSRTHLPEDVQDSLNDYLDAIEHNGHSRPGQRPALRGP

SEQ ID NO: 954940 - protein, 40 aa, Homo sapiens
LAVVLHGPSCNTGRRKHGPSYYTGRRFNGTSYKLDVVNTG

SEQ ID NO: 954941 - protein, 70 aa, Homo sapiens
FRSNTYTSCLGEAELDKFFFCNSPYEYVIKQTIHGCGYFKKDKIGRTRSRTITLLFTTVTTFPYSLVQQN

SEQ ID NO: 954942 - protein, 50 aa, Homo sapiens
MLDYFNTQFQSCFHIFGYLFSNAPLYWYYYVHFHAADNLIPVRAEMCRGS

SEQ ID NO: 954943 - protein, 40 aa, Homo sapiens
GVVSADEFQRGDQLFRMRAVKDPLQIGFHLSATVVPPQYG

SEQ ID NO: 954944 - protein, 35 aa, Homo sapiens
RSRGSLQAPYQLQSGGFQEPEEDLEVEEVEGPEGP

SEQ ID NO: 954945 - protein, 42 aa, Homo sapiens
ALSVRQTNKLHSARRLHADTLSVVRILAFPCNQFGKQEPGSN

SEQ ID NO: 954946 - protein, 77 aa, Homo sapiens
RPHAKSILSQKNKAGGITLPDFKLYYKATVTKTAWYWYQNKDIDQWNRTEPSEIAVRACALTGVLMEPSSSVVPPKF

SEQ ID NO: 954947 - protein, 54 aa, Homo sapiens
MACYLPLCSRFALGFYSDYPAEDAVHAALVAPPPKRVGVPRPPLQGQGRVHPTR

SEQ ID NO: 954948 - protein, 37 aa, Homo sapiens
FDPRRTRDAWDPRYHSSRSGRMRATEPSPGTSAGSVV

SEQ ID NO: 954949 - protein, 34 aa, Homo sapiens
VTLPRTTWPHNAPSEREFPRPGTTRYAVLTRANI

SEQ ID NO: 954950 - protein, 57 aa, Homo sapiens
AVLFCLRDFLFAAYAFIADISSLILRLPVSSYRFDALFIPVLDCSPSYYCETYMPVL

SEQ ID NO: 954951 - protein, 87 aa, Homo sapiens
LRHRMFPPCDAHVGTEDLPVHASHGIARLPLILSTNTTVKAAASRSFLTILGLLCPVGCQQQCFPLGLTWPCWPSHSCFIRGLSASS

SEQ ID NO: 954952 - protein, 79 aa, Homo sapiens
MSCLSYLRGPLGVPKSVDRVLPGRWACNTLPSSSCSLQFFSDLLVQVDKAPSTMHVNSTHCDNEATLLTPCLTHSLEGH

SEQ ID NO: 954953 - protein, 61 aa, Homo sapiens
PTVNTFLSLFRSFDFYRRITMVLESHMNYISRTLPILLFPIWMSECWRHLTLSVHDHSFLH

SEQ ID NO: 954954 - protein, 69 aa, Homo sapiens
TLLLVNLGSIYYHISSAYTVATMGSSSDKALPAKRGKGWSAQVLEGPAEGCNVMEGGHCARRLFVISCL

SEQ ID NO: 954955 - protein, 63 aa, Homo sapiens
  misc_feature (44)..(44): Xaa can be any naturally occurring amino acid
  misc_feature (60)..(60): Xaa can be any naturally occurring amino acid
LSGTAPAFKPASLAQAMTDLRQEGLSSKRHHNFMELTPTPTEPXVWTNNVDLAAYVWPAXSEQ

SEQ ID NO: 954956 - protein, 124 aa, Homo sapiens
PCSKTENPSSAPAGRWDTPDGTRLDHVLLVFVLYQTLHQVPRVYLVICHIVTEVLNYGLTGLISKASIIISSDSNSVRLPTISLRSTTEYIQTVLKALQLLSSLCVLTAPFSQINQALILEGRI

SEQ ID NO: 954957 - protein, 65 aa, Homo sapiens
VYSSQRQRHRRRVISAFPSEGNNESEWSQIHENIIRKSSAKYSAPSASHGLIISLQLLRGDMEQI

SEQ ID NO: 954958 - protein, 76 aa, Homo sapiens
MIAAYPSEERISSPATEQIWMENDYDELREEGFRRSNYSELREDIHTKGKEVENFERNLEECINRITNTEKSLMDK

SEQ ID NO: 954959 - protein, 167 aa, Homo sapiens
VELHRSRQKTVLVCAVATALRNMALDVRNKELIWHNTPMRRPMSTALPVREQRATTLASNGHARTDHSDSLSACTLHECDYQGTWMNAKGLNGMPEAIDEVGRASPKSKGRINTLQKVGPGLHLQVLQQACGSYRRSEGVSTKKGWMVHNTHFVALRLQTIEEGTGK

SEQ ID NO: 954960 - protein, 99 aa, Homo sapiens
RDSDYPDAYTTGNILSSVGSFVTWSIIEFSLVIYKLETQHINTVLQYIYSVFLNYHYYILCYRLTILFHTVHRAREGVENYILSLLIQLIDTPERSSTI

SEQ ID NO: 954961 - protein, 34 aa, Homo sapiens
CITSRTQIAPPTGFARGCVREVVCEDVCARMCSA

SEQ ID NO: 954962 - protein, 75 aa, Homo sapiens
DLEDPAYLELTKTHSRGLRLVRTPPLDQDKSRRLVSASVEIIHIMAKGHDGRSESEVFLCSDKGVEVKGATYYSC

SEQ ID NO: 954963 - protein, 113 aa, Homo sapiens
GIPSVLNFSTTCRAKKMPMSFSLTQMLLVSAAYLAALFGVAWISERGMIPRAIIRHPLTYTLSLGVYASAWAFYGTVGLAYHYGYGFLSSYLGVSGAFLLAPVLLYPILKITR

SEQ ID NO: 954964 - protein, 108 aa, Homo sapiens
KGRYQSNRYRIGTRTHGGCERERLDTVPAIVYVTRFTLEPAFDRGWSTGRGTRGQCIVPTMFFLLSPVIAVERDEGSRPLFKIGALMAPTRNLMTDVVSYPKGDTRVN

SEQ ID NO: 954965 - protein, 111 aa, Homo sapiens
MASTAVRSVIQAAAGDLQAAQVAGVDSHGHQREGNTVQAWQILHVAQHEFVILGQRLDRRQLNIPRVYQQQWLFVGGGNAQHGFAVAQHVLEQLWLGLDQVQGIAVVEQVA

SEQ ID NO: 954966 - protein, 33 aa, Homo sapiens
GSEVTAYSCSPAALACERQFWPFFAVQKGKNSS

SEQ ID NO: 954967 - protein, 30 aa, Homo sapiens
MVNNNELVLRIASDSRYLNFARFAATSADQ

SEQ ID NO: 954968 - protein, 59 aa, Homo sapiens
EDPEVTRVRQQVITAQVECAFADRRADREAGDRALGDRQGIAMADMTPQDMASKLLAAG

SEQ ID NO: 954969 - protein, 41 aa, Homo sapiens
QSSPRAATEGGLKPLTTNAWGMAYGAAMLATYCALRVIPFE

SEQ ID NO: 954970 - protein, 52 aa, Homo sapiens
MLPISKPVSRLLVEKPEPPPLALSVGRLRIGSVDLGLGHLAFGGQFETAQAR

SEQ ID NO: 954971 - protein, 172 aa, Homo sapiens
MTVFGLTLSFVKDSNRPTRYPELNPRYPVHNRIIFLRHPPLDYHSPQSFGNTSTRTILRRNRIDKVLRHHPLASPLNNRPHRFTTKPQPVFIFTNPDPQLRCFTAGMVQPDQAGKTSTYPLPDREHDVAAIRYRRQSLPPDLRVLLQRGRRFPGHVASQCRSDTSERLNRVL

SEQ ID NO: 954972 - protein, 72 aa, Homo sapiens
VIHPVIDLRSGQIREVFEDDDKVRIALRRGRIVITALQIQTKIRERLKRIKDKLDRGEKLPVASLFHGGTRV

SEQ ID NO: 954973 - protein, 64 aa, Homo sapiens
VASTLVEQRVVLTELSDSEATPCDGVPPFPSLTADRSLTGVCDEQSAACVLVTSVLGLTQAAVH

SEQ ID NO: 954974 - protein, 105 aa, Homo sapiens
RYLILLPVAISYVGISKRAIAKSKKDANREHSFWRLLSKFASPKVAPVSVFLALIAFGGGLWYSQNLKIGDLDQGAPELRPDSRYNKDNNFIISNYSTSSDVLVV

SEQ ID NO: 954975 - protein, 33 aa, Homo sapiens
EVPRVTQQTSTNAKPLIVLAVSKEERSDKEEVS

SEQ ID NO: 954976 - protein, 96 aa, Homo sapiens
VGWANQDVEVTKNIVYEVTCQYTIFPLVSEQIGQLKTSPILCCHIGNPHLGKLMYRGILQHPLCNAESLGKGQWFLLEDTSYFCVRVNIQFTADGS

SEQ ID NO: 954977 - protein, 105 aa, Homo sapiens
SVYDCPGPPVAIREGLITDRCKCLARVLQAVGANHFGERQGLVADGGVEHSELEGAAQFAFQRSGVLLETFEFAQQAQGFLMKQLTLAGQAEAATATMAQHHASE

SEQ ID NO: 954978 - protein, 70 aa, Homo sapiens
LEQRHDFLANREEVRRVAKHLAHRNGQELQQLHERGRVVQHALLQCGNGRAVELTQGMGHTAFDRRARVV

SEQ ID NO: 954979 - protein, 40 aa, Homo sapiens
SVDVCLAFPGQVVGGSSSRNRLGAQSMTSPYCLRLAAKVK

SEQ ID NO: 954980 - protein, 67 aa, Homo sapiens
HPLSVWVTHEFKPAFGQRGVTGRLDQDHKQIKSKIKSGSLRIVVTVDRKLPLLLLLQRLCQLNGLRG

SEQ ID NO: 954981 - protein, 63 aa, Homo sapiens
SIFDVLLQGGLPCTGVQAQSMFFFDSLSANMLVGLRHQHIGQVWLGIIRVLRVADPGGPVGWG

SEQ ID NO: 954982 - protein, 178 aa, Homo sapiens
VPHVLKWRWSSCIPLVLVVGTYDLKTVVTVSVVQFSLFFVDFWFQLARWIDSTILDALYGWGWGWNRPHSNFDPVMGLNNAFGDMLLNFVMATMFLILPAFWVTALAWTGIRAGNFLQGLASGTRDAGQAGGKGAGALISAAKKYVPSDSIVLKPRVRVIVVRGGMVKQAIPVITRVN

SEQ ID NO: 954983 - protein, 80 aa, Homo sapiens
MRFTYTRTAFARQRAFAVQVLQQRQRQPADIHQPLVQHVRDGLALQGLVELGERYQHAGMALTQVTLQAFAMLNERTRMN

SEQ ID NO: 954984 - protein, 37 aa, Homo sapiens
MGRPQFKSMTRRYEQSADNTSVAFNACQELISNNLST

SEQ ID NO: 954985 - protein, 230 aa, Homo sapiens
PALWYVGCGQGQRGQRRVQGTDSYNAVGLALDSSFSQRFSLGVRNNLSRDHSTNVQGARNSVSVSVGLPANVQMSLSATAQTPGYRDVIDTVTPHVNDVDGSRFKNQYTVGFSWADPQLGGFSIGYNRGADFKSRITQNIYGTWNKSFRYASVGVTVDSQIGQSNSADDRNDDGLGIRLQVSVPLGRDRSLSAFARRQEERSSIGTAYDERVDETLNYQIRSDRDFGGHR

SEQ ID NO: 954986 - protein, 81 aa, Homo sapiens
PACVSICMHRRTQGAGLAGWMPTQLVNLALSEQGLAWLVPSVMTLVVAVVIDRMLGKRSEADRLKPLTYTLQLKSPGSNDP

SEQ ID NO: 954987 - protein, 173 aa, Homo sapiens
SRVITKSPRTCRLKKTLNKFRRFTGRAEGMSISFEAHLLGDKIEFDEAGGTLIMRKFANPARRSTKTCSCLIRVVLRHEIVINENVARLFKQDSGKLREIQVMKLSDPPCLDIRTYCMIDSILRHFSTPINSGLIGTVLRFLHDRKAFVIRMIYMDGDSNRNGIHAIPRGGYR

SEQ ID NO: 954988 - protein, 61 aa, Homo sapiens
TVVLFVGLLFASRWLLPRLFREVAASHSAELFVLLALVIVLLTAWLTHLLGLSPALGAFLT

SEQ ID NO: 954989 - protein, 79 aa, Homo sapiens
IRRHQRDQEHYPCVESRLPIFSRENTPYISGVSVDVDVDTRVNIEVHPGIGETLQPNSGPPITEAYLPVVLYQSTEMCD

SEQ ID NO: 954990 - protein, 138 aa, Homo sapiens
TFSVTASSARAKENVWLLHDTTKAVHGHRCVDKLPKDAVSHLTRSARTRSAHSAVRPQAMQSISSRFMVGLPPLYRWRISAQRSGGYDGSVDCCQGATGLSCQVMEYQSRKPSLPLDIQVGANTARQIQRAGNPYHQE

SEQ ID NO: 954991 - protein, 40 aa, Homo sapiens
ISIKPVDAVVGDPVSIVVGLVVIYLCYLLEQRILYGGLDG

SEQ ID NO: 954992 - protein, 43 aa, Homo sapiens
GYEGTALRLQRIRMAQAIRASDTNEQHACRIQHAYKGIGRRSS

SEQ ID NO: 954993 - protein, 37 aa, Homo sapiens
IFGAQYRLRSVLMRLLDSHAHRAQRFVYLIPVLIAVR

SEQ ID NO: 954994 - protein, 39 aa, Homo sapiens
MTLVELLVALLILAIGLIGAAVLQLSALKYTNTRYTFGY

SEQ ID NO: 954995 - protein, 74 aa, Homo sapiens
MQVIDIAAVLIIGPNVERTFCLHLVSSNMHYYGDVQLGNVMQQTPVLNPWWLWPLQAYCFNFGSTHGIHHFVVK

SEQ ID NO: 954996 - protein, 36 aa, Homo sapiens
LSYRVGCTQGFSYINGPIRDLLLGKDPGPENPLAHN

SEQ ID NO: 954997 - protein, 97 aa, Homo sapiens
TLVTCDRWPGPGDCPGPPVAFVGLITDRCKCNAGLLQCCRRQYTSANGKALYARGGVEHSELEGAADNSPFNAAVLLPRKPSSSPNRPEFPDEPAHP

SEQ ID NO: 954998 - protein, 60 aa, Homo sapiens
FLSHTRIFKERSNQRLEINIHHHQDGMLISIALTKKQQIVVEPNWDRDLLTSLRTRDKTS

SEQ ID NO: 954999 - protein, 69 aa, Homo sapiens
FSSYEGYPIERSQLHHDTSKSMGQPHVKSITRRLEQSAENTSWLFNACQSLFAASEHRIMRVREEYPSL

SEQ ID NO: 955000 - protein, 140 aa, Homo sapiens
AAFLRDIFCNDIPLIFRRELYASVSFLAAWFYLLCLVPEAAQRASNSADAVQWLSMLRLLAIRFHWEMPKFVYNDDVHSAQCVAPEPIPRVRVPTPTGSPAAPSMTSSTGMLEGALPRPTEKLRNPRSYPARRNGTRLNF

SEQ ID NO: 955001 - protein, 60 aa, Homo sapiens
  misc_feature (2)..(2): Xaa can be any naturally occurring amino acid
RXKLSGKLYLVDWQEEKVSKTGAEGAVLDEAKNINKSLSAFGRTGGRVPGAPEFRKIIGS

SEQ ID NO: 955002 - protein, 79 aa, Homo sapiens
QDLTRTPNTGPHYINTPRTHKTDRPDGGAHIGYKDRALERRGLLVSHVSSKRLSAGWEITPLCRQISRLGPEFGSLFTG

SEQ ID NO: 955003 - protein, 85 aa, Homo sapiens
RTPTQHFRRIKSANATGGIPYTSALSHAGPADCYSNQLHFPFSIEQMKSPFEIKNAFRLRLHEEKCDLHYSTTLKRNLNFLGVRG

SEQ ID NO: 955004 - protein, 85 aa, Homo sapiens
MWSPGLTTSSKVVVAVVHSRNCSLLETERQVIYVESWCTKMENRTLCPLLPKNMVYWKEQEHGRQPDRNSNPVLCHLLGNLGRTG

SEQ ID NO: 955005 - protein, 39 aa, Homo sapiens
PDRNKNGRNEVSSNKHLLYRLTSVPMHCFNALDDMLATL

SEQ ID NO: 955006 - protein, 59 aa, Homo sapiens
RQFSASPNTELDFGGAAGSDVDQEEIVDERAVQDVESTVTNLIHGNLGTLIQGSSTIQM

SEQ ID NO: 955007 - protein, 53 aa, Homo sapiens
MFDTADKVLGDNHNMYCTEIKAHNIKAELLLTEKAGTQNYITSLPIKRRGYRA

SEQ ID NO: 955008 - protein, 42 aa, Homo sapiens
SSISVTARSTFDLKYIRAIEFSGVENVAHFLPLMGYIYEHNV

SEQ ID NO: 955009 - protein, 79 aa, Homo sapiens
EVTLEVSTRNAFTYAFRIRKDSPEQERVIFAGTQLVDGLTLSDYNIQKESSLQLVLRLRGGMPIFVKTLTGKSITPVNV

SEQ ID NO: 955010 - protein, 35 aa, Homo sapiens
LRIVCLETEHPQQFIRKDDRVWAKDLNYLNLMVEA

SEQ ID NO: 955011 - protein, 60 aa, Homo sapiens
TLRILAEAFSNTNPESRPRSWFVQIVLCMFCLILVLLVTATGTHGIFHRKGSRMPMALGP

SEQ ID NO: 955012 - protein, 51 aa, Homo sapiens
MNLMFPVNNTQSVGVLHNERESPDEVTEIRQRGPTPHEGFMWHDKKVWRGY

SEQ ID NO: 955013 - protein, 35 aa, Homo sapiens
VKGSLVHADFLYLSATSFLRYCSVSANSIWNELDS

SEQ ID NO: 955014 - protein, 69 aa, Homo sapiens
MSTDEGGYTKTTDFLSRRNSFLLETDAIQDFHSYEKSVPGFKAGWAQWLTPVVPATREAEAGGREGTEL

SEQ ID NO: 955015 - protein, 85 aa, Homo sapiens
VCGRLWQDPLPVQPGPALHIKRRLAREKSLGMALRYTIKDVCRNGKRKGLKRGMDAIDDISEDPLTALWRMDWKVLEQNREAGEG

SEQ ID NO: 955016 - protein, 69 aa, Homo sapiens
DSEDPPPFHSRQAKSQIIMNILFTTATKRIKYLELQLTREVKDLFKVNYKPLLKEIRDDTNKWKNIPCS

SEQ ID NO: 955017 - protein, 69 aa, Homo sapiens
KSQDTLTMSLPIMEPLMDDARWNARIRYHNLCHHHLLEVKISGLLNHRDLPCSLLLRHPLRMSLTRGSM

SEQ ID NO: 955018 - protein, 48 aa, Homo sapiens
KKEDGVSLLYAQDGVHMATFSSSLTTSDLYGYKTILAASALPEYLRIH

SEQ ID NO: 955019 - protein, 43 aa, Homo sapiens
PSGPAIMTLGDKYDLSPHQQIPSRTPFDLADRGPPELVLSASS

SEQ ID NO: 955020 - protein, 209 aa, Homo sapiens
  misc_feature (1)..(1): Xaa can be any naturally occurring amino acid
  misc_feature (6)..(6): Xaa can be any naturally occurring amino acid
XSADPXEDRLRGEPGTGYERFSPTVRKLERIPKRERATVQLRHKKQQHHEVEIAHECGTANGLDQRALTANEMVTLIFANGCNRFVWKLRVDAISPTVGASNSSRLQALNSFVTGDHDTFNDFGRRESFAISKPVSSTPAGTAISPNHNRLNITVMATKPSRSRPLKDSCLVVVAVMLFPFYTIKHDVQPTAVVQRCPDDRCGGLNHGF

SEQ ID NO: 955021 - protein, 225 aa, Homo sapiens
MPECGSETQRSSSKRSEFCPACSTSGWNVDDVDLCLVDQADHVATVIVVVTHGRHGREQHRVAPAEASAYGKLRIWMRHADEDDKTRRVNLYLLNQATDKPWACRSAGFAGPAQISVALSWRRVITVRYLMPPFPTRSGFSSEAVSRSPVPMNTAAPPNSRAFNEGLQNLALDVQAILFGFDQLDLSLVGLPVAPVAARINGRDAHALLRRPRSTEGVSSCWSSI

SEQ ID NO: 955022 - protein, 42 aa, Homo sapiens
GADDSPAISRSLMRARSVFERRAFHRLEHFRAGVLERDIQVR

SEQ ID NO: 955023 - protein, 224 aa, Homo sapiens
MCVTVAPSKTSSDRGSAKEATIKRCEDNNSTIAAYLAGQVDLIASGNVVMVAISERNPKRVPALKVKLKDSPVYVGVNKNEPAPLEKVNQILVAAKADGSLEKNAMQWLKEPLPADLLTRSSTMAYQFDFVPVLANTDLLLRGALFTLELTAIGATLGVALGTVGAVVRAWKIQPFAWLFGVYVELIHNTPFLVQLFFIFFGLPSLGLKITEMASRVLAMVINW

SEQ ID NO: 955024 - protein, 61 aa, Homo sapiens
MLCDVMWGISRNTDFMTGCRGHSEQGALGQYTMAHQNPEPDKVNQNREMDIYKRSEGGSQT

SEQ ID NO: 955025 - protein, 68 aa, Homo sapiens
LLVLVAQMPAERQRSRRPGSIPALPLTGGLGLVALAPLCLSFPILVLREMNGGLRQALRAAQPESGWR

SEQ ID NO: 955026 - protein, 41 aa, Homo sapiens
QDVVMPKSQHFERLRQEDRLSPGVLGCSALCRSGVRTKFGI

SEQ ID NO: 955027 - protein, 67 aa, Homo sapiens
LRVLHNKCIQGFYPGLNDKEILTSLIPINDRLDKKMWHIYTMEYYAAIKKNEFMSFAGTWMKLKRRR

SEQ ID NO: 955028 - protein, 77 aa, Homo sapiens
LLTNTECTAHQTSTEDGITIDISLAKKKTNCKKEESKGNTSNSTIQIEWAQDSKLAGTARVALQEAHNERVDYGLLE

SEQ ID NO: 955029 - protein, 71 aa, Homo sapiens
MSSTPGCQAPSVSPMSVCVLDLKVGKPEFHGLVECTDELCSSVQMLIPLQFKFLVCKMIKLSHDVTRGVGG

SEQ ID NO: 955030 - protein, 38 aa, Homo sapiens
AAVGEKRVFKAASCHLALPNGEEKGMAPKMALQLHTQY

SEQ ID NO: 955031 - protein, 87 aa, Homo sapiens
TESTLTLLLNPHSTLNFHNRGQRVVEYKIYPISSHLMGYTLTYRLYVGTCAYFVTFIMGLLKMAVYEADQQVVRLIRVYRLQNRLLY

SEQ ID NO: 955032 - protein, 73 aa, Homo sapiens
LIATSRHRRIQTRRRYERYGQTQASISLMDTLYLDTYLIKTTKGQNGGESPDFHESVLLYMKIKINASILHLL

SEQ ID NO: 955033 - protein, 70 aa, Homo sapiens
SPSGSLQYCLRLGATAIVYWLNSSADVIDITSYGDKGCRVALWEEVRYGIFNLRAKAYYHCARSEGDSHC

SEQ ID NO: 955034 - protein, 50 aa, Homo sapiens
SDRIDNLAEDNEENRGWGWAQWLTPTIPAPEEAEAGESRAQEIDTILANT

SEQ ID NO: 955035 - protein, 128 aa, Homo sapiens
MGPCRIHTVRVWGGYKKYRALRLYVAEFLLGLQNVSTRNNNGIIDFVYDASHNELVRTKILVKNCIVLIDSTPYLTVVRFPLCAALGRNKGAKLTPEQEEILYNKRSRILQKKYDQRKQECPNQQSPG

SEQ ID NO: 955036 - protein, 131 aa, Homo sapiens
ARTLDAPPSGSLPVHADYCTPPRPTGCLFIPLERSSHLKRTVYEYQRILCSRSLRENVKIGAKLLHDVRQDLADVVQVCARAKKQTNYLRTLINELVKGILPRSWSHYTVPAGMTVIQWVSDFSERIKQLQ

SEQ ID NO: 955037 - protein, 40 aa, Homo sapiens
IPRMGLCGVFICGFGAWPTLASCDLAMIAVLEIDEMIENA

SEQ ID NO: 955038 - protein, 91 aa, Homo sapiens
HCATPAGVLPSTTLSKRHTGVGKKPTACSASDNRADSQIRSSLRECGWCTHFMGSTPLKKKRQAATIKTKTKSIIPCNPTILEQYSWLVVK

SEQ ID NO: 955039 - protein, 34 aa, Homo sapiens
SRFFTIGFRFSVFVAFLSRTRRFRITSTAVTAIQ

SEQ ID NO: 955040 - protein, 70 aa, Homo sapiens
PEYLDKIDVITQADICAERSGPDSMTCSDFWNLMRTKFQVDKSQTIHKFDVGWPDSDERPHSGLQMLQTN

SEQ ID NO: 955041 - protein, 61 aa, Homo sapiens
VCLDLSGLIGCSLFSWESLLREEQDSENGDAGNNAPLIPQATDFLTFFCRFSGLSLEYVAS

SEQ ID NO: 955042 - protein, 67 aa, Homo sapiens
YAIYTTVDEIYLGDTLQASRYSRTRQRTFTGVQEHIAVHLPACVTNSNKAELMKACDSLDLVMRYLH

SEQ ID NO: 955043 - protein, 45 aa, Homo sapiens
MTDPLVGPAISLAYQAAESVYLEDGSHINSQHETSLVIGEALVIY

SEQ ID NO: 955044 - protein, 117 aa, Homo sapiens
LRTQAAFLRLVSGVEAVGEFQRMFDQVKSGQRSLDSLTAWISSNTQVSAVYRDELVKLAASYSSSSQKAADFQALLGKSKEPLDKAAAGARALADSQSASSAAVSGGAQAWDKCVRS

SEQ ID NO: 955045 - protein, 146 aa, Homo sapiens
RCYGRASWSSSTLSKEERAQVWGMTFALDDGKNSDSPLAHLQSEFAGLEQRLNERLVERLQLERDPARRDLIYGFPQQFGALKDCLQSFLEGVFKPNAFEERVLLRGVYFTSGTQEGSPIDRLIGAMAQSMNLDRQHLARQSGTGR

SEQ ID NO: 955046 - protein, 45 aa, Homo sapiens
SCVRWPVSSACSLDLISTVVTPSRSHTAPALFSAHAQLIFARRTG

SEQ ID NO: 955047 - protein, 87 aa, Homo sapiens
KDEKDESSFLYKMRDSPSIQGTAWCANAPRFTIQLEEAVSEFTLGSQTAWISYDVYLVVARKAGLPTLFFSCDLTSQFTCAISSLLF

SEQ ID NO: 955048 - protein, 42 aa, Homo sapiens
LKDQADCCHSRYGIHGKPMCVESFSDYPPLGRYKLYRAYEDR

SEQ ID NO: 955049 - protein, 38 aa, Homo sapiens
DPEQQQAGGADQQRDGAVGLFDLVERRFDGVFVADVEG

SEQ ID NO: 955050 - protein, 46 aa, Homo sapiens
MLSGFMESPETTSHLEGQMDSQSRTGFHGTQTRSTERVPETRNSVI

SEQ ID NO: 955051 - protein, 50 aa, Homo sapiens
MGRHMPDCEVIDDREDVYQILNPWSSADTTDIWNAIDADKSGQSARKTSV

SEQ ID NO: 955052 - protein, 54 aa, Homo sapiens
RAKIKNALTQFLPQGTPTPLYPHTRLLSKTSAILIQPNSPGQYGGDTDARHSIN

SEQ ID NO: 955053 - protein, 44 aa, Homo sapiens
DTTVKPIRRFTTVPWCWRNIRSPRLKSGIIFSFKRSLPKPRTTW

SEQ ID NO: 955054 - protein, 66 aa, Homo sapiens
SSPDWHTGRANDRVDRQGRISIIIFCINNVDGHLYKLDGRMPFPVNHGASSEDTLLKDAAKVCRDI

SEQ ID NO: 955055 - protein, 81 aa, Homo sapiens
PFRIAGDLSDAANARQVLSDNGSPTLICRCSRFFGYRYTSAVKQSVLFKVNESGTDALLREGIVGRLEGFNIHESAHVKKR

SEQ ID NO: 955056 - protein, 69 aa, Homo sapiens
DLVMLTLLDIIPVHPMLCGELLRLSTFGSLSWFVMGKHLVAVGVIKAVDKKAAGAGKVTKSAQKAQKAK

SEQ ID NO: 955057 - protein, 66 aa, Homo sapiens
GRLYNLYLSPSLHYSRCEQELGREGGKSQKLMSSTAGKRHTRGHRLLEGTSQIAKSLPHYAWAIYY

SEQ ID NO: 955058 - protein, 42 aa, Homo sapiens
MGLLGRTANSIYSSLRNLHNCFPQVAEHILQFPAKQVLGLPM

SEQ ID NO: 955059 - protein, 59 aa, Homo sapiens
PGAVILISPTGYILITILPSTTQTTNALIVTSESSLKDFKLYSHRTNHILYLLRNHTYP

SEQ ID NO: 955060 - protein, 38 aa, Homo sapiens
PTITGRCLDLRVPTHGDDDTPWWHARVYKVFSVVCIVL

SEQ ID NO: 955061 - protein, 89 aa, Homo sapiens
SKANDYCTRSFPSLVGGICLMQGDRDREDVTSITSWVVQTRQYLERVDAENREISQKNQRLTRLYNALSLCNQSIVRSSSEQELFEPVR

SEQ ID NO: 955062 - protein, 63 aa, Homo sapiens
MGILLVVFIICYTLSYNIERDICEVLEGVSSREVILLLAVKRFKRSGTVAPCRSEFDRDKIVK

SEQ ID NO: 955063 - protein, 121 aa, Homo sapiens
TVLVVQTATRRRYRLRDGPYCSMRIEDNPLDLAPKRILQALGAAELVDELLRQVLHMLRVQQFLCLQSRKLVVGLLARLPVQPCFRVAQVTLQRGRKKDFSLRWERAAQPPMAIKSARAVR

SEQ ID NO: 955064 - protein, 43 aa, Homo sapiens
KASEDTLLGTEYKSMQAVDMLYELKSWFYNIANALDATDTVHF

SEQ ID NO: 955065 - protein, 87 aa, Homo sapiens
MNTDESRIVADPNRLSLFAKNTPEVAVAPTHQTYVIALQERIALGLLVTICPPGAITMMPTDRLVTTERYTYFTFLQTLLHVLYIDC

SEQ ID NO: 955066 - protein, 118 aa, Homo sapiens
MNNICKIADYGSTRIDSKTIEITQTRQGAKFPIKWTDPEADLYGRYTIKSDVWSFGILLTELVTKGRVPYPGMNNREVLEQVERGYRMPCPQDCPISLHALMIHCWKKDLKNAHFEYL

SEQ ID NO: 955067 - protein, 34 aa, Homo sapiens
RTLGPYWFFISKRHLSNIQYQNSCTIDFSFSQYG

SEQ ID NO: 955068 - protein, 44 aa, Homo sapiens
LSPACAQVALNVDSGRASGPECRGRLLGGTHGTPSLCQYGGTEL

SEQ ID NO: 955069 - protein, 120 aa, Homo sapiens
AVHLYLVVDSSRTPTPPVVTVHATSAAACLGRRSGCRVTFNVFGVEMRADESSSTDEADCPNFSIEAGGQLLPPPVDSGLSFNKIQVVCIAQRRRSIEYHDKAHEIPLLFSREQCQSASL

SEQ ID NO: 955070 - protein, 32 aa, Homo sapiens
MVVHPINYPDSDTQYIPPAHHLSLHSKGVHLN

SEQ ID NO: 955071 - protein, 75 aa, Homo sapiens
MKTSRVPLIHTPGFCDLCQRPVDVAAQRVVGELQLGVDQIVYRVHIRYMSYIGAICTSSGSTMSKIPTGTVGQTF

SEQ ID NO: 955072 - protein, 73 aa, Homo sapiens
AVTMLGIIIWYNVSTNDSQNLVFFNNPPTCHIESTTGGDELAVFISTVGRGLNSRSTPICLAERAYRSNLDYS

SEQ ID NO: 955073 - protein, 143 aa, Homo sapiens
IPDVDTMRCRTQTWITSVYIGQKLSERLMRTNGVQSRIRGILERAGAGTDGGSDAEVTDADWKKCDLIAKIKASCPQQSHISPKNYYKGTSAPRFWIYLHFQDKLTAQTITESCHHYLYNLVKRTPTFGSKVYAPDQCSLLFI

SEQ ID NO: 955074 - protein, 38 aa, Homo sapiens
MSTVPEAAHRWAHRIQLCVGTMASGWVSGRLLYRTRGS

SEQ ID NO: 955075 - protein, 44 aa, Homo sapiens
QLHEIRPRSEEQRPPAKSHVREPSWKQFSRPKLQMTVCPSQCIS

SEQ ID NO: 955076 - protein, 104 aa, Homo sapiens
GSCTDVMHVEGGHAVDVCMECMARQLRDPSHCQTRAEASGCWKTRLKAGMIPSKPPEASPVIRSHNRPRAYILITILPSKLITTNGAHSRIISASLKDFRLYSH

SEQ ID NO: 955077 - protein, 133 aa, Homo sapiens
TLRGLITDTVIHRGRSCFKAGHGALASRRSRRCRRVRIIYFSTMFLDSPRRVAISCWVSPSIFCQMKILRQLSGNSASARSMASANWIALHVMLRVATCEACCDQPPAASTPRGGLRGGRHPPQYCARFDAGR

SEQ ID NO: 955078 - protein, 71 aa, Homo sapiens
LLSRELATRLDNPAKSVSTKNTKKLAGHGGGRPFIPATQEAESMNNYLTHRRRRPQMSHSSYHLHSRPGTP

SEQ ID NO: 955079 - protein, 34 aa, Homo sapiens
TLLRIDRNRWTPQWWSPTTARYLVVPKRVSLSLP

SEQ ID NO: 955080 - protein, 215 aa, Homo sapiens
PDHVVSLRKWSGSIAVSRPGSGAHVAFLVSCQRGPGGTGYRTISRAPAPSPACGKDQRVAHHGESAAFARPFGKPQVFVIQPQPEHLQQAGKLLWSDAGAGFGQQFRGDAHLLQHPRVVETGSARTAEGRSGVMAGDGTFTHARASSMEWRMVAITQWGDKADIRQIVGRDRMSGRKSATVLHSPESPVNPKPCCLKAFSAFKQSGTLFANNIRC

SEQ ID NO: 955081 - protein, 233 aa, Homo sapiens
ARHTRGQIDQDHDLKHTFGRRPRAASVTEVDRKALLGHKNGSITSHYSTPVLQHLIEAANKVLATDSREPVLTVFEEEIEMIPRKVPTYEKAEQVRVRQVIEKYGRDGVIRTPAPYHPVYADTSTGRYTQGFAPGARCNDAQECGTVTHEVSCKVTEPILAPSGVLQTYHKIQTREKKPARGGLNISNATWSLSLRLALRIRQCPIGNRHQILRHKFRTLRRQVIVLPVHHLA

SEQ ID NO: 955082 - protein, 130 aa, Homo sapiens
MPDRVRGQTRQHRGQGVFRNGHADQLDSSLRCAGAMANAWGGTAELDFRWQGDGFDARQLDGLLHVVHRHYRVIVLIDDHGHRVVTARKRKADSEVIFRNAPGGLVDNFGFENHHIINELIQALNENKML

SEQ ID NO: 955083 - protein, 153 aa, Homo sapiens
MQTHAKNHHEDHRCPTPRRLHANPALIPNTPDTTTADSQMQVAQPYRTQQRHGDADDGWHVAYNGGDQGDKRRGNREFQTQPIQPGNAFTEHDAGEGEDVPDGIERQADAQGVPAVEGLAVILADQGEEFIGQQKAQAHAPPGFERRQRRAHV

SEQ ID NO: 955084 - protein, 159 aa, Homo sapiens
GGSARLLLIQHLTWMIITRNRTVDQRQQLRTQRRQNEILAIAALFLRPRLDKATLEQQRLVIGSGLLECVQVASVLAGCRLLGRFWFGVFARGKAAFAVLHFMQQTFDQIPIVSRHPDSSCRPMELARLGSDTFRHGPFNQTDRRHFSELSRGSPPQLH

SEQ ID NO: 955085 - protein, 62 aa, Homo sapiens
TGAGGMRLSLSRLLVIPDVDNLRRRLLPPIIRKAKVIHAQLVNEDEIRRLILADVRESNAMV

SEQ ID NO: 955086 - protein, 47 aa, Homo sapiens
RARKRGMHAQNACQREPNDGALRGDQYVKISSPSKALGLQRSSVRGE

SEQ ID NO: 955087 - protein, 86 aa, Homo sapiens
  misc_feature (81)..(81): Xaa can be any naturally occurring amino acid
DAELSADTLIGIAHYSPELLGSSDPPAWATERTPSQKKKNTLGSSYWWCRGELGYHFLCSHCMLCYGCAVYHSGVYCLILXSRGIL

SEQ ID NO: 955088 - protein, 71 aa, Homo sapiens
TDRCCGHARRGAACLSREVLEKIGIAMDKVDTDAHGRELSNPAAAGQYCGDLGQWIPMASSTFDPGALELA

SEQ ID NO: 955089 - protein, 86 aa, Homo sapiens
DTNVLQIIIVRWRYCATQLLERGEKRPRRTLYPWQSNWLRQVGAAREIAHLLLDAKQDLVRRLMAPSLFQPTRRLRDKETDGQHEH

SEQ ID NO: 955090 - protein, 75 aa, Homo sapiens
MQRRQRVSTLQFAWCGPARRCSMRMGDNLDVACRCTQVARGIFLLYGDVARLNAAGSHIRPVLQQMADRQSIRQL

SEQ ID NO: 955091 - protein, 117 aa, Homo sapiens
PVARSTVVGADIVSAYGGTVKVLGLVENSSTTAIVEKIRNNECYPVGRACSPLAFLRHDLAQHLPCLAGQALELRVFFRFCQALLPEPILPANPLIAHQPAFLLGKTFRQIEAARAG

SEQ ID NO: 955092 - protein, 125 aa, Homo sapiens
RRRSGQFMRKCVLRDRYFPYHRRAYHTFMITLSHHHFPYLLPNPGCLMTLQSVAKLANTTFLSRTGNINRLNYPSPPIYPRSLIVPPILYSPLHNIRSLRSLPYHQINWPPMVLNLRVHRLRRIR

SEQ ID NO: 955093 - protein, 80 aa, Homo sapiens
MHPCRLEPSRSMFLVIEPLNWITVISSTLCLITEKGKNLELFPMPLEESPSGSHMATFISTGFTLKTQIGQAWWVMPVIP

SEQ ID NO: 955094 - protein, 39 aa, Homo sapiens
MPRWAPGKRQSSGQMRAPIRTKANFLYGKAMSAASNYTE

SEQ ID NO: 955095 - protein, 125 aa, Homo sapiens
GWSNPHGSMVFLAVEAAQVTVDWEASRFELIAQTAHLAVRLFGFDQSDRAKAMAAQADVRLQQAALVKHSPYLQVQVFEFRNTISRHAEYLQLLIASAFVKGLNANCRASGKVNSTGRATEVSRR

SEQ ID NO: 955096 - protein, 75 aa, Homo sapiens
GRILPWPIGESDLIIGANNRSAVATTGLSVLSLLCNSRPSSKPPPQSAATEAIVREMFRIAPSLFRNHDALTQAA

SEQ ID NO: 955097 - protein, 36 aa, Homo sapiens
GRIRLDGYSLGALNVFTIYGCVVSVLVLGSCVMLIN

SEQ ID NO: 955098 - protein, 95 aa, Homo sapiens
MAAQQNVYGAISGGPMAILAGTLAVLLGFALVPVLVRIGHREPVAVAPTKEAGVIAMYESMMKVITGYGLISGFAVIGLTMWVSYWISDTFTKGR

SEQ ID NO: 955099 - protein, 65 aa, Homo sapiens
DVDTRVVLPIECPHSYELSYITRDVWALVSCAHIRLKNRCNSRYVKTNTTFTDYTYRGVYVLVEC

SEQ ID NO: 955100 - protein, 40 aa, Homo sapiens
GPATGIRDLLYSAGTAKSVFILDWGTHTRTHTHTDPEEGG

SEQ ID NO: 955101 - protein, 46 aa, Homo sapiens
HRPAAFADMTEGTRSRVLSLSFFHHAITRLHPSPEFLYHKINPQSP

SEQ ID NO: 955102 - protein, 51 aa, Homo sapiens
  misc_feature (46)..(46): Xaa can be any naturally occurring amino acid
MTSRGDRHRDLNIYGVVASTNLFRNIINFGYLIEKVLLELQNDDPXAFREK

SEQ ID NO: 955103 - protein, 124 aa, Homo sapiens
  misc_feature (81)..(81): Xaa can be any naturally occurring amino acid
MGITIRRKLAALASLFDHLLESNALSGGNPVHGVKRPRIESNEGKTPALGDHQAKALLEEPDETTFGREWRDRGEYGLSFXTISGLRPVKTAALLAGNATFQERPWDPNTLKDSRAKGRQGCRY

SEQ ID NO: 955104 - protein, 59 aa, Homo sapiens
MPVNFHAMSSPSLRIYTEAQRPLDIPLPLARAVQHPPDRIHTSKATDDPRMCASEIRPQ

SEQ ID NO: 955105 - protein, 91 aa, Homo sapiens
MPRTTGSSYHRSPFLDQIDILTLANRCTNYCELHPPHSFVAGLNGTVEGKRVIKKYKCGPLAAPLPRTTCIPALALFALSIPLSSSLLPKP

SEQ ID NO: 955106 - protein, 46 aa, Homo sapiens
FIGSPQISARSALKVLRFMGEPPCPDYFAYFLKCLHDSEFNPRSTE

SEQ ID NO: 955107 - protein, 80 aa, Homo sapiens
RTPGDGLSDLMKKDTTLVKSGELRAENARQMAGYSTILEAERRPLGLELSKKSAFDESSMGRQEPVLINQGEQFTVLPEG

SEQ ID NO: 955108 - protein, 63 aa, Homo sapiens
  misc_feature (1)..(1): Xaa can be any naturally occurring amino acid
XDGIGATAGTAPCRFAVNLQVLDPTAFLNVAYLQQRRFFTVQAVIEKDSQYRPIAHSFQSGFI

SEQ ID NO: 955109 - protein, 35 aa, Homo sapiens
NSDARSAARGLRMSVRRLYHSRAFFVLSLLGSFYN

SEQ ID NO: 955110 - protein, 43 aa, Homo sapiens
LITCSTYTHMYRRGDSLVLYKNILTVSDPEVSWLYPSYHVSCL

SEQ ID NO: 955111 - protein, 43 aa, Homo sapiens
ACADYRGYPARSTTPWRRWGKEGLTRITQLSIYLCADPTYFFY

SEQ ID NO: 955112 - protein, 90 aa, Homo sapiens
MYRASVPENEDNHTADCETPVAIDLDLLGHMELTKRDQKLFHAVKETLVRHSILREKPQTHSEKLMGWTLFADCNGVHVTTDLPILLWLS

SEQ ID NO: 955113 - protein, 74 aa, Homo sapiens
RLRGIMSGRTCLGRSRVGVTQLENITITFAMEVVSPLQWNHSKRGCEDLFAFQATAKSRVYRAWGATELPEGTE

SEQ ID NO: 955114 - protein, 65 aa, Homo sapiens
IDPHKLPDFVSYSEKKRTRGERFLDKIKPRSAAMRTTVLVVFVVCFSLFMSLWFFWRTLFLPEIQ

SEQ ID NO: 955115 - protein, 36 aa, Homo sapiens
GSYELYKAVIALDKTLIQARDVKLKSMLFNLTQSSG

SEQ ID NO: 955116 - protein, 35 aa, Homo sapiens
VEPQQLGDFIQAEARRLGRFHESHPCHVRRAIAAN

SEQ ID NO: 955117 - protein, 47 aa, Homo sapiens
KQSTPSLGGIIMDGLQSSGTTSSRFSAMLMATIQEQGPGLLGSLLKL

SEQ ID NO: 955118 - protein, 46 aa, Homo sapiens
MSGELTNECEAYYTIDRLDFKSTASKILLTQRWEAIDMGLRGAPNV

SEQ ID NO: 955119 - protein, 41 aa, Homo sapiens
KIHGLNVPFDAVVVAKSTVEGVISLQRETGMRAAERLIHFT

SEQ ID NO: 955120 - protein, 58 aa, Homo sapiens
YTILPYRIHTREPRVTLDKKIHLFIPPMLSIQTTLQIPWQMALSLYAIPVGKSLYSRI

SEQ ID NO: 955121 - protein, 36 aa, Homo sapiens
MDHGPGGWYVSSLLPSLLYPGTVLPTYIMLHVPTLY

SEQ ID NO: 955122 - protein, 113 aa, Homo sapiens
YWKRQHRLVKGIIQKELTGKGCADRNRSSHSKLQVSSGPVIWSFSLQAVFWLEGGVHKGTRPYLPRPFDYPLSLSNPLCSTCFHSCPSCKAILVFKTTVELEKGRWQYIKLKL

SEQ ID NO: 955123 - protein, 144 aa, Homo sapiens
VKIPAYPDTKHEDPAAEYRGGLGTYLRAMLKIVLRTPYCGLAENKLTQGAHAYEPMTAVSAATAVKSSTLQLLEGHDILATEGMHICRAQRTRVVDKDKTITESNDTIYSVTGGNLKASNGGMEGHPSDCSGHKTRDELKLLSG

SEQ ID NO: 955124 - protein, 83 aa, Homo sapiens
MGGGGTLLLNYGDRSRENKVVVVPAALLGPAEAHLPQNGTDGVLMQGRAWRRISGIDLIRGMRSLLGFEFHPRAYLGDHLPLH

SEQ ID NO: 955125 - protein, 57 aa, Homo sapiens
MTGAVAVIELMRRRADGWKAVRRSGTKPVSLLRNTVWCEGETFNEDMHGVESRGNWP

SEQ ID NO: 955126 - protein, 84 aa, Homo sapiens
RRVGIEGSETKATVGVKATVWVAEQRLAHSEKVMWSVVAGRSKSIRGAPASGKLRVHPIVDTGYRPPAGPETRKDASQEEGDDR

SEQ ID NO: 955127 - protein, 75 aa, Homo sapiens
KRASTESGTLRERETIMNAVVGESKDGMWSGTKEHNGGDKTPGPQTRRQRKRKSTNTAEVALEEYEGYGLHVGVP

SEQ ID NO: 955128 - protein, 79 aa, Homo sapiens
MIRVACFAEKVVPAGEAFACSIPTWAINIVIVCTIAVSGLATLMLRDNTWFTSDLDYTRGREAVRLTESVDLPLLCRLL

SEQ ID NO: 955129 - protein, 119 aa, Homo sapiens
MRVVYGRYSTMTVQLYGTAKKHTAQDIPQKTDNDEEGYKWEKERNYSLELRPKELRGAARTPIGTALLGALCTSYGNAGTKVRLLPHENKERAGERKGTQGMKIQQEELRTSGSYPDYS

SEQ ID NO: 955130 - protein, 34 aa, Homo sapiens
SFCTLLLALLLDTLLLAFAPFGGQKERVQKAGQK

SEQ ID NO: 955131 - protein, 66 aa, Homo sapiens
MSSGTDRLLATGPYIERQLGHQLRGGPHKALSTNDMKVQIRGIVHCGRKRVGYTQQLSNRTEQNVV

SEQ ID NO: 955132 - protein, 137 aa, Homo sapiens
TDFMYRTGWVNRYLQMAISGALCREPPARALKVGTDARGVERRTKIGLARKKSAMEKGGCLEPSKCRERAFETATTGHGFSAGRGRPCMEGQVGPKRKLYYEVRLCRWARVEHWCYMRVRDTRNRGKCERWKRKNRE

SEQ ID NO: 955133 - protein, 115 aa, Homo sapiens
MLDNGHIPDNIADIIAVLNVSAYCYLSYAVTTLLTPLSFDKYEFGFRLPLRTVMLLAILQYFLHLHVFIMQWRLFLIISNPLQMGDYLILSPVYFTYFFSIHIKPTEIAVHSGAN

SEQ ID NO: 955134 - protein, 154 aa, Homo sapiens
ATLTTRPGDYDKGKNIKQGIQKARKELIRGHGKRGCEKGPGIEKSDKHGKKKKAGCVDAARWTSALPHAATENRADGNREKMAKKLQTYTKYNLQLGQGHSTTEEGLLDRTDSYTIRGVKCGAACTLEETGVTNVLRKTCGYGHNYGRADQRFV

SEQ ID NO: 955135 - protein, 105 aa, Homo sapiens
VRLLAAAHGLVLWLLYPNHALRRAALLLVQASWAVNQAAGMADGKLLTTIGGYMATGVQREVIIAELQLGYCPGVIVRNLDLLRGLHVPLGWQNLLSRSCMARGG

SEQ ID NO: 955136 - protein, 63 aa, Homo sapiens
MGGKGYYAGYYGLYTYRHYEYGYCTSTDVDGCGYQERHGAYDGGENRGNGEKLYGYVERMRLR

SEQ ID NO: 955137 - protein, 145 aa, Homo sapiens
SGGRDIVWRANVPRNSCVIDGEGGRRLSNSVGTLGGKRVLRYERRLADDYALGLGDRWGRAMQLYACDWGRQVGRTWHGGEKGWRRDDVADLRRIAGEATNGETGRGMDGYVETARTGGVEMIWGDCGGCKVAKHDERPVLAEFR

SEQ ID NO: 955138 - protein, 131 aa, Homo sapiens
MLYPWGGYNCGIFKFYSAAADKFTAGNAAGSGYCGGRLAFDGYAITAATYAGRAVAGGTNAAWSGAVVVMQGTCGAGTFVGTGQEGAVRACGTYLGTGQTRAAEAVNGGTPAVGGLGVYYVAYGYVGNNTR

SEQ ID NO: 955139 - protein, 51 aa, Homo sapiens
MQKSFLIWVNEERSYTGDLHGARVVTLNEVFERFCRGLKEVERLIQERGQK

SEQ ID NO: 955140 - protein, 36 aa, Homo sapiens
VLLATSPSGHADSMNSVCCTSWLNKSLPVDPVSRQM

SEQ ID NO: 955141 - protein, 56 aa, Homo sapiens
VHKLQPFTIMAANATYPGEPLSRKKLYLCYTISLQTLLNYKHSAATVTNHIFILFL

SEQ ID NO: 955142 - protein, 144 aa, Homo sapiens
SRPASPLLHAACAYSLVALRIYLRLELYRSVYTWRQTDFGWNANLITADILMTYAIDQTNPEGTPGAIVVSWEGVEVATFTHRDSAEYFVDRDLANRRESDQPDAEEEPMRYMLSVARHYLTGKITTEHAVYALRDRPVAVASK

SEQ ID NO: 955143 - protein, 51 aa, Homo sapiens
MSRAESWNLLCHGHSLSLLFCGYQALGFGFWVHRITLCAEHLRSIESHYGL

SEQ ID NO: 955144 - protein, 45 aa, Homo sapiens
YATALYPGLQSETLCQKRKKETNPDDPLAIYSLSLKHLARGQQGG

SEQ ID NO: 955145 - protein, 47 aa, Homo sapiens
DSREIPHPMLTQQVQQSTHQLSHINCNTKATVYRRSNFDNSLDHTLI

SEQ ID NO: 955146 - protein, 52 aa, Homo sapiens
IPPSARIDMLCLMDSVIEQGKYNKLQLISNHEKYRKMVMPYIKIGEPSGKDN

SEQ ID NO: 955147 - protein, 41 aa, Homo sapiens
WAMHSTSTHSWGPGVPPTTPYPAPHPYSTYTTDTPKYSCVR

SEQ ID NO: 955148 - protein, 100 aa, Homo sapiens
LYHLVFTPLDHRVIWTFKPCYTKYSLEKIVSAVKDIPDENMKVWKDDNIENTIIVIEKAMKVINPKQYIPAGENCPDVVHDFTGFTTKLTKANMKEIVNT

SEQ ID NO: 955149 - protein, 51 aa, Homo sapiens
ARVHADSAVALTAPVYPALVIRFSSVGLPFFVTPLTGKIINLEVEPSDNIG

SEQ ID NO: 955150 - protein, 67 aa, Homo sapiens
MSEVRPITGSAVLITVGGDGGCDARCLGEPFLDPGKRQLLSGKSLRLSVKIEAVTSDSTWATQSLTE

SEQ ID NO: 955151 - protein, 85 aa, Homo sapiens
HVSNWSYSCPPTPQSRKQQIRATVLDPHHSSQQSQILNPLSKARNPNMHPHSTLNRYVYHCSHDRNSNTVIVKGIHCGRLNGEAK

SEQ ID NO: 955152 - protein, 35 aa, Homo sapiens
MTSVTLTAFTHNIVDKIVKLLVNKPGPPTLHNGLV

SEQ ID NO: 955153 - protein, 44 aa, Homo sapiens
TETRKGQEGEHYQRNNITEFPGGKGHRVLDIYNGLQRYFSTTGT

SEQ ID NO: 955154 - protein, 35 aa, Homo sapiens
RTDFKTDLRFQSAAIGALQWVLAKLYLVGLVRIYQ

SEQ ID NO: 955155 - protein, 113 aa, Homo sapiens
  misc_feature (4)..(4): Xaa can be any naturally occurring amino acid
MRYXVNIIGHRLYSDYSWIHIPNILDKNGSHSTEMGSPVQNLYLFGTARGKYNKRCRASMVVYGVDAEYLMNLHNEALDKVKIYELTSRTASVASFFVLQIIEHIRTVEGVTP

SEQ ID NO: 955156 - protein, 68 aa, Homo sapiens
QKRVTYDVVVLTRRNLGAPNLSESRAVKEDIEGAGKRNSLIAAICAGPTALLGHEIGFGSKVTNRTSC

SEQ ID NO: 955157 - protein, 39 aa, Homo sapiens
DEQPHSRRLRWDNHLSLESQGCGGAIALQAWAQGSGTLS

SEQ ID NO: 955158 - protein, 51 aa, Homo sapiens
MRDEAILHVIRYYTREAAVRELERQLASICRKAARLIVSEEKKRVVVTEKN

SEQ ID NO: 955159 - protein, 73 aa, Homo sapiens
QISLITRDSDLSSTHRQSACKLDFMFPQRLSRCLRLRTLGCWNRTLMTFDCHFVCSVETPICLLSIQYLLLPY

SEQ ID NO: 955160 - protein, 57 aa, Homo sapiens
VGEKQRRRLERMLGCVEWKAMVPYYTAEILKGMDYSDSATEPCLGEGVSGTQGAPVA

SEQ ID NO: 955161 - protein, 70 aa, Homo sapiens
MTVRVPLVPEPPHGVHVWPVSRRGVKQERWGVPGVRTWERDGWSSATGGFIAKEHLASASRRTAEQNRQA

SEQ ID NO: 955162 - protein, 70 aa, Homo sapiens
LADPYWQSWTVREYYGFKLPNHRAAKRLWKVCVEHHTFYMACFLHEHAPKAKFLNLGVKFPLIVCAPKSQ

SEQ ID NO: 955163 - protein, 34 aa, Homo sapiens
GSTSRRGALTAYLYGHTTDGLGESFPEVAVNFLC

SEQ ID NO: 955164 - protein, 38 aa, Homo sapiens
GGGGRANGLSPNLQSVLLDRSHRQHIFYVTALPVGGGY

SEQ ID NO: 955165 - protein, 111 aa, Homo sapiens
PKQKQHTNACLQLLRHVPVLSYTSKQCCSVSFFLSDYIVVFCSHILPSLMYRIFQKMDLTHSPFDSFPCKIYFCAEIMSNGCHIRVGVLPFDGYVSDRAIFAVKQCVCVFY

SEQ ID NO: 955166 - protein, 70 aa, Homo sapiens
LIESRYLGGTTQNDTSMVAIETLSRFTLYHPECIIVAFLLSSNVETSTACSSFSSIKNFLKDGLDSSHTF

SEQ ID NO: 955167 - protein, 49 aa, Homo sapiens
SSFPSYAAWFDYNSVHAIELEGLPEFFNGKQKSTHPEIYPWLVLLAYRS

SEQ ID NO: 955168 - protein, 89 aa, Homo sapiens
MPVKRNILQPVPPYPDYRLLCNKLKNCLPDSKKPSPNSRSPLAVRLGTRNQKSCLPALVWKIETSECKIWRGVSGETGGRVALRTRNPQ

SEQ ID NO: 955169 - protein, 69 aa, Homo sapiens
MASWCFGANEAKPDGEGACSLQNIPGVVYWGYNSLKFHPVIICALDNPVKNDWCGDTFLLCQILLHVLG

SEQ ID NO: 955170 - protein, 110 aa, Homo sapiens
RSRVSPSRVLPTGRLSMTHLQQPAQPINLAHKASLIDQQWSPRVVAEMNDYQFKVVRIEGEFIWHSHPETDEAFLVLEGTLRIDLPEGPVYVKPGELYVVPRGIEHRTAH

SEQ ID NO: 955171 - protein, 46 aa, Homo sapiens
MTGCATYWVVGREASVHAWAFRPTIINVNSGNAATSNSKAGWFISI

SEQ ID NO: 955172 - protein, 48 aa, Homo sapiens
IAGSHAKSFCVAGFWFNPPQLPAMTGLRLDDDVTDERLTVLRDGTTTL

SEQ ID NO: 955173 - protein, 78 aa, Homo sapiens
MTGQSFVLSVETGFLHAGQARLVLLTSLIHLPRPLACAVTYQALAPLSRSECPRFSNRNWDPLASFLASTPLAPQALV

SEQ ID NO: 955174 - protein, 51 aa, Homo sapiens
ILYEPEQALVWKDGQLVQELIKVQSAHCSSLAIKEYNMLKSAGLFADMKMP

SEQ ID NO: 955175 - protein, 55 aa, Homo sapiens
GEPGYTLRQTYAKIHITIIFIGVNLTIYTHNTYSAYPGMPRTYTRDSPQIAYTHI

SEQ ID NO: 955176 - protein, 42 aa, Homo sapiens
WVAATVYIRDEVDLMLYLGIFLLYLPKKKYHKKNLECTHKQI

SEQ ID NO: 955177 - protein, 69 aa, Homo sapiens
VDMIRIELVYLWVSSIRKGPQRWGEPQAGEQVSEHISCTEPLVTILLDHKQPVCNIISLHNVAPFSRTL

SEQ ID NO: 955178 - protein, 47 aa, Homo sapiens
QASPVVQAVAQPWAQATAGKPVQCRGSHSMQHISLHRAQQCGQAMHS

SEQ ID NO: 955179 - protein, 55 aa, Homo sapiens
TNHTSSSHITNTGTHMPTHAQTCMLTPSNMAANGALAVVSENGLVGMTDSERVPQ

SEQ ID NO: 955180 - protein, 61 aa, Homo sapiens
ADLQVTPYANPSRIRKHILFNIYMIAAVCLNPKCIFYNSPMVQVIIIIFIFVAKEKKTKHE

SEQ ID NO: 955181 - protein, 81 aa, Homo sapiens
QDYPRTPNNQKVSILQWTLAGCSVIQFQYYLPGDNIRIHRLKAQSPRLPPFFRHQSQAPDSGTSDHLLEDEFPILPPWAYG

SEQ ID NO: 955182 - protein, 51 aa, Homo sapiens
HEMYWDLPHLGLRGPRERSRAKLVLHVVVEVEGVSGYLSTYGHIYPSAYSD

SEQ ID NO: 955183 - protein, 79 aa, Homo sapiens
SNDAHFIFIEMVSGSLLKVVFPFVINNVFHEGVSRNDISIQSSSFPLYSFIYLIPYGCSIYLYFWGGTGGRGTRRLGIS

SEQ ID NO: 955184 - protein, 88 aa, Homo sapiens
RILPYANDYQCYHYSRAQVKSELTTLSSYGNANADGVAVWWHVSSYRQVQLKEAKKSNLGYGILLKATKVSRNTTKLMGQVRASRVPR

SEQ ID NO: 955185 - protein, 40 aa, Homo sapiens
  misc_feature (22)..(22): Xaa can be any naturally occurring amino acid
SDLRSQENLIMYLAEIMRYSCXPELEDSQRASCCIHTSEA

SEQ ID NO: 955186 - protein, 42 aa, Homo sapiens
AIYDPSRTPMLSDKVKVKRTLPNHSATTRLEAPQGLAILTNT

SEQ ID NO: 955187 - protein, 39 aa, Homo sapiens
DPYRTPTLRHNFLEKSSSINYYVNSSCVWKSGYIIYYSN

SEQ ID NO: 955188 - protein, 42 aa, Homo sapiens
  misc_feature (24)..(24): Xaa can be any naturally occurring amino acid
MGVRRPGCFLLVRKRDSSRDSGLXEKHVGPAGRPLLIARWRT

SEQ ID NO: 955189 - protein, 73 aa, Homo sapiens
AQGGSIAETHLQAGELTKFQRSGACDWCLKKGGSLGDLKPSNLWDSDVISREIVLGLNYRTPQLVSTGRNLIA

SEQ ID NO: 955190 - protein, 70 aa, Homo sapiens
  misc_feature (55)..(55): Xaa can be any naturally occurring amino acid
PDLTRTPNDVPSPYEVIGFPTIYFSPANEKLNPKKYEGGRELSDFISYLQRRSYXNPPVIQEEKPKKKKK

SEQ ID NO: 955191 - protein, 58 aa, Homo sapiens
MPCYFFFNFGRDEVLLCCLKLEANLELLTSSDLPILVSQSVGVTGVSPCVGAYGEGTE

SEQ ID NO: 955192 - protein, 132 aa, Homo sapiens
HHHSSATVDSTRVKREHMHLRQSSCRRLLFKGKLEERRLNNATSQAQHQVQAGLFLDVVSDRVLAILHLFAGKYQTLLLRWDTLLVLNFEALTFSMVSLGSTSMGDGFASEGLHKDLHVCVSSAASLKQMRW

SEQ ID NO: 955193 - protein, 104 aa, Homo sapiens
GVHAKQLCEEWRKCMPIPISVIRRILREKQVGCRQQWLPRNKSMGHKTAVYSSMEEQLAAAVRHVSCFAARAEVRPGRAVFPTLRWVVYLAGRRKPLNDVDRGA

SEQ ID NO: 955194 - protein, 41 aa, Homo sapiens
  misc_feature (22)..(22): Xaa can be any naturally occurring amino acid
PNYPCYTCYTEASVLEMKLNVXDVMITDRDIDLCRYKNFHV

SEQ ID NO: 955195 - protein, 50 aa, Homo sapiens
SRHRTRYLGITAHPILESISTIGFTNSMLAQDIPMDAAAIKASLVQRLKS

SEQ ID NO: 955196 - protein, 117 aa, Homo sapiens
  misc_feature (91)..(91): Xaa can be any naturally occurring amino acid
VIKIHTYASSGSVTVTESNWLFSIVGRRFSTVWQVNLISSVEKEAEEENKKKKRKRDMRRRLSLDLTIHGFLRVELGDPCLMTIFGSQDVXVAQALGGRVIGPGGGGLHRLGGLAGK

SEQ ID NO: 955197 - protein, 51 aa, Homo sapiens
GVIKDPLELSFHYCSGFQGSDADLVAKLSRNYLKQGYIEKTGPSQRKALRG

SEQ ID NO: 955198 - protein, 49 aa, Homo sapiens
MSEHYTDTHAHTAHTHAQHTVNTAHTHTHSTHAATHTYTHSMRSPIRKT

SEQ ID NO: 955199 - protein, 37 aa, Homo sapiens
SRSVNTRIIEWSLHCAQSRRSLHDRVHLGDRSCTLPA

SEQ ID NO: 955200 - protein, 39 aa, Homo sapiens
  misc_feature (2)..(2): Xaa can be any naturally occurring amino acid
VXRIPGFVSAQVKGKIFVGEVNNLKVRDVHGDEEVSALG

SEQ ID NO: 955201 - protein, 70 aa, Homo sapiens
INRSCGSLHDLALLLVSLFESPLCRDIATGLNLWQSNGDYQRTTSERSQAQEYPIRTHLEAYVGTSSNRI

SEQ ID NO: 955202 - protein, 67 aa, Homo sapiens
RGLVVERAEMWVVGIELGLPWEVVDGSTKADVVDEEVQAKCPLSLASYGNVRRFSLYGIVAAGRGTD

SEQ ID NO: 955203 - protein, 65 aa, Homo sapiens
  misc_feature (60)..(60): Xaa can be any naturally occurring amino acid
MRDVLIQHSRIVNPYLLIWTSRIGLRCYPKCNLFRWVSLLDQLRILVRFDWRSHRHAVNXLRGTE

SEQ ID NO: 955204 - protein, 89 aa, Homo sapiens
GRRTVRLRIKQRHCRKVFHDPGTTSLYSLFESTSAEIKRTGSLKPFWFWVPNGNGRLSTHDIGEKQAQDINTNTLEAYVWVRARNFGKS

SEQ ID NO: 955205 - protein, 88 aa, Homo sapiens
MQSTLALTSGRASMLDSVLVVISILYRPRVHNVFSRGAPSWVTSSAIIRRTPSQTLNVTCACRLGPPCELCMTQLNYTEQTAREQSRI

SEQ ID NO: 955206 - protein, 53 aa, Homo sapiens
  misc_feature (14)..(14): Xaa can be any naturally occurring amino acid
SRIHTYAQSDDQSXVFYTISSSSSARDLLKLHAPASAEAQSAFYSHAEDTSFT

SEQ ID NO: 955207 - protein, 111 aa, Homo sapiens
TSSVDHLGMIWTIILRFAIQDISVGIDLGYGRAPSLVPENRQPSYNNVNVLETSTISWKDGLAFHALIQRHRPELIEYDKLRKDDPVTNLNNAFEVAEKYHKIPKMLDAED

SEQ ID NO: 955208 - protein, 145 aa, Homo sapiens
MATYDSTSQYSLYPIGHPVHHGLTTVAPWPAAYPAVTSYPPLSQPDLLPIPRSPQPLGGSHRTPSSQRNTDFSNSVASYENEEPACEDADEDEDEYHKPSYLVVLPDSTPATSTDAPEAPALSTPGIRDSRFSMESIDDHVTILR

SEQ ID NO: 955209 - protein, 64 aa, Homo sapiens
MVFREGFSRRSWNFDCLADTRDLWAVHIFDVSLVTPDDGLRQVYTKICIPTLRRRTQVARGSER

SEQ ID NO: 955210 - protein, 51 aa, Homo sapiens
MISLSCPHDPPASASQSAGLTGVSHRRSRQKVYYHYLTGSPRTREQISGDT

SEQ ID NO: 955211 - protein, 122 aa, Homo sapiens
VGDSKDPTRKRFPNGNYSPHKRQGGINLLINVENDNGSYFNGRGCSANVILVFFEKGMDLAKSALDLTNKLVDKRVNSQRSEGKSNSQRVRSIFESVAKQKADLFRLLLLCPASSPKTLRVG

SEQ ID NO: 955212 - protein, 67 aa, Homo sapiens
IQRIYTYAFTYLYDNILLHLQEYYFSFIIDIHSYALKKIIAISLHYFYHIMRSSNLSLYKKPVSGGH

SEQ ID NO: 955213 - protein, 40 aa, Homo sapiens
THYQEIANALESRIDDFKIHIFGLVQRIKIMSGVQVPEDV

SEQ ID NO: 955214 - protein, 34 aa, Homo sapiens
GPSSVNLVLRWLGQEAEVRNQRWEDQCGPVRSTE

SEQ ID NO: 955215 - protein, 58 aa, Homo sapiens
KLMCYAGKRHIGGTIIRGTGQLPKPPIMVGITMKKIITNAWAVTITCRCGHYREDCWL

SEQ ID NO: 955216 - protein, 50 aa, Homo sapiens
QVDRLHNSTSASHTLCPKLYLLATAERVFGCVWKNQAVSHPSVPLLKVCL

SEQ ID NO: 955217 - protein, 68 aa, Homo sapiens
MIGHARASGPGRHQRGVLNPNSRQMRSGWWSSTSVGLSFVPEFLGEALSPSRGEGHQGPLVSPEDCVV

SEQ ID NO: 955218 - protein, 77 aa, Homo sapiens
QRALGTGSHRNQCLPGDLAMEMSTQVDSVTSPYALTWWPQSRLYEQPRFHTTDHSRRVQADLRTQSRRVGVLSTPLY

SEQ ID NO: 955219 - protein, 46 aa, Homo sapiens
QPSLLEVEPSYIIKNVKAKFQDNEGILLISRVDLCWDIAGRLTHSY

SEQ ID NO: 955220 - protein, 41 aa, Homo sapiens
MGASIIRGTSQLPSSDYSGYYYEEDYYKCMGCDDYVVDVVG

SEQ ID NO: 955221 - protein, 69 aa, Homo sapiens
VFHLSRRGRCTGSPSNLVPEESVYGEKRVSDYREGDDKIEYLDAWNPFRSKLAASILGGVNQIHIKPGG

SEQ ID NO: 955222 - protein, 30 aa, Homo sapiens
MSSMFSSVASLAPTLSPRLDPLSSLRISLV

SEQ ID NO: 955223 - protein, 44 aa, Homo sapiens
MGEYEISWSRLLYLPCRDYSNAHFSAREDARLYYVHDEPLLRYL

SEQ ID NO: 955224 - protein, 34 aa, Homo sapiens
  misc_feature (1)..(1): Xaa can be any naturally occurring amino acid
XSLALSKEAFVPVLVIQNDHWKVGSVPTGHLLAA

SEQ ID NO: 955225 - protein, 48 aa, Homo sapiens
ALFRDNTRQPLRIFQNKRVSIKAERQLVNSFLLDKLHVIFSTYPVGPH

SEQ ID NO: 955226 - protein, 34 aa, Homo sapiens
VLSNVAVCTSVFSNAVPGHACRCSVNAGRVHSRC

SEQ ID NO: 955227 - protein, 36 aa, Homo sapiens
DLVLSLAQSKEASSGLVIQNDTGNRFSPTVIVAAIT

SEQ ID NO: 955228 - protein, 72 aa, Homo sapiens
QLVRVPRSGQPDRRTLPNSSRAAGTTVTHMTLGMRRREDIGKFLPVHLEKGILKNDPFQILDRTVWDTLIRE

SEQ ID NO: 955229 - protein, 51 aa, Homo sapiens
HNIQVTKNLQELVHMILWEGLDTAYACYDDLKRRSLRDSSPTPRKDCLAGC

SEQ ID NO: 955230 - protein, 69 aa, Homo sapiens
MAGDGKMLKLSSSSLGNKSETLSLLQIQKLARHGGACLYSQLLERLKRRESLEPGRWRLHVGPTITTLH

SEQ ID NO: 955231 - protein, 83 aa, Homo sapiens
TDLTHMQFLSATSETIPIRSDCLRGRADYSPIRLLDINTYKLMCNVRYDITEFFSQHGNIIIFHISFLQAFLGDRYYRIAALR

SEQ ID NO: 955232 - protein, 106 aa, Homo sapiens
DVNIVNMPEIYTFFFGNRSQSVTQACTQWHNYGSLQPHNPRLNYSCPSVSQVAGTTGVHHHGWLFLRKKMFVERVSPYLAQACNKLLGSSNPPVLASQNPGFKDMS

SEQ ID NO: 955233 - protein, 47 aa, Homo sapiens
NDTYPHLGYHQPDEANQPERLNAGAYFLCYTLSRLPSPTHRTDLQSE

SEQ ID NO: 955234 - protein, 63 aa, Homo sapiens
MPVPLGCRHEAYQHRAAAACHLARDSVGLADLVRPVASTHGDDGELVQDDGPTDGGGQLLGAL

SEQ ID NO: 955235 - protein, 158 aa, Homo sapiens
KRCQLCNLLQKVTSSQSGFGTFTAGLRNHKACTVLHEYVQSRLNFSEGVWYLSSSREEDNAPVEGVEAFCLIHLGSCVPQSVGITLDGCELRNLSGFAVGARAMSAKNSALAEAAKYSDVLPEISSSSSPSMWLYKTLEDFIKAKLAESLQGVAKESR

SEQ ID NO: 955236 - protein, 62 aa, Homo sapiens
VDSFNLSTLITSTRTHLDYSCQHDPWTITMIDRPHYSRDQPENPLYDLDRNGEVRELGLQDF

SEQ ID NO: 955237 - protein, 40 aa, Homo sapiens
LSLVISASPRHNYLPDPGGWARSDWLYQMHLDRQESWLSG

SEQ ID NO: 955238 - protein, 79 aa, Homo sapiens
IYGSLSYERISVTALFRTRYKRSPASASRVARDYRHATTMTRLIFVFIYVADEVFAIVWPRRGLATTCTSRLILPDLKP

SEQ ID NO: 955239 - protein, 67 aa, Homo sapiens
LSAVNAPPSAVSRLFACAEGRAVNIAGLPQTCVHVWKRELRICVYIIDYARESQISLFYFRSEKPYR

SEQ ID NO: 955240 - protein, 106 aa, Homo sapiens
MWVGKRPERLEGVGVAPLCSDQYRKNFFVEEEDEKVDIDFGLVEEFHDSHTLILERQEILIVKLKSLHVHTQELGIYFKLSCLISRRDVKDDVSEVRGGKIFNFHQ

SEQ ID NO: 955241 - protein, 77 aa, Homo sapiens
VSSAFPAGEQYMPRLHQSKRATILNGPNKLTNGSSYPSDNSSKPILEAITTVGLTTSMLDQNIAMEQPLLKTLMFND

SEQ ID NO: 955242 - protein, 97 aa, Homo sapiens
RTSRCVFQRRGGFPEAVISKAGLGCDSEARRSPRDESCLNFGASHLLREIPGFSRHMHISQKTHTVMDTQIQKILVGLGVRPTAGTARALVFLPPER

SEQ ID NO: 955243 - protein, 68 aa, Homo sapiens
MYDMAQNPLLGAAFCQGNLCSGNQTSAPMRLGSGLQREPGSRLAQAPHKRPRRLWADSGSEGTAASLH

SEQ ID NO: 955244 - protein, 75 aa, Homo sapiens
MGVLLRLQKMVILLAPVVDTSVPCAIYKLASAFRNLELIKLSTGESIGSTLKSVWTSEVFQTAPGLHSHQYYTCE

SEQ ID NO: 955245 - protein, 36 aa, Homo sapiens
WVYYEEDYYKCMGCDDTRCRCGRYPEDCWWPMKIVG

SEQ ID NO: 955246 - protein, 71 aa, Homo sapiens
VSSASLVMGPVSRVAVLCLRFVVMGPCSGCCSVCELRGDGAVSRVTVLCVSIVMIGTLTRTGASTRYETRE

SEQ ID NO: 955247 - protein, 32 aa, Homo sapiens
MPWACARIHVVSMWSITTVSIALAWEGILSAV

SEQ ID NO: 955248 - protein, 130 aa, Homo sapiens
AFPAGISSRPPEAPLQTGISSRPPESRAPDRHFLKASGVSPPDRHFLKASGVSPPDRHFLKASGVFPPDRHFLKASGVSLPDRHFLKASRVSLPDRHFLKASVVSPPDSYFLKSSEVFPPDSHSLRSLEA

SEQ ID NO: 955249 - protein, 78 aa, Homo sapiens
YPLSDALFVAGVARGVLSTRSLGLGWGGGPLRAPSRLPGRLAPSASLALAPAAAAAAAAAAAAAEELEDDDDEQDLRR

SEQ ID NO: 955250 - protein, 46 aa, Homo sapiens
MLLRSSLRIAGALVNPGHPRYEVVSGKGMIRVSWGRNDLTYSQTLN

SEQ ID NO: 955251 - protein, 93 aa, Homo sapiens
MSQQPLQHQQAAVSYSARQQVFKPSFNSTHSTGNTSGGGGGAAMSHIQQEVKPQTTPANNSTVKSTNPSVLSSLITETSHQNLRILRLGPSDI

SEQ ID NO: 955252 - protein, 56 aa, Homo sapiens
MLCGPPMNLEGAVGTLLWSPRRRTSLLRVVMSSLLGDDVVDGLVLPASDEQGEGYR

SEQ ID NO: 955253 - protein, 49 aa, Homo sapiens
WPVVDNVASPKTQSWHLNCDNQQMPHPGPHRWMIGRALAVCPKSWEGYT

SEQ ID NO: 955254 - protein, 73 aa, Homo sapiens
APVLWTVVSPLAVAGDPMCLADLPVTLPASPDCTIVPGTYGVPTAMDRAGAREHVCQDGLIIHRTVYRRSNFD

SEQ ID NO: 955255 - protein, 82 aa, Homo sapiens
LRGSARLIAPRFPTAVNAQTGYMHMWYISPWNTTQPCQEHDRLGVVASAYYSSTLGGQGVWLAGAQEFITRPDDRVRLHLKK

SEQ ID NO: 955256 - protein, 40 aa, Homo sapiens
YASVTAHPILESISSTRVYDLECWSQDDPDGAAAIAEHGG

SEQ ID NO: 955257 - protein, 198 aa, Homo sapiens
RLRPIREYYKHLYANKLENLEEMDKFLNTYKAPKTKAKEEVESLNRPITGSEIEAIVNSLPTKKSPGPDGFTAEFYQRYKKELVPFLLKRFQSIEKEGILPNSFYEASIILIPKPGRDTTKKGNFRPISLMNIDAKILNKILANQIQQHFKKLIHHDQVGFIPGMQGRFNIRKSINVIQHKQNQRQNHIDFSIDAERL

SEQ ID NO: 955258 - protein, 68 aa, Homo sapiens
REDIIAGYGSYDTKIIQVLTFQTRDVTAAANQMRNFRVLILLMPSLRTVGEIFDSWGLDGDSYELEGH

SEQ ID NO: 955259 - protein, 49 aa, Homo sapiens
AHTRTHMHTQHTHKRTAHTNAQHTAHSTSTLHDAHSHTERTVTRTHIAH

SEQ ID NO: 955260 - protein, 51 aa, Homo sapiens
RSCVYQLSSYQQEVNVRIPDGSKMRVFSHQRILYIDLLLVIKNSSLMGARC

SEQ ID NO: 955261 - protein, 36 aa, Homo sapiens
LRSSDQRHCVTLRWTAVFDNQQEVNYRNPLYGTKTA

SEQ ID NO: 955262 - protein, 95 aa, Homo sapiens
MGTGHQLLPANQAQSSPLSDFLPEVQDVSKLMAWAQLTFSERQDVVGDDYMGLRSDVKSLVDQCGFSDMPSHVNGGRVCYYSGALRPYIHPRPQR

SEQ ID NO: 955263 - protein, 69 aa, Homo sapiens
AHLPHNVLLVWAVVLFVLCVRVLCVGVLCARVCARVCVYAVRKCVLCVSVCAVCACVCVCVPRYLIEQV

SEQ ID NO: 955264 - protein, 43 aa, Homo sapiens
LANHIAVLPTIRCQPHPDLPTTHLLPTNHRLANHITVLTTTSP

SEQ ID NO: 955265 - protein, 36 aa, Homo sapiens
NHNLLAKHITYHITVIANHITVLPTTSPHITVNHIT

SEQ ID NO: 955266 - protein, 50 aa, Homo sapiens
TFSYTSGDIRKHTTNNTDINTTHEQTQTHIHMHIDTQAHTREHSTHEHST

SEQ ID NO: 955267 - protein, 54 aa, Homo sapiens
KPATEFEGVDSELSSQPLLKKPLLSMLSSHTLKLARMESLTVSLISCTWLLRKL

SEQ ID NO: 955268 - protein, 39 aa, Homo sapiens
SVDISALPISAYTTSPFANLITVLNHIPSCQPITVTTSP

SEQ ID NO: 955269 - protein, 44 aa, Homo sapiens
YPEKASELKYSTYVTVAANTPRYMAVSTGHILIRIDFLIWGPGL

SEQ ID NO: 955270 - protein, 60 aa, Homo sapiens
SCYPFCSSTSAQHTHKDTAHTVTHSTHTRTQTHTHTAHTQAHRHTNAQHTHTHASPQLHT

SEQ ID NO: 955271 - protein, 135 aa, Homo sapiens
LLENLAYMKSSGTDFEPFVRNDIPLEKHVASLAKPGTFAGNDAIVAYARYHQLNVLIYHLNCPFVADSWYREKQRAGVQIVCRYGEHHDSVRRILDNSEAPAYLQTDVSKASAYSRYSPPYWIQIESCISGAKNQ

SEQ ID NO: 955272 - protein, 64 aa, Homo sapiens
EFPPVTDTSMYLSPELLAVGLVHCLLDQLYAFTIMCASMGHRDPIWPRNHPPLRKSLLYSLVDP

SEQ ID NO: 955273 - protein, 70 aa, Homo sapiens
VWGGWLAGQPLRDRGWAGAEQALREGLLGTPETRGRHGRLGWGQSKGPERGRDLLKVILPVLADPVRHNR

SEQ ID NO: 955274 - protein, 69 aa, Homo sapiens
MFTKLFVPVLRTEVGANRPAGSRMHAVVWAQKAFPRPILRSPRRRIRVQCDSGAGNPQQSRRTHVRDKR

SEQ ID NO: 955275 - protein, 42 aa, Homo sapiens
MLPQNYYARGSSLASPSRCRLERYQARLELWVSKSSTLPRAS

SEQ ID NO: 955276 - protein, 39 aa, Homo sapiens
TLHLVSRWLPSVDLNVNSNEGKQKKRGGGGGFGYQKTKK

SEQ ID NO: 955277 - protein, 33 aa, Homo sapiens
VRSPARRLYLAGGLCCFVFLLDLFARHARLLVD

SEQ ID NO: 955278 - protein, 35 aa, Homo sapiens
LQETDYTTLIKATNFIGGLQYLYIETIRLLPYHCI

SEQ ID NO: 955279 - protein, 61 aa, Homo sapiens
  misc_feature (5)..(6): Xaa can be any naturally occurring amino acid
LFKAXXSRLVNFMENSTLIPFISITSVLPVLGLHVFVGPAVICPLPMILSTISLLSLLTLV

SEQ ID NO: 955280 - protein, 42 aa, Homo sapiens
LRLFPGTSTVTVRADAYAKEAVRMALVNLGAVAAPAGNMPVV

SEQ ID NO: 955281 - protein, 42 aa, Homo sapiens
MAAKHSKLTCRFCRKSFSKRAQVKRKVQLFEMNARTVVPELD

SEQ ID NO: 955282 - protein, 58 aa, Homo sapiens
IDLYAELSGTTSHFDTITDPPVVLVTAKVKPCAHCVSSALDLLFAFDEACWHRRGAGR

SEQ ID NO: 955283 - protein, 70 aa, Homo sapiens
DISKHNRSGARLTGMWELNQQVLLAGQLLTFSVILNVSDNQRRTLAVDPFICEYNATRVPPLYDRGNLYR

SEQ ID NO: 955284 - protein, 30 aa, Homo sapiens
MSLFGYDYQREMKWPPGAPRLSYQLTYTML

SEQ ID NO: 955285 - protein, 39 aa, Homo sapiens
MSYSFFTAAYIWCLLALTSHNEHKCVVVFYPSSMARLQW

SEQ ID NO: 955286 - protein, 37 aa, Homo sapiens
LGTYRSGVTVQHLVLGVVHHVAIVDFITVWIEHWDEV

SEQ ID NO: 955287 - protein, 50 aa, Homo sapiens
TLAFIRRRPVRIYIGICLEGNRKGHGFVTAYTLELSRADKLMDAASSEIR

SEQ ID NO: 955288 - protein, 115 aa, Homo sapiens
  misc_feature (18)..(18): Xaa can be any naturally occurring amino acid
MCPQLSLEAVAEEKLMEXPYFPKTLRELEVVEGSAAKFDCQIGGYPDPEVVWFQDYPSIRESRHFQIDYDEDGNCSLIISDVCGDDDAKYTCKAVNSLGEATCTAELIVEHHGGR

SEQ ID NO: 955289 - protein, 81 aa, Homo sapiens
LLLPVSTSLDRMTGCGQNAGHLGLGQTGSQPRLGNSLNEGSVLFSMDGLRHERALVERPKKLYPVLRYLKTRYSVFFIDRG

SEQ ID NO: 955290 - protein, 130 aa, Homo sapiens
  misc_feature (10)..(10): Xaa can be any naturally occurring amino acid
  misc_feature (27)..(27): Xaa can be any naturally occurring amino acid
AEKLESEEDXVQAFSLRLLLSEKPHVXTYFSKTIRDLEVVEGSAARFDCKIEGYPEPEVVWFKNDQSIRESRHFQIDYDEDGNCSLIISDVCGDDDAKYNCKAVNKSWRSHLHSRAHCGNDGGRAKGEDE

SEQ ID NO: 955291 - protein, 119 aa, Homo sapiens
LQDLRSSAAHNENFLNTSWSSPAGMGSGLCDPSDESPSQEHHWTLSSWNRIKAVLSVACVQVFQTLGEDWYVLVGVAQDQILNPRSVAGGFVYTYQLVDHGEKLEFLHKTPVEEVPAAI

SEQ ID NO: 955292 - protein, 105 aa, Homo sapiens
MWVRRLLRTTIVVMSELITVYLAPVTDEAVYAPSPSRCYQETGLLLNPKFLGETYIRRVRMRPGVACSVSQAQKDELLLDGNDIELVSNSAALIQQATTVKHTDI

SEQ ID NO: 955293 - protein, 87 aa, Homo sapiens
  misc_feature (1)..(1): Xaa can be any naturally occurring amino acid
XDVEHAHVLFLAAFTRVCSLTKVHNLSRFDSLGQKLWFLFKVVMLHTKLSQKKPGVVYVEVIRVVIADHPALPRAPGFFRVLAYAGG

SEQ ID NO: 955294 - protein, 66 aa, Homo sapiens
ELGRSRTRYQPSTARYAVSDHTITRQYHQATWKLYEHYTYREQSFCQCQLDNCGLLSVTDTGDAGK

SEQ ID NO: 955295 - protein, 38 aa, Homo sapiens
MMIQPEVAVQDDSIRSPHFRLLDEEGLLFNYQVMFAGM

SEQ ID NO: 955296 - protein, 37 aa, Homo sapiens
  misc_feature (1)..(1): Xaa can be any naturally occurring amino acid
XAAQHIMPDPQPTKRSQGLNPQPHGSYSDSFPLHHDG

SEQ ID NO: 955297 - protein, 36 aa, Homo sapiens
LRRLRCVRGAVVVGGARRGSVGAVGRCRVRVGSGGP

SEQ ID NO: 955298 - protein, 38 aa, Homo sapiens
MGYEMMSSGAVNGYCRIRLRVNPAHGRQYQWIGAGDML

SEQ ID NO: 955299 - protein, 72 aa, Homo sapiens
LEDPRYNAKAIIMVMLCMMLIQCRAPKLSVCVPDCITSRSRCYASGEHTDIFECTELIKIMHNISLMIALAL

SEQ ID NO: 955300 - protein, 97 aa, Homo sapiens
DLEDPRYNAKAIQHIAEATLDICGGGAPRARIEDRDIAEDARHQFTAFCSLPPGRFRAQAQAAREFQRAPPEVLGFGVITLTPGRARSSQSRIALAL

SEQ ID NO: 955301 - protein, 83 aa, Homo sapiens
DPRYNAKAIRIMPSGRTRRVKPFLRSCSQPRVVPTAIFHPNRGMQMVGEHDVSKDGMRNTFARRAPCGKKRIDFTDQKIALAL

SEQ ID NO: 955302 - protein, 99 aa, Homo sapiens
  misc_feature (1)..(1): Xaa can be any naturally occurring amino acid
XGYNAKAIASGSLFRRVVLRGINGTFGARAATEAAGGSVKRSDPAVATMTAPGFALGKFADLKRRLWFLVGALIVYRIGAHIPVPGIDPVQIAKLFETQ

SEQ ID NO: 955303 - protein, 66 aa, Homo sapiens
EYPKRQIEDRLAWLIRIFVWLVFFFLGLDPGLKMERDKGNSSRWKEDSPKFHKAAENLDGPWWFLN

SEQ ID NO: 955304 - protein, 35 aa, Homo sapiens
LCWKLDRRTCLTTTSERVTCTVLVLEVDQIFDFDA

SEQ ID NO: 955305 - protein, 63 aa, Homo sapiens
MRVSQLGMYVRVAIETVPCELVQNFDPYYPIILGGLGNSEGNVGHVPMHLKQHRWYKKTLKIT

SEQ ID NO: 955306 - protein, 161 aa, Homo sapiens
  misc_feature (10)..(10): Xaa can be any naturally occurring amino acid
AWQGPMHLRXDDRILMCLESNAHCLTIVSNRGAAGQVLHEAAAQVVQWVSFADSDIVPPGSTWVFPTLGIMHHNKQATENAKEEVRRILGLLDAYLKTRTFLVGERVTLADITVVCTLLWLYKQVLEPSFRTGLSQLQALFPQLHLTKPQFRAGLGEVKLC

SEQ ID NO: 955307 - protein, 111 aa, Homo sapiens
VISENRLPLTSENKWCQFSAGVQFAENNGFQLYPCPCRRQDLIPLYGCIVFHGICLTGNFPTDLPLIMWALVTQTICARHSGQSQHHSLRLAPRPPSTPVTLTPFSLHRDH

SEQ ID NO: 955308 - protein, 44 aa, Homo sapiens
DPEDYTVRRIAPVHCQRIDTVTVKRIAPLTVKRIARVTVKRIEP

SEQ ID NO: 955309 - protein, 34 aa, Homo sapiens
MVHGEVYNFGIVIILTVYLFVAIAIQAPYTWETV

SEQ ID NO: 955310 - protein, 49 aa, Homo sapiens
SDSRVSQRIDRHLSGGLTAHCKADVNRHCQRIERHCQRIATPLSRRIAT

SEQ ID NO: 955311 - protein, 37 aa, Homo sapiens
NICRVDIIPASSCCLCSYRLNVQTTHNLYSLSHPACV

SEQ ID NO: 955312 - protein, 106 aa, Homo sapiens
MPAIHHKGRFDLRYCADQFLESLHWVIPLDYINEISLDCPGLEWSTDTGQHITENDYYTPTGEFRVDREGSPVLFNCLMYYIVTIALDGLYTEAKRPPGFDRLRHA

SEQ ID NO: 955313 - protein, 45 aa, Homo sapiens
TAEYRFEQQNFDRCVGYRGGIIAPPNIAQPFAAAINVVGEHSLRP

SEQ ID NO: 955314 - protein, 46 aa, Homo sapiens
LELELNFSVLPLLCLMLCEVLLEEFCKLTEQSCSNVPWDVAALPGV

SEQ ID NO: 955315 - protein, 100 aa, Homo sapiens
MRGGRPRLCHTVDATIYGLCMWSSVCEINKVQAGLEVVVGVLKEESALPQILGFPDVRPLEDARGAFLSTLLRHIICSLCRFLWDRLNKMIRMIKCEQKD

SEQ ID NO: 955316 - protein, 151 aa, Homo sapiens
RVVLETTGSDCTEASQSRAAFPVLRGTSISSTGPACLQSQQMIPVAVKRIPAFWTVSFGWQLPKIDAPLKLTVCRRRNPQKLIYRLRTTLDYVLNVVTLKQKHVLCGYCYEKVCKETCRNQTTAREARRGAYKGSHHRDCGAVHRRDNRSE

SEQ ID NO: 955317 - protein, 41 aa, Homo sapiens
HEDSLFYIYGSHFFGHRLPRTSRHYWLTFLTICFIRQLIFH

SEQ ID NO: 955318 - protein, 50 aa, Homo sapiens
PIYMRIGLVGHVRLKSGRVGEAEQQPFVRLQFQASSQEGSLLTAWVGAEQ

SEQ ID NO: 955319 - protein, 95 aa, Homo sapiens
GIFSLSFWPKDQASKMYLISNKWRPGHDGFSQTADSSIGASCSFPGRFISLINLEGRSGRVSTGHRDRQHPLRKQLHWKVPGVPGHIFARSSSSP

SEQ ID NO: 955320 - protein, 96 aa, Homo sapiens
TRGPHWIADKGDGGCEVLQKTRFKCLFLFYQQRRNESRVEENAHLRQSVTGQLYTQDQPVIDKSKPWVLLLERQRNNLAFQGRRKARDILQALGSS

SEQ ID NO: 955321 - protein, 65 aa, Homo sapiens
MDAGYRDQKRRSSVAITAIAKYRWNFVVAQCMLVLLRMRRAVACLTRAETGFNVWKYTSCHIHKV

SEQ ID NO: 955322 - protein, 103 aa, Homo sapiens
SGVIHSSWWVRGLAGFRREAADLCGRCYQQINAMRTQMSEQQQDLLQRAQEQSFHSVEGDQSGLLLLAQAACIFFLFFFFFFWARGENPPFTGTRVQIGTRGK

SEQ ID NO: 955323 - protein, 72 aa, Homo sapiens
  misc_feature (20)..(20): Xaa can be any naturally occurring amino acid
  misc_feature (51)..(51): Xaa can be any naturally occurring amino acid
EVVSPISQGSCADELCRMSXRGAILNVTQLVQKRTADHCDSYLICWLGLIXPESTSVSAQNSDTPLLPPAVP

SEQ ID NO: 955324 - protein, 31 aa, Homo sapiens
MRRSLIVIAPLSPKPLTIQGCTDQTAGFQAV

SEQ ID NO: 955325 - protein, 42 aa, Homo sapiens
IELGTCQKLRALFIYLPIHVADSDGGRGSLLRDLAEAAPAGV

SEQ ID NO: 955326 - protein, 113 aa, Homo sapiens
EVVSPICYAGDTPCYLDATTPALDLILGGRDAIIRFVVECLIEEDDTPMQGFTRSSACQQQLGVRKRRFFSVFSVPMDCSRLANAPSGLILAARMPLPGATMLVSDVRQFLLL

SEQ ID NO: 955327 - protein, 101 aa, Homo sapiens
FLINLAYSNLCYFHDGAKVNIHSHISTPDFFLYNCVCVCVCVCVEEGSGEKSDNLSVRKESSCLDKGRSLSVAIMTGGKCGPESKARVGPPGGKERTEFAL

SEQ ID NO: 955328 - protein, 39 aa, Homo sapiens
  misc_feature (1)..(1): Xaa can be any naturally occurring amino acid
XRLGVEFMFQEPRPSQSQGFTADPKPLSTSAKAVVNIAD

SEQ ID NO: 955329 - protein, 107 aa, Homo sapiens
NWKNLAGIAHLLSSPGLVYETVTTYGQARQWLTPVIPALWNAGAGGSLEVRSPRPAWATKARLRLQKKKKTCFSDFHCVTIDEPLMIHNYKLGVVTCSLSILQVGLI

SEQ ID NO: 955330 - protein, 69 aa, Homo sapiens
HTAEVRTVILQNGKFCCLILLLKASSQRGTWLYEVSVGPYWEVISHLGYSRVRDPLEEAVYLFSDLKLH

SEQ ID NO: 955331 - protein, 55 aa, Homo sapiens
  misc_feature (42)..(42): Xaa can be any naturally occurring amino acid
MIQHSRKADVSGNQVCSNTTNSLVLGTTASAWSTDQYSEKCXINTAMMITLSGAG

SEQ ID NO: 955332 - protein, 87 aa, Homo sapiens
MADDVLLIIGGSDKITYDSDRYQITHIFVQAGEMYIESVVILQRLYIRQQETGSHDYLYPTGNWELKGEARSLLMDHLQVKRLRMVG

SEQ ID NO: 955333 - protein, 32 aa, Homo sapiens
MYAAAPLLSLQLGCSVAEKCPRRPRGVIQKLS

SEQ ID NO: 955334 - protein, 48 aa, Homo sapiens
VFSRLFVRRLEPSRQLFVPKLVPRVASMVVLRIPGSAMQAGLAVLSAV

SEQ ID NO: 955335 - protein, 33 aa, Homo sapiens
DGALQFPCQGIGTSEFMCRRNQATSSIRACMWG

SEQ ID NO: 955336 - protein, 139 aa, Homo sapiens
PAWAVQPDADQSQRRVALGAMQWTINSHFLNALKMMMHGSWSTSSGASWNGKAFSFPVSKGSLSSTAQKADVKYSGSVHFTGVGGRMDLTLADPEIVVNNGDDHVIMSVKSKTMVGQSVDYGRITFVDMTGSITQGQND

SEQ ID NO: 955337 - protein, 38 aa, Homo sapiens
MRPDIINSDLAATAMRGLSLVPYSLRIDSDSNYHIVFI

SEQ ID NO: 955338 - protein, 51 aa, Homo sapiens
GKLKRSRRSADRPILPSPSTEAHYFISATMHPQSKEFVYNPKRVNLEVCYP

SEQ ID NO: 955339 - protein, 47 aa, Homo sapiens
PPRAGGHAEIVLCLRIPSASGRRSAVSDMAPDVPVTSVIRRQATSQM

SEQ ID NO: 955340 - protein, 70 aa, Homo sapiens
MTSCTMTSLSDDVTVAMTSCSDDVTVSDERHCSDGRHCQRLTVMSAIDRHCQRLTVTAAIDTVTVSGLNL

SEQ ID NO: 955341 - protein, 151 aa, Homo sapiens
TWSAAICNLTHQSWLAQRMKKAAGVDSTLGSELHLKMNIGHTYHLCNIKEIQNRVLNTMLAKTGIHHYSDNNCKACRKYYRVCTLAIVNPGDSAIIKRMNLGGRGCHEAKIAPLHSSLGDRERLHLKKRIKENNNNNVTIKSWFVNMCLHH

SEQ ID NO: 955342 - protein, 229 aa, Homo sapiens
MFGASGKKFVEGVDNDYHDDNMSYSQSSMFPHRSEKDMLASPSTSGQLSQFGANLCGQQSALGLPMRGLSNNTPQLNRSFITMCISCFRSIVTPTPGVPTMSLHTPPSPSWGILPFFPRNMMIHSQVGQGIGIPSRTNGMSSSGLGSSNRSSPSIICMPKQLVYFFFFTVNSMSGFGMNRNQAFGMNNSLSSNIFNGTDGSENVTGLDLSDFPALADRDRREGSGNQLH

SEQ ID NO: 955343 - protein, 107 aa, Homo sapiens
MYDDYSWIGVCAGHFMAASLGSNLLFEQQQMLVFWKLSSLNEVFTANARERQTDDELDTDDRVHLQRNAHPELDAGISYTCFKYQDCDSFLFAGPFQIQLLLQEVGN

SEQ ID NO: 955344 - protein, 137 aa, Homo sapiens
PASSWCHLMIWAVLEGFPSSYKMVCEEPSIRSGGPVSNSYSWPECHPRRSSKREMRRSLPVVLGSREETLLFVPLLGLSDAENLSAGRVFCSPISSKIQADQVAAHDLCSGSWNLTLVALGPVSMAAEHLLPGPPPI

SEQ ID NO: 955345 - protein, 66 aa, Homo sapiens
IDISTVRTAGVAAAAAAAGRGPIVCVDVLATRCVDMTRGTCDISWSHSTTLVVKEQLGGSHRALSQ

SEQ ID NO: 955346 - protein, 57 aa, Homo sapiens
MDQVGVTDSARLGLILDFLPPPQLISSRELVAEAPIWSQRATATIDVDGPSTLIGNE

SEQ ID NO: 955347 - protein, 62 aa, Homo sapiens
MIVSFHEHLMVLSVPGISPTGSHSHSYLPCEEVPSTVLISIRRYRGSNFDNHSVIASFPCCE

SEQ ID NO: 955348 - protein, 32 aa, Homo sapiens
MQLQTHSAVCKHTIAAFKHTVQLQTHNAASNT

SEQ ID NO: 955349 - protein, 48 aa, Homo sapiens
MSDLSRTIGLYKLLSICLYFLELFFIIKDFRDSHSEGFYQLTHAPSPK

SEQ ID NO: 955350 - protein, 65 aa, Homo sapiens
IVCLQLSNVNRTLILFNVSKKMTQSSYKCETQNPLSARRRDSVILNVLYGPDSPTISPLNTSYRS

SEQ ID NO: 955351 - protein, 193 aa, Homo sapiens
MVKPVPRGKTALCLQLLQWQKRPSFYSMSQRDDTVSYTMLNLEKPRRVPGAHDSVILNVLYGPDAPTISPLNTSYRSGENLNLSCHAGSNPPAQYSWFVNGTFQQSTQELFIPNITVNNSGSYTCQAHNSDTGLNRTTVTTITVYAEPPKPFITSNNSNPVEDEDAVALTCEPEIQNTSYLWWVNNQSLPVSP

SEQ ID NO: 955352 - protein, 30 aa, Homo sapiens
MTCLVKKRPKAQCYTQHCEVDWFDFRGPEL

SEQ ID NO: 955353 - protein, 99 aa, Homo sapiens
  misc_feature (56)..(56): Xaa can be any naturally occurring amino acid
PCVRDMDEAGSHHSEKLTEEQINQTLHVVTHKWEIDQEVFNWWPLVVPRGTLGSSXHPCADMTRVERAPGYLDACSPGYTCSTHLSLQRDGSCHRTVIH

SEQ ID NO: 955354 - protein, 63 aa, Homo sapiens
INDDSHSQSRLSLLSNFSSSYHIQVITAYFSNSISLSVIPVSYYIMLTSNSFLHISELDRAAD

SEQ ID NO: 955355 - protein, 41 aa, Homo sapiens
LTSTQSTLYHLCLKDQCRVLWLMPVIPATWDAEAGEWRGPG

SEQ ID NO: 955356 - protein, 75 aa, Homo sapiens
RGFTGAELSHTLTGSELKHALSPLHSVNCQQMLLWTWGAPCWWKLCLWTGGSGRYSTWIRGELMYEANSIQPKAC

SEQ ID NO: 955357 - protein, 37 aa, Homo sapiens
RLTATLPLRYKSFSSLHRSPSGWRITVRAATSARGII

SEQ ID NO: 955358 - protein, 69 aa, Homo sapiens
SCFAYSSPITLTYTYTHCPGLRHRYDVIHMTAYSSLASTWGPCVNKRMADSEGWKSLCPNDIVELLNQP

SEQ ID NO: 955359 - protein, 54 aa, Homo sapiens
MNLKHLVLVMGQACLEEHRIHPELRVQEGHVAVHLHEEVDALVPLVEVGVIMRQ

SEQ ID NO: 955360 - protein, 37 aa, Homo sapiens
RLGFMSLKTRTIYIALLHRDVLIPYIEFVYPIVDMDH

SEQ ID NO: 955361 - protein, 57 aa, Homo sapiens
  misc_feature (29)..(29): Xaa can be any naturally occurring amino acid
  misc_feature (36)..(36): Xaa can be any naturally occurring amino acid
SRSEVGKGSGHELALRPGRGSRFTIRYSXVPVLNHXPGEAAQCHLQEHKALVTCHNL

SEQ ID NO: 955362 - protein, 69 aa, Homo sapiens
LEDPITELELKNYKITLMKKSLPVFLVYEMLTLRNWDPFKLHAAGSYYDDYMQCGPKGNSEGTSCRLYL

SEQ ID NO: 955363 - protein, 93 aa, Homo sapiens
  misc_feature (39)..(39): Xaa can be any naturally occurring amino acid
MFVYVDSRGVTAQRVTIQLQENKLNMRTDSTLCSYLPAXSPVPELSPVSLYQTKLMTHNGLFSAIPYLMAVSADDATSSQQTPQAQLHRYNGL

SEQ ID NO: 955364 - protein, 35 aa, Homo sapiens
SHGFCALSPQAGMCSGHASPSTAPSASQVHVLLPP

SEQ ID NO: 955365 - protein, 42 aa, Homo sapiens
PCRIYLGGLQLIWGELDSDAPVGAKATILHLYSSLVLFAVFL

SEQ ID NO: 955366 - protein, 36 aa, Homo sapiens
ATLYCIFRTILADSNNSNFSSIKTIVKVIDIRTQGT

SEQ ID NO: 955367 - protein, 33 aa, Homo sapiens
QQWVNILAQVVQVALGPAHQRRFQLRLEFANQR

SEQ ID NO: 955368 - protein, 39 aa, Homo sapiens
PKLSFRLHSSHSKYPRHHLITLEAALQKHRPLSLHIIPQ

SEQ ID NO: 955369 - protein, 70 aa, Homo sapiens
PVRWDMQAPTVSRGVRLADSNGDKKKAMEDLTGITNRKGGQRWHCTPNKPAAAHATWISEPRPEGNPEPH

SEQ ID NO: 955370 - protein, 106 aa, Homo sapiens
QASEELNEISELVILFHYIRPFRNYPATPNCSTEEHSISHCCNVKMPAAFLQILWSTSMAGTLHKGESLIVKHPDDAKSLTRNPGEESEISPPDSPQNQAHRSLVP

SEQ ID NO: 955371 - protein, 70 aa, Homo sapiens
LSIHTSIVGFPFRLRYRHQVARQASVPRSYPSSTNARRLPCRLITGRHQRVSAWNHRAGRPLKAGIQGNV

SEQ ID NO: 955372 - protein, 137 aa, Homo sapiens
MERRDGHICKRRNTASFTFVRILCLHQCDAGRSEEIGITSKPGLSSNISSMMYKLSLLPVEDHVFFELLTILSSTSHEHIVRVGLFGISWVRHGIDQVLQPMDIYQEYNKSVSYYFLYQMTQQLYIWCAQIVFILPI

SEQ ID NO: 955373 - protein, 113 aa, Homo sapiens
MTASAMKTGSALCRSPKPLSTGQQGLVAGCGFWCGLSEANSAEFPKPEDIVCLGWGPCHPWECCPLCRLLLEPATPLRWIFIRGLQGPPFSHVFLRCKLQAPAIVTDVCSLTP

SEQ ID NO: 955374 - protein, 45 aa, Homo sapiens
MSYGVSVCAGSALPQHRRRAPSAPSTPDLLSPTQVSQPRGSCAAG

SEQ ID NO: 955375 - protein, 69 aa, Homo sapiens
ALLTALEHPKGPEDLTGNTTHREGRPEVALPPPNKPAAAHAHGQEPRPDRQPRATLTAQRLTCRSSDGL

SEQ ID NO: 955376 - protein, 68 aa, Homo sapiens
VVDMTRIVILVPRKLRLWTSNAGELNKSVTLTDDDSIVVIFNRLISVQLMRSFNPELIRAWLRRRSRY

SEQ ID NO: 955377 - protein, 120 aa, Homo sapiens
ASLSVYVVTVAVETSTDVPTLVPVTEFWQSNVANCSNHVQVRLTPSCKQSGWFCGSLLVSVHHFPFFWSVNLLLTCGCAGVSEPHSGLGGCLIQESFTAQLNSFKFNSAEVFLLSNEICS

SEQ ID NO: 955378 - protein, 101 aa, Homo sapiens
VRACQRVVVGGGGRHPPHPVAFQTLNMTGSGLFSNLQQYDLPYPEAIFELPFLFHNPKPFFILAKELVPVNYKPNVTHYFLRLLHDMGLLSGLYTHNIDGL

SEQ ID NO: 955379 - protein, 105 aa, Homo sapiens
PQFAITGFACSGTISLSVSPHDLKLPQRQKITTVPSTEALELGTYCNWSHWVMKNACTHSDPGTLSRATKAAGGWVANMHAMQPVPLTTLGPMFHRCSTKHLLPG

SEQ ID NO: 955380 - protein, 51 aa, Homo sapiens
PVNNSLPDQEVELTNCEIKKAPGIIFLSRSPIRDLGSLFYYHRHPVRVSPS

SEQ ID NO: 955381 - protein, 42 aa, Homo sapiens
MIINDEYRLVVLVMVHCPESILLKRIAIRRIMDAVACVRKYL

SEQ ID NO: 955382 - protein, 45 aa, Homo sapiens
SGTMLNYYKEQKVCGGALNNLRESPHSSFSKPRKLVNTINPGARY

SEQ ID NO: 955383 - protein, 39 aa, Homo sapiens
QAHGGHRGGSLLQHVGGDHRGHSEEGGEEQPVTPAPALS

SEQ ID NO: 955384 - protein, 80 aa, Homo sapiens
MRVSCVLRLLALIFAIVTTWMFIRSYMSFSMKTIRLPRWLAASPTKEIQVKKYKCGLIKPCPANYFAFKICSGAANVVGP

SEQ ID NO: 955385 - protein, 105 aa, Homo sapiens
DPSLSCKKLRMALTILFNIVLEVLARAIRQEKEMKDIQNGKEEVKLLLFADDMIVYLENPKDSSRKHLELIKEFSKVSGYKINVQKSVALPYNNSDQTDKQIKNL

SEQ ID NO: 955386 - protein, 37 aa, Homo sapiens
MGANDTGHKGLTQAKAPVSRHVCPSFSESPTDSQMHV

SEQ ID NO: 955387 - protein, 61 aa, Homo sapiens
LEDYIGYGIAVVRPQLDDNLKTLPSVATPLHPQLDASADDNIKTPAERLRGAIPPSADDNL

SEQ ID NO: 955388 - protein, 78 aa, Homo sapiens
RDTVSEMLGLEVMRSGTLELSHQTLCFNSAWPRQVVPATLAAGCESLGNVLPKPLSQNIKITREVCPSERCLGPALKE

SEQ ID NO: 955389 - protein, 114 aa, Homo sapiens
CSRGFPLDERIGVFWLACIIVDGHSVKELCKAFAQAKHHATAIIAKTFKGRGITRGRRLRSLGNGKPLPKNMAEPIIPGDLQPDPEQSEESVQPPPQKDAPLVDIANIRMPSPC

SEQ ID NO: 955390 - protein, 93 aa, Homo sapiens
MAFSVEAGQCTLDATLHVTIALEEPLSPLKLVRHKKIYVFQGEAAEIRRDQLEAAQEAVPPCKTPVFPCEEAHLICRDTMGDWLSAVAAIWQN

SEQ ID NO: 955391 - protein, 48 aa, Homo sapiens
  misc_feature (43)..(43): Xaa can be any naturally occurring amino acid
CAVTLVGSRQVGTVKVQSCRIYVQRQPRSPSGYTGSSQDYSSXFFSAT

SEQ ID NO: 955392 - protein, 68 aa, Homo sapiens
LTPSSSALCQCTVTRSLQLPALCLGPLMFLPLPASQAAFSSAQQAGQHLRCFFSYGAHKLPLLLQVHG

SEQ ID NO: 955393 - protein, 55 aa, Homo sapiens
MALAYHIYDHYTMTNPGWFRPLVNRLRSSAFRSRLRLVNDGVEDSLAIGPPSKRK

SEQ ID NO: 955394 - protein, 75 aa, Homo sapiens
  misc_feature (33)..(33): Xaa can be any naturally occurring amino acid
VPEVSLWSATNAPFLVHAFAAAHQKVIAASELXFAVRHCLLGLDKIEPAFLSLALFMKISGHGEQDANPVQLVWG

SEQ ID NO: 955395 - protein, 61 aa, Homo sapiens
DLAGYSTAVSSTRRQLIAALFVGTYLSGQKDQQPERNELERFRKSEIARLETLNVSIKQSE

SEQ ID NO: 955396 - protein, 42 aa, Homo sapiens
  misc_feature (18)..(18): Xaa can be any naturally occurring amino acid
GLCRLASFSHDETPPSQXKVKKNAKKNGVRGMVYLRLMRTGF

SEQ ID NO: 955397 - protein, 54 aa, Homo sapiens
RVELTGAQCGPARGDHREQRVGHVLALAQLFALALAQPGQAHQRQDAPAQAPAK

SEQ ID NO: 955398 - protein, 49 aa, Homo sapiens
TAPRCIAVDVEMPAVAGTTVVQHTLAGIAAIARSGSSVQWITTISSVAG

SEQ ID NO: 955399 - protein, 80 aa, Homo sapiens
EVARKYCRASRSDSVHEPGSRSRQSEICTLDLQSVGVQALLAWYTTAVDLSKLLHNERALSELEERLRSVLPHHPATKNL

SEQ ID NO: 955400 - protein, 36 aa, Homo sapiens
PTWLESLCCSGGSERFILRQGILRKHIIPVIATCAL

SEQ ID NO: 955401 - protein, 128 aa, Homo sapiens
TDRPARWCHPPQVLKTAAAPAAHGLPAYRAAGNRRSTPSSDTVPSCFLQFDRLGPGLGNQQRGRFGQVGIDKGAGPARTPDQGRPCSQSAEVLAYGCAQYAIRFHQGSQRGNFAGPARQGAGPWNLAA

SEQ ID NO: 955402 - protein, 37 aa, Homo sapiens
APLSSASSTHFYRKLWPESHIDGTLRRPPRPFRSWQR

SEQ ID NO: 955403 - protein, 47 aa, Homo sapiens
KGTAGAGTVGLPPLAALMLDAQRQSAIAIALERGQIADIDHVALDGV

SEQ ID NO: 955404 - protein, 35 aa, Homo sapiens
MTRSSETPPVRFRCRRGCRRQSGHGPECERSVMSF

SEQ ID NO: 955405 - protein, 111 aa, Homo sapiens
NSWTQSGGGNSSPSHHTVPASSRVTLGVRHLRQHLAVEIEDRRRQQGAPDRAHPQQDDGQQRDDDQRDDDCVHFLCLLSRISLGTRRTGRGDSLLESDLAGLSRLWHWAGR

SEQ ID NO: 955406 - protein, 66 aa, Homo sapiens
QWTVVCRRRAGGVITEVIAVTTEGLIMTPIVEGGDVVSLLKDRVLGRVVAEDVFLPGTTKIRIVTR

SEQ ID NO: 955407 - protein, 52 aa, Homo sapiens
RSFRSRRCTSGNVQAAADMSWVRALVCVIQHGNCRGMHGHTTHVRKHRNRIQ

SEQ ID NO: 955408 - protein, 53 aa, Homo sapiens
LLTVGKEGRTGHSLDLRWLKERMYLVSAIFLASFNDTFVHVTDLAGKGNHLPC

SEQ ID NO: 955409 - protein, 36 aa, Homo sapiens
HFFKRRVEAHPISQGGYKILHDAVLRPRAAAIFTLP

SEQ ID NO: 955410 - protein, 41 aa, Homo sapiens
MRRRYEIDESRQLVVSPGTAAANSAAPLCSMYLHGPACLIS

SEQ ID NO: 955411 - protein, 45 aa, Homo sapiens
MTCSARFTLTLLMKEEAVVTDSAPSQTATDWRSHHRRLSSQAFYD

SEQ ID NO: 955412 - protein, 46 aa, Homo sapiens
MTAYAAYIISSPVALPASSMMLAFWRSVRPPPTRASSFTTAQHDNL

SEQ ID NO: 955413 - protein, 42 aa, Homo sapiens
MSVRKAALGRPSAASRRLDLAYNCIDLSIMLHNERALSELEE

SEQ ID NO: 955414 - protein, 53 aa, Homo sapiens
RQLGLLFTWYDSLTGVPVSQQKLLLEKCQVLFNTGSLYTQIGIRCDRQTQAGL

SEQ ID NO: 955415 - protein, 70 aa, Homo sapiens
MFLLHIQRCQCFLRVEIMLGLICLISRRYMMRMVAPRCATAGKTQNDTRTVFKIDTDALMFAYRMVDRIT

SEQ ID NO: 955416 - protein, 35 aa, Homo sapiens
SFSLPIKESEIIVIILWPASLKDEVLNDYATCRTQ

SEQ ID NO: 955417 - protein, 37 aa, Homo sapiens
LIATIIPRVVAATAARTLRLRGGMKEAVALVICYIGS

SEQ ID NO: 955418 - protein, 33 aa, Homo sapiens
MYFSNVAGYPVRLSTITWKRAPIRHDPARRQSP

SEQ ID NO: 955419 - protein, 57 aa, Homo sapiens
EGYDPRVLLKDVMISSRTYLSGRSHAVGWLMHSVFPICAAFKLQAHFQVKPKVICQQ

SEQ ID NO: 955420 - protein, 43 aa, Homo sapiens
CRTYFWWCTVLESLRAALSELPALKGMACLLTVSSGSIDHSPV

SEQ ID NO: 955421 - protein, 48 aa, Homo sapiens
YTVTIVRTYFWWSTVRKLADTLGELHALKGMACLLTVSAMSIDQKPCS

SEQ ID NO: 955422 - protein, 160 aa, Homo sapiens
PSLPRGYVHPVRRGGQRQRHAAAQGLQSPQSALQDALRTPAAGRMSLSFLLLLFFSHLILSAWAHGEKRLAPKGQPGPAATDRNPRGSSSRQSSSSAMSSSCASSSPADFLGKPRKLFCSKQFSMGPPGGPDPQPFLQRGHRISISKYYTLRGGGTDPNN

SEQ ID NO: 955423 - protein, 83 aa, Homo sapiens
KLSPVIPVKPMWDHPTRSIREVLKRFEEAAFTCEYKHDGQRAQIHALEGGEVKILIRNYEDNTVKHPDIISRIHKIKLPSVTY

SEQ ID NO: 955424 - protein, 93 aa, Homo sapiens
LNLTIAFTLSLLGTFIFRSHLISTLLCLEGIILSLFVITSTSTLNSNSIISITIPITILVFAACEAAVGLALLVKISNTYGTDYVQNLNLLQC

SEQ ID NO: 955425 - protein, 34 aa, Homo sapiens
EEYVTDPEQRWDHLVLNMTLSRRLDERPSVPTQR

SEQ ID NO: 955426 - protein, 37 aa, Homo sapiens
GSQALSSRISVFTFSTVSLYGLCCFLLQPKCRCTRGI

SEQ ID NO: 955427 - protein, 76 aa, Homo sapiens
KKGGAKSGMGKTAVFVLAHCNSGAVTGQVSVLVMCHTRGVGVFKISKEYERFSKYSPNVKVAVFFGGLSIKKDEEV

SEQ ID NO: 955428 - protein, 74 aa, Homo sapiens
SRSLKWRLSAHEIEELHRQWKELDEQVATHQREELSLAATMQKEEAAVEQLREQLTGARMNRFDGLTSNVVAFR

SEQ ID NO: 955429 - protein, 41 aa, Homo sapiens
RSRSQVPVSVQESPPVSKRESKSRFGDEEFPPKSPERGKER

SEQ ID NO: 955430 - protein, 49 aa, Homo sapiens
SSSAPFRPRRRRQLDVDAHGVRFILRAQAERIVPQIFAGLDVVLVRVGP

SEQ ID NO: 955431 - protein, 106 aa, Homo sapiens
APMSINITWDQIHMKLKSNIHARHHEGATSIYTQYSLRNGIQSHGVVKTPHTETYYKQEQRKQSSKNLNEILGKHMVQHNTINSKTSLAIHGFQFMNLLNSILIYS

SEQ ID NO: 955432 - protein, 62 aa, Homo sapiens
SSSVPNGLSSIGAVFANHRRLHITVFPDILRLRPSTKPTPISMSSIIFIGRLSNFLPTILSR

SEQ ID NO: 955433 - protein, 61 aa, Homo sapiens
RLRLSASLILPLKPLMRSTALFMLEGVRDSRAYLADIPTTLLLPRPPALYFSASCAQCSSR

SEQ ID NO: 955434 - protein, 45 aa, Homo sapiens
MILDRRGSGPPLIWGHLLLGLVRRCLETLLSSGVISSLVWSQRGW

SEQ ID NO: 955435 - protein, 56 aa, Homo sapiens
  misc_feature (38)..(38): Xaa can be any naturally occurring amino acid
MSNADIHSLWSVSGIPKKSDVNADIHYIQAIKIETGIXSKDNSINSFEEIGFNGNF

SEQ ID NO: 955436 - protein, 77 aa, Homo sapiens
CGHGLSMEVLCCIGSSHLTSAWIRDDFYGWYLLQIFGQPMAVLPLLMLSTGSIQRQSTQRRLHSAATSGSAINCGSD

SEQ ID NO: 955437 - protein, 75 aa, Homo sapiens
MLKDLGLATEAARQAHQPVILGAVAQQLYQSMSQRGEGGKDFSAIINSYRKPKVNTCGEGASSLATGFAGSGKHK

SEQ ID NO: 955438 - protein, 69 aa, Homo sapiens
SWHQVITTVINIKPPGITQYQTPLFVCSVLDQQQSYCLRISVLFCSISYCSRDRGIRLDVDAAGTCNAW

SEQ ID NO: 955439 - protein, 37 aa, Homo sapiens
DPSGVDLRNAGDIGISNADVADEHIFSYARVKGPIFN

SEQ ID NO: 955440 - protein, 35 aa, Homo sapiens
RSFEFFTSLRRTFQNTGFTLVLAAQYWCILVSGGS

SEQ ID NO: 955441 - protein, 49 aa, Homo sapiens
GQRSAEMEVGERNTPLRSISWVLAILLPQPPECWDYRHVPLSLANFYIL

SEQ ID NO: 955442 - protein, 48 aa, Homo sapiens
SPVHIFLNQLYPTNTRLHLYHWFPKMASKKINSSICLQTNHGMPAFNK

SEQ ID NO: 955443 - protein, 42 aa, Homo sapiens
MRASVLHLALVSDSCSAQRAGLQVCANTPGNGLIFKKKREFR

SEQ ID NO: 955444 - protein, 39 aa, Homo sapiens
SSNKQPGAQRHLLHTCSSRPTYTTISTRVSIGRVHPADT

SEQ ID NO: 955445 - protein, 150 aa, Homo sapiens
LRIREESLKERNDGLLDGKATVLFSWEAQNWRRKCHHLGEDCDTRIEGTQADTRESDQMWLARHVEIIRKYVLDDLIVAKNLMVQCFPPHYEIFKNLLNMYHQALSTRMQELASEDLEANEIVSLLTWVLNTYTSTEDDEERGAGPVKWM

SEQ ID NO: 955446 - protein, 48 aa, Homo sapiens
RGLLSLMNIVSITAVRELNEPTDDRMLHVVSASGSSEYTSGDSGIPMD

SEQ ID NO: 955447 - protein, 39 aa, Homo sapiens
MNVHRSRKYKGRCETRNKKLRSLKTTIILDSNFNVGGPQ

SEQ ID NO: 955448 - protein, 116 aa, Homo sapiens
STRQFARNHWLEQPAQGACKAREAEVGQDVQKGLVTEQARQHCRDFAVVVRSDGIEFAHHALLLETARVSKRKCQGAVLNKGPAKNSPVNRPAIIRTSHLGDCDARNCCCTIVLIV

SEQ ID NO: 955449 - protein, 50 aa, Homo sapiens
RKEGMEWNGMEWNGITRLQENGMEGNAKEWIQLEWNGKNGINTMWNGMDW

SEQ ID NO: 955450 - protein, 53 aa, Homo sapiens
TLIVISHDRDFLDGCGLRHLSTSTMRKLKRYSGNYSSFERQRAAQLELAQGMM

SEQ ID NO: 955451 - protein, 83 aa, Homo sapiens
  misc_feature (48)..(48): Xaa can be any naturally occurring amino acid
EIPDASCQDRAMFRSGAMCFADRVELEPRSLVVSSDVGLWGEAKGEVXSTYDAAVCVNSVSKDDSCCVLLKVHHLHTENHPDD

SEQ ID NO: 955452 - protein, 106 aa, Homo sapiens
LNDRGACIAGKPAPTWTASRQRALYFIRDKQQGGEIFIRPLCVRLLLRFFFVCGSVEGWLVNVVIASCDHLAFKFLTFELFTFDFRRLLHTLQADQLFVLGQLDQG

SEQ ID NO: 955453 - protein, 60 aa, Homo sapiens
GTDSIECADMSSVDLDISPCQMYDVKIFSHSGLSVYSTDVPLPAKALCLIKSQLFILVFI

SEQ ID NO: 955454 - protein, 43 aa, Homo sapiens
THCPLAGQAGGIHIVTPGLRRVLLLLGLGAFKRKVLIAEEPSI

SEQ ID NO: 955455 - protein, 37 aa, Homo sapiens
HKGIPTPYIPIRSYYRNHQPTSFHAIAPGCTPNRYTL

SEQ ID NO: 955456 - protein, 51 aa, Homo sapiens
GNVDSWEGAVLRRKSSPSGPMSELLKFQATIERRISVSNLMSLGSVRARWV

SEQ ID NO: 955457 - protein, 46 aa, Homo sapiens
MNARTEEQANKQQFVGTDRKQKSRSQWIWVKEASKKGTERYRFGSE

SEQ ID NO: 955458 - protein, 133 aa, Homo sapiens
YSRGPRRLLPPTAAACAACRTGTILLGVWYLDHQCCGTVDFYLSALACSWITYNYFNVLELREVDFGSSWIDANIVHMPIGDIPPFLHWKTFFPPPFFGGKRFKTLGFWLMGYVNGRRYQGKRGRPWIHPDSS

SEQ ID NO: 955459 - protein, 55 aa, Homo sapiens
KRGIIVESSLEDSQIGDGCSPYTCGIELDSMRNLKASLENSPEGVWSARYALQIE

SEQ ID NO: 955460 - protein, 40 aa, Homo sapiens
LLAGYSERQPQAALAVVLSEMTWCLAPVSALVFTYYSILS

SEQ ID NO: 955461 - protein, 34 aa, Homo sapiens
FASNYELNAVLLSGDSTPGFRFPREKYSFYSSFD

SEQ ID NO: 955462 - protein, 43 aa, Homo sapiens
RLVVLLHSIGSELESTEGAFTSGVRGGEASEKVLGGGSILAEL

SEQ ID NO: 955463 - protein, 63 aa, Homo sapiens
RRTYSQAGLGPGDGAGQAEPEDDAETIGWKAGCCRVPEDDVVTPGTSEDSYKSGLTTLVATSV

SEQ ID NO: 955464 - protein, 45 aa, Homo sapiens
LAGSDLDTSEHQQDLGLQAVNPVPGTPPLSSWISSQLLALEKGGK

SEQ ID NO: 955465 - protein, 36 aa, Homo sapiens
AEYALDAILGVSYLDAMDNITRQNQFYDTHMSSNKK

SEQ ID NO: 955466 - protein, 67 aa, Homo sapiens
EHHRGKMLEKRLMIHGRAQWFTPVIPALWEAMAGGSRGQVIKTILANMVKTPSLLKMQKLAGPGGAL

SEQ ID NO: 955467 - protein, 148 aa, Homo sapiens
TTEYTTGRQLTCARRQRAGFDVEQELARPMDIDRLSGRGLSLVRQLSSAVGWSDGGRTVCVEFVSGGSGIIRRFLIKEQQVAEIHMDPEVLSGLQEVMESEYPTLLDTFLHDSEERVQALRKARDDAKTLGRIAHSFKGSSGNLTQVV

SEQ ID NO: 955468 - protein, 85 aa, Homo sapiens
  misc_feature (44)..(44): Xaa can be any naturally occurring amino acid
MPLFHKFTEPYYCKQGGRMEDTSFSGQLPDSLYFEIGYPGLSEXVPLRRLKFFICVLASFVQVLPGDGSASFALLDTSCALILLI

SEQ ID NO: 955469 - protein, 142 aa, Homo sapiens
ADQRVFGEFPLKLPTGLAKNFHQAVAIGGFLYVVLEILMVIGSSKPTFCHFCYWRTAWDATHTSTSGISLACASHCRNSHGECTVPWLSRARISASHPVHKPVTGGDLGLKLKIELVIADLLDAVQLSGLAGQCLVGGDSGG

SEQ ID NO: 955470 - protein, 56 aa, Homo sapiens
MNCNSIYNLPCLTFIIYRLSSLCHLPPVSTETTADCTVGIEPVKPILNWLGTELKL

SEQ ID NO: 955471 - protein, 40 aa, Homo sapiens
MSFDHLSRSKGALGSENGAVACSRTRGMPSEVKAGAQGPR

SEQ ID NO: 955472 - protein, 139 aa, Homo sapiens
LVVIVQKKIKNRTPSKMNPMTVFLSVFIETFIERQRKGMDRKLGVFSIIFRENKDMKLYREEQFGPLIPVVPFDSLEEPIEYLIESTHGQQVSLFSNDSKELASLIDPLVNQVSRVNIKSADMAGCGSSIFRYTDSGGV

SEQ ID NO: 955473 - protein, 95 aa, Homo sapiens
GRPVWPGGCCERPFAIPGLDIVLLGSIHRSISHSRLAHVLLRARSLAVCRVQLLLLVPPPALRLLLGHLLWDLLTRSFICAPSTGTAALIKVRPH

SEQ ID NO: 955474 - protein, 136 aa, Homo sapiens
GAQFVGHVAQQLALAADQALQACAHAVEVVGQHAELVAPIGQLRQAVLLISGLPQIMHRAAQTAEWAGDGQGHQQAEQGQHHQGNRQCTERPQQAAAVPGVQLRVRNTVDQEEVPPVSALVYSAVRRRQGRDSGGV

SEQ ID NO: 955475 - protein, 45 aa, Homo sapiens
TGGVCVVNVGVATCAVRCAFDPGDASECHAETGFVGAAVQLAQNT

SEQ ID NO: 955476 - protein, 235 aa, Homo sapiens
CASWRVSLPFQTHGYWAGYHPTADQRQRVLGCLHPQDVMLAIARIRHARDKILFAVEIDGFSLRQLQLLTHRLHQHFKARSGHQRLRHFIAGQGLNQLCFFDCKLPLQCFGHTVEHRLGDCTGLEIAQQRIHLFVMGLVLRLEPRAVFVRDVVLPEFPDEHGLKLMHRIIQADHLIVRSILHRLADVAETNEPGLLRLARQVKPLFKAVTIGQPDFHFFRALRASAFCVAVRSSR

SEQ ID NO: 955477 - protein, 31 aa, Homo sapiens
MAREPCVVGLAFSLLFSFGPGCCVFFECCQS

SEQ ID NO: 955478 - protein, 215 aa, Homo sapiens
CRRCDVHPSQSATLCQHRDQLKDADAYHMLIQIGRHQTLAGCIKAVCPGVPFVNQTSEEPETLANGFLFQRQYLARKVGDPLNLIRFIHPCLQYETRSMLTISFEVTNTARSLLEERACSRKPQTITQRLKAKSDSPAAPCSIAYACVRIRRLVAEVAVSKVARSLNSSVIGFSSPPSDLTSAHASSIRRSRLCLMVAVRRASSDAPVLLGPPVY

SEQ ID NO: 955479 - protein, 236 aa, Homo sapiens
MGRSTGQQALLIDNRVRVSARHDQRLAVADLNGQRRIAPRLTSKRAVDSYLAGSKKAPSRMITSAADGRQLELVPEDEEQAQKIAEKNGSRSWDVAPLVTAAAGSGVVVANPDRLGEWDQLVQVGIYALDALAHVGFGHEHHISPLQRHLFTPVGAGLEVLAEVQEVSAVGALGIFAQQCNHAGVACRVHPAGADDGLFQGVGRGDRHRGRVVYRTADDDRVARCLVDVTVTRGSD

SEQ ID NO: 955480 - protein, 69 aa, Homo sapiens
CSPFDEYTKGPTSAHALFTTCVKHGSSNSIKARKPKVSPRRQSARENRLNKQNGRANRKIVTSRSSQYA

SEQ ID NO: 955481 - protein, 143 aa, Homo sapiens
LVATESMHSACLKAHPRVERDEGRIKLDAGLLQERRRFLDHGHVHFLEDLVENLLLGELQRGGDESKPELPHFLEGVFVLQNMIHASGEVVRELGELRVQSPDDFQTVLLGIEKISIRKGEVSHSLCDEVRHVALNEIVGERP

SEQ ID NO: 955482 - protein, 57 aa, Homo sapiens
  misc_feature (13)..(13): Xaa can be any naturally occurring amino acid
FGWVVLLHNHNNXTGIGAPLNEQPLFRAKPPGNWKHAALSRSRKASATVIRCNCSGC

SEQ ID NO: 955483 - protein, 38 aa, Homo sapiens
SRYRVLDIEDGLGTGAALGSNVIRNEQLPCSTWPMWTG

SEQ ID NO: 955484 - protein, 58 aa, Homo sapiens
MGDAILHVFAGTEHTEVVLHAALQLATQGCYIFAISALVQSVQTRQGSFDVGVGERPT

SEQ ID NO: 955485 - protein, 80 aa, Homo sapiens
MYKTKLCHHPRATVNNSLGISQGGELGQTSTVKTFTHIHLPGVWIPRVQSLMGRPRGDQVSSGVTIYKAAGTPGTYSRPQ

SEQ ID NO: 955486 - protein, 209 aa, Homo sapiens
HAVRLSQADDRASGLFMGSCIFAGLVVQWPLGWLSDRYDRALLIRCFALCLAVTALPLAIMTQVPLEVLFVAGFFCSLVQFCLYPLAVAFSNDHVEGDRRVSLTAMLLVTYGIGASVGPLLAGVVMKLFGSQMLYAFFSLCALILVWRIRPKAVTNLHQVDDAPLHHVAMPDSMSSSPLVAALDPRVDEQVVQDQMQVTVPDPEPAPEN

SEQ ID NO: 955487 - protein, 188 aa, Homo sapiens
LGLPLGATLVAFRGLAIWQAIIVAILGAAGSFAVVGIISIAGRRGRAPSLTLSRAIFGVRGNIGPTLVSLMSRLGWETVNTTTAAFVLLSLSSILFGSAVEAKSVPVLTLIFIAIFVLLTLAVSGLGHATLLVIQKWATYVFGGLNILVGGFLCATIDWSAVFNATPAPVSAMIIGVGPWLGYRIGWP

SEQ ID NO: 955488 - protein, 105 aa, Homo sapiens
TDAAGWPDDKIHAVRRQWCPLRSCCQADKPAIKPMPNRYSIRLAYPACAVAHASVAAGCWLTRGYDAEALRQYCDRYRMQPVIPLRSMKRKTKPGLPRLFDRVRS

SEQ ID NO: 955489 - protein, 43 aa, Homo sapiens
YGRTAESIGATVHRQVVGASNSARKRSLIPSYFQILACKTPIQ

SEQ ID NO: 955490 - protein, 104 aa, Homo sapiens
MDLTVLVAQVAAVVVGDGVAVAGVADVDCGVELAAHGDLGLHQLRAQALYRPLAFLQGGDDHLFHFFFADLARGRQLVLGVEHRFAGAASRGQQGQRDQGASVA

SEQ ID NO: 955491 - protein, 99 aa, Homo sapiens
RDIYVPQRIGIEPYSADLSTVLSLAIDPQHGGSNHKEVEQQSTVDETYSYSDEEGHDKRGTQEYLESTSGRLSWREALEDSHLIKVAHGNPSARHLKRG

SEQ ID NO: 955492 - protein, 81 aa, Homo sapiens
TGVGRHRTAQRKAAGKYSSWRPRASTNVQVLAHGAKRRQVHVHGEITEHAQPRQIPGKTKRIFHRCLVDTAIKLFADCRPL

SEQ ID NO: 955493 - protein, 34 aa, Homo sapiens
DGYRVLVVATRNIPKALERQTVHYQRRTQHLRYQ

SEQ ID NO: 955494 - protein, 54 aa, Homo sapiens
GRYLSGRSSCQGWANVTKRGVCIRRLARPVFFFFFSCWPPEESDLSLFQQGPRV

SEQ ID NO: 955495 - protein, 35 aa, Homo sapiens
SLPSKRRDEMYKRRDEMYKRRDEMYKRRDEMTAPT

SEQ ID NO: 955496 - protein, 112 aa, Homo sapiens
GAEIGKGGGRVVGSMRIHRGVTAFDLGEVQDAQIAHDQRAALEDHLRQRIQATFADRAGAVADPLAAFQVLGQHRVVLEALEFIERRQEGVAVGQVDDQPDHHLVVFQVMRP

SEQ ID NO: 955497 - protein, 64 aa, Homo sapiens
ARNTYLTEATSCSRRALLVTQVLADPIYWLIHYWLTHYWLTHYWLTHYWLTHYWLTHYWLTHYW

SEQ ID NO: 955498 - protein, 48 aa, Homo sapiens
GTAYNYDVDIYSCAVGYCMACLEKRLFKGLPFFLETESYSVAQAGVRG

SEQ ID NO: 955499 - protein, 99 aa, Homo sapiens
AVLDDQINASTMFAVDIQLDLVERFVAHPHRLGAAVAAQVVEGGFRQFLATVDAVQDVDLGRLAAAVADPAPEPAHIGVGFLDETQAHERKTVDEASVA

SEQ ID NO: 955500 - protein, 53 aa, Homo sapiens
QSCSIAQSNVQRTVPASNPPSTAISSVPHPATPIQVNITQFHSFVSNITHTHT

SEQ ID NO: 955501 - protein, 55 aa, Homo sapiens
MAYTNSQGMWRVSVVPSTVGRLVQRENGLNLGGRVLQGAKIVPLHPSVGDTVRLV

SEQ ID NO: 955502 - protein, 137 aa, Homo sapiens
RTLENSRPHRWCVQRGIPVIQVFHVEDQGHFSMQSGNVRTLSELLIKPQLVIHKRYHSALAGTPLAARLVEMGVTTLIISGIRTEQCCETTTRQAADSGFKVDFVSEATLTFPMTHVRSGRVYTPAEIRERTEASVA

SEQ ID NO: 955503 - protein, 200 aa, Homo sapiens
HALSSADQAFAVEYSHWVTVYSRREGLADATDVAQQNTGTLAEAVGQAGFELHVFYAVQFLQAVLAAAVVQEQRAIVECHRFVEDAVPFEEDFIVVFTAGDDLGTGTQAETVVALDTHPRKSIAVHRTVACPTVGAQQDGRCAVVVGGGGLFVADPGKAAADGVEVTDDDGAVAFDVIVERRLGDTLDRVDEHASRCVRN

SEQ ID NO: 955504 - protein, 178 aa, Homo sapiens
DQIARGSGVRWRRAFCAGRFVVAHRAVAGRLVLPCPRWVRRCSKPCEALNAKLLQVARQTYPVFKDAEAVRFEEGQLHAGDVSVSLAQLVKDSGEEVLQAQVDSEPDKKRQGYACATHTAVFVEVRVDEDLGTIKVSRVVSAIAAGRVVNPKMARSQILGGGGVGHWHGPAVKASVAG

SEQ ID NO: 955505 - protein, 57 aa, Homo sapiens
MLCQQFQWQQCVHHVCSLRPALSVVQVCYHSSACRQSRPGMSAVQGGHPFQQSAPAR

SEQ ID NO: 955506 - protein, 155 aa, Homo sapiens
ERTRDAGRRRRHSSVRPSVSMIMQAMAAVNPRNRLMAEINTRREENKAHTKYRQAIRRTGPATIQVIQGDKGRQRAVANRSQAQAGAETVRYARTPPRTAAARHVHRHRRFIADQHQSQRRQHRQGKTEAGVAVISHHHHAKWRTNRNRAEGVRS

SEQ ID NO: 955507 - protein, 33 aa, Homo sapiens
TYAFDQEVLTVLQFKHKAQQGTRMEPHAVWTLT

SEQ ID NO: 955508 - protein, 226 aa, Homo sapiens
TARTLYDSKATPRHAEARYDKGIGDRRTIRQASDMGLGSDKLVAAHYRRPCQAADTLARPVQDHERDHVLRSLREQFEEAKDQGRPDKQRRTEPNQTLARVQLRRTREAGGLRVQIRSRCDKQRRDHDLPGDTYGRQRQASDDNPHYIDTSTHAKQDTQLMLLSPPIDSKPTEPKVCSDSDSRTSSAIATKRIKSKLPSHSNCNSGCRRRRSMNTTVTSNEIGATS

SEQ ID NO: 955509 - protein, 61 aa, Homo sapiens
RPFPGLPGGSREKEALIQNRGSLNPQICIPSWALNQRRERLQKNVKGETQATDDSIKGWCS

SEQ ID NO: 955510 - protein, 82 aa, Homo sapiens
LMADVAQRVFHVLLDLSDQYGGNELFSVQRGRCRPPGNVVLTYGRPLRQSFGLVALQPLERCAILLAGTHSLSRVSGFMFAG

SEQ ID NO: 955511 - protein, 69 aa, Homo sapiens
SRYRCQKNNGILRDVFNEIELIHVTNEGNETPEEHQVTRNFRTHLIRGEKALTFAKLGVRAILSQKLFG

SEQ ID NO: 955512 - protein, 125 aa, Homo sapiens
RHHVIKGSDALHPRDRLRQDGSAESSKIDRGSGRAHYAEYINLPVGVGRVGYIQTNSCQSVSFVLCPRSTGPQSQTNCLQREGARCDKHKSPAGLSSLQGQQALQNPRKKACPCAVKDDIRLQSP

SEQ ID NO: 955513 - protein, 110 aa, Homo sapiens
MDMHDLPVFANFLQEGSFCSKYLHVLALYFGFGLCFRPNHRQIPVDSLALLQYRTCRCLGKSHIFRQMMSGITLSVNAQHNRTHEIVMSGASSSVAFALSPDAKAEDSGG

SEQ ID NO: 955514 - protein, 135 aa, Homo sapiens
SADDRSGDDITSAPMLDIEERREFMRFQEPLLNTRRIISEIFAHGCNSRQEASLYAVSRLNNPFGPAPLLIMRSTTMSITSAAAGAALAMAADSLFAGVDTQVPAADATVHCYGVNSCKGMNDCKNKDHAWQGPT

SEQ ID NO: 955515 - protein, 206 aa, Homo sapiens
MRTVGVYLVGDFGLVIALGTSFQKPSTWAPHVAFCFRLVGRHAFQFARDGAVSGFGGGDVDVRVAVRHGERGLELGVGPGLVALVVDEFLGFAFMDPCASTDHIFLQRLDLGQRRLDHGHAAIGLVLGTGNLAQGHLDTVFVLGDLPILSLGSGRKQQRKTHSTATRFSEPIVVFLMVEVPIVKPIKPPSSAPTSRSTQVVWGISR

SEQ ID NO: 955516 - protein, 104 aa, Homo sapiens
MPGCHQCANDWKDPANARKSSSFQQPRAILQPNARQPVHPAIALIQRSITEQIRSHPLTKFNQPVHFDSTTTKNCGEASMPPIVLVLNGPNLNLLGTREQGPHS

SEQ ID NO: 955517 - protein, 194 aa, Homo sapiens
DARRDPVDCWAAASAWLSNTAFNGHWRLLQDWVENLRELRALIGSLGQAAPRQSTSELRSALDALLEDWRPLVQAGDDDEDIRKAAPEQFIEELQDVRWGLFSLNLSRWLLARTWTAERNVRGNRQGAAQITNWLPRLLADDAVALQLQRYQQQPEDLAEQLPRIERIQAWLHHARHVVDIPELDRLYGELNKL

SEQ ID NO: 955518 - protein, 113 aa, Homo sapiens
TKWDRRANTGMVPPKDELSGASDLTTALDLVPSTHFSMGHPVHERQSQSVLEGNNRAFQIRGICLVHFRRQCNPLVMFNTQASSCRNIRQHGFKDLAHKVDKFTRQWQGTHSG

SEQ ID NO: 955519 - protein, 114 aa, Homo sapiens
WRAGASVANIRRYYDILAWVTQPQLEGNQVVEGNLHVPGVDKTKPPQDTPQLCSRQPAHCKSLWEPGLARDSGLTVKVIAACRTAIEGKRGSHHVIIVAYIGRRADEVPHAVNS

SEQ ID NO: 955520 - protein, 126 aa, Homo sapiens
MGRHGLHVGHPVARAYRDVRLVSIGGGADEIMLGIICKLMGTLPGEKAMNTLLLEAHNGVLHITLNRPECRNAMSLEMVNELRAVLAQLDSQVRAVVISGAGGHFCAGADVKDLVGAGDQLQALNR

SEQ ID NO: 955521 - protein, 133 aa, Homo sapiens
DQDQRLTQLEQPANCSMHAKIFSQASGDEEETDNTMFTRTAQNEIYSQFKRLPNPDLVMYVFPHLAGSDPAPIPGYTTVFPLYQRVQYAMPGERTEAYRWVFLNDSKRNGRQSVWNLAVTPGSPLSDDVQGPT

SEQ ID NO: 955522 - protein, 34 aa, Homo sapiens
LTTCPGVVAVAATAKTQSLGGGCTGQQLVVAGLA

SEQ ID NO: 955523 - protein, 78 aa, Homo sapiens
MLLHARVLIDSIGYGSLSGEYLVDEDRYLRQDYWTAVACVTDITLMAASVDTDGIINLRLEPEYNATPVYFYGLLWKV

SEQ ID NO: 955524 - protein, 98 aa, Homo sapiens
TLTCCTSGEKCPLRGDIDRHTISIIIFLLHIILNFRCIAYYFRTIVRDCNMGEQGPVFAVDEVHQAIHPYIDKDIYIREQWVICKLRFRNSGCYQLIC

SEQ ID NO: 955525 - protein, 85 aa, Homo sapiens
SRLYGYQRWARRSSGQNLFGDAVCLGIEHRFEHSAGCIWSLAGCGMIRKKSLVSTLLYMSFVSVAALGGYANLDPQFTFWVQGPT

SEQ ID NO: 955526 - protein, 159 aa, Homo sapiens
MTVLSDDAEAQAEQGIGHAVTSTQMEGWPLEGRRITIWHEANQGSVTEIEHRALDHRGLCEHQFNGFRLIEIGLAFVYELAKGGSPHGPKPPAKLCSYAPLGQVFAVDTGRLVVMELIAHPVLIEPGARLIHGVAGFDAKRCKVLLDATQGIAPAGTHS

SEQ ID NO: 955527 - protein, 116 aa, Homo sapiens
MIITVVVLPVLWPQQHAFMPDNFLSLHVTAPPGRRVSQQRVYRSDPIPDQHGNVVARQRNQQPPLDIGQVSLSRQHPHETTVRSDTKHEPQADPRAQTTFVADNPVLGQRQLRIAI

SEQ ID NO: 955528 - protein, 44 aa, Homo sapiens
MAYHCAAPGRCQGWRPQAEGVVVVPVELARPLHHGAELRTVDGV

SEQ ID NO: 955529 - protein, 45 aa, Homo sapiens
RTFLIISCGAVAVSGACPEALGWPGSSSSSSGSDSLMAPGASSAS

SEQ ID NO: 955530 - protein, 204 aa, Homo sapiens
  misc_feature (147)..(147): Xaa can be any naturally occurring amino acid
MSGSMPRLHTLLLNETSLVEWPSSVFRVPRPEDFILDMRQNPIAWIPEFAPGSDKALIVAKTFLTRETLTPELLAQFKRYIEAAGRDPDRQLPKRGARDSEQWKTGYSAQEWPSRQVLWDMLEGSFGSEGFFNVLRAVRNSGDSTLXGGVWLPELTAKVWRILEAMGEDAELREQLFLMARDPAACVDAGRQMSMRCGTTRGSL

SEQ ID NO: 955531 - protein, 44 aa, Homo sapiens
APNVLVNFESSTVISECETLSRKMMRVPYRVKALSSSYLEESPL

SEQ ID NO: 955532 - protein, 33 aa, Homo sapiens
DEPALMDFFQKEYLQLGEICTVSIINKLWLLLD

SEQ ID NO: 955533 - protein, 157 aa, Homo sapiens
MLEQLDDSDINAMRALNINAPICLTKLLLPLLKQADSAMVVNVGSTYGSIGYAGYASYCATKFALRGFSEALRRELADTRVSVLYVAPRATRTSMNSVRRKPLNDALKANVDDPQTVASAVIHAIAGDRRDLYLGWPERFFVRLNNLLPQLVDRGLR

SEQ ID NO: 955534 - protein, 204 aa, Homo sapiens
TASALDVPTQSTVVSVYATSKVTSAPFDNKLVLAARDDAAAFIATDGQWRGARLESALDYLRRTQPKLHASDLELAQAILVQKSSLYFYLCHWSHPMRSPLIVAALGLLFLADVAQAQTLKATSNIVVRASARTIDFTSDTTTSIRDSKIVREAHDDAASFVATNGEIRGAQLEAVFDTLRTRVPEARDASDQTLAEAIRRDPL

SEQ ID NO: 955535 - protein, 183 aa, Homo sapiens
TARPLRWRLSAAGWFAGTAADGLDDAADHLGLGIQRLDAFTGLLHVLGQVAHHVHGLGDHSGTALGAVVGLQRGAVGNIGGLGHRLLAVDLVGNDRGELDHFVQPLIGVQHRVVGGLQPHQAAVVVHAFEARGDELTGVQALPALLVFGTVVFLWFTDHTVMFAFDLRQTVTHAGPPRGHPLE

SEQ ID NO: 955536 - protein, 76 aa, Homo sapiens
WVRSGIFHERHLDIRVKMLFPTDHAYSLLIGCIPHLLTVKIPSALSKAGQSFSAVGGLDADIESRCVGTVKDANLC

SEQ ID NO: 955537 - protein, 199 aa, Homo sapiens
MDIEGIGSVVTSLTSSVTVPAASQVEPRKQISTECYVPTTNTKVMLWGDSHAQQYYYGLSKTLPPSVSILQVASSGCEANLPGTATGGLKYCDRSNEFAFEVMAKEKPQVLVIAQLEQHDTKNNLIDLTARAKALGVKNVIVVGPVPRYDQFLNQLVVRKFWNNTPRRTKENLLPASFDTDRALASQVRWWCWWVRYLS

SEQ ID NO: 955538 - protein, 162 aa, Homo sapiens
RRTPVRRRMRRLAETGSAVAFCPTSNFFLGSGLFNLPMAEKHNLNVGLGTDVGGGTSFSLLQTLNEAYKVMQLQGARLSPFKSLYLATLGGARALRLEDKIGTLQPGTDADFLVLDYNATPLLSYRLKQANNIAETLFVLMTLGDDRTVLQTYAAGQLVHQR

SEQ ID NO: 955539 - protein, 80 aa, Homo sapiens
MARLSTIVLRIGAFEFPDVMYLRNARVTECLAQPTRYAVQYVAVQALAVKGVQHLVAHGISNNRFKRLDLGAPLTVAPAQ

SEQ ID NO: 955540 - protein, 218 aa, Homo sapiens
MLVHKTYLKFLKSARRPVKTRLERGWYERPEMAPLHWVTEAGYVDPIDNRNKSRTSWVKTSPDSTTVTTLTIALARTAPHLYTSVSAPWRATSADSLYGRGLRWQLDEKSANNAHGAYNGSYAHHARRDEEEHPMSSTAQTAEGENILNQLMTIRGLSSLMERITTPRAIVPAPVPNTEQMDRLKGREVSTWSYRTDVARRRRHTDCSACACEHQIPT

SEQ ID NO: 955541 - protein, 195 aa, Homo sapiens
MGAEIWFKHGGSSSCSRKNCRCHIQDGYKLSTENPQDGDSVQSHGLSSERRKFTYVPTTIRARWNMDEEQMAFFESWFARTLVDGTLWFEATLKTPVGFKDEICKIKGMYDGPELVQVNRYEMSGTFLLRDRPLIEPGWENFPELWFGKNIIDLAINRDVARSMSPLDVCYASPGSEVLIPAFELFERFLENDHR

SEQ ID NO: 955542 - protein, 75 aa, Homo sapiens
WWVVLRFGVITPDLSSGRAKLLVSALSYARYTQVAGAVTLVSVILPAVGCGQFVFLFQGAAPHGFTCLGSENDPP

SEQ ID NO: 955543 - protein, 56 aa, Homo sapiens
GGLLGFSAIAFNHGEVCTAGSRCWSSVRSKTPSCRRVIEALKGWKPWQSTGPERPT

SEQ ID NO: 955544 - protein, 216 aa, Homo sapiens
RADCYAQAENARNAIAKGSSQQVLNSRGALPYRNKVWYAVQDVDNCGAVHCDCRHRTVHSGAAASQQAKSIGPVKSTTRFDPVARLVCGAYSKAIPEKKADHLKLVAEVMSPVGSNRAAAYAGCKYNREAVLQSASFFKTPRDMTDSSPSASPSSLTIYFRLLSYVKPYMGLFALSILGFLIFASTQPMLGYILKYFVTVSPIRSCAIPTVPFWRL

SEQ ID NO: 955545 - protein, 49 aa, Homo sapiens
QQQLLIDPYAKQLVGETSIVVLQRCLATSSATRSDDPLVIDEARLVRPF

SEQ ID NO: 955546 - protein, 76 aa, Homo sapiens
QGSMPSVFTAWHYVDQPENAVHDCAMVDGRSEYQYAKLGHMFDFVHIEGVQAAMVISSEQQNACPPSFRLSELYRV

SEQ ID NO: 955547 - protein, 195 aa, Homo sapiens
GVADTTADSVIAQASRQLYRFLPWPMANFTGPTIDGLVQIVAIALHRVGELITEQLADVDTVDDHVTQFPLTVDLRQGVGHRVHGAIAAGDFHSDFGTVARLVLGRINDNALVVVFQQSVTVELEQPLLEVFLERLHLRRRRFARIFDRHAAFGDAFSIDHRANDRVERVIELGRSCLYCTLLALRSASILLVVS

SEQ ID NO: 955548 - protein, 92 aa, Homo sapiens
YRSVYDQVDVNYAVEEQASGSITASVGIAQSAGLILGGSITQNNFLGYLVTDVSIGLTRSEYQSRYNFGYTDPYWTADGVSLGYYAFYRTTE

SEQ ID NO: 955549 - protein, 112 aa, Homo sapiens
MATHHRDQDLKDQGTSLVVKVGTKVKNIRLCDGDHDIDCKIDGIGPMKLKSEFVRKVMNLLHSIPRPPRDGVSHSALIERNTHTEKPRNCQYTLAILRIRIILIETHQGERP

SEQ ID NO: 955550 - protein, 50 aa, Homo sapiens
FSLLLVADAHIDDQVTDNRQSWQRTNDQLVAFDHGGQRRDARQRRILPLM

SEQ ID NO: 955551 - protein, 63 aa, Homo sapiens
WVSHDCRPFLVGIRCLRDRLCVADPAGVYRRPASGVSLIKIGIPLLAGLSAVHGLVPPHQNDP

SEQ ID NO: 955552 - protein, 206 aa, Homo sapiens
TGALDNSPGGRIVSDGSQTVTAANVDNRAGVIGSQQALNLTTANLDNTAGLINSQADLTLTGQTVDSSLDGEISAKGDLKLIVQQLIQRQGRLIGERAVSLDLQGGNLENSAGLISAKGPLTFARLANLTNREQGEISSQTAFTIAAKRIDNGDRGVILSADQLRLEADTVVNANKGLISGWNGLTVVGNGLDNSAEGTLSSKRRP

SEQ ID NO: 955553 - protein, 62 aa, Homo sapiens
DSAEDARRYRVHKVRMLEYRVGRLVNQGKFTLWTLSSFGQAQKYATSDTSASSTSWANAQAR

SEQ ID NO: 955554 - protein, 99 aa, Homo sapiens
TGQLGRPNTGKHDPLHYTPEQRAQHGISEGLVRLSVGLEDSCRLAGRYPSGPGQVQRCQPAAHCDSGVCDEIASNPMGYAVPGRRSEGSDCRSACLMFF

SEQ ID NO: 955555 - protein, 66 aa, Homo sapiens
LKAVWPRFQHDTSTRPGSRNRSGRPGCLARCHVYGTKPELRQDQRRQARIADIDRQARGDQDGLAR

SEQ ID NO: 955556 - protein, 150 aa, Homo sapiens
AAPRTLAHVLLGWLDEFKLEHPTIRLQLLLNDSNADLFRETVNIALRFGVPRDSSLVALPVYPITIAIACASPDYLARHGTPHTPEDLAHHSTLRYMRRGQANSTWYFRQGALLQEVEVSGDYLSDDGEIVRRWTLAGHGIAYKANRVRS

SEQ ID NO: 955557 - protein, 91 aa, Homo sapiens
ILIRSTHKTSLCSWTNRIDAPIHKLLPKGYLLVLFLDRLVLPYGCIRHSDQKGDAIMAKRTSSRQFVTVFVSLLLSFGVNAADLTVGPRRV

SEQ ID NO: 955558 - protein, 94 aa, Homo sapiens
AQRVIAITTMHLLRTQAILRCDRPGTEEPVAFPVVARHADIAGFIHKLRLLLVYRLSGRLTQQSRRRGQQRQCARDMEQIATIHIVSPHSIRSN

SEQ ID NO: 955559 - protein, 47 aa, Homo sapiens
LSRGRTDYRCRCRYTDGDKHDENDDHAHGITVDHPLSAYLMVFTVTG

SEQ ID NO: 955560 - protein, 97 aa, Homo sapiens
RSNHQTVMYEQYQQNLQKQAQKQALRPGRSNARNLSNPKCQFWLQQDQNAPNEKTRANVLQFCDLMSNTAMNKHAVLQLILEKLTVDLDIVQRAAQS

SEQ ID NO: 955561 - protein, 82 aa, Homo sapiens
EQQHLEHLMLTSESALEQRRFWALACTPRTSLSLALTIPHSNLAVKKPGLRALVLFIPIAVHQLAKCRVPIIVLFARACCQQ

SEQ ID NO: 955562 - protein, 79 aa, Homo sapiens
MPNQALARADPRSKQSSAQAAGVRTKAPRELPPPQTPAIDAVLGSQEPSDRAFSTRRGERLVIRYRPYRRGPSYPPRKV

SEQ ID NO: 955563 - protein, 94 aa, Homo sapiens
MIVFSIAEVISHISRLAARSTISAARFLGRACDGYKPFGDLGSRIEGVLQSKKPLLSKAGYDIAAHWYELALVRSGHQQIEGLLAHRCTDAAQS

SEQ ID NO: 955564 - protein, 91 aa, Homo sapiens
LNIEAISRRKPALNCHCDDHSLLILQINRYSRHRTVIIGIRCCLPNNHRRTGTRIGYSRIDGSKSSAAGLQIRSIAEIIRFLPAKLNAAQS

SEQ ID NO: 955565 - protein, 122 aa, Homo sapiens
TSPVTGPQGRYAKVTPPLISGKSSPQFHNPTCANYTHHRSEHRCAGWRLRLGTLAPLFVLPASWTDLPRQYGLPMKQRSEHSMKLTYLGDRATPESLSSAIALSADPIKVSSSGKRQLGAAQ

SEQ ID NO: 955566 - protein, 72 aa, Homo sapiens
MNIEALDRMKRDSRITVYVLTPYVIKLAINIGAVDRPNGSKVHNKVMPRLGGLAIIYRCRRRLFSRRGPSRV

SEQ ID NO: 955567 - protein, 101 aa, Homo sapiens
PIANYSYEHHTVIGLVAVMAGKTPRIGESPFVAQDVDNDAITPFDMQAIDRLRENPGVLDPGMRCVYVHVRPLPPPSADFQRLSPIYVIIPIGYRISSRAE

SEQ ID NO: 955568 - protein, 50 aa, Homo sapiens
MAERRTGEYISRNITSQWGITNTERIANTAYDLWMQQEIFREPCAIEMAD

SEQ ID NO: 955569 - protein, 55 aa, Homo sapiens
AFLMRSDVPLSTSAGQQERQQLDDGVRITAQYVLSRVTLIEIGNHVARPVMAENR

SEQ ID NO: 955570 - protein, 172 aa, Homo sapiens
APVSLQAAYGNEVEALALPMHWASREVTRWIIGWNVRAWDYLLLAGWIDGALKPGPDPAAACQQDDGAVAILTLVVIAALASLGSIVAELSVAKDFTGAARMAHIALAGGTILSSWAFTQVMFALHYAHDFNSARRQWQPGGLQFPDTPEPDYLEFLYFAAVIGTSGQTADV

SEQ ID NO: 955571 - protein, 186 aa, Homo sapiens
MLRVSLVGAGQCGAHRNYQSGSCAASFCRIFIVLPRKCCARRMPSDVNLLLCGAPSPPHAHQSRGCLVSGGLTLRSSTCCHKRPALTATSGKQETTSHRQQDICRIFTDDPARTLHVKTMRLHWDGTNPGKMRAFAPDGLIMPATARFPLLPYLFALILGVLALGGYWYGLATGGAADVAAPAQAA

SEQ ID NO: 955572 - protein, 219 aa, Homo sapiens
RRELRSTCTSALTPRNETRTSQHSQQMTDRCRACHRRYQSGSRTANHDSRARLSPLVPSSASLWTYSSNSSRNASGIQTWPVTPNFVCTGGAAPGPTARREKPFSGRVGGGALQRLNLEITDAAEPHPGKKSKGQHEVELGRGVLCGEIQNCIAIGLRDWQQPIFKCLAWALTVRDAEVGGGSADRSLEPHPVEVLTTQGFPATAGRVEKEAPMPYPRI

SEQ ID NO: 955573 - protein, 86 aa, Homo sapiens
RRGRCGNPGCRLERMVEHASIGRKPDHADAYPVSKIMLVVRNCSQSCWHHAAATQTYNCTRLVLIIDEPALSGHVLRMDAPRRSQP

SEQ ID NO: 955574 - protein, 44 aa, Homo sapiens
PVLAPTRLTDSRTVARPSAPGRDVPLCLAHVDLTVCVGDSSTTS

SEQ ID NO: 955575 - protein, 47 aa, Homo sapiens
NGPALVLAYIVFGWLPSLLTRPWPDVPHDGGTWRPHGVCEGTPSTTS

SEQ ID NO: 955576 - protein, 206 aa, Homo sapiens
CGRQIRACCPFHTSLTLPTEADPSGMPTYRHANVLTKLRQEGFEPFMVCQTRVRNEDRREFTKHMIRMRHASQINGSEANEIILLNSHDGTSSYQMLAGMFRFVCHNGLVCGETTADIRVPHKGDVAGEVIEGAYEVLQGFEQVQASRDAMRVITLETGEEEILARSALALKYDDPTRPAPVSETQVLAARRFDDRRAELWSVYTA

SEQ ID NO: 955577 - protein, 59 aa, Homo sapiens
MDQAGGQRLLRVENAWRGDQVLFGLQFFDSIGGALGHDACVQLQVVIEAHRIFGHARVV

SEQ ID NO: 955578 - protein, 85 aa, Homo sapiens
ARQQRQQLAVVVAQLSLSLGVACAGALLGGFTAEAGNDGVNTVRGAFQLTFLTVGLMAMLAAAIFLQLSPKDGKRVVSREHDIEH

SEQ ID NO: 955579 - protein, 98 aa, Homo sapiens
TSSSRAVEHDVLWPADDRRRPFLTTLVKLTTVGTVVVSQQVAVGVQALDHRRKKALRSSSVNRTSGACLPSLPMGMRQDRGAHAVLATAQVDQDQVRP

SEQ ID NO: 955580 - protein, 83 aa, Homo sapiens
MPMALDMDREDRVYSARMPVSRYPEAFISIATKHSERIVDHHEFDRQLQLRQCKCKSHIKMVTPPYPRHRDHLSSRERRLSAD

SEQ ID NO: 955581 - protein, 104 aa, Homo sapiens
EPDWRSMGCSIDVSYPRTCATQRSSTWSQPEAIKRHGMPLAFARSMGCSYTAECQRAGLTHRGLRTQGLSTGKSGRRSRSISRVDVALQGPTRVGTLTYQTIPS

SEQ ID NO: 955582 - protein, 162 aa, Homo sapiens
MSYGSNNRGHCCSPSLKGWLRTERRHRYLSKRTKGLENYRLATGAANARPNISATWSTSPAVITSGGRKRTITAMAPAQFQDQPALEAFALHQRRQLAMHRWVALTIRRAKSGLTSSTPQHQPTPKDIPQVREVALQDAQVFAQALGHGRRNGLPGRDPQGP

SEQ ID NO: 955583 - protein, 67 aa, Homo sapiens
LTPDITGHSTYKLKHTEYRKTKFSIYPLLTKQNVLVDIGLNRMVYLIYCDNLTLLSHIAVAARWQLN

SEQ ID NO: 955584 - protein, 64 aa, Homo sapiens
INMSWLVNLVNGWLRICSVLERFINALAGSPADVHSVDSLARRLLTRRRTFRRIGRVVPRGDSS

SEQ ID NO: 955585 - protein, 119 aa, Homo sapiens
EVASAAVQDALVRLQPPIFLRYPSHVVNPIPVNGAAVEIPWYAWRQPTDKIMLIMRYEVPGSHDLIIYDDSFTVGQVPEGVPIRRLIPYDGLLKFNGTTPDLYYVYESANILASSRDPL

SEQ ID NO: 955586 - protein, 102 aa, Homo sapiens
MNWRCASACCRSTRPGTADVDVVHRQAEVAQFAVVTNGFLEPVLVVGQVGNRRAHMEVQQADALVQADARKRSTTDSNWADDSPEFGFLAYGVRPLARCLGR

SEQ ID NO: 955587 - protein, 36 aa, Homo sapiens
RTHSELYPCGAMPGCILFLLFLAHLFNFFDLHLFPA

SEQ ID NO: 955588 - protein, 169 aa, Homo sapiens
  misc_feature (11)..(11): Xaa can be any naturally occurring amino acid
NAGGIGGVAFXILADGDEQIKTSTQKPAKIPRTDFQKLQTSLSSLPYMDSNRELTVRLERLLSARSHALRGNASRDAPRHHCARLEPCIVSWTQSVRGGIPTRSVGTIINMEVQANPASTNNASNPIKSGTLATCSPTCTAASSSGHNGTSTELSWLSSLYERGIPTQV

SEQ ID NO: 955589 - protein, 221 aa, Homo sapiens
ECCWARLCPGTAAEQRQEAKAENKCRGATAHAGSFCVMPTFKCVCDCELRSGFLICMEDPNSNGSHADKIHMLKTLAVANYRSINKLVVPLDRLNLVTGPNGSGKSNLYRALRLLAETAQGGVINALAREGGLDSTFWAGPENISRRMRNGEVPVEAVVAQGVKRLRLGFAGEDFSYAISLGMPIPVPGSEFKLDPEIKKECIWAGPLYRPASLLVQRSGT

SEQ ID NO: 955590 - protein, 56 aa, Homo sapiens
IKDVITLLLYTPVIPGTIALTHTFGLNCPVTLTSTYGCDLYSTAKVPSRVQRLLRL

SEQ ID NO: 955591 - protein, 134 aa, Homo sapiens
RRTALEHVEGLGVLQVLVQVVLLATGFQAGRFQQAAQQGFQGGVLAGFGISVAMTLKAVDIVDSGHGLTGWADDWLFSTPIKAAKTAGCFNQMIDNERKCMLRFDDLQLFVRAADLGSLSPAPRVSWPCICGAQ

SEQ ID NO: 955592 - protein, 91 aa, Homo sapiens
LTTIAVTGAYAARVGSGLVISLAAAAKARYDSIVATHSARSSQSAQQHFRQQMQPHKCKSKRCRRSGCSVGDCAADLVLNIAAARAFQAKE

SEQ ID NO: 955593 - protein, 79 aa, Homo sapiens
ALRTIYQSMAHAPEILFQNAVSAQQTAKHPGPGGQPTSDVMQIYSVDTTAGAAATEKVAQGGVSDNLTSLLTVLKSFQP

SEQ ID NO: 955594 - protein, 85 aa, Homo sapiens
VDSTAYIQTRARSDGTRTHFTSEAHLSLVDCLPATKAFRLLALPHVNAINNNLFIVRSGPVNPAHRRSPRRLGGQRPFRYSSYYD

SEQ ID NO: 955595 - protein, 188 aa, Homo sapiens
MPMRIGTGGTARADAQQNRSMSDRPLLSQIDPFLASEAEIRRTISDFRFSPWGLTNRLLVSCCSCLPKVSYMVLDVVGIGLLFQPYPGMVLPVVETHRSGDVLQLKLQCSVADQPGCLHIHCAGSSELMPGQRPDFADRKLVGQRRRHQPSQFEIFRRNAQLLTVEQLVEPLKHMAELGIDGRIVRLI

SEQ ID NO: 955596 - protein, 158 aa, Homo sapiens
HECIDWTVGMDCTGMEWNAWNGINPSEVEWNRKEWNRMEWFQPEWNGKEWNQPEWNGMEWNGMEWVQHRIEWKGNGINPQWNGMLIAMAMAHAMEWHGMECNGMHSTRMEWQGSGLNPEWKWHEMELDMELTGMERYGIEWEWNDMEWNVHPVLTGTE

SEQ ID NO: 955597 - protein, 133 aa, Homo sapiens
MTHDHKRRYVDCQVKSRSSEQPMSGHTPATTLCGADFIWHDIGPRKPYCRQYATVRNNDLVRLRFMSIEPAHGVPITQIEGDDRHKPGRPGQVPVWWMSQRSRDVGGRRPLRAPEGNRGVLWLGNEPDERQCG

SEQ ID NO: 955598 - protein, 35 aa, Homo sapiens
LECTNAHVLPERVGATLQDMFRPIMSEVLVVVIGR

SEQ ID NO: 955599 - protein, 144 aa, Homo sapiens
  misc_feature (42)..(42): Xaa can be any naturally occurring amino acid
MPYLRQARTYRRNCCMTAMSLEATALGEMIRDNSELDATNTXTMRPVTTWNSNVPRSAVHSVMLGSRPVISGINTNAAKCYEEHLCARQDLAPKAGVEFILHVHASFCLVPEDLVTGIAQARDDVAVFIFQALIDGCGVNLYLR

SEQ ID NO: 955600 - protein, 52 aa, Homo sapiens
YVGYLRSELTCGQKYRGGFHDFTIMVRLAFTCSLRLVAGLRICGGYNLSQRM

SEQ ID NO: 955601 - protein, 115 aa, Homo sapiens
EEYRRMARLHPELDDQDLARLLALDEAQVAQLRQHLHSSEKAVEQAKVLLHEREQRLAEHQALHNGNLEAEQLDATLFSLEQQLLEGEKHCAELLRNAKAKTSAARMPNPGPWPE

SEQ ID NO: 955602 - protein, 111 aa, Homo sapiens
SSTLSWRRAYRARRKVSRICSSYPILFIKKDWIYLYTSFSNFCRDCKKRLLSEWDSSQRAFKCLGRQQVNEIIAPFISEDLGDISETIESRLSQFALRHSVNKVPASDSWG

SEQ ID NO: 955603 - protein, 53 aa, Homo sapiens
YTAHHHAAGCACRTQTGFLTFLDDEIFLIQQPIQPRAEQGIDTYCHTLHGGVR

SEQ ID NO: 955604 - protein, 41 aa, Homo sapiens
SGAILDNGGTLHPAMPRCVKKASGCKALLSGKKSHLLILGA

SEQ ID NO: 955605 - protein, 53 aa, Homo sapiens
EYLHTIMPQVRLPNLQTGYLTFLDDEIFLIQQPIQPRAERGSTPRQSLTGGVV

SEQ ID NO: 955606 - protein, 166 aa, Homo sapiens
YHARPLAIDQYALATLGIDEPELTKLEHFIGPPLLQAFMQFYAFDEAKAWEAVNFYRERFKVTGLYENRVFDGVMPLLEELNIQGRQLYVATSKPWEFAREIARHFDFAKYFKVIYGSELDGTRTNKVELIAHLMREERLDPATTLMIGDRKHDLIGARSNGLDSG

SEQ ID NO: 955607 - protein, 115 aa, Homo sapiens
MLAYRLADASTGEVKVGAFKFRLPETTGGAVENIHASVRQWLEKLTQRLRGLHQARGVVLLLPLGETQDDRKVRFSTAARVAWISSMAKRERLARLPPYTSVRWLLPSQKNWSTT

SEQ ID NO: 955608 - protein, 124 aa, Homo sapiens
MSLTALGNFVAHARIARGLYWLTARLADKHIALDLAVGVVPPRAGRRQGLGFGHAFIFLVLGEQGQAVFRVGAPGEAGGDELALVIDVVDIVLRIIRQAGQAVEKLALLVQRGRPGRWPGSGVR

SEQ ID NO: 955609 - protein, 132 aa, Homo sapiens
VNDSDESTLRWRNVRDASPNDTTTLISAAAGAVVKGGLYERFRSTRRCRWLQQNLPGVDLSWFKGLQKPQGDIGFESYSPNFYYQNSRVTAVYTADIDKLRALMPPKLLAAVQPLQVLGRVAGLIAYTAYTL

SEQ ID NO: 955610 - protein, 87 aa, Homo sapiens
MGEASAPCLQVSIEIHVPIPVRPVAVSVVPAQGPRRRKYYRRQSWPKAWNLEHAISRGVHFALRLLNLFLKLPKKGFVAFQQNSGKD

SEQ ID NO: 955611 - protein, 39 aa, Homo sapiens
RSFRQLRRMQGTGTGASPDRDTSGLLMIAKKRRCCATCT

SEQ ID NO: 955612 - protein, 56 aa, Homo sapiens
RESTWVAERRDASPRNNHIDIALQQVPSVKGGLYERFRFKPAVSVFAEELTGVDLK

SEQ ID NO: 955613 - protein, 118 aa, Homo sapiens
GEAEIQPRKTNDLRQQVPSVKVGCTTLSVKTAVSVGLSRITGLIEAWFTGVAKHKVDIGFESYSPNFYYQNSRVTAVYTADIDKLRALMPPQGTGRRAALAKSGRVAGLIAFTAYTYE

SEQ ID NO: 955614 - protein, 143 aa, Homo sapiens
PVTDSESQLAVGGTPRCQPNDTTTRYRGSRCRCPGWLVRTVSVQPALSVVAAELTGVDLSWFKGLPKHKVDIGFEFYSANFKLTEQAGNSSLITGGIDKASGVDATAWYLAAVKPLASLPGRGLIRVYLGTPIRIEIFGIHSG

SEQ ID NO: 955615 - protein, 91 aa, Homo sapiens
  misc_feature (20)..(20): Xaa can be any naturally occurring amino acid
MGRDWGGVRAASASGIEITXRYQGVPVAVSVSSSKPAPLLYRRQSLTRLRFEHANSRGYIRLRSNLFPNSKKALGFKTPEDSQSLGVYLGL

SEQ ID NO: 955616 - protein, 75 aa, Homo sapiens
RCETVRHRGVCEQYRVISVKVQASQNRLIYRPFYTDSGTAVIQRIDELGVMHEVWRVNLAVGGRADRLWYTIDDL

SEQ ID NO: 955617 - protein, 185 aa, Homo sapiens
NDSESPVQRLKHPQRNAPMKKSSIALLLLSLSPLAGFAATAPLDLVGPVSDYQIYVTEEIAELVTPDQAFTDAINKGDLGTAKKLYAPTRVHYESIEPIAELFKRPRRVHRLTASTITEKGVKAEDFTGIHRIEYSLFSEKNTQGLAVLAQKQLNKDVQDLKNRVDELTFPPEKDRRRRPTADER

SEQ ID NO: 955618 - protein, 80 aa, Homo sapiens
  misc_feature (44)..(44): Xaa can be any naturally occurring amino acid
  misc_feature (47)..(47): Xaa can be any naturally occurring amino acid
  misc_feature (52)..(52): Xaa can be any naturally occurring amino acid
MVHGAVLRAVTPSYRCRCITAVTDCLVVKISERIQTDVALCFCXPLXQLKSXPGNSAAATDNARLERKRSYKPPLTTGTC

SEQ ID NO: 955619 - protein, 112 aa, Homo sapiens
  misc_feature (106)..(106): Xaa can be any naturally occurring amino acid
RRCQSTTHHIDSRQQCRRQGGCTTLSLNRVSVVEQNTRVDLAGSQGAKHKVDIGFESYSADFYYQNSLGNSSLYSGIDKARALMPPQVLSAVNTSKSGRVRGLIAXTAYTYE

SEQ ID NO: 955620 - protein, 92 aa, Homo sapiens
SRGSRDIPESRALTDEDVTMINAYYCRLSSRTLGTRFIAEALRVVAYILRQHAAICVAFQVRIDGGLRDQQHKQQVDRGPSIASKSIGSVPG

SEQ ID NO: 955621 - protein, 75 aa, Homo sapiens
MSPCGLTQRYYYRLNGRRSDSVQCCARCCMGGGGHHVMQLFFNFDDQHCFEYLLLKQGGAGLDVFFVISGLVIIL

SEQ ID NO: 955622 - protein, 90 aa, Homo sapiens
YQRVNFVAERRDASPTTHPHDIAAAVPSSGACTTLSSTACRGCSRIPGVDLSCSKGAKHKVDIGFESTAQFYYQNSRVTAVYTADIDKLR

SEQ ID NO: 955623 - protein, 45 aa, Homo sapiens
RIRDIQRVLALDGFDASTAPVDCCCAAVRKRTIALDCYGDRSMLT

SEQ ID NO: 955624 - protein, 86 aa, Homo sapiens
  misc_feature (20)..(20): Xaa can be any naturally occurring amino acid
EVAHDLFGELCVGLVDYKMXNHSPSVTAKPRQVLHQRMVGAAIAGNEGVTSMKLHALPLMRGGRILVCAPGNTPRCRALRGWSCRT

SEQ ID NO: 955625 - protein, 77 aa, Homo sapiens
MIGIFGRDLLRAHARGSLAVHNGSVTTLAFQRFYVLVKHRLLSLALGKLIGAGDREEKQERPEEYHTYMISEDAEPR

SEQ ID NO: 955626 - protein, 63 aa, Homo sapiens
IQVIRLKYDLAAPKEDQVMVDHANNGEHYDQLIAADNEKGNQIVRDSDCALCVQARPVLDRGL

SEQ ID NO: 955627 - protein, 110 aa, Homo sapiens
APYGYALVGCEALIRDFKHQDNGLLGIRVEGGRRYRVRESGVQKDQLLVADVQWLQELPDQPLGEEDADLLALLEALAKHPMAASLNMGGQAEGHQALSKYSGQYLLTLN

SEQ ID NO: 955628 - protein, 103 aa, Homo sapiens
GTVTSGDWQYTYRPISSVLLRLLRLIERRYVLQGHKSFAAIIAGIHHNLRVVRIKDLKAHSLVESDFGWCAPKLDMRIPCNHFFHHRSANTKPTVLMMNNHIR

SEQ ID NO: 955629 - protein, 145 aa, Homo sapiens
MRFAIAGAGELCAEFAASTTLGGLVDKLHVPSVGPGAAQKLADKFGSLESVIKAELGLIFARRCPEKQAKAVRDFFDNSENASHALAIEQQLKDYGMALAEREKRSLKACPKAGAHLGTHGLPGADEPRCGQGQARKPGGQGGRF

SEQ ID NO: 955630 - protein, 200 aa, Homo sapiens
RVCPAWPPHSREASMSIIDFYYYNEGKRVREIAGDEHVKLGESRSGFCWIALSEPTPEELLAIQRTYNLHPLAIDNAMHPLCPPKLEVYNDELYVVAQTAELVADRISYGKMAIFTGHNHLITVRHGNAGALGKLREQTRGNRPTQFGKGVDYVLHAILHRLVDQYLPIFEMIEDDVLAMERRALHDFLGPEEVARIFEL

SEQ ID NO: 955631 - protein, 174 aa, Homo sapiens
DIQVIVHLETPGRFAGARHAGKHHLGVPGNIHIDIAQIMFTGATYPDKTGLPGGGGGMLRCEVMGNLVLRLHPAHALGQGIGTVGFAQQVDIGAEQMMEDRMSRVWPEVNSTGTGGFCARAQVARSVLLTRPGITTSVKIRSGDTPGLKHLHRAVAILGGQYGKPDCFSNSNTV

SEQ ID NO: 955632 - protein, 195 aa, Homo sapiens
YRVLSANASSSLSISVDPLMADSSRKGGSLTAFRGVMLLAREPSRFYNCRGQPPARPGGFVMLKLYGFAVSNYYNMVKLALLEKGLPFEEVPFYAGQTPEALAISPRGKVPVLGVEQGFINETAVILPYIDDTQPGVKLLPADPFQRARVLALAKEIELYIELPARASFAEGFFGMPVPEAIKEKTRGELLLGLA

SEQ ID NO: 955633 - protein, 65 aa, Homo sapiens
IARSAHQMKYSFRIYSQRRALCFFSVACQTMELIYSLAEVLWQSVHVIVVIPYILLFPRTVHSIY

SEQ ID NO: 955634 - protein, 88 aa, Homo sapiens
CNPDFSDQASLTLDIAAFCSSMKYSLSHFFTGRAPCFLARLPNYELIYSSMRYSEQSDQVIVIIPYITAVSSLTVHSIYRVIAVPEYR

SEQ ID NO: 955635 - protein, 39 aa, Homo sapiens
MVRAPLKKCEKLYFIDESKNCDSRDQYLDRANRGCISTT

SEQ ID NO: 955636 - protein, 84 aa, Homo sapiens
ILTCNPVSRISILTLRYRSVLFLRMKYSFSHFFKGPRPMLLSVLAKLSAHLVSADGTLAIPYHVTVVIPVSYCVFPRYRPLHAT

SEQ ID NO: 955637 - protein, 90 aa, Homo sapiens
QARISRIKHTDPGISQRFAPQMKYASVISSRGAPYAAERRLSNYELIYSLMRYSGSSVHVTVDNTRITLLFPRTVHSIYRVIAVFLNIDR

SEQ ID NO: 955638 - protein, 33 aa, Homo sapiens
MANNIMHSRTGHLRTVCFTMVRGGKQYRVCIPC

SEQ ID NO: 955639 - protein, 215 aa, Homo sapiens
YSAQWPEQEHGNVSVPAAVTVTTSQRRYNEAVSRRSITDMEHGEQISHSRTVHRLTVASPCAAAVHQTVLHPGNKEFTTGEHIQRPQGGGEGEGPGKAGYSGEGMDEFCIPDHSGYEFLEFLFEDLELTNLVKRNLTGTDNFKTVRAGISHEGFPSRINIIRTLRSAHSRRIALSGSSRATLKQSKEELERLKREDPDNFGGYPGNRGGNRTNQS

SEQ ID NO: 955640 - protein, 210 aa, Homo sapiens
ELGKPSVVTCGRNRDHYKKAVEEAVSRRIHHRYGAWSNKSSFPDGTSTNRCFTIAAVANRPWCIPVYNGNSPPANISSAHKAVAAVKVPGKAGYSGEGMDKFVFQITQEEFLEFMFEDLELPNLVQTQPDRHRYLLDRYAQGIINEGNPSRINIIRTLRSAHARRIALSGSSRAKFYQAKEELARLKREDPDHFGDIQDIEAEIRKLSAR

SEQ ID NO: 955641 - protein, 225 aa, Homo sapiens
TPKWNQGTLLGYANHLHDNDRWPMGDSGAGVALPPRFDAALELVPCSLPLTLSQQQDKAMALGMMHDLQPRAPFKRRVRRWLQQLLAGRSPSPYGENEFFRKAVRRHELLWVLKQDETLLKAGLQGLPPLFFAGLRARSQIAAWRVMKPRFKVLQLQPDYNVKTHDFADLGEQIVKALPAERFEVTSGFLSGRPLPGQPLSVAEHSHYFELPEKSLKGIRIGAMW

SEQ ID NO: 955642 - protein, 168 aa, Homo sapiens
MAIAAGENGLPAEVEALGSVCIHFKEVAGQLANLVIAQAHLIKRWQVEYSDRHLREASFFDHQTCQPRHFADVGRDAQRVMTQVQVLKVLQVAQGAALVVVKRIWLFARLSDLSLGRLNTAPGMSFKVYAVDQQAFQVGKVLEKSLGNRRSFLCSQFQLRNVLEIDIQ

SEQ ID NO: 955643 - protein, 171 aa, Homo sapiens
  misc_feature (158)..(158): Xaa can be any naturally occurring amino acid
ASNTWICLVIFRGMNHGHVQYEASSSRNFRHDGFKDLADKVDKFTRRGVAIRSRNSQGEWGGRQDEFNRLIEPGQCVWRRSRQGQSEVGAEPKQGDAGRGRVQALFSLFGKLPYPSGTFDPLKHSKCFERLLLPADRPPSCGVQIAGGADRAPSVHHXVRNLGNRPANTPF

SEQ ID NO: 955644 - protein, 180 aa, Homo sapiens
MSSPIPRGWHALDSACLQDCFVEPVGSTLVPVRLTRSRGGVYAFRALYSSRALRSTAEIVRYTMLGSTVGIPLSNISTVSEEEKAFREAELVASRRQQKTIKRVGCCLTSQFKRGENVGCVLKGPKFQVMGVSRLNALHMPYSGDTMSCRRSLLREVAGSSWRNRIPGRGVRTKNIRIDS

SEQ ID NO: 955645 - protein, 207 aa, Homo sapiens
ERQPGIHGGGYDQVIAGARSHDLALHDFGAVESIHMQLDAGLLLELPGRLRFKKPEPVNRYTEDSAAAAGVLVAAPRSEAKKIARKCARLIMTIPVHTTRLHGYRKLGVNIPSINEVVNTYKYLALACKALTLKGENMSLDLHSLAWHRSVGKLIMQLNRPEFWSSLIRVLNEYVQIDNWVVLVLGDHAVRVISLPEVADGFHWGGD

SEQ ID NO: 955646 - protein, 142 aa, Homo sapiens
NRAGRQTSAHVHCVAFEPQVVGQVGEDIAVVFNAIEFHGQCLRYAVTAVWLAQLKAKRGSGIEVKRPADKGFQLFVKPNKFFTIASQSNYSVRTKIAPHGYKERRHGLFQNSANALLLLITGAWLVVFLLTRSVLLITHLSE

SEQ ID NO: 955647 - protein, 145 aa, Homo sapiens
RRTRQQPLERLTVPIAGSFATNNSEALRDAALNHLGIALLPDFSAQAALAAGKVVQVLKDWTLKGAFADEIYLIRPYSPHVPKSVTVLVGYLKEKLQAGFNLVAADEGSCRSELAREKTENPALNLIARVIVGDLREQARSYRGQ

SEQ ID NO: 955648 - protein, 121 aa, Homo sapiens
IRRTKNMQNQNNKYDTNRDSADTLRTYHGRLSKYKESHSYARSSDANYRFARAVQALKRSHLMSSTRIIIVALGEMEVGLIVDAANDCPRSSYKKHGADYLKVIEAVKAEYIFTVYRKIGN

SEQ ID NO: 955649 - protein, 33 aa, Homo sapiens
MPYYNSIVAIRDNQFWRLVSLCEENLFSILEFL

SEQ ID NO: 955650 - protein, 43 aa, Homo sapiens
YRPQCLVDVCRPLAHARTAGTGVSQFDAAVNAIKQADRQLLFK

SEQ ID NO: 955651 - protein, 142 aa, Homo sapiens
PYSIKPGSRSANPGHLNSGKRSGGFCRSRRSGGGHVVCPQTLPWAKNGDSIMSLVANAKNVEGLEFVLVTSDHGFQDYDIKGHSVLRRACIPHDIKKGENFNLYHGESSKSGVKWTGDLADSLHKWFSSENTQQPERCELRK

SEQ ID NO: 955652 - protein, 69 aa, Homo sapiens
AWDWNVTLAELMNPSLSVAGFTPRRKRPSIWLLLPVLLLVGLSLLPLAYVGLKAWQAGWTEAVHLLWRP

SEQ ID NO: 955653 - protein, 144 aa, Homo sapiens
QSAQKHLRQQMQPHRQVEALSPIRLQRLATAQRTLAETAAARAFQANALAQIQAVQAQLLADRTLEQQRLRAQITDVGRQQSLARLAEIRLAEAAVTNQQTSAQSAHNQSLSAEVIAQSRVNCRKRGIGSLREQLTRLQSQHKV

SEQ ID NO: 955654 - protein, 74 aa, Homo sapiens
MGPPRRDVRPALFAIAFAQLDDTFDDFVEHLPGHRHGHQHAKRWHRHGHQVETEQANAHVMRGAQWARGLIDIC

SEQ ID NO: 955655 - protein, 62 aa, Homo sapiens
QREGGFGVQVELLRPSRRTRSTVLDMEYTTLKVVCEHQLSASMPHDADMAEIWTKVVPDHAA

SEQ ID NO: 955656 - protein, 50 aa, Homo sapiens
MSIGIGYSYRFNTRLGRCYLLRTFCEVADCIGGVGKNRADSDFSTKSWWL

SEQ ID NO: 955657 - protein, 151 aa, Homo sapiens
RGTGLPGNRMLEQAISPTGVQRCASINPFASKSSAISGELTFEYYIRRHEHRTMPAAGRSVRWAKAQRYPGVADQGRMWQAIPNGVHLNVIQASRTCRGWKPGPTFKAIDDVCLELLTARQLVISGLPGSAGAGGVMLELDADIVLAHEGV

SEQ ID NO: 955658 - protein, 114 aa, Homo sapiens
QRTAMGQRLYARYLQANTRRQGIYGKGMNRTSAEERQESRKSIDNNLSRNSQANSTSVENHTLRSSTYGIIVIPEETIEDIRRAVDLVDVISDSVQLTKTTTKLLWTMSVPWGA

SEQ ID NO: 955659 - protein, 142 aa, Homo sapiens
STSRGLSVDSTSYRMASMLVTRQIPSFTARERHIERKSWGSDFMPGTYKDTSVGKALYGTGMNTYNRRRTTGVSTQSFDKNFVETRRKIRPRSRIIHYGVVHLGYRIPEETIEEIRRAVDLVDVNSDYVQLTKQDAIILDYV

SEQ ID NO: 955660 - protein, 121 aa, Homo sapiens
MITERASSSGGCCRDGAEQLDDVEGGNHLIAIRLKVVPAIGCERIGRHRREAETNEKSEGGAGEQMLHADFDAGAIDNAYEAVFEGAGSIWSGRIMQKARRYSTGLSPDSLWRHCESIARR

SEQ ID NO: 955661 - protein, 57 aa, Homo sapiens
ETRGSRWCIDCPGRFGCVVGIRRHAPHAALAREVIERGGLLAGLGGDHPGLSGKRGG

SEQ ID NO: 955662 - protein, 60 aa, Homo sapiens
AHGGGGRTHRLVDGVVDRGGSAVACNFQFFEVAAGSVSDLTVCVLLSINTSSVGAGTVTV

SEQ ID NO: 955663 - protein, 126 aa, Homo sapiens
MPRLLWEDSLLNNRYAELIYAAYANASLFAVRSASHKLLNYAQNAREYLDFRYQGLTVAFDALELNITRLEEDMAMMQTRQRVVSDEVKHEVEQALNATADFMGAQKTALHQAIGHVFSARNILDL

SEQ ID NO: 955664 - protein, 52 aa, Homo sapiens
KTVVGYAGYAMIPRASRSFQVFQKQTSRISLQERLETYQFGEAIAAIATHGH

SEQ ID NO: 955665 - protein, 97 aa, Homo sapiens
SRCHNLTGLHIGDRTPGSIFIARLGPWWPWPAGMGGKQSGYKEVWRMTIPVLVGSYQQRDFLLAYSQADITDPTHSKCTSQSDASAVLRPYGALHLQ

SEQ ID NO: 955666 - protein, 72 aa, Homo sapiens
PALSDVPMLGGMRTFEQQVSEITPYRTDFSSTTSDVSTHHIDAVMPQLVADLLSRTPIRLAMVARRTDRHGT

SEQ ID NO: 955667 - protein, 58 aa, Homo sapiens
MTCNDVIDDSNYYYDMGRFTSESTHSTCQASQDSQCRLRFYGITGGQYVGSCKTSPAV

SEQ ID NO: 955668 - protein, 49 aa, Homo sapiens
MAQMDSGDGLTHTVPIYEGYALHPCHPAIWTLAGPGPDLTTSLKILTAA

SEQ ID NO: 955669 - protein, 68 aa, Homo sapiens
RHSRSVTGSLFWLAGHAEEARVGLDHPGAVPILEVVLHRGCMHAGLHGHVLYFVVLGWILVDHLVLLH

SEQ ID NO: 955670 - protein, 45 aa, Homo sapiens
SPLETLSYPRSGTISFSPALRFAPDEDPIRGSQRLPPPSRGPPGV

SEQ ID NO: 955671 - protein, 66 aa, Homo sapiens
ELGPAVVRIAADTVLRYELMDRIRPWSLFHSAIERKLEQRAFEEGRPNPVRFIPTGFQQSPRLLCD

SEQ ID NO: 955672 - protein, 34 aa, Homo sapiens
MLFYRKTIGYKVPRNPELPNAAQAQKEEQLKIDE

SEQ ID NO: 955673 - protein, 36 aa, Homo sapiens
TRCKIKNPLPSIETIEQEKQARRIVYEACAAYMHCT

SEQ ID NO: 955674 - protein, 70 aa, Homo sapiens
RQDVQVEETRCWWQAIEDSLMVVSTIKSSSAMVLKWLMDLPSSPQESAAFPLCAIFVSSPRPFPYGFLVL

SEQ ID NO: 955675 - protein, 109 aa, Homo sapiens
FTQAKALTTREETRCEATLTRHPQYGQQECLKHRARSTPWELPGASPSFLAVDSVPHSLAPRYLHWECPVDPLSSSGHFLQELRVRVSTLSRTALVSEGWCARVPIRIS

SEQ ID NO: 955676 - protein, 38 aa, Homo sapiens
QVLQVETETLQAERNSRSKSIGAAKARGEDIEPLRREV

SEQ ID NO: 955677 - protein, 78 aa, Homo sapiens
LRQRKPRGTLARYHIFTRVKATYSGGTLGMSSAIQHHADELRPMGPSPPQDMPHNRFLVDTTVAVLMPCPPAARLFSC

SEQ ID NO: 955678 - protein, 162 aa, Homo sapiens
SHIPIAGLSQDNKKRHRGPHPMSSQCYDQSQIQEYEVSAFNMTSPEPVMASLTSEDLHDMLASLGKNPTDEYLEGMMIEAPGPINFTMSLTMSVGEAERHGPRGCASQRLRLLTTRKPQVTSMRTTSVELLTTMGDRFTDAEVDEMYREAPLDTQGNFNSVG

SEQ ID NO: 955679 - protein, 126 aa, Homo sapiens
MKDDRRDRYSAGKRGGFNTFRDRENYDRGYSSLLKRDFGAKTQNGVYSAANYTNGSFGSNFVSAGIQTSFRTGNPTGTYQNGYDSTQQYGSNVPNMHNGMNQQAYAYPATAAAPMIGYPMPTGYSQ

SEQ ID NO: 955680 - protein, 46 aa, Homo sapiens
SRGIPEEEKMYKEKRRDAGGRALRTASGCINYKELVRIVLKWTEDL

SEQ ID NO: 955681 - protein, 83 aa, Homo sapiens
VSPSGMRWYLVVDCSGYAISGPTTMTVFEDESTSSRVSSTKSELRHPKPKNAKGHLSPETDTFSLGSGDRADHLERPLAVDAS

SEQ ID NO: 955682 - protein, 69 aa, Homo sapiens
RCCMIIFCLDRQYNVVLFSSRFLTTQLLWAKYPRPLAYSMWDKSVGCKVVIMVQVARWLKGQTPIYLRA

SEQ ID NO: 955683 - protein, 51 aa, Homo sapiens
WECSVLSGRLDIYEKDASGKGSAVDRRDKGSISEGSAYLYPSLHINWNDLK

SEQ ID NO: 955684 - protein, 42 aa, Homo sapiens
GSPVERRDVTTCLRTLHIALADQYTLSVDEWILAQPSAWRPG

SEQ ID NO: 955685 - protein, 30 aa, Homo sapiens
MAYSSDQPHSPRSNSHAHPNPLRLHRCSHA

SEQ ID NO: 955686 - protein, 45 aa, Homo sapiens
MWSCLPLSRSLSILLSAGDLGATEQEECEQLARQLLRTPTTHGDF

SEQ ID NO: 955687 - protein, 122 aa, Homo sapiens
HRRDRCCMLFMRGNVISGAPIIRGTSQLPLPPIVMGITMNDRLLQMHGLWRLPLLESVRLHLKGRLCWSHLALFSCRDGQENRELRCLLYSRTDDDLLMDWIEGLWGRQNCINTLDFALDRW

SEQ ID NO: 955688 - protein, 54 aa, Homo sapiens
PVREETRCTREETDAYVVYAGKRSYRGHRLLGELVSCPLPPQCDWVLLLNEDYY

SEQ ID NO: 955689 - protein, 43 aa, Homo sapiens
  misc_feature (17)..(17): Xaa can be any naturally occurring amino acid
IPAEKRRDGPARHLLGXDHIYTLSSQPMHLYNLLHCITLHNLE

SEQ ID NO: 955690 - protein, 109 aa, Homo sapiens
AVGVPVYCVLSPLVSLGLRTSVFSSHWVYPGWVAWEILLYVCSAVGMYVCVVAVSLLVLYWVALVATAERPNIQSFPRTELTRAPLPSHPQEFQAHESPSIHIQCGLEL

SEQ ID NO: 955691 - protein, 55 aa, Homo sapiens
RSLLSKNNGMILPGHPFSNSRTSFTVDNKGSTYDRWIDLVCLCILSVHYESRPSD

SEQ ID NO: 955692 - protein, 90 aa, Homo sapiens
LPVIENKVCNRYEFLKEESNPPNSVLGIWPEALTVARVTVEGLWFASRRTNTFYKESLLGVLAVHAPISLVSMFVFQGLFTWIDGVMKND

SEQ ID NO: 955693 - protein, 95 aa, Homo sapiens
AVCCRSSLQDTPPSIAENLPVDWGGVLQRPTGRLSWRWCALVYSCCLWIVFFLQVALPPHHDWGLEQHGGRKSSRILGHFTPVFLLDGLFGRTGF

SEQ ID NO: 955694 - protein, 92 aa, Homo sapiens
QASPAAQGLNKELSHCLHAGNREKPQHHWLPPTLAEKPEAGQGQSNAGSMSTRSARLRMVRYLSESIPTLHTLGLSLSALQDLCQELHAKAV

SEQ ID NO: 955695 - protein, 32 aa, Homo sapiens
MVEQIESETAFQEALDAAGDKLLVVDFSAIEV

SEQ ID NO: 955696 - protein, 76 aa, Homo sapiens
AEVFFDGVRVPSENVLGRLGVASRMPCTSSTMEGSGMDAALSGTMRGIIAKAREYTCPSPQETQTEFLLSYMPCVH

SEQ ID NO: 955697 - protein, 79 aa, Homo sapiens
IDILPGPKDTHTLSFPWAMALGATHRRDEEAQTAPRPQSFQVGELGMEHENDMLVKYITGCDHKAEGASLLWRGFSFIL

SEQ ID NO: 955698 - protein, 40 aa, Homo sapiens
MDTSHKLHCEPGHSAPIPPVCGSLKGPPPNRTAKFSAIEV

SEQ ID NO: 955699 - protein, 54 aa, Homo sapiens
ARALTPPAPQRDRVDLNFPSSAGGPGKERTEVCQGPWVPRWGQALGWFPGRSGP

SEQ ID NO: 955700 - protein, 94 aa, Homo sapiens
KAKVRLQFHDVAGDIFHQQCKRNELVIRVHPIEALYTKMMTKKPGMFFNPEESELDLTYCYRFNIVNLPDAYKRLILDFFCGSQMHLLLRYELP

SEQ ID NO: 955701 - protein, 78 aa, Homo sapiens
SSTDPPHFDRGEISKTHYRQCYSHESVFVEDLKHPGQVEEGGFIGKEMVLLTGVTSGHYGQLSCNGSTPLSPMVHLHT

SEQ ID NO: 955702 - protein, 55 aa, Homo sapiens
SSQKGKMCRCLNSELKNCERTTWMSLEAQAEKYSQNVDKYEEEIMVLSDKLKDAE

SEQ ID NO: 955703 - protein, 120 aa, Homo sapiens
MVYFMAIVKNNDLMSKYWLKAYSRASRFLSNIMCNKVESQLLSKDRRLNHYVHFEDATIYTHPNYYIHIQDLKTTSPAQNAYSLAPKPYSHLTITLQGDTSNVPTTKFLCTGFYPEKSKM

SEQ ID NO: 955704 - protein, 179 aa, Homo sapiens
NSHQQTLIELLMCARPGTKEEHTEVLNKVLALEELLDDLRKKKYGGQKHLSNPGFSPISVVSGNGKAKKGDLMNKGPRHTCTGYTCTKHVQSPRNYRTRVQTQGAYVSHVGGIQVQSPYVHKPCDYGTRTPISQVRLEKKGKNPKGPLKPLQRLKAGNLATLGAREKKFLPKKTGERER

SEQ ID NO: 955705 - protein, 66 aa, Homo sapiens
PSKVGGIVGNEDTVSRLEVFAREGNVPNIIIAGPPGTGKTTSILCLARPLLGPALKDAHVGTQCFI

SEQ ID NO: 955706 - protein, 70 aa, Homo sapiens
KLRLAGDQRNASYPHCLQFNLQPPSENISLIEFENLAIDRDKLLKSLEKIAVSYVKGTEHYQTKWDSELP

SEQ ID NO: 955707 - protein, 69 aa, Homo sapiens
RGAAFRLVSSDECPPRICSAKKACPPCRDVRVAPIQMGTRPSFSEPWEPPHRMVFAAQTNRVVRAYPRV

SEQ ID NO: 955708 - protein, 149 aa, Homo sapiens
GTLGKQKVEEPDQVSFIPGMQGWFNICKSINVIHHINKTNDKNHMIISTDAEEAFDKIQHRVMLKTLNKLGIEGTYLKIIRAIYDKPIANIILNGQKLEAFPLKTSTRQGYPLLPLLFNIKSGQGNQARERNKGYSNRKTGSQIVSVCR

SEQ ID NO: 955709 - protein, 89 aa, Homo sapiens
RTALLTGQTPGTHYQLDVQLYHWELLGPASPPAHVIVGPSAPSALRQLYALRRLRLRDTADMEAPGGSAWANIQVRGWMCTWLRVQETH

SEQ ID NO: 955710 - protein, 78 aa, Homo sapiens
ISNNKRDAVDKPRGFARGLDPERIIGATDSSGELMFLMKWKDLDEAHSVLAKEANMKCPQTVIAFSEERQTWPSCSRG

SEQ ID NO: 955711 - protein, 102 aa, Homo sapiens
VYFDRGEFVSPTCEGGILSEEPQAGDFGAECPGSQCSLWIVSILQVSSSSTSDWVFEKDGGWKSSRILGNFTPVSPVSSGLFGSAVVFFSCDRSCATLRFAE

SEQ ID NO: 955712 - protein, 42 aa, Homo sapiens
VRRLRFKDVISCKGADCCEQTGDNAYAIVLEFGLVGYFPLRD

SEQ ID NO: 955713 - protein, 38 aa, Homo sapiens
AKFPKARVTTYEIVWATARNAPIRRSLSLMLTLIRHME

SEQ ID NO: 955714 - protein, 42 aa, Homo sapiens
DSSTDPHTSIAEKSKSILEHLGKIESWEELVIALTFSYNICS

SEQ ID NO: 955715 - protein, 30 aa, Homo sapiens
MMLESFLIAIRLARGELRLCFSTAVRGLLS

SEQ ID NO: 955716 - protein, 35 aa, Homo sapiens
HHSIAEKSNEGETTGNPGDGDEGEGDGMFDLLLFF

SEQ ID NO: 955717 - protein, 62 aa, Homo sapiens
RIPYTSIAENHASGFRNRFLFTMEGPGFTHTLAVLYPAFCLYMLVEDHGRGIRCPTNPTTCT

SEQ ID NO: 955718 - protein, 69 aa, Homo sapiens
IGMVWIQSRKWREGHGKPFPYRRPPCTHSDRLGAKRKWTMQRQVDVSRIQQGDLSSDCLERVGLMPLQS

SEQ ID NO: 955719 - protein, 45 aa, Homo sapiens
DPPGLHVEDDLDTVVVPDHKLRHRTLRSIGNVAAIECHLETSPSG

SEQ ID NO: 955720 - protein, 42 aa, Homo sapiens
DGEVSDGEDQTQDTELVETRPAGDRTVQKWAAVVVPSGEEQR

SEQ ID NO: 955721 - protein, 87 aa, Homo sapiens
DHIKTALSSKDGLLPTKYRLFRRTAPRTDRPRDLNLAPVPVRFRLDTNLVKKPAGCITGAPNVTTAPTLFAFFPDSVCRSVASVSTL

SEQ ID NO: 955722 - protein, 99 aa, Homo sapiens
MVDTEEAMEDIEEVTEEIEEVMEDIEEAMEETEIRGGYGGDRVGGSGSGGHLKWRLWDETGMVSALERNRGGDFGGKRSGYGGQMGLRAHYRNDGQHSA

SEQ ID NO: 955723 - protein, 171 aa, Homo sapiens
  misc_feature (5)..(5): Xaa can be any naturally occurring amino acid
MIHEXDTTIITPSLALSIDHRRTDKQELHSREAAVLQLSDPTGCMNDVQRCKDIMDLKQELHNSVAIPEKENTKLQKQREDELIQKIHKLVQKRDFLVDDAEVKRITEQDEDKEMADFLRIKLKPLDKVTKSSASFLAENKAEPPPSKPTEANTGLALINDCCWATHCNIM

SEQ ID NO: 955724 - protein, 72 aa, Homo sapiens
ADSMYGCHVDGTLALRPQPRNWHSSAVRMPPNYRLLDELAEGLNCVSYGPAARVYKHYDLTLSDGPDDSLAT

SEQ ID NO: 955725 - protein, 104 aa, Homo sapiens
WHAHRHVRQPGPGEQGPAGEHQACCEGHPGLGRVVPRSVPAHHTVYLPRPAPHRGDAQLTVTSRLGPGVAAGGFIQRDGWKLAAPTRLPPCLGPRWPYLCAYGH

SEQ ID NO: 955726 - protein, 102 aa, Homo sapiens
  misc_feature (5)..(5): Xaa can be any naturally occurring amino acid
  misc_feature (7)..(7): Xaa can be any naturally occurring amino acid
MKPEXLXTRTPDLITPTLALGGHRRDCGRSDPAACALERRIPRAEEFGTRFDTNPSPVTLLVKSPNQCYRDLDLSGYRGWSVGHLKPTLNRVYHLRFAFRGP

SEQ ID NO: 955727 - protein, 233 aa, Homo sapiens
  misc_feature (7)..(7): Xaa can be any naturally occurring amino acid
APLKPRXDETLERSDHYYAKLGTRPRSMKLNLVIYHKRLRCRIRGVSLFEKGCGKLETYIKLDKLGEGSYATDYKGECKLTDSLVDSDEIRLEHEEGAPCTDIREVSLLKDLKHANIITLHDIMHTEKSVTLVYEYLDKDLKQYLDDCGNIINMHNVKLILFQLIHGLAYCHRQKVLHRELKPQNLLIIQRGELKLAYLGLTRAKLIPTKDLLEMRVEPLVVPAPMTSLLGSN

SEQ ID NO: 955728 - protein, 185 aa, Homo sapiens
STSLYRCHLVGQLGIRPPSTELKHRSPWERRQLENAWIRAAGGIRCEDWRPTLELDKLGKGAYAKVYKGYSELTDNLVGLREIRLEHEEGAPCIDIREVCLHKDLELANREALMTFMHTEKVLTLVCEYLDKDLKQYLDDCGNIINMHNVKLFLFQLLRGLDYWYLQKVLHPDLRLKKLLMNHRG

SEQ ID NO: 955729 - protein, 110 aa, Homo sapiens
  misc_feature (4)..(4): Xaa can be any naturally occurring amino acid
  misc_feature (6)..(6): Xaa can be any naturally occurring amino acid
MIAXTXWTRSTPSLKLSLNEGNKKLELHRKGLACAITTGILRSVRILHEVIKFNYKTNFSYTLNGHLFKIMNLWLHIYCRGIWNLYKTVGGTSFVKSCLNLHNSRTSDPF

SEQ ID NO: 955730 - protein, 115 aa, Homo sapiens
MVNVGIPSDIRIRYELLASLSLSYINLTECAYKWPYCSQSMYYGGMPTVDNVTILNGMGVTRRIVYKPELQPYLPHKRDNIEVAFDYFEVLWPWSGYLCIFIDVTKKAASWEGIV

SEQ ID NO: 955731 - protein, 96 aa, Homo sapiens
LRLRKTFGPRKRTLDNEGIPRSAGIGHEQNKTTQLRTMLPQLKIEIPHISSFKFIYLMATYESIHYNITHIYVFTVCTIIYMRTVLDLTKTTLTTD

SEQ ID NO: 955732 - protein, 247 aa, Homo sapiens
  misc_feature (5)..(6): Xaa can be any naturally occurring amino acid
TDSLXXHDHVDTQLGTRATAQIIDAALAAKHTCYRENGFIMTEKDYLNLSPEYNKEYITKAPYATNCKDLSDHKYNDCSHDESTPKDSNETDCGRDQTLNRLNAFNRSNITTSHDIMNTRSCFSIISDSLSGYTYHSACRLSEQFQNSHRYSFTVSSGSPSGFLRTHDSTYALTLQIQNLLIHMKAEQNADHICLAQDNAHWETTLESDEGSPDGPRFLTYGKSKMIYFAPVKVAFPSLPKAMRTSN

SEQ ID NO: 955733 - protein, 210 aa, Homo sapiens
  misc_feature (7)..(7): Xaa can be any naturally occurring amino acid
MKPGKPXARRLTILRQPWHEGIDNATGSDFGYTTNAVHVVYTTGCRNYAHTDCPGHADYVKNMITGTAPLDGCMLVVAANDGPMPQTREHLLLARQIGVEHVVVYVNNGDAVHDSDMVELVELEIQELLTKLGYKGEETLFIVGSALCALEGLDPEESLNSVHNLLGAVDTYIPELAPNLEKPFLMPVEAAYSVLGRDNRVTRKLDLGIL

SEQ ID NO: 955734 - protein, 63 aa, Homo sapiens
LSPLASPLSLHSLNLLCHMLGEREEGNRKEKKRTVDQSIILRRIEDVGVPDLEIPTLLGSYAT

SEQ ID NO: 955735 - protein, 74 aa, Homo sapiens
MWLGDSGWGLCALCICALSRSLLCVFYIAGPCLRGQHFYSVESMAYCEGCYLATLEKCATCSQPILYRILRAMG

SEQ ID NO: 955736 - protein, 48 aa, Homo sapiens
AANRHSRQMVDIEDLEGPQRQSATLQDDQTYLCMLYGETEEDIGGPHP

SEQ ID NO: 955737 - protein, 51 aa, Homo sapiens
YNRIPKLKMQMTTFKEEPICPRHLQNEKLSCLADILPQERAFSGSAPVGWR

SEQ ID NO: 955738 - protein, 90 aa, Homo sapiens
MKCTKPGKSSRSDTMVMFLLLFTSKKSFQSVSFSRMSLLHLVLQVLGQVWASPAGGCGQKVQPVDGAELPLQLPTCLEQIPGGSGLTFGE

SEQ ID NO: 955739 - protein, 113 aa, Homo sapiens
SQTTGSVVLAVKQENEHLLEDYEKLASDLHGVDPAQHPHGLEDRVPQKTIQEMQQKLEDFRDERDVMHKHAQGAGADAQLKIKLQQAEDKAAPSASRTAYMPSERKMVSDINN

SEQ ID NO: 955740 - protein, 30 aa, Homo sapiens
MNLYNSKDNKIILVILDAISKIYQDEEKNK

SEQ ID NO: 955741 - protein, 45 aa, Homo sapiens
FASQQDDMKTSLKKVVKETSYEMMMQCVSRMLGPPPCMSPHMRCM

SEQ ID NO: 955742 - protein, 66 aa, Homo sapiens
PDSAAVSVPGRRGGVTGGLLRTAPVTRPLCWCHLWSAEENERLDDTDTTGVSATTGIPKTQNFDTL

SEQ ID NO: 955743 - protein, 77 aa, Homo sapiens
TSELAVHKVHDPTDWNLNGHVLRFRLPLSVKVSRLLGLIPNLMRIPVRNAEASEMKWSPFKDFQLSGLLQYESMSQA

SEQ ID NO: 955744 - protein, 60 aa, Homo sapiens
VASQQDGLNSLDLMILPALASQSAGITGMSHRAWPTQTILNFENVQFILSPVGWILLAGD

SEQ ID NO: 955745 - protein, 105 aa, Homo sapiens
MFTQTIGGLPKLIRATCQAPWVFSPTFSFQVLALVTAWNYSRLGYRGHVMVVSGFSGYWSFQRWLNDLPWDQHEALHNPISRTLGLSVRDQGWVSRSMLDLRPLA

SEQ ID NO: 955746 - protein, 121 aa, Homo sapiens
TSCGPHIDVISMGMLTQAAPALDFSLKLLAKEVAPVPKIHYSKPEEDDTCHGLTRLLMTLWVTRLYGQWPMGHIWHQLEPNSGSATCCSCDLSGLTAPLLISDLLICKMCLIKDQPHGALA

SEQ ID NO: 955747 - protein, 71 aa, Homo sapiens
ARGFPYSYILSSYEYSPLETTASNTYPFKILNSELSYGPITVQEFMEVKNALVSSEAMEQHLMKVSYHLTD

SEQ ID NO: 955748 - protein, 63 aa, Homo sapiens
SVPFDIRWQLLACPAYGELAVHGIKLIPDHRIFLSSAFSVVIWLVVDFQTCISLPNMASTSRL

SEQ ID NO: 955749 - protein, 40 aa, Homo sapiens
WSHPDHNTSQEAKQMMNRRLIAMAMTRPMIIQYQETVYIF

SEQ ID NO: 955750 - protein, 40 aa, Homo sapiens
VVENECEAYYTSSRLDLNSTAASTIDPAMGASDMGFSGVI

SEQ ID NO: 955751 - protein, 114 aa, Homo sapiens
ARGPALVQAVTIGKWSSGTRPWLLDEDCCPGGVAVTEISTPGPEDDYDHACVNDAAEVPEPDTGERTEANGAHSGPNQSRTLASSTGCGRDLSWQDLTYERVMGLNCAMGLMKD

SEQ ID NO: 955752 - protein, 98 aa, Homo sapiens
RRVTMARVGLDRVLMGYQTYPLALSLVFDNVQGHDLMEQVSPLTTLGRCQVARLEPAEGRSLQWQVFVPSAESIENLISLLARPWEALCGRELPVGLT

SEQ ID NO: 955753 - protein, 39 aa, Homo sapiens
MAVSFGEHGDSSVPVWSGMNVAGVSLKTLHPDLGTDKDK

SEQ ID NO: 955754 - protein, 82 aa, Homo sapiens
LQDMEDPIIAASSMTIDKLLLEEEDSDSYALNHTLSVEGYFMRSSHLSPVPWNWDYKMTLELRPQVHACLEESFYDYTFYAQ

SEQ ID NO: 955755 - protein, 129 aa, Homo sapiens
PEVCVLCRPCQLHTKPALPEVLARPGNHQHLPWFQCLAGARVPTLEMLHLDVEAFGHHVQRVTFLDLVLHRFFRRDFTRVLHHQGLADLEGLAVELVPALQVMHIDLVGLGDQREVVATAYLVAAGTPC

SEQ ID NO: 955756 - protein, 110 aa, Homo sapiens
AAEVDKRLAVRELASATLTHVQGCSAEDGMGLQHGLERLYEMILKRKKAARGGMKDCDRSPHYLSSHLDKGMHTWTAGWDQSVTSQSDWGAGPVHLNEGERSMECPVLET

SEQ ID NO: 955757 - protein, 116 aa, Homo sapiens
QASTYLQKMSMYNLKCPAEENCLASTPYRANVIDYDHKVLLTFPQRVKNQGTSHFLPILPRYSWEWHSGHQHYHTLDDYSHYDLLDANTQMRVAEGHKASFCVEDTSCDYGYHRRF

SEQ ID NO: 955758 - protein, 71 aa, Homo sapiens
FPLLDTNDPIHKFAFNTLSLDEKHSSPGLTSKESLIVQINTAHGFILIHVDNTKVTMKEIILKAVTRKKGS

SEQ ID NO: 955759 - protein, 125 aa, Homo sapiens
VTGVLGCCATFKERRNLLRLVRRAQGHGVGVVQMGPKRLSLPALNLCLAVLTWGGVTVLSHLPTTVGPYVPAGPGKGRHHLHKKASGWADALHPPPGLHANQGEDPVIRCILDPDLVLEQGFPLS

SEQ ID NO: 955760 - protein, 118 aa, Homo sapiens
GTSQGRGSLLLAVAGATSMVTLLLAVPITVLTVLALVPQDQGRLVTDTAGPGAHAHQGLGFKNLPEEEPETYLSLGLPTAHLISAPLKGLGLGWETTKEHAFLTSGTQFQDAQGLALP

SEQ ID NO: 955761 - protein, 71 aa, Homo sapiens
ERKTEPATGFIDGDLIESFLDISRPKMQEVVANLQYDDGSGMKREATADDLIKVVEELNSDPLAKGRGPLC

SEQ ID NO: 955762 - protein, 66 aa, Homo sapiens
ELGTQCMLHLALIAPVELAMAAAIQPASPLPVRADYESLKVAAEWYARLQNADASAQQRLAWQHWL

SEQ ID NO: 955763 - protein, 88 aa, Homo sapiens
VVFSEFFFVVEEHGRMVDGPFASYGSATGELTRRNERNLGSPIRSGCNDEPRTSDSNTREHPTKPAQTLDRDPPLKPGGVSKNRTLQT

SEQ ID NO: 955764 - protein, 97 aa, Homo sapiens
AAESDVLHSQFEQQGDVVLPKMNLLRQHNLFCDVSIYINDTEFHGHKAILAACSTFIRDQFLLTQSKHVTITILQSAQVGRKLLLSCYTGALEVKRK

SEQ ID NO: 955765 - protein, 69 aa, Homo sapiens
NYYTSNLRKVLAWDQWQGPRNLKVLDKDDLLLLSEIFNASSLEEGEFYKYGPICYGDCQYKDPLLTLVL

SEQ ID NO: 955766 - protein, 96 aa, Homo sapiens
GTAAMNAFLLSGLSLLGAWATWAGGATAHDGNSSFSLESAKKLRDLQEPHEPRVGKLRNFAPIPGEPAVAILCRTRTFQNNSSLFARTPMPKRYFI

SEQ ID NO: 955767 - protein, 91 aa, Homo sapiens
FEEFPMTPTTYKGSVDNQTDSGMVLASEEFDQKKAGIDKKAALVSEADREKAPYFSIFFSALIRKIKDFKTFDICSTGIYYKLQKRNQDGQ

SEQ ID NO: 955768 - protein, 90 aa, Homo sapiens
GDYVGEKGPGPRHSPARLEAMPRKIEEIRDFLLTPRRKDAKSVMINTNKDNVKFKVQCIIYLYTLFITDKEKAEKLKQSLPPGLAQKELK

SEQ ID NO: 955769 - protein, 91 aa, Homo sapiens
SKWKQAFNATVVVRHMRKLQLGTSQEGQGQTASHGELMTPVVGAGPVVGCCCRDCCVEPGTELTPPLSYQLKGPEPRVMILRVGGLCGSLL

SEQ ID NO: 955770 - protein, 112 aa, Homo sapiens
EFQIPWFHDRFWQQYNKGFGGMDGTQQHIFKMLPEVLGGINSVKALVLTPYYHNVHYECMLDKRKKPLRGGSHNITVGATTKNCLGIQNWNWLDQGCHQGLKGLLWNLWIQT

SEQ ID NO: 955771 - protein, 77 aa, Homo sapiens
IVRELHVYGSDVPVSSRDPTKFQHHGFGMLLMEEAEGIAREEHGSGKITVISGVGTMNYYRKIGYRLQGPYMVKMLK

SEQ ID NO: 955772 - protein, 102 aa, Homo sapiens
LFLDNQEVPQWSQCGIPSWRGWPGQDTDQQVLGLKTPPSSSYGAHEPVPATGGCPQAFGLTVSSPDAARGQVSAHHVRPGPQLAIHRTLLGPGPGGLFCPIP

SEQ ID NO: 955773 - protein, 89 aa, Homo sapiens
ALGGGRGAVAAGCPLPATGEQRPRWRRPALRPSPQPAPWEAGSRSTPTEGLIKREKPLQRVIPVSPICGRQDIRSNMCINVGSHHLPCV

SEQ ID NO: 955774 - protein, 107 aa, Homo sapiens
FYRQLLLTADDRVNPCMGGVILFHETLYQKADDGRPFPQVIKFKGGVGGIKVDKGAVPMSGQMARLPPKGEDGLSERCAQYKKDGADLPKWRCVLNIGEHTPSAVDI

SEQ ID NO: 955775 - protein, 116 aa, Homo sapiens
SSFSSMSLPGAPTASPGAAAYPSLTNRGSNFAPETGQTARQFQTRTGKGGGVCPSGRASSLIIVQVLVSNMFNNRQHNNLARLRAFKKIRPFLENQTTSSTIEKFPDLTMFPPFSE

SEQ ID NO: 955776 - protein, 78 aa, Homo sapiens
MALSAADKTNVKAVCGKGCAHAGEYGADALKRMFLCFLTTKTYLPDYTLSHGIIQVKGHGSMVTDALTNAVAHVDDMP

SEQ ID NO: 955777 - protein, 125 aa, Homo sapiens
QTFKMELGTGERSVSPHQGEEGIGGEGGGHEHNEEDSLWQGSRCACGNTTWTGRLHAFKPYPLLFRLCLCPLSCPLCKCPLRATSSSCCSCEDLWAVRILNLLSNTVPGKADEHSSDLCLVPTCK

SEQ ID NO: 955778 - protein, 98 aa, Homo sapiens
RQPPWLNQPTGFYACSSVQDFSRPPPHLVSTSNRAYMRNPYSSVPPAIDDYTKTYTTGVVATSAYTTDAITLQLHMKALICVPGQTVGSAYPPTAVTF

SEQ ID NO: 955779 - protein, 68 aa, Homo sapiens
PPQQSVDLPRCPVGACVFTALATALDVGLSNWSFLYVTYRCEYWPCPAASLQAEAVCLSIEADCTPGC

SEQ ID NO: 955780 - protein, 53 aa, Homo sapiens
ETKMAGGGQAYHNGIDLPLGPVRPGSAATGIWWRGGSLVHIDMLTNYLSLITL

SEQ ID NO: 955781 - protein, 142 aa, Homo sapiens
AGGFDGMYTYFAYNGLSFGSSHQNWKAVKNFCDANILMFIPSVGPGYIDTSIQPWNNHNTRNRVNGKYYETGLQADLTVRPEIGSITSFNEWHEGTQIEKAIPKKTPTRLYLDYLAHQSNLCLELTPPLGGAFYKEKEQWLM

SEQ ID NO: 955782 - protein, 90 aa, Homo sapiens
CPSLPCLRRSSPTPAPWTKFVQCPHGELQKRKEVVHTASLHKIGDISSCAHGLLALFSCDTGEIKEKSVSISMPRWLTGCEEGTAETIPG

SEQ ID NO: 955783 - protein, 198 aa, Homo sapiens
ESIRQKLALGSYFDDGPGIYTSCSKSGKPSLSSRLQSGMNLQICFVNDSGSDKDSDADDSETETSLDTPLSPMSKQSVFLVLIETLLKRSLNPWMTWTVLQGKRNCKLKPKWPLPWPNQWPKCKLKWRNRTGKSIPSLKLEAAKAENAGSVWEPEMVDTVPILSPIMPTCGSLPPLRPPPCHSLHIKFVYFYLPTVGL

SEQ ID NO: 955784 - protein, 82 aa, Homo sapiens
DSSLPQNQPFVFSLGTGLVIKGWDHGLLGMCEGETRKLLIPYTLWCRERGSPPETPGGAALMLNELLFIMECLTVLSPYWVM

SEQ ID NO: 955785 - protein, 79 aa, Homo sapiens
HPGDFGADAQGAMNKALELFRKDMASNYKELGFQGEAPAAPTPTHLGPGFKRERGLISCSHIEFASECLLCLVEVGRRS

SEQ ID NO: 955786 - protein, 179 aa, Homo sapiens
ASSGKHRILLNPSDRTAFNLVLYGRRSTRPGRDSPKFKPGHSTDLGMLTFARRSFLVSFDSLLSFHGIFIPELYSRIALNSPPLDVHARNKVSDLMSIVSSREGHLKLEIYQKTLWSTNGSGPLYKTDSTVLNRGITNFLIEEEILFIILAVPLEDYRSRKLNTPLPVILLKIKSSSRK

SEQ ID NO: 955787 - protein, 76 aa, Homo sapiens
HEAEKLQQYIAPGMKVYIDPFTYEDPNEAVWEFAKEIDVYCVKIEEVIGAGEFGEVCLGQLKQPGRQEVLVAFKTL

SEQ ID NO: 955788 - protein, 55 aa, Homo sapiens
MFNLLKKLSSHITNRPITRSRRRGINRSNYRKSNTNVSYSIRKAPFRVTTHAITG

SEQ ID NO: 955789 - protein, 79 aa, Homo sapiens
GTSFDSTEAPRAKSVRAKKPIKYLEESDEEDLFKNVRRLFKVIILPSPRLVLKLPEALNCLPSEFSLGKGFIVQDIKVK

SEQ ID NO: 955790 - protein, 72 aa, Homo sapiens
SGGGPSRSSFPGTSTFKRSRIRRARGGPATRELTGSGGPRWDLAENIASTWVDLLKGMGPPPSFILQASAIS

SEQ ID NO: 955791 - protein, 74 aa, Homo sapiens
DDDCAFTGKLLFGSEGLDLTRSIAPAWHAIQKPFRAGTGVVGAWGVSYSLLSVSPHSSELLLLIKPCFKLTNID

SEQ ID NO: 955792 - protein, 151 aa, Homo sapiens
EADGAGVGPKAESVVGAAMASAIAPPPGVTEALGAAKAPAMAGAPKVAEAPREAETSRAAVPPGTVVPTEAGAPTEGTEGSWGSNTLPRKLKLPGWHRLPRQLRLLCPQHLLGLQNLLGADEISWELLSSPKSGEGTWKHILPNKCNPVGA

SEQ ID NO: 955793 - protein, 68 aa, Homo sapiens
KIPPREMFLSEPDECFKVDENVIMVLSTHDMEGNELTQGQAMNLNKLFPAQEKLYKEYLQMAQNGSFH

SEQ ID NO: 955794 - protein, 78 aa, Homo sapiens
VASSVTGVVDLARRGRRWSVELKRSVSHAGDVGLEKLKELVDHFLAMTEEELGEDDTLNPKPLSPAPFPFPVVQIRKV

SEQ ID NO: 955795 - protein, 123 aa, Homo sapiens
RGINKKTRTSTEGGRSPGWLHGFPVPPSLLHSHIIVLSYHGRPGALCHSCSTGEPGEGGLGAWGRKAGKSPSWEVLAQLVGPLSTPTLFISVDFFAVSPNISQGAGGTCPNQPPVSDKPLLCI

SEQ ID NO: 955796 - protein, 95 aa, Homo sapiens
EKPGWLLVNVNAPAKARRLLRSQTLHRPLGPKARRNLLVLPPKRRLKSTPRPKISVCVLGDQHHCDEAKAADIPHMDIEALKKLNKNKKLCQKLA

SEQ ID NO: 955797 - protein, 115 aa, Homo sapiens
KPPSLNLHPAPDLLASMQLHKLNSQYQGMAAATPGQPGEAGPLQNWDFGAHAGGAESLSPSAGAQSPAIIDSDPVDEEQLLSLAEELGLDRANELTELRLWQNEFAFTADFPSSC

SEQ ID NO: 955798 - protein, 72 aa, Homo sapiens
LPRGRQRPDGQRGYMSGMPEPEAARFWSGGHSGHSYIGNQKENEYCETHNLGVDWEKAALGKAHSGPTLPMA

SEQ ID NO: 955799 - protein, 95 aa, Homo sapiens
NVGFTKDVGNIKFLVCADCEIGPIGWHCLDDKNSFYVALERVSHEELRGGVLISIFKDLPSSHKNWPFWWFILFRGLFVCAFLISVSQLFSFVHA

SEQ ID NO: 955800 - protein, 90 aa, Homo sapiens
MVDSGPIYDKTYGGGALRLFGFSQEMASFSDLNYQCTDPYIIKLSIERLIINQCWYCTFWNSVLEKTPRITDYSASFFYELELLGTPITC

SEQ ID NO: 955801 - protein, 83 aa, Homo sapiens
YVIRLEPLLQKVVEKGAIDKDNVNQARLEQVIAGANHSGAIRRQLWLTGAGEGPAPNLFQLLVQIREEEAKEEEEEAVVTLFQ

SEQ ID NO: 955802 - protein, 115 aa, Homo sapiens
ENHRSLFHKGPLIKVNRRQRYASNAVSEALILQVANKVKVPLQDLMVRNDTPCGTTIGPILASRLGLLVLYLCNPQLAMHSIREIACTSGVLHTLTLFKGFFVLFPFLNHNLLVD

SEQ ID NO: 955803 - protein, 84 aa, Homo sapiens
SCRIRHEMVCPEFVPSDVQMCPQFLPSGGFVVLLTSGVKPQTFAVSATALKGGASGVVYSSWWVHGLAGFRSEAADLHSECYSS

SEQ ID NO: 955804 - protein, 95 aa, Homo sapiens
RPNPSPECLRPCALPLRVPRTGYPPLLFFETGAWCIPMREYSALSIADCTLELLGLKKPHRLIQQRLLGYRRERTCPYFLLEGPPLTEVRGSEYT

SEQ ID NO: 955805 - protein, 40 aa, Homo sapiens
MAQAVSGRDVAVTFAPNTRNSLYGGRRSCLICPLVESGYH

SEQ ID NO: 955806 - protein, 71 aa, Homo sapiens
RVGKRLPTTAPSLALHYLLSPYTTLYYLRTSRTTRTVPYIHRTLEPPLGDPESPVSKPEEDELELEDTSDY

SEQ ID NO: 955807 - protein, 182 aa, Homo sapiens
RSTGRLGENMADEGAVMIKERYGDQEPLWISRAPLKACNEPREYGLISDLIIGKDIVPNRLDEREKKSFGAKGYADQRISTGSIGGRRVSHGPHGCTYSGIRTCIDVKGERHCTCTKVTAEIREESFHVQTRKRLWQHPFRRPGDYIRTASKPKLTSIKKFKAYTYLVGAELKVKKADGIRG

SEQ ID NO: 955808 - protein, 127 aa, Homo sapiens
LHLVSLAPYNQTMAPSFISQITQQVSQSLGIQWRLHIPCWPQTSGKVERANGILKAQLTKLTLEVQKPWTSLLPIALESIRASPKAPSFLSPFELIYGRPFLLQNRPPSNSQLGEYLPTVSLMSYLL

SEQ ID NO: 955809 - protein, 104 aa, Homo sapiens
SYPNLANQLVKPPTNEYLLLKMSSHYQCDVALVKDSADKTGRNAVITKGNEEIKSLGVSKKHLESMVKYLVGLSVVQVLTSVVPLLINLTLLRTPPTVVRRLRL

SEQ ID NO: 955810 - protein, 91 aa, Homo sapiens
  misc_feature (33)..(33): Xaa can be any naturally occurring amino acid
MVQEDWQRVWKLGSGLVCHWLLDLGILAGRLSXCLCYKQIDPQAWKSDCWLRKVVLPAHSPGPTGDLSITGWTWALMGHRVEIRLLTWDVK

SEQ ID NO: 955811 - protein, 191 aa, Homo sapiens
CRSSEDVCNGIRVGHPYWFRIGNALETVGEPDALANMNLYKPNMGHNSRTATYAEEALKRLINARNDPLTEAAKRNVINSNLKGNETNDWPTPKWAWALTSENEYFATESLRILPIINLNDLLSGKTNRNRPLLMTCLRISLEAFKYVVLTRRPTLDLALRVLWDDLREGNGAVMLYPKNCGSRTMQRGEL

SEQ ID NO: 955812 - protein, 68 aa, Homo sapiens
MSGWWIGNALDWIRLGYSGRSEWRNTFVDSTTALSKKYDATPGTDRPGKHKVYTDRYEVGHNLRGMRA

SEQ ID NO: 955813 - protein, 109 aa, Homo sapiens
NLSCFHPADMFGTSDPGGLASWTHNYSGCSCTSRVPDENANLDASCFLNGGLEGSREGRLSGTSPPPSMDAGRSSSGDLSWTSSDCFESLHALPDYSLGPHYTSQEGSC

SEQ ID NO: 955814 - protein, 99 aa, Homo sapiens
SRRESIPKQPSKKTPRYPFHVTGLFAPCLATATNRAYMTFRYFSPGRSKEASRTLTFIRQLRSMIPEMLKPPPTQYKFPRAVAPNFEQREPHNYLRASH

SEQ ID NO: 955815 - protein, 48 aa, Homo sapiens
MRTNRIISPKMMKRSDITLQSTSPKLLPRKQSYGTPQRAHKPYRSPRS

SEQ ID NO: 955816 - protein, 103 aa, Homo sapiens
VPEVSRKCYYDSSWNTPTYLEPDNGLDMSTSGCKFYCCSHDATDTEVTDQSSQARKNVKNLFILSSTRLKKVFGSYRNLIKIKIIEDYFHLKCWNISDLIKPF

SEQ ID NO: 955817 - protein, 181 aa, Homo sapiens
MDGALDSYTYVEDISSFPHSGEKDDAIHVTKFIRRLGSDTTFLRSVSYCTEIEPTGKPDEGKSFIDLYSTSSSVTEIAVYDHDATATDSVFNSGTGMTNAARVVDASTAFMFVEPPDHILVSKPPDTSCDSSKNADSKGPEFDACTPSIKHSNSNVSLAFADGGINLGRSGEYGLKKSRMR

SEQ ID NO: 955818 - protein, 133 aa, Homo sapiens
WHEDFSSLLINVLCGILLFFHNRALLSALRTCFGRYAFSSMIFLMASGNSFAASWSSGAASSVILTFLKPNFFLILSSHPLLALNSLDLDPSPSFCFKLSYNDRLFSNHIRAYRYVFLVAILHPHKSCIFNTR

SEQ ID NO: 955819 - protein, 146 aa, Homo sapiens
MQQELSFLPSKRLNPRTPPPTVPETCDQALPTNAKVNFWRPPPFRQSPQSRRTPGHIRERSSTAATGSTPYILFSETCERSVTFESNGYHSLSSRVSRTIPKKSSPLAFVIALRPTHLSPSAIVALKKLSNGRSRPLLSLSPLYLS

SEQ ID NO: 955820 - protein, 100 aa, Homo sapiens
DVPPVPTPSGDCWEKDLDEALEAGSCDLETLRNIIQGRPLSADLRAKDWKIAVTVAGQGDSYGIMGWEIKTLPEQTTIHIDCLQYIDQLGEPAEKAPESL

SEQ ID NO: 955821 - protein, 30 aa, Homo sapiens
MAKLSAKEKLREDIADLVYKVPPKPVPMTI

SEQ ID NO: 955822 - protein, 158 aa, Homo sapiens
  misc_feature (154)..(154): Xaa can be any naturally occurring amino acid
RHREVRLTCFIETHHCNQVLGTRLRKYRDECTFLYGCNYHELSIREPRRRYNKPTLRRTPEVIHMRGLRMAILPRKRMWPLGNGRKYRSHVPGAEQPHHSPERVAPMWIRKTYHHPRGCDTLRLTDPIRPPRGLSMRNDTNASDCLLAAEDTPXRLIL

SEQ ID NO: 955823 - protein, 99 aa, Homo sapiens
SCRIRYERDERQWKIWDLLKIVLSLFMIMKFFDPEDLLDERQIKGVIELRKSLLSDLRTYEPYGSLVQQILILLLGPYGVGKVSCVNLLRFIVQGHATH

SEQ ID NO: 955824 - protein, 115 aa, Homo sapiens
MTVPIKRCFARREKADANNRLRRLTYAPETPKHRQNKRPPLNKQCEKTRYVVPPTIENGPPTTKPENPSTKPNLNPVRQPLGNRPKHGSSFPPRTNYTMNDATVTKHGHFCYPPR

SEQ ID NO: 955825 - protein, 211 aa, Homo sapiens
KITLSRATAKNALLKHPLRKASSVTISLPGMLKKSYLDIEVTKIPEEVKAPAEADPMKKPLKRPLPKLEKGGDIAAEHAHLRPFLRRNSRDRRGYPSIDRPLRKKVENRAEAIKLAEIKAVDSELEISNGSEESPKENKEDGNNNVEEPPRIYNISLRTSRYENIFIKITKSFSKVNESCHGEGLTPLNPPPRSSDKGEEAEKGEAHVRTK

SEQ ID NO: 955826 - protein, 129 aa, Homo sapiens
SNTLHLVNRDNTEPETKSPNSRKRLSGKATNQLLPRQRRNLEDTLSMDLIDPRQKNGEKYDRKRSTHLKIPDKAPRPRRKPPRYDKSRGHPVISAHNDRRNSLKSSEEYEGSYDYTTRTICRIEPELRS

SEQ ID NO: 955827 - protein, 220 aa, Homo sapiens
YSRRNYVRTREGRIEKTETALEATGDVTDDVPEGDEEEEEIEDSASSASDETGTDTNEEANILTLQSLPIHLIHGLTELTPLQSPDTYNRLNYNGFHYSPNPSEIEIDIVRCETRPHPIRPHLLTIPSASPFIRKTSNLTRLTYSRPSRRTSYSAVAVAFVVKNKAAEVEVIGVEDSGGTDSDFLSKAGQFQKNAKFPSPSHYNTIEVDYPLNPKVNAVN

SEQ ID NO: 955828 - protein, 106 aa, Homo sapiens
PKPPHNILNKHARTGENAPNITKKKKTLKPKTYTPKYTTIKDNGNDRPVLAVNLQTHPNSRYNTPKKRHLKTSTQKNAPQQNTLTESLHDPLHLETPRLSFHPLLH

SEQ ID NO: 955829 - protein, 149 aa, Homo sapiens
MANLITFDDPSVKTVKKTIDETSAGFLVIIMAEIYAVETPHIARTLRKASTPPVRVMTLMIIKPTVVTTYLVFREKVDTEFPLKGARTSELDRYAPRSLVRLNVRMRYQGSYYFSMILRLTISLRNIRPRDIPYNRWQRPYGCYALKFT

SEQ ID NO: 955830 - protein, 82 aa, Homo sapiens
DIHILKVLDKARISTGDQPICLAARRYLSTHFQESHITVAGWNVLADVRSPGLKNDTLLSGVVKSGGLAVAVRSIMRTMASD

SEQ ID NO: 955831 - protein, 178 aa, Homo sapiens
PKPATPEGLTSPLSSLSPHTFRKPARARALSPVQLRLQSPFARNRHLSITLYNDMSWKYKAQSSGRSTSESIYTNRAVSIVCPLAGKFAALVVPTNWLMCGERWPVHRVSPCPSVYRSVVSGCLVVVSGTSLSKGGNIATYRTMGQCRKEYASKRLVKGYELQKGCAVGAPLQVLFFR

SEQ ID NO: 955832 - protein, 93 aa, Homo sapiens
ACTVQSLGNLLDMMYREPSRWSYTFQTFSFLSRLKVQLEPFPEKLYRPVKPVQIFERSGYCDRYIFVKNLFENGALNDIHRHIFQDWHSFSLA

SEQ ID NO: 955833 - protein, 84 aa, Homo sapiens
QDTEDPAQEEDLWRRRLSLSPSTPEGCESKDEASGGASDPGPGPHCASSLGVSGPWAPQMASSGDCPAATLLEGACKGRISPIL

SEQ ID NO: 955834 - protein, 97 aa, Homo sapiens
MAQADISLFGLSVMGQNLILNMNDHGFAELATKVMISWPMNAKGTKVVGAHSLKEMASKLKKPRRIILLKNAGQAVDDFIEKLRRCRDLTATGILFV

SEQ ID NO: 955835 - protein, 102 aa, Homo sapiens
QELEVLTANIQDLKEEYSRKKETISTANKANAERLKRLQKYADLHKDRLGLEILKIYGEKLQLIITNIDPKNPESPFMYSLHLNEARDYEVSDSAPHLEGLA

SEQ ID NO: 955836 - protein, 111 aa, Homo sapiens
MAGSPPPASLLPCSLISDCCASNQRDSVGVGPSEPGVGYSLVVRRFLSPSEKRSIRVGVTRFSRCSVTPFFDSERELPDPLRFPSEANASPCFGSRTVRASTDLRPLSGTP

SEQ ID NO: 955837 - protein, 102 aa, Homo sapiens
DGVGDKKRIQEVGEPSKQEKAVVKYLRFNCTTKSTNMMGHRVMIIILLQKQWTVYSDSQRVNANIGEEALFTTSEYVLVYSHIISNEITLSLQLLNVTDTEI

SEQ ID NO: 955838 - protein, 96 aa, Homo sapiens
EPDPCFGGAVAALDQLSQSERRLRKGATPEREGEALKPFLRRMEETMKLAPMEDTAEFCLFLIPDELWDSHKLYESLLKFIERIFTLFAPMLVPYI

SEQ ID NO: 955839 - protein, 114 aa, Homo sapiens
LFASYKWNVSRPSLLADSKDVMDSTTTQKYWIDIHLRWGDYDSHDIERYARAKFLDYTTDNMSIYPSPTGVLIAIDLAYNSHSAYGNWFPGSKPIIQQAMAKIMKANPALYVLP

SEQ ID NO: 955840 - protein, 95 aa, Homo sapiens
DDDCKAKAYRAAGDARSLDLSLIARALSLKHSPAYPGSGKHQLIDDNLIKQQKICPKLHDCSFSFSPEPLSMPLISSFCPRVSHPRLPRPDAFIN

SEQ ID NO: 955841 - protein, 131 aa, Homo sapiens
VDLGRVWAALGGWHGFTHPFKREDPLVLAILDDRAELRVIRSGSLSSSANALAFVLTMPSLWDRFSSSSTSCAPWSLPRTPTPDRPPRSAWGSATREEGLDLSTSLESSDCESLERSNNGFWAGGRHGLPG

SEQ ID NO: 955842 - protein, 82 aa, Homo sapiens
AIVWYRTWGIPPWSTVKNLMMVPASLMVLLLKPTRKFAYLERLSNKVVCKYQTLTSTLMENMKDKAKIHYSNKKHLMRFQKQ

SEQ ID NO: 955843 - protein, 90 aa, Homo sapiens
MTASQERPYFMSPELRDILLKGSAEGFGVSSYGNVSMNHTNMNTRMIEFLKKNRSPKNGQVNIEKEKVHKHMIKERIRTEKQKQSYLNSY

SEQ ID NO: 955844 - protein, 133 aa, Homo sapiens
IDEDEITASCRRYGPLIVDRPHKAESKSYFPPKGYAFLLVQEESSVQALIDACIEEDGKLYLCVSSPTIKDKPVQIRPWNLSDSDFVMDGSQPLDPRKTYICWWRSPTITKLWGLAMIMDRLYGGVCYVGDGY

SEQ ID NO: 955845 - protein, 62 aa, Homo sapiens
MRPYTTYTVVSDSIHLWRCVQGSYMLEPMSELHFFLWVKNRLWGATHGGSLLCSHHCEAEAG

SEQ ID NO: 955846 - protein, 45 aa, Homo sapiens
MNGYITNEDKANRPPYGQDDGVSGLLPEVLPNRGRRALTPAWLHL

SEQ ID NO: 955847 - protein, 78 aa, Homo sapiens
ESQSGKGDMVEMATRFGSTLQLDLEKGKESLLEKRLVAEEEEDEEEVEEDGPIICSEDYYSELEIDITEHLTKKEIHI

SEQ ID NO: 955848 - protein, 136 aa, Homo sapiens
DIFGRTVSKRSSLDEKHKPEEEEKKAEFERQRKIRPLEIEEKLICEETAEEYNNWYQKGWRKNWGKGRMKLNDEVLRMVAEAKRIMEKHMLEELERQRQAELVAQKAREEEERAERDELGANLQENDRAIGESQAK

SEQ ID NO: 955849 - protein, 77 aa, Homo sapiens
FYHPLGKMRQLKGKPKKETSKDKKERKQAMQEARQQITTVVLPTLAVVVLLIVVLVNVATLPTNHRVYPAVCRVPHL

SEQ ID NO: 955850 - protein, 85 aa, Homo sapiens
MGFGKSNRDPYATSVGHLIEKATFAGVQTEDWGPFMHICDIINTTQDGPKDAAKALKKRMAKNYNHTEKQLTLPLIDMCVQNWGT

SEQ ID NO: 955851 - protein, 112 aa, Homo sapiens
TYCCRGEEESMMMRIAQKCNINLLPLPDPIPSGLMEECVDWDEEAKADVHTYGIASVPYQPLKKHIQTIERSLQFQKAHGDHMDSSRNNPVSGLSVKSKNNSTQYACVKSHS

SEQ ID NO: 955852 - protein, 95 aa, Homo sapiens
EATSTVMMCGCLSSICTPGSRYPLCTRAGEGTRCDLCMGTLLDYGVLYGIKQMPKRDCYESFTNTWTDIMAVSYATCTPVAPQYTISVSCYTCGE

SEQ ID NO: 955853 - protein, 117 aa, Homo sapiens
  misc_feature (12)..(12): Xaa can be any naturally occurring amino acid
MYEVTWWVGWTXKGRCASLDEILSQRDAASARTLQLRSEEPSTPALPNSGQLSWIQDLITRKLDETQDLLAEVHGLGDGKLKAKDPPRSPSDSESNHLLFETERLLGEASFNCNQSK

SEQ ID NO: 955854 - protein, 118 aa, Homo sapiens
MPHAPIGLYFDTVADKIHSVSRKHGATLVHCAAGVSRSATLCIAYLMKFHNVCLLEAYNWVKARRPVIRPNVGFWRQLIDYERQLFGKSTVKMVQTPYGIVPDVYEKESRHLMPYWGI

SEQ ID NO: 955855 - protein, 53 aa, Homo sapiens
MCFPKVLSDDMNKLKARMHQAIERFYDKMHNAESGRGQVMSSLTDLEDDFQEG

SEQ ID NO: 955856 - protein, 78 aa, Homo sapiens
VHVEAYSCGELLSTCAVEEHVPARVPQDGELNMMNTTWGTGRLKYLMFTYNCCLWLGGLDAMAEDIWTLALMSDYISL

SEQ ID NO: 955857 - protein, 79 aa, Homo sapiens
NIWTPLWEELAALMPDPGHNPEGMLAHHWADGPAREVGLRQVPGLRANFSGIELLVTGGAQLGPLQAIQTPRGPPDIPS

SEQ ID NO: 955858 - protein, 105 aa, Homo sapiens
KLMLRKASLGPLPRASERPGVPVFLEMGPSAAGCEALRSITGRAWRWWPPGTTLSCLFTFHYQVFSGHYDLFPYNSDLCILLWPAVSAGGSQRGTGEGVPCITVN

SEQ ID NO: 955859 - protein, 137 aa, Homo sapiens
DNEALYDICLRTLKLTTPTYGDLNHLVSATMSGVTTCLRFPGQLKADLRKLAVNMVPFPRLHFFMPGFAPLTSRGSQQYRALTVPELTQQMFDSKNMMAVCYPRHGRYLTVAAIFPGRMSMKEVDEQKLNRLTRNST

SEQ ID NO: 955860 - protein, 95 aa, Homo sapiens
ARAEGRKGYGPVGPYGGFAGRDAFRGLGTCWLEKDALRDEYDDLLDLSAVHMESVREWERLLKEKCGYVGRLLNQEKNHENLHDEEDTMDHSEQD

SEQ ID NO: 955861 - protein, 102 aa, Homo sapiens
VSKATLPPRVKTDILDKLSYLVLQQNKGKKVTEGSLKLKDLPKQNGMAELLLLQILYDHLTLQAYHEGYAQKVTKDLLDPMVRQVTIVLHRVFGIKVYTVEI

SEQ ID NO: 955862 - protein, 95 aa, Homo sapiens
GRARSFSRGRRKKKCKICKLRSFFRKLNTRLMSQRICWWGGRQLFLKDHPHCCLSLAFLKESSEDIYFYMALLGVESLFRAHSADMKTFFCTICK

SEQ ID NO: 955863 - protein, 173 aa, Homo sapiens
NYDPHLRPAERDSHVVNVSLKLTLTNLISLNEREEALTTNVWIEMQWCDYRLRWDPKDYEGLWILRVPSTMVWRPDIVLENNVDGVFEVALYCNVLVSPDGCIYWLPPAIFRSSCSISDTYFPFDWHNWSPIFQSQTYSTREINLQLSQEDGQAIEWIFIDPEAFTEKGEWAL

SEQ ID NO: 955864 - protein, 180 aa, Homo sapiens
MLSFGGMFCISFWKPTFLPLSWGCCPGFHFGSLSIQSLQEPALGTTKEVEEVSITNIINSSISSFKRKISFASIEISSDNGDYRDLAMKTTDKVKVVFPEKRGRNGGLFHNLKTPARGVTYSKKRGPLDFYGPPRIFNGANNKYFLGAGEKFLGGPRAFPRHTKKGVKWVFLGAGGPPPP

SEQ ID NO: 955865 - protein, 94 aa, Homo sapiens
LVFLDLELVLVFLASGQYLEPWLPLKHPNMEQQCLGSLEGSGLLVEEASHAVWWEPDPPPPLPKPKLLSKPPNLAYWEPLGSEDLQSEGLEFHV

SEQ ID NO: 955866 - protein, 218 aa, Homo sapiens
  misc_feature (174)..(174): Xaa can be any naturally occurring amino acid
FCTGGLLRPGTCKFAGAASQAPHAPAFLRARGEPQDPLSHPRVPAVSANCRMWKHLPVHSSPTPRLTPLWKLQARWLLPQLVYLQGWGSYSLLRPRNPLSHPRVPAVSANCRMWKHLPVHSSPTPRLTPLWKLQARWLLPQLVYLQGWGSYSLLRPAALISMVLLAREFLYPAXMSVFRSVLLLAQFFSFEYNIKTNLFFYPSGDICSPNGKIGFNQP

SEQ ID NO: 955867 - protein, 103 aa, Homo sapiens
QVSAAVENNPADWLNPCQPLCKAFIATDEDIRKQEERVQHVRKKLEEALMAYILQGAGDTEEMDIEMEQVVMTPYEFDQGNFQPTFPKRKFSRNGTKMFPLAF

SEQ ID NO: 955868 - protein, 76 aa, Homo sapiens
SCRIRHEASEGMIADPSRCYVSSLTFTATVYLRGLPTLDTRELFAKDSDQPFAECAGVKLSQVTEDAFRAHTGCNH

SEQ ID NO: 955869 - protein, 130 aa, Homo sapiens
MQLGYRLQQIAAAVENKVTDLEEPRSHGLLLLQPGLGSPGSSEERPPSEVPVVTDKQSYVEGDSQSPGGSGLGPAGSTSYTRGLKAHGVVPSLLPESSDPVTPVCKELGTKGFQRVAGRDSKPLGRLYCS

SEQ ID NO: 955870 - protein, 156 aa, Homo sapiens
RSVLLCKAVGARGVGKSAFLQAFFGRGLGHQDTREQPPGYAIDTVQVNGQEKPLILCEVGTNGLLANRWTPPVTLLCLMFDGKDPKSFAHCASVYKHHYMDGQTPCLYVCSKADLPKSVAVFGPSPDEFFRKHRLYPFRADSLCWAIRAQHQPFFN

SEQ ID NO: 955871 - protein, 104 aa, Homo sapiens
MTEGASPKKMMFLFALRNITCLHTSSNIGKEQTQTQHGVGPWEVQPPWSGWPYFLQRPPKTITNRMKVKRKYGPPKSWTTVIQKRSLFPFKKLALLKGGFLFFF

SEQ ID NO: 955872 - protein, 83 aa, Homo sapiens
IRPGTVVHTSDPRALGGCCGRIVCAQEYLTRLGNMAELCLFQEYKKLAGRGGSCRWPQLLGRLTWEDPLGLGGKGCSDLRLCL

SEQ ID NO: 955873 - protein, 62 aa, Homo sapiens
MGQDLSSLISRWRKWRRGTSLHSREEHGKEANSWILLAQEAWCIPFPRAWDRPGFFKAKGPQ

SEQ ID NO: 955874 - protein, 118 aa, Homo sapiens
EKEEDDGLRKSLDRFYEMFGHPQPGSANSLSASVCKCLSQKITQLRGQESQKYALRSFQMARVIFNRDGCSVLQRHSRDTHFYPLEEGSTSLDDEKPNPGLSKDITHFLLQHNVMKDL

SEQ ID NO: 955875 - protein, 218 aa, Homo sapiens
PRQCPGEGLPSALITRHTAAPLDRLGGPMYETGTGSMTQVMNMHGNLAMDTVPEKVPFFNSTFYDKLRTKGHDGVKRSTRNGYILCKELLLIPIHLEVHWSLISVDVRRRTITYFDSQRTLNRRCPKHIAKYLQAEAVKKDRLQSLLWTLTRASYHVLCPTVLGDNLGPEGERNLAPPDASILISNVCSFRDHVAQDLLRAQNWAWHKKQKALGESRP

SEQ ID NO: 955876 - protein, 55 aa, Homo sapiens
MVLSAPETLKPGPFQNSELVKKSECKFTVFFKKMQKPFAPIGCRNEKESPGPANL

SEQ ID NO: 955877 - protein, 101 aa, Homo sapiens
LIPDSGKLEEGTYSCLATNELGSAESSVDVALATPCEGGEDTLGRTFHGKACEGKGCYAVDNYVQASRPEDNGDIIYLHPSGNPEAAVAEWVPGQVSPGLL

SEQ ID NO: 955878 - protein, 114 aa, Homo sapiens
MPETLPARRSPERPLRPSAPTCPVLHSQAADPERKSASDELDDSQGRPMLLDLERDYNAFKRFCMPEPGALDLAQNGNPEAKAPGPLCATHAVGMHTTHCLQMTAWRQDLVIEL

SEQ ID NO: 955879 - protein, 104 aa, Homo sapiens
PYLSTQNHGCLLHLMAAQRLLRCRNKPNHEGQLQASPPAAVEGLLVKPKPEPQLQGGPSPAHIGNLREQGLDGHLRGGPAIVEDQIPPSNLETVPVENNHRFHE

SEQ ID NO: 955880 - protein, 49 aa, Homo sapiens
MEGRQLRKRALRLGILHAGGCQHHFQDPWGMEGMETRELKGPDGHAFRL

SEQ ID NO: 955881 - protein, 93 aa, Homo sapiens
GTANKHTVQWWLKKFCKEESLEDEERDYGPWEVDNDQLRAIIELHEKLAEELSVDYSTVIRVVQHLKQIGKVKKLGKWVPYELSGNQNYRFEV

SEQ ID NO: 955882 - protein, 211 aa, Homo sapiens
ARACKRLTLETMKMMLDKKQIRAIFLFEFKMGRKAAETTRNINNAFGPGTANERTVQWWFKKFCKGDESLEDEERSGRPSEVDNDQLRAIIEADPLTTTREVAEELNVNHSTVVRHLKQIGKVKKLDKWVPHELTENQKNSRFEVSSSLILRNHNEPFLDRIVTCDEKGILYDNRGRTAQGLEQEKASKHFPRPILDPKKSRALLEGRLRV

SEQ ID NO: 955883 - protein, 128 aa, Homo sapiens
EPLVTLNCCLLFCGDCWLHTPPSPYCCTLGDLHLITEDILGRIALLRGHPVRRRRCTCIHDRNPSECSEERKHLGWMEFTIKHSPLAVQSVRRCIKMKQAPEILSSAIGKTPSCEENRECAAFLSKAH

SEQ ID NO: 955884 - protein, 162 aa, Homo sapiens
EALNIREENPGIFAGLKEKCGQIHKALQGISGEKGGGESLSPAFHLQLEESTGSREQDVRLLQEIVEQCMNRKMALTQARYLEKEEKGLPPPSIRVGGTGEQTEEELERAASTIKEVAQAGGFRQRPGTKGSLANKKAGGLKNPGGQGVGRKERKNMGELWK

SEQ ID NO: 955885 - protein, 80 aa, Homo sapiens
EDEAVEDSESGVYMRFMRSHKGYDIVPTSSKLVGFDTTLQVKKAFFALVANGVRAAPLWESKKQSFVGMLTITKFKKNTT

SEQ ID NO: 955886 - protein, 152 aa, Homo sapiens
WGLLVLDFQLSPCPLPEHHRHRLPNRAAGFRSHCSTSPKSSWKGWRMEGNQASLEAAWEGDCVVSPTREARAMEQATSSNWAAWNSGQAPRLGELLGVFCPPPQTSVEEQGLPARQKDLNRTAKLSSPSLPTLGWKRNNPGPPRPLGWGNKA

SEQ ID NO: 955887 - protein, 79 aa, Homo sapiens
HEKLGIEGTYFHITKAIYDKPTANIILNGEKLNALLPRTGTKQICSLSPLLFNTVLEVLTKAIRQEKEIKVFRIRKEEV

SEQ ID NO: 955888 - protein, 145 aa, Homo sapiens
AKAKDWRTGKPDRVVRNVKGGKNSKYAPAEGNRYEGIYKVEKNWPEKGKPGFLEWSSYLRRDDDEPGPWTKEGKDRNKKLGLTMQNPKSYLETLTNRERKKENNKREEEEQQEGGLESPKTGKGKWKPKPTGGGPKQGTRYPNTG

SEQ ID NO: 955889 - protein, 86 aa, Homo sapiens
IVPDTAPPLNDYWVPILTEIVGYYLIAHGYFSVYGMMCGHAVALLEEDLDRNDSSATRPYFMYNTLKKLLIKTNTEGIGVLKAQCS

SEQ ID NO: 955890 - protein, 161 aa, Homo sapiens
TGPQDGGEIKIANEVSGTIVIDNILSGDSVFEINRSDQNLLGGNFLFLISLGVLWETGVYFTSAISTKRDRYAPRGPVQRPTPRCAFSFSGTFHAEKKNSAIFLPFAFERREIWLCSARLTGSQSLKLSLLFSEQLLLSYSFFKVPTFHIAPTHMLDNLCS

SEQ ID NO: 955891 - protein, 112 aa, Homo sapiens
WAKDMNRHFSKEDIYAAKKHMKKCSPSLAIREMQIKTTMRYHLTPVRMAIIKKSGNNRYWRGCGEIGMLLHCWWEGKLVQPLWKTVVCTQRIINHSTIKIHTHVCLLQHCSQ

SEQ ID NO: 955892 - protein, 123 aa, Homo sapiens
KRAHTLLPFIPNQTYEVQNPSTKKFTPSQSQNQGVQQFKGSQNQNKSARAGVLWVIRPRFHSHGVGQDPKTSLTKSSRVKTTSKSANTGAPRGIRPRFHSRGVGQVPKTSCTKSSQAKTRTER

SEQ ID NO: 955893 - protein, 82 aa, Homo sapiens
DPGRLGSRSPGTRISWMAAAANRRAGWTEPGIYYTGIVAREKPSMRKGDCLYLQLSFFSSLLSSTSSSCKFFYDPLMVLFLE

SEQ ID NO: 955894 - protein, 121 aa, Homo sapiens
SGVRGSTHYSTGGNSTTALPCSLPVPSQGGEQGRERNQAFGQTSRSKKPIELVQRQEAGALLVPPLTGERLRTDRGTPKGGTRNLSSLIFPLSQKYLCKLAFPIPPYFCGWFFWWPPLTPF

SEQ ID NO: 955895 - protein, 150 aa, Homo sapiens
QRRPRSETGCRKGSWVSAGLGKALAPALRPTHCPPLLEEMLPKLAIMSAGSGGWALGSSLLSWQMGITEPVPGTMRSRCLTKVASAEGKSQAQKAAYYHFVHWCKFLRQGLDQSRRLEYKSAIWAQLSLTSWAEVILTSICDYMLPPAGA

SEQ ID NO: 955896 - protein, 33 aa, Homo sapiens
MTRHKQISFKTYVRPALMSKRLYENTMRPIETT

SEQ ID NO: 955897 - protein, 111 aa, Homo sapiens
VNLLLILTFVAAAVAAPFDDDDNIAGGLLCEENSVPYQVYLNSGYQFCGGSLISNSAWRQQVTDSVPHTCETGRAQHLSPGVGMQPFINAANIITHPKYNSRTLDNDILLV

SEQ ID NO: 955898 - protein, 146 aa, Homo sapiens
APDLEWSARLGLLGYWDCRRSLGHSVLSVAQAGMQWRDLGSLQPPPSSRLPWPPKVLGLQPMPGRPVWEARSTSAWPPGLGSEEPLCPAATLSGRRGAPLPCRHPVWEVRSAFVRPHPRLGGEERHLSARHPVWDMRDSSARAESH

SEQ ID NO: 955899 - protein, 78 aa, Homo sapiens
MLDRTEGEEFMAKAVAIENQYMMIPRTMVNVTAIIKIMETKLVRKFLNRSLHVTFTYVVSLILHSFFRDSPEGPWAIL

SEQ ID NO: 955900 - protein, 91 aa, Homo sapiens
SCRFIHALSVIESIIVLAMAFERYVAICHPLCHAEVLNSTVTAHIGIVAGVRGSLFFSPLALLIKTLGLCHSYVLSHSYSLHQDVANLSYA

SEQ ID NO: 955901 - protein, 114 aa, Homo sapiens
GEPCPKKCRICHMDEVTQIFFGFEDEPDARFVHLEDCNHIFEVQALYRYMNEQKDDEFAIILKVCPICQVPIRKNLRYGTSIKQRLDEIEFILGMIPGLSREIASYPERIKGPV

SEQ ID NO: 955902 - protein, 83 aa, Homo sapiens
KRLAHCPNCWFSTLVLAPGVCKMKIEDVKSTTKTQRIACHSHVKGLGLDNSSLAKQAASGLVGHENAREVWSLYQGVGGCKHG

SEQ ID NO: 955903 - protein, 169 aa, Homo sapiens
ALLKLIFPDGAFESENRALINVQMLNNSGFARGIIEEFQNNNDLELQQKCINVLSTYAMIQGQIDANKEIGQFFIQTLTQLNVRPEILIEMTNSLFQIYGDASYDYNEPIFVRGGFLSILKDQVVPNLRQQFKMVDKNKNPELKERCHDCFTTLDSFIHYKMNENSTNQ

SEQ ID NO: 955904 - protein, 126 aa, Homo sapiens
TGWASPSASREYPSTLPSKPFQKPLFSVLLPVTLSDSDAGSVPGGSAAVPPGGICMGHLSNGCEVLSATHPTLPSEQTKKTTTGPVTAVSVYPMKVYKDPPVQEHWGETTNLSAVPELPSLEGYNE

SEQ ID NO: 955905 - protein, 159 aa, Homo sapiens
YTNDIQAESQIKNAILFTIATKRIKYLGIQLTREMKDLYNKNYKTLLKEIRDDTNGKTFHDLWIGRINIVKMAILPKAIYRFNAIPIKLPITFFTESEKKSIKIYLKPKKSPKSQSNPKQKEQSWRHRITQLQTILQGYSNQNCMILVQKHGAGTKADT

SEQ ID NO: 955906 - protein, 84 aa, Homo sapiens
PPASIPGVKSPPVGHVTTEPALCASIGQTTPRPLGSGHLRPLVGTISEVRTVEIRGCSLDIAYVLDSEHIPHNTERSVTVDKSA

SEQ ID NO: 955907 - protein, 83 aa, Homo sapiens
QLCALTFLAPFWVCSHILCVHRCPSTGSPLHVTRGAASPPRDYITGTFDRAWEKVDKRMLLSAFLFHFPATPHYPRREVVGWE

SEQ ID NO: 955908 - protein, 129 aa, Homo sapiens
MESALLPRLECSGVISAHCKLHLPGPRHFPASASQVAGTTGARHRTWLISCIFSRDGVSPWSRFPDLVIRPPWPSKMLRWVDRLIPYCWCTCSFNIDESLFCSPFQVFSCAVVIFILWSQFLIVFYAGW

SEQ ID NO: 955909 - protein, 66 aa, Homo sapiens
EPPPPPPAASNVAYPHQPQTKHKKLIKSELKYPYNLQRSCSPTDVSPSQHLQQTPPQSLVTKQLTQ

SEQ ID NO: 955910 - protein, 68 aa, Homo sapiens
EPPPPPPPPPFNKNSHPPTKKEASRQSPKQEGGGNETLRHEYSYSPANRYAELAGRQAPRIEAGVSRP

SEQ ID NO: 955911 - protein, 62 aa, Homo sapiens
MRRPPGPHHGGLGVVARSFRQRTQRRRERRVLAPDVEASQRKGRNIVLDFFVLLIETRGTRE

SEQ ID NO: 955912 - protein, 136 aa, Homo sapiens
MHPRIYSQYKYHLSILDVSYPRRKPKTLASSGYNSNNTESGQEAELVSASLLLLRNPSLEIAILLASQVLTLLGRGSPNNHLVLLGFLVGLPYELYPYFLLRPPQMSENPVNMLPFVEPDLGRRAFSPGHFGGVPR

SEQ ID NO: 955913 - protein, 135 aa, Homo sapiens
QTVLEICEDFCMSFTPDVREVVEFAIHIPSFRDLPQHDQITLLKAGTFEVLMALLASLLNVKDHTVMFLSRTTYSLQELGAMGMGDLLIAMFDSSEMLNSLSLTEEELGLFTAEVLVFAHRSCMENSASVEQLHD

SEQ ID NO: 955914 - protein, 224 aa, Homo sapiens
EPPPPPPPAYEVPHPQTHAPYFQKKNFRTPFFARPCSVLLRLTTLVEAASITKLNRWDGSRPPRYPLRLPSRMLNSGSTILYPPSSFAQAYNNPFSLAATNDPKPVNAITSYYYSEKLDDDPGVWFNKYSVPVRSPGTADISESYSLGYLRVLPRSALNLRVWGTYQPQSGCYCRGVLTGFTASCTMCVYRLLPHNAAIGKISVPFNPTFPDYTFSLLVGPTIK

SEQ ID NO: 955915 - protein, 109 aa, Homo sapiens
MRAASREVKEPINVLSQNTSQEKEGHRVRFYVSKGKEFRIRSFHLSKFEFRLLRVVYGRLRLYEDRALYSNIGYNAGEIIPFLPGSSVLAVSSGLLKRSPFLTLASDYE

SEQ ID NO: 955916 - protein, 88 aa, Homo sapiens
GEVDHSFFDSDFEEGKKCETNSVFDKQNDDPKERIDKDSRNVNSYTGDANNVDNLLTGTGNERNVKFPPEHPVENDVTQTVSSFSLPA

SEQ ID NO: 955917 - protein, 144 aa, Homo sapiens
KGGPSLASTTLGFLLTSSPSLQVQYEVGPPWKALTGLLVWRWLHYMGPGRLESGMKENSASSLLSKPTGRLLLKRSRMDEEDRHSLADINRLQKIWFNFFTTDPPTKELANPTNQPGEHRPGLSFDHRVELTGPAPALRVPYLG

SEQ ID NO: 955918 - protein, 86 aa, Homo sapiens
HQATWASPLSSAFCWQRSSWTGAFGTAAGVSCARLPHGPMQPQGLPPCPWSRARNPGHYARFGPRSPYPEPMQAGNMLPSFHPMCL

SEQ ID NO: 955919 - protein, 83 aa, Homo sapiens
LPASWAVNDIFSMSTDHTLAYDTDSFLEASAGPLRCCRCLTACLRNPALFKIDVMEHTHTHTLTHSQMQTHNILSTAGERIQA

SEQ ID NO: 955920 - protein, 105 aa, Homo sapiens
HREPTMELSADDKTNGKADWGKVGAHAGEYGAEALQRMCLSLPTTKTYLPHFDLSHWFSQIKGHGKKVVDSLTNAVGHVDDMPNALSSLSDLHAHKLLVDPANLK

SEQ ID NO: 955921 - protein, 83 aa, Homo sapiens
DIGIGIARENGLPGPPGPQGTARYGKMGATGPMGHQGIPGIPGPPGPMGQPGKVGHCNPSDCFGAMPMVQQYPPMKTMNGPFG

SEQ ID NO: 955922 - protein, 105 aa, Homo sapiens
RQGLTVLPKLKFRGSVMAHCSLNLLSSSDPPTSAFQVVGSTSVCHNAWLIFVFFVETRFHHVAQAVLELLSSSNLPTSASQSVGITGVSHCAQPRVFYSTFFFFF

SEQ ID NO: 955923 - protein, 105 aa, Homo sapiens
MAGVAGTQDTKSLGCTHMSGAALTWPGDIFPMVLGINIRLLATYANFCSWLEFLPRKWVFLFYCIVRLQISKLLCFASLIYKGMPLKAPKSPVEQFCWLKNFFPA

SEQ ID NO: 955924 - protein, 95 aa, Homo sapiens
DLDVAILVGSMPRREGMVRKDLLRANVKIFTFHGASLYKYAKKSVLVIVVGYTANTNCLTAFKSAPSIPRENFSRLTRLDHNRAEAKIAFTLGVT

SEQ ID NO: 955925 - protein, 66 aa, Homo sapiens
MVLWADRMALGLPTCCLQWLCLLLQQYGPCPESSRGLAKRTDWWSKHHLHRCMGQAGDPPTVNEGG

SEQ ID NO: 955926 - protein, 68 aa, Homo sapiens
MEAFLGSRPALWAGGPAPRQLYRIPSTPDSFMDPACALYRGPITRTQNPMVTGTSGLGVKFQGGVAIA

SEQ ID NO: 955927 - protein, 133 aa, Homo sapiens
PLLADGKGEAGIPWQEEGSKREGRRYQAFSNKQVSWELTRRELTHDPRTAPRCSRGICTQDPNTFHEAPSPTLGITFQREIGRGQKSQLYHPMPRWGTVLMKRGGGLVRNRPSLSERQGSCLKAYHCWQAEAR

SEQ ID NO: 955928 - protein, 94 aa, Homo sapiens
CCVSFTEDLDYVPTANLNHSVGKGGSCGLPLMNSYNLNDMASGLGSETRLDRRIGDAQSDTVLLHSSATLMTNDDNEESECTHVPADYLHADEE

SEQ ID NO: 955929 - protein, 107 aa, Homo sapiens
HTCGWKVVYSGDTMPCKALGRMGKDATLLIHEATLKDGSEEEAVEKTHSTSSQAISMGMRMNTEFIMLNHFIHRYAKAHLFSLNFSEKAGVAFDHMKVCSGDFPSLP

SEQ ID NO: 955930 - protein, 72 aa, Homo sapiens
YTGTSGGQTGPSGLPTPYTYASYNYLPEPYNYSPATYPGTRRPAQGVQVGHTGAMMAEDTGGDGRYPQRSHS

SEQ ID NO: 955931 - protein, 73 aa, Homo sapiens
KKRETFIYNQGRPTGVHKTHNGHTPKRNLLGKYHAGSGPGATPKGPIRTTITGTWSAEPRWTALRASRLQAVS

SEQ ID NO: 955932 - protein, 134 aa, Homo sapiens
MGFHHVVQAGLKVLDLKRSTHLRLHYEELPAQEEPPEPPLQIGICLRYMELMVKLKQNEAFPGPKGGPPAPWVGGDGNLFPILRGWGFPPWVRFTREDSLKEISPPWVIFYFATLGGMTRKIFFFLLGKHIFPA

SEQ ID NO: 955933 - protein, 80 aa, Homo sapiens
VASWCCPRWFAGDEMAFVKSGCLLVQSTIWKRWKKNWFDLRSDGHLIYYDDQTQENIQDKVHMPMDCINIRTGQECRDTQ

SEQ ID NO: 955934 - protein, 36 aa, Homo sapiens
MNPFGCSIAWGACSTATALFILAWRDSGNSTMSNSS

SEQ ID NO: 955935 - protein, 73 aa, Homo sapiens
TQETFGVLFFGHVNPEVHMGPLGVYNKAAWEESPNPLHITLLENGATDQSDSTLHRGLLNRNIDHDIHCTNNA

SEQ ID NO: 955936 - protein, 72 aa, Homo sapiens
TQHFISKERAGALMMPLVDQLENRLGGEEKFQERVTKHLIPCIAQFSVAMADDSLWKPLDFQILVKTRDILA

SEQ ID NO: 955937 - protein, 95 aa, Homo sapiens
  misc_feature (26)..(26): Xaa can be any naturally occurring amino acid
TSEIATVSSGGDGEDEGWRVREEAVXVAENTGMGGSTSFCRLQGHIAGSYHLEGNSLSLQYPYFVLSYISGLSGAGFSNIRVGLSLFYSLCWTCL

SEQ ID NO: 955938 - protein, 122 aa, Homo sapiens
YKEVPWNYTCRELAPTEWGWRTESHGDLIRCTGLTYQCEPGFQLLGSYILTCQWDLSCSAWPTGCQKIMTCADPVEIDNGHRTASDAGFPCRLPRPDPLPDMVHAKWGKHAHLLQPGHMHTQ

SEQ ID NO: 955939 - protein, 95 aa, Homo sapiens
MTQGKLSVANKAPGTEGQQQVHGDEEGGSSRAQAPPSYEEATSGEEMKAGAFLPATTAWPSPPSWSYVDPRSSISCDNGYSTGDHELFTTLSCDD

SEQ ID NO: 955940 - protein, 85 aa, Homo sapiens
NVGSIRIYFDRDLHTNSPRHSKGSYNDFSFVTHTNREGVPMRKGEHLGEFNLGSTIVLIFEAPKDFNFQLKTGQKIRFGEALGSL

SEQ ID NO: 955941 - protein, 133 aa, Homo sapiens
  misc_feature (111)..(111): Xaa can be any naturally occurring amino acid
QGVAYYMWELLVCDMRAGQLLKSNVGQHKEGATSPKGGKRGKRGLGNGLTEETGSSWKFGDGDVKQVASGRHRCPAWWPQSNLYEQPRFQTNTHSRRIQEDLRTQNKRVGXLIQACKTRQSPINNCFEPAFLQ

SEQ ID NO: 955942 - protein, 96 aa, Homo sapiens
TSHLGVLKTPHDPMMCPIQSLCAESYKGLTASSLSESALMPLEASCLVILAVKSKVPAQDLLCILCQVFQANDTRVHHSLSGQSDIRWGLYSYPPH

SEQ ID NO: 955943 - protein, 99 aa, Homo sapiens
CSVTDSVNLAEPMEQNPPQQQRLALHNPLPKAKPGTHFPQGPSSRTHPEPLAGRHFNLAPQADEEFSPNGPPLGVAFKERPTAMLVSFRNPFLPTLVIS

SEQ ID NO: 955944 - protein, 78 aa, Homo sapiens
NKLSSHAGPFATPIVVPGLDPGTQTILQEFLVPNYLIGCVNGRQGSKISEILHISWAHIKIWNLLRSLVIWYITIIVS

SEQ ID NO: 955945 - protein, 89 aa, Homo sapiens
KCFTCWLVTQGVCILTGLGFNGFEQKGKAKGDACANIKVWVFKINRGCTGTIAEFDINTNAWVGRYILKRLMFLGNKELSHALWWLFLA

SEQ ID NO: 955946 - protein, 119 aa, Homo sapiens
LDETRNLSAHKISGNFLMEFQVKNVPSERIATQKILSVLGECLDHFGPGCVGVQKILNARCPLVRVSPQAFGFQWDLTSNHWIGLTRSQLLYYIWCPKLKSESLGVQGPGLGSSTFTNR

SEQ ID NO: 955947 - protein, 69 aa, Homo sapiens
MARGLGAPHWVAVGLLTCATLGLLVAALGGHDYLNDHLNSGLSMAQATGTHMKISTMVNEHAHGHGHTD

SEQ ID NO: 955948 - protein, 104 aa, Homo sapiens
MAVGGRAEGGESPNVVLAPLICVGTQKAVSVYRTSNQAYGSRAPTVHKMPKVFYPNSNNFFQQQQRVECIRDNTLNVYLERSIYTGHEYCITCCDRINFHPSYN

SEQ ID NO: 955949 - protein, 85 aa, Homo sapiens
KINFDDNAKFRQKDIFAMDDKSENEPIENEAAKYDLKYIGLDGNIACFVNGAGLAMATCDIIFLNGGKPANFLDLGGGVKEAQIY

SEQ ID NO: 955950 - protein, 101 aa, Homo sapiens
LPPETVLLLPQSCQLTDDVHPPSQPPPPLRNNNNNCEENEHSLPPPAGLNSSWVELPMNSIGGTDNGNGKNGGLEHVPSLCFNPNGSPVENALELPNMIQD

SEQ ID NO: 955951 - protein, 77 aa, Homo sapiens
GSVVPGSSGVGTPRQFTRQRITRVNLRDLILCLEKERETSHSLLLYKAFLKGHRRTPGDYKYISRLRLLGTSKWDIV

SEQ ID NO: 955952 - protein, 122 aa, Homo sapiens
PSSAPSTPLSTDAPEFLSVPKDRPRKKSAPETLTLPDPEKKATLNLPGMHSSDKPCRPKSEYTLYKYLMGLYITIRRCCMLQKSSDPENDCCGTQTCPFDLFMVHVTAELSIEYDTLGMLHC

SEQ ID NO: 955953 - protein, 78 aa, Homo sapiens
HKKVDMMETNTTDDEKSTAKSLLVKAEKRKSPPKEYIDEEGVRYVPMRSKPPHTLLPQYLNPCEACYHHFQRYSDLTG

SEQ ID NO: 955954 - protein, 98 aa, Homo sapiens
QDPAYPDADSGSALGPRDLRCYRISSDRNECSWHHEGPTVGVSHFLRCCLNSRRWWYFPAGSTTTLKNLPPGWGVCAVTVTLWVEYCAKNQTEKSPEG

SEQ ID NO: 955955 - protein, 88 aa, Homo sapiens
STKPNRHTPPKSGYAIVQATSPPIRTYDFLSILEIYPEGNNFSVFHLLFYYSSGIIEALSLTYIIKLEDLPPPRTGKLALLNMPESGN

SEQ ID NO: 955956 - protein, 96 aa, Homo sapiens
ESVLRVDTGGKLAQENGCGVMVSHRLRETDDTFIADLLVELCTGQASEAILVSEEKLSVGLVFLAHPPSLSFQVFEVCRGASGEPRFTFRRERTAT

SEQ ID NO: 955957 - protein, 116 aa, Homo sapiens
RAEFGPRAKPLPRGAGVNPSSFTKGGGERNLAGPSIQPRPTTRKTDCAPASIEEEAVLTTGQDLVFNITKKTGLEPLLPYAHSELLGCSFWLSGELMEPLAEDAPPPSRNKNEVPD

SEQ ID NO: 955958 - protein, 66 aa, Homo sapiens
MIIYRDLINHDEMFSDLYKIREIAYGLCLGVQGKMVMWTEGDIDDYLIGGNAYDGGPYGRRYRKHM

SEQ ID NO: 955959 - protein, 119 aa, Homo sapiens
SGKYQFGNAAFQINAMIIHIVEFVVGVPEVSPFYNFMHTPGNIINMSIQQYWDGWGVDRRLTNRTVHETLSEDAPPIKARSWLEEHRYENFDLASVLNGKKKMPLWRMEVLPYRLEILS

SEQ ID NO: 955960 - protein, 106 aa, Homo sapiens
KSWMLWNFVERWLIALASWTWALCRISLLPLIETFHLNGGIILLLLIFISIAGILYKFQDVLLYFPELAIPLQRHLLFPIGPPRHFTHWKTIFTIKIRISIGNYRP

SEQ ID NO: 955961 - protein, 132 aa, Homo sapiens
  misc_feature (84)..(84): Xaa can be any naturally occurring amino acid
  misc_feature (92)..(92): Xaa can be any naturally occurring amino acid
RPAEDDLPMKAKGETIEGLAQFLKQYKEAIHDMNFSNEDMIREFDNMARVEDKRRKSKQKLGAFLWMLRNLQDPFYSRGPREFXGGCRAPRXYTIYIFFVSCGSQAYVKPCVLYLIVLIGFILILSIPYCVV

SEQ ID NO: 955962 - protein, 99 aa, Homo sapiens
AGNWGGMAEFGLQRRPFVFLSRVSPRVRSLRKRGGLGVDSLEEGALNVAGPGLPPCWDSNPKWKWGDLASSPPPAVSLNQVAVGESFALFGSLQHERSH

SEQ ID NO: 955963 - protein, 79 aa, Homo sapiens
NGNIGFLLSSAQLCYPGRMRITWAEPAELRLRGLGPSKVRSTRASAPQTHSCAVLNVPAVKTVTYAPKKTLPRIHTGPG

SEQ ID NO: 955964 - protein, 99 aa, Homo sapiens
PENPPFKKGVFGKPKKKKNSPGGGPGGAPPKTPPRGGRFGGPRGPPPPPKKAGGGGGGPPPPPGGGGGGEPPLGGGPPPRGGPPPPPRPGGEGPGPPPP

SEQ ID NO: 955965 - protein, 152 aa, Homo sapiens
MRRNKADVERYIASVQGSTPSPRQVSGSRRDRRPRPGRAAASRCSGVMAPDGRCSLARSVEAPAGWRSPVGGVALCKRMKSPGGTAVGGRPLAPALPLSPGLFPTLVPDGARSWGRPGPGFLADRAPRSNPRGLFFGSLGTRVLYWRVFSIL

SEQ ID NO: 955966 - protein, 31 aa, Homo sapiens
MDDNVWTAEDEQETYALGLFSLKIAFEFDKL

SEQ ID NO: 955967 - protein, 69 aa, Homo sapiens
QLAPSPGGFLLLQEAQEFSTYSLSHMLRKEAGPQLGLTIVDEVMKRSPKGEICLPLCSHGGTHICRFRP

SEQ ID NO: 955968 - protein, 79 aa, Homo sapiens
RKKVNPLYGGLQLWTNLGSGFSRLNIIFCYLGESGQVLPAQGSHKHDELQVDGGVVASRNQLNVGKTLSSDGGDDLPRG

SEQ ID NO: 955969 - protein, 110 aa, Homo sapiens
DTGSCFFTQAVMHRHDHSSLQPQPLGSSDPLTSVSQVVGTTGVRRHAQLIFIRFFERHLTGLAQVCLKLLGSSDPPTLVPQSAGIIGVSSPPGPKFSHKFSRRSKVPSLP

SEQ ID NO: 955970 - protein, 54 aa, Homo sapiens
MSTNINDNDHVFSYIKIKNYAFTHTQTHSHTHTIQEYDYSGMVAHACIPIYLRS

SEQ ID NO: 955971 - protein, 180 aa, Homo sapiens
MPHLPVACRANLHGSPGALAGRSMAQGIGRLQNCWTYPGLQSIVGPWVESRSVLAARWMLLARGHCEGKIPAPSLACGVCFLPETTGFSSSILNGATKGKHLERTFAISGESRSLDPCGVSYSLSKTTDFTVGNNMSSGVTITSTLLRFKRAQPAYLLPCYVTFTTTSDNNFASLTRRRR

SEQ ID NO: 955972 - protein, 101 aa, Homo sapiens
MRNNNKKNYFWFKKDWFPPGRAIAQMSTESGPGIKEGKVLKDKRGGGKPKYQGPKFSTAQGYCILENTTHPVGIGGLKKVHAREGSPLGQGRRRTQGPLVA

SEQ ID NO: 955973 - protein, 63 aa, Homo sapiens
NGGISGPVTVKLARAMIAGNGTGAYLGGGLKQTRNGRGGWQVPPNAYSILKFSVSEWLLLYLL

SEQ ID NO: 955974 - protein, 122 aa, Homo sapiens
MSPKGPQIHRLLFEEFIPCRVLAYVGHWITRTTRALNNCPKKPSNPLSFADSLDHPLLLGERPQIGSVFTPQGHCTPSPRILWPEGPNLLIWRPDKIRKFRHTLCPSVEKEYLPPQFPHTNS

SEQ ID NO: 955975 - protein, 151 aa, Homo sapiens
NKAGGITLPDFKLYYKATATKTAWYWYQNRDIDQWNRSEPSEIMPHIYNYLIFDKPEKNKQWGKDSLFNKWCWENWLAICRKLKLDPFLTPYSKINLRWIKDLNVRPKTIKTLEENLGFTIQDIGVGKDFMSNTPKAGATKAKLGNGDLLN

SEQ ID NO: 955976 - protein, 90 aa, Homo sapiens
IRGRVDGVLLITMNVLLGSVEIFGTFATLCNASCYSIPNEGVSGDFNQDVFTPVGYDKDYCPIIFTRGDCKCIMAEKKDPKKTFPGGEWI

SEQ ID NO: 955977 - protein, 36 aa, Homo sapiens
MMSGLRDRRRMGDRCLYLGGAKPEETMAEVHNGPDM

SEQ ID NO: 955978 - protein, 138 aa, Homo sapiens
RRSLALSPRLECSSVISAHCSLHLLGSSNSPVSASSIAGTIGMHHRGRLTFIFLVERGFRHVGQAGLELLTSSDLPALTSQSAGITGVSHRAQPSFIFTTRHFSKCLHFHNCPMEQVNYVDAAANLVVVVNPGIPDRD

SEQ ID NO: 955979 - protein, 101 aa, Homo sapiens
MSLQAKSKATITPSGSVIYKFNSTTSCATPQALDSSSAEVFIFVSTAVVVLEILTMTVLGLVKLCFHESPSSQPRKESMGPPGLESDPEPADLGSSSAHCT

SEQ ID NO: 955980 - protein, 52 aa, Homo sapiens
SRPRRLSAVDRNYYLNRSVSFDFSAVNLEFQNIERDITLRVCQFRPVGQIMR

SEQ ID NO: 955981 - protein, 47 aa, Homo sapiens
IRGRVDYNSFIITNKHETLYGGYDRIYRTRMLKTTKCYTKEVKEDLN

SEQ ID NO: 955982 - protein, 49 aa, Homo sapiens
SRPRRRITYDSKAHLFVMGVEEVAAYHLGRIQREDGLPPLREAFTETNH

SEQ ID NO: 955983 - protein, 74 aa, Homo sapiens
MCVQGTINVGFSYKALDGEQNGPDIIQGCPLLLHDVQAYVTLGVHFRVIARREELHCGRIARVATGELYRELIP

SEQ ID NO: 955984 - protein, 52 aa, Homo sapiens
FAAASTLADPFASVAVAPVAAATTAAPAAAAASANVEAKKALTFISKWEGVI

SEQ ID NO: 955985 - protein, 138 aa, Homo sapiens
MQPFPDCELNILRQSVEGVLFMLAHEQLKQQLSVTRNNCRNRQLNQCFHDPLLEDSRADVKRNNVTRMVSVPQTTAGAILDRVNIGCGYGLVEGHPRRQFETTSDSEDVWYILQFDYSRLPKQRIGHFHEGDAYVDKW

SEQ ID NO: 955986 - protein, 155 aa, Homo sapiens
KKTWALIYFWGGDHECVRVCKGNSCFQGLRAGPLSLFFAHPCSQCRPPPWGAGPAPGHPSWGGSVFGTMGTLWCAGGKVGGGATQLLSFLQPQKENGLGPPQLWAGLAGGSIARFNHPFIGIRLFPGTLPLFQGDVIYGNFPQVARALNPFKKFL

SEQ ID NO: 955987 - protein, 114 aa, Homo sapiens
MCSRQDRIQKDIDAVIHKSKAEDCLFAGEFLLFQNLGPSAPFLVFQPKRVWLGQLLTLKAKPEWPQRGSRPRGKARYFQPRVEPEACKHPSWVPQAAAKRGWLDPPGLRNGLIG

SEQ ID NO: 955988 - protein, 30 aa, Homo sapiens
MLLCKRRSLITRRETHLQWNNLALRHNNLS

SEQ ID NO: 955989 - protein, 73 aa, Homo sapiens
MGPSGNMKIAIKQQRNCETLNIPYRTKAGQGNTVTSPENEKDLRCQVVRKAPIRQGLEWQAREPPPRPEPILS

SEQ ID NO: 955990 - protein, 127 aa, Homo sapiens
SRPRRRILTLSPRPECGDTISAHCNLHLLGSSSSPASVSQVAGITGACHHAWLIFVFSVEMGFHHAGQAGLKLTSSDLPASASQVAGTTGVCHHAWLIAHLANLLKKNCRDRVSPCWPGWSRTPDLK

SEQ ID NO: 955991 - protein, 68 aa, Homo sapiens
IRGRVDISEASDYYFVKMSDIFYHAVNLRLAGVCATDTWRMCLSSESLASPKSFVALNDVSELTPETD

SEQ ID NO: 955992 - protein, 61 aa, Homo sapiens
IRGRVDEDVYHCRVEHWGLDEPFLKHWEFDAPSPLPKTTENVVCALGLTGVLVGIIIGTIY

SEQ ID NO: 955993 - protein, 67 aa, Homo sapiens
RAEAIFIVKTERTKLSQHIKETKQVVAAELVGSLAVPIFIPFFGPVHFLLTGPFYITIDCAILLNAH

SEQ ID NO: 955994 - protein, 59 aa, Homo sapiens
MVPERPPTSFQGPTGGSGPWRPAGLSLAHPGGHSFQWLQLLGVDEATLLDQIVEVLVAG

SEQ ID NO: 955995 - protein, 77 aa, Homo sapiens
MWVSCSPSPFLHPTNTLGAVLERDTLGIREGRVFNALGRWSEAQCQRQQLQVTPKNRRKGLGKALGLIRFPLMTIEE

SEQ ID NO: 955996 - protein, 96 aa, Homo sapiens
PPIGEPRGTGARSQAKGWKNKTNDNKKKKKGHSFLCARGWPVPLCVVSTRKVECAVVVIWPLPVPFGRGGVVWSGSPLSPVCSNSLCTPLNAAKTM

SEQ ID NO: 955997 - protein, 90 aa, Homo sapiens
TTQQTNPLNQNHPVTKIPPSPGIAVNKPICRINPSQRKSDLTAVYCSISSLSRGLREWAPRGPGCQCLSRDIYLELQTWGLPILKKADLF

SEQ ID NO: 955998 - protein, 102 aa, Homo sapiens
VCERESCQSSLSSKKATVGSVRTSVWCLSMLCTFKPTAGIKLKVLSLEVASTCSVASPRVLSPRGVRSPPNGGSAPALSRTWGLRGGSSKEAMNCQVVPGPP

SEQ ID NO: 955999 - protein, 117 aa, Homo sapiens
MGLHTCSSSLLLCSNSSFWGKVLASSHEMTSGHLFSTFFLYASLILPLSPLSSTGLFMLKGEDSRAFWVAPSLACTLSSRLLLVPLLDQGRKFLPCQAGLFGWWGRNFRGWRGFYSR

SEQ ID NO: 956000 - protein, 113 aa, Homo sapiens
MVRPHFYLKIQKLGGYGGTCLESQLLGRLRREGRLNPGGTDCSEPRSDHCTPSWTTEQDSFKKKKKKKSTRVANLVVESRTRKFRTRYPAGVPLLSNESHDRVLAFIWVLAVS

SEQ ID NO: 956001 - protein, 72 aa, Homo sapiens
SRPRRHQIWGSMAPGLDKHEKRIAVPVVVSSMLLSYTGMGLAYFLGLPLILKFFGGATPAGVEMKTAITKSG

SEQ ID NO: 956002 - protein, 108 aa, Homo sapiens
SRARRPAATPRAPRTLAKGSLTDSFPDLLSLAAEDCCCLIALEAPWTITDAELWITLTVEDAQLYEDTLAGRSVLIKNLTPQTLQPRWTGPYLGIYRTPTAGRLEDPP

SEQ ID NO: 956003 - protein, 35 aa, Homo sapiens
IRGRVDNWCNTRYWRAKQSPAVPDTPPEATPAGCF

SEQ ID NO: 956004 - protein, 30 aa, Homo sapiens
MPPAYGRRGREFKEKEEGPRNWERDLQAVP

SEQ ID NO: 956005 - protein, 139 aa, Homo sapiens
QGAALGFRKRSSSSLAGGSTWAISFFSLFFSLDFARSLRRRARDLDRERGPSRTMARSHSRSDRGRSPPVHLPFPYCPLDPHCPCLLPLYCPGELGRLDPGGGAPPPATTTTTPTGGTASSTHHKNTHRTGGNPSHTTL

SEQ ID NO: 956006 - protein, 92 aa, Homo sapiens
KKIQLLFLKYWEGKGGKRAPDEEGPFRKKLRIITKGPLAIGEALGTWGGGSRRSFIAIKPELGSFGWHTIEAGLPQRGAELNLPRAINALVD

SEQ ID NO: 956007 - protein, 124 aa, Homo sapiens
GRLGRSSAFQHHADELFIVDTTFVVFMPCHQHLYFFLWHLFTQCDKNMPDFSTHDGAFSFFVKHPKSFALILIGGPGPCSWPLFAAWAEKAQNPPPFHLFYIFFGVPQDLNPLGVGRVFAQGPL

SEQ ID NO: 956008 - protein, 65 aa, Homo sapiens
RQSLTLLPRLECSGMVSAHCNSASQAQAVLLPKPPEELTPPSVPPPLANFRISSGAPPFTMVDRL

SEQ ID NO: 956009 - protein, 43 aa, Homo sapiens
FAAVSTFHSMRGSDGVGEHHVLAHAKQAHLAGRVLQGRLLLYH

SEQ ID NO: 956010 - protein, 112 aa, Homo sapiens
SRPRRLFFLEMGFHHVAQASLKFQASSDPPTLASRVAGTTGACQHSWVIFVFFVEIQVSLLPRLVSNCWPWEILLYWAPNVLRLQASCSPLKYARYVARLSCRAGFMSHPFA

SEQ ID NO: 956011 - protein, 124 aa, Homo sapiens
ELSYLVLETMWIAMFPVSFSARRRVGPNTIPKLCVDMRFLEALATILVRCPKRTFMVSRFGGRSFCTKRFYSFNSCVGGLLFDRFHKQLKKTVKEEGLMQAPGKTSLVLRGTTRMSFPWAGRPN

SEQ ID NO: 956012 - protein, 109 aa, Homo sapiens
FAAASTNGAISAHCNLRLPSSSNTACSALLSSWDYMHMPPCLANCVFVVEMGFLHIGQAGLELLTSCDPSASGSQSAGITGVSHHPGRELRQRGRELSSSGSDSRRPGN

SEQ ID NO: 956013 - protein, 67 aa, Homo sapiens
SRPRRPIPIMGIDAGLAVLGVLAVLGAVVTGVMCWRKSSGGKGGSCCHAACSDSAQGSDESLIACRG

SEQ ID NO: 956014 - protein, 166 aa, Homo sapiens
LDKIPQYCFNSEKNTPPSKRSFNTAVSLEFKVFSCHGESPGEPFPLGFAGDLFHWHPEPLAPGNADPGVQVVELGRAQGHLVVLLLGRGLHTQLRQLLLQLFQEPPFFLQDTPGLAIPLGFGLSPRPPKFCPGLSHLLLFCLDLCLEILHRLFERTGGCSLMVAEN

SEQ ID NO: 956015 - protein, 108 aa, Homo sapiens
MLCSWRGLFQDDLGLQKPLSGGSSLAYRGCENLNSVTCRGHDHVTSRPGGSTVRQRRILKGPTTGRISACGEASPDPKEASVSDHMAHRSKCQARSSLGESEKGMRWT

SEQ ID NO: 956016 - protein, 55 aa, Homo sapiens
MEWNEHALDSTRLQWNGVEWNGMEWNGIYFNRMEWRGMVRNGTVRNVLEGLVMEW

SEQ ID NO: 956017 - protein, 153 aa, Homo sapiens
SLRPPPPCALWSRSPVTGDGLLPPRTPGAYLWLLGSAARDQAGSPEKRFVKGLRQYGKNFFRIRKELLPNKETGELITFITIGRRPRAASSEPIVSTEQAGSEINAPVTPVHTLNPAGILGPINPGDDFDSEDSEQELKGTPAATASPPPPKI

SEQ ID NO: 956018 - protein, 53 aa, Homo sapiens
MAENDTQMQTLPMPPGGDSLTKQERAPGLRGANGSDIPPKGKLNILFSMHPPR

SEQ ID NO: 956019 - protein, 103 aa, Homo sapiens
NCLFHCSTLAADSCRAGVSRALLSRRVCSSISHFFTLAALCVKAIFSLAFSDFRGVLGVTRVRSPFIGRSVGTGIPGKITWGLQFFPRFGLGILGGFFTPRDI

SEQ ID NO: 956020 - protein, 125 aa, Homo sapiens
APVFENKLGNWMGSRGKGEVFQGELFLHPWPGLLFKTAGVQAKPGSFAQLGPPPYPYSKERAAPGFLANCLFAHVATLLGGGSLTGFPALKCNFFCHPPGGPGGIHVKSPALDHHCWTPENRRKN

SEQ ID NO: 956021 - protein, 130 aa, Homo sapiens
MNKVDLTDLSQGCPTKLWGPCLNGLPEPTDLSLRPDAGILRLECRTGPGEIHGVNSLSEDEKPDCLMHDDESTVHCTNILPGLNDQREKDILCDMTLIGGRKDSRSNGCACPKHEKFWPATVARLNGWVA

SEQ ID NO: 956022 - protein, 116 aa, Homo sapiens
RFLSRVVFFIGDIRVMELFQRTEGGFPVIFPPHTDEDIKGPRRSDEDYKLEQIWVQRGSAGAVGTRERPPGGRGTEEMRVQPRRAEYTCPCSLSRQAPTANTVCAVPWRWGQEPFE

SEQ ID NO: 956023 - protein, 34 aa, Homo sapiens
MLLPEEKHFICREFYVKEFGVMGVNYLTDHLLFL

SEQ ID NO: 956024 - protein, 76 aa, Homo sapiens
SRPRRLPKQRRTGLFSATQTQEVENLVRAGLRNPVRVSVKEKGVAASSAQKTPSRLENYYMDAGDENNSWSIFFES

SEQ ID NO: 956025 - protein, 65 aa, Homo sapiens
KLAAANFTVQLDDYLNGRAVQNREVQGFESATFLGYFKAGLKYKKGGVGLRIKHVVPNEVGVQRL

SEQ ID NO: 956026 - protein, 80 aa, Homo sapiens
TETCPIARLECGGTNSPLGFKQYSRLSPPSSWDYKRAPPCPANFLHSSRDRVSPRRPGWSRSPDLLICLPRPPKESKIKA

SEQ ID NO: 956027 - protein, 104 aa, Homo sapiens
KNSFAGHGLLGWQYFSFNTLKMSSPSLLACKVSAEKSTVSLMGVPLWVIRRLSFALFSIFAFALTLSGLIITCWGEDDFALYLFGDLWASCIWMSRFVVIFGKI

SEQ ID NO: 956028 - protein, 115 aa, Homo sapiens
APTISLFLPLGFLPPLRAPHHQGKACWPNPISFFFSLITQNPFCPQAFINLFVHIKPNGFGEGADKKNGKGLVQPGDFQNSSTGKAIPGPVVAQGVLVLFRVEVLGLNIQQDLQK

SEQ ID NO: 956029 - protein, 81 aa, Homo sapiens
ALRPLIPALSSPCPVRRVLSYLTCGERHRSSGSVRLAGEGATVSVCYLERTAAQETERVLGLPGSKEGPPRGSHAVFQADV

SEQ ID NO: 956030 - protein, 103 aa, Homo sapiens
PGKTACLFQRLEVGMQNAGVPKGGGACTPGADRDNAPNPNTVHPEDTAEPPTFQRLTQTSSVLCWGGGSTTMARPDGGGGVAGFSCISFRPSGGTYFKGDRCY

SEQ ID NO: 956031 - protein, 128 aa, Homo sapiens
  misc_feature (3)..(5): Xaa can be any naturally occurring amino acid
SRXXXQTESCSVAQAGVRWQDLGSLQAPPPGFTPSSCLSLPSSWDYRCPPPRPANFFFFVFLVETGFHCVSQDGLDLLTSGSARLGLPKCWDYRREPPHPAWGAIHSYFWLEMEPGAQELGRAHVDAA

SEQ ID NO: 956032 - protein, 52 aa, Homo sapiens
  misc_feature (7)..(7): Xaa can be any naturally occurring amino acid
FAAASTXDTSHKLDWEGGHSAPMPPACGPLKGPPPNRTAIVSGLARGVASRT

SEQ ID NO: 956033 - protein, 68 aa, Homo sapiens
RLFLGFNLSWGCNNSRSSCGGSSHRGSSHKGRWISQEGLDLFSKWEGVIRLHRQGQDSFVPADDRMGH

SEQ ID NO: 956034 - protein, 99 aa, Homo sapiens
PTQAFFKDQKVQVQGKKKGHGQKATPPKGSLTVLGGQHGAHKGKEFVQKGMPRGGEIGRGVASQGHQQAGAQDLEVDGIHPHLVGMQVAQSKQGTGQVI

SEQ ID NO: 956035 - protein, 44 aa, Homo sapiens
  misc_feature (2)..(2): Xaa can be any naturally occurring amino acid
GXEFFLLKWAGAGSFEVGWFNFLEFPLNWVLSGLVQLHKEALDV

SEQ ID NO: 956036 - protein, 30 aa, Homo sapiens
  misc_feature (22)..(22): Xaa can be any naturally occurring amino acid
  misc_feature (26)..(26): Xaa can be any naturally occurring amino acid
SRPRRHKIKTLPSPSLNVPSQXLKGXIPIT

SEQ ID NO: 956037 - protein, 154 aa, Homo sapiens
VVVVVLDGVSLLSPNKDQKRQRRGIYYGKGFNATRRAKINIYATNTGASRFIKRVLRDLQRHLDSHTIIVGGFNTPLSILDRSMRQKINKNIQDLSSALDQVHLIDIYRTLHHKSTEYTFFSAPYSTYSKIDHVIGSKIFLSKCKRMESCLRGR

SEQ ID NO: 956038 - protein, 50 aa, Homo sapiens
IRGRVDWKNSFCSHIMTINTKDFCDQMCGVFFHQQASNQFLLAPGGENPN

SEQ ID NO: 956039 - protein, 114 aa, Homo sapiens
MNLQLVPYPRLTLSIVLESIEVVITVLFLRLGHLTGGEKACFVVITGKNILRVVTLITLRPAKGHRKQWLGMFRGDSWLSHVIHHSNELSRESSDRNRETMSVRQRAGGREGDP

SEQ ID NO: 956040 - protein, 93 aa, Homo sapiens
SIAQICDKGAVITVTVNFMELTPRLHSLTWTTKSTGRNLAGTRRLAMTQIARISDKGNERRLQAERLVGTQALQEAQALRFNVFSGEFNAKLK

SEQ ID NO: 956041 - protein, 108 aa, Homo sapiens
MQVIINTGQAALLWKNGILRARSICTTRVGESSPSINQPDWNSVCISTLWAENTYHISAKVVMSKIDEVGPIQIMKRPMFFASHLRGLARYSLSILSQGRASGELVEG

SEQ ID NO: 956042 - protein, 140 aa, Homo sapiens
GPHSTACAQVPHRWGVVCFLRKQQGFSRLMIPIWVSSQRCCYVRDVVGAVSAVLSSAASKGAGNIFPLASARRSIPAHAFALKKYLGGIEPVSSTCDNEHTTASLGQAEILGVQDPPRDCSFGSIHTTSVLPFLPWLVEG

SEQ ID NO: 956043 - protein, 52 aa, Homo sapiens
VLPVSVRTSTDMWSHASGFSLTYDLNCDKLCTDFQEDIEFHFSLGWTMLVEG

SEQ ID NO: 956044 - protein, 126 aa, Homo sapiens
MKSSGGRMVRWLNGYACNEPLPTSTTTYMCGQQLNVCVSKQPAIMPGQSYGLADGSCSYQDFSESRNNRFSTPEQADKNRIQNPSNVLHLLQRPAGGDRGRTSLRSAIELGVKRPSSVKVFYRLQV

SEQ ID NO: 956045 - protein, 68 aa, Homo sapiens
HRSSLHLTGSQAMIDTMGMGKTNRLKRVTNIFRQNNYKHAWHRTGALSLKLKGCKNNSYTKDSNWYEI

SEQ ID NO: 956046 - protein, 86 aa, Homo sapiens
TCTRMFIAALFTIAKTWNQPKCPTMIDWIKKMWHTYTMEYYAAIKNDEFMSFVGTWMKLEIIILSKLSQEQKTKHHIFSLIGRIEQ

SEQ ID NO: 956047 - protein, 109 aa, Homo sapiens
AIYSHISGVDLVRDGEVTYYVLEDNLRTPSGVSYMLEDRKMMMRLFPEVFAKQRIAPVDHYPNLLLKTLKSAQPPHNPNVVVLTPGRFNSAFFEHAFLAREMGVELVEG

SEQ ID NO: 956048 - protein, 39 aa, Homo sapiens
MHMVFSLGGMHAIACETLVEGSLTKPSAHQTCPSELVEG

SEQ ID NO: 956049 - protein, 34 aa, Homo sapiens
TRTPNAWWLMQCHRHLTDEMKPEPKRPEWPELAT

SEQ ID NO: 956050 - protein, 30 aa, Homo sapiens
RYLYSPDTKFIQEEIDTSLSNMAKSHLYKT

SEQ ID NO: 956051 - protein, 82 aa, Homo sapiens
MVHPCVAGGTLRVVNHRQRHAIFNGAAGVLVLQLQKQRAGTGIKLVQLDQRCPANQFGDGVVDRHDVFLSGCHDGMIGRRNF

SEQ ID NO: 956052 - protein, 51 aa, Homo sapiens
MHLPTSEIPHGDEILVSWRHLGPCVLAKCLSKVTMLEVSLKNNVVSVSVRR

SEQ ID NO: 956053 - protein, 142 aa, Homo sapiens
  misc_feature (5)..(5): Xaa can be any naturally occurring amino acid
  misc_feature (142)..(142): Xaa can be any naturally occurring amino acid
KRGTXKVMDRNPSPPPPGRDKEEEEEVAGGDCIGSTVYSKHWLCGVLSGLIQIVSPENTKSSSDDEEQQKELEEEMEKKFAEYWDKSMDEDVALFLQEFNAPEKFMGVLAKSKCPRLRENCVGILGKKACFPGEMCCSNSSX

SEQ ID NO: 956054 - protein, 114 aa, Homo sapiens
IDRVSLCCPSWSQTPGLKGSSHLSLPKCWAYRREPPTPAHLLVLCTTARDLSVYVTLLSTKKDSRSWEKVLWAPGLWRCSLSPIVLISHSGEKRFQYRNLPTAEARPQLKAYTM

SEQ ID NO: 956055 - protein, 68 aa, Homo sapiens
SNQNGLDLNVRPQTMKLLKDNIGETLQDIGLGKDLLSNTPQVQATNAKVDKLHYIEFKSFCSAKETPK

SEQ ID NO: 956056 - protein, 67 aa, Homo sapiens
AAIVAVVAVHVVLALFVYVDWNEGSRQWREGKQDESEHHLFIALNSFFKMINAGGGQSDLNKVERTC

SEQ ID NO: 956057 - protein, 108 aa, Homo sapiens
ETGSCSVTQAGVQWRNHGSLQPPPFGLKQFSLLSFPNSWDYGYGTLHSASFLYFFFFGGKQGLAMLPRLVLTELLGLFTTLWLPKGWKFKVLPPCPTKNNPFAGIHGV

SEQ ID NO: 956058 - protein, 115 aa, Homo sapiens
LKCKHSNRPSTKKRFSFVIGTPDEHLMSGSRGYPLMSVDDDILASRLEPDDSKGKRKPWVTGSGRRPGLHQLCNKSGGLVFRFERLHLFFLLIFGSGCYFTWIDFALYPTTQRTL

SEQ ID NO: 956059 - protein, 104 aa, Homo sapiens
GQSKTFNNFFWNPRGTEFKWEKGEGGFKQRDPQGPSQLGLNNGGGQTFFSTAWGVKSGKAWKFIPHPKIPQPIKSPDLGFYKHLLNKQNPSKFVPVGNFSHTMD

SEQ ID NO: 956060 - protein, 119 aa, Homo sapiens
CSWWHSVESHLGVLAPKNVYQKDAQIERTYVDEVNSELVNIYTFNHTVTRNRTEGVRGFVNALNKQKGAPQLFVARPKEAEVSLQVPLILGGMINPISSTTKGNKPFFRPPPRMRSRCN

SEQ ID NO: 956061 - protein, 50 aa, Homo sapiens
MQTLAPLTPGCLGSRDGLESLLLQGQSHKERPPGPTAASWAPPESGVLKG

SEQ ID NO: 956062 - protein, 119 aa, Homo sapiens
GPETGQAEADVTLSKLQGDKAATGCPGRKNHHFPGSPCSLRPQPWVQENDLWPLPALRMANYQLHPLNSSHITSLVAALSRTTYLDDINPGAAKIKPDPPNEDLKMRGSFGNFWTTGMK

SEQ ID NO: 956063 - protein, 179 aa, Homo sapiens
TGTCAPANDFNLTQIQSAAESMKGLGTDEDTIILISSRTRAMSSWKKIRQTFKSHFGRDLMTDLKSEISGDPDKADSGAHDANGPLQCQAVEEGHGGSRHRMTKALIEILALEPMLKSGPSMRPYKEDYHKSLEDSSEAQTHLATSGGSSFLWPRGIVHGGKETTGPVHGKMPRWLLSS

SEQ ID NO: 956064 - protein, 87 aa, Homo sapiens
VCKHPPYGGRRQIEFGFNPACHDSATCCFSDSEALNREFRLSLVYVRLRNVLRGDLSRCLSNLMACSSEPKTGHRGLAMDGGFTTLA

SEQ ID NO: 956065 - protein, 65 aa, Homo sapiens
YLFSPDTLIAHHDEGDQHPNRQEMIATRDELQVPEKDSADQRDDDELFDQLVAEVFHGTINQLAA

SEQ ID NO: 956066 - protein, 41 aa, Homo sapiens
SYSTLLLQYHIALRQVIVRDRNEKLFRCSSPGNRVFSARTF

SEQ ID NO: 956067 - protein, 148 aa, Homo sapiens
MKTLTAENTVATPAKKLPSEIQSSPVPAPLAPAQPSPFELPQHSSSSTDEFDELLALLGNINEPSEDTKNKAVSAAHTAPPKLDEIQPSQTSNQGGAPLAIIEEVTPMPSNNTEIGQGFVEWLKKGIASRTIIINDTKALVHTVAGTH

SEQ ID NO: 956068 - protein, 78 aa, Homo sapiens
DRLVGPASPPRQIIDYRDHRVEVRTGKSGEAHDQHVQATSPVCQQHMAENALDAYVYRYAQTRDTIDSKNQATVHTQN

SEQ ID NO: 956069 - protein, 32 aa, Homo sapiens
MVFARCPWIECMHNWDTRIVGQPGGDNGYLSS

SEQ ID NO: 956070 - protein, 55 aa, Homo sapiens
MAPPACRIVISCFMSQRRPLKGLSVAMSGSAHPFLTIFEGSVKTGGGTAVYEGGW

SEQ ID NO: 956071 - protein, 172 aa, Homo sapiens
WVPALRSEILSLPKRKGGILLLDETQDTELWQRWKVLTAQQPVGRTDEASLLAAAMDLAEGMALPLSVVWAAIKFWVDQGLVKVMAVDDEIQRRGPMALSDLFDGALKTLAAQQQAAPAPVATDGFLYSGNRHESVPRALFLDRRLTPLERNAWQVFRLLLNDDAGTHSGYR

SEQ ID NO: 956072 - protein, 32 aa, Homo sapiens
WNVPSREGSQPFWMRKAGSQVKSAHSARCPTL

SEQ ID NO: 956073 - protein, 171 aa, Homo sapiens
SSSNHVSRLRRRRSVLQQGVEAYSASSQALQFGDAIRQACSSRTWTLSPTTSRVKFGACLPVSRTNRRVLKRNTGYPHCCSRAEIILALNIHLKHRLTAVHFLPSGPAPVGVGSFSTSPENVTMIQKINPLARGYYGFEIRRVAVVSYEIAIRKRSFRCTRLSASYQNDPP

SEQ ID NO: 956074 - protein, 44 aa, Homo sapiens
GGSFCGRKSIAHYHKLGIEPMSKTLVSPDSLTLPKALEIFRALR

SEQ ID NO: 956075 - protein, 53 aa, Homo sapiens
FDMHGVESLGSTVPSFGQCEASVKPASGQHVSAGSNAGGRLTSPKAERISRSN

SEQ ID NO: 956076 - protein, 125 aa, Homo sapiens
HGKPRCNPHKPTLYAIFTPHPALALVPLHRSCGQCPHTRQSPQDGEISMSVLDGVSLLWAVALFIYLLVALLRADRNQERAMHSYDYWLIIAFFAVVLVPAPFLGRFYYKVMEGQRTWLTQNDPP

SEQ ID NO: 956077 - protein, 188 aa, Homo sapiens
RHLGDDKRVSSGTRHPGRCAPLYLAACQVLGRGAVVVLPESHEQVAITVEGQARAEVVASRQLGLLAQYHLEVFQAAQVGRQTPAPYGCTGLAALASAFGVRQVNQAVLLEVWRQHHIQQPTLPLGPYLRHALQGRRQLAVRGTQNAGSQAVRSPGNLAGPAKTPVPTDGQGPGQPAWRRCCLARWGT

SEQ ID NO: 956078 - protein, 77 aa, Homo sapiens
DPCGAYCLGAYDEDQIIAPPERKYSVWIGGSILASLSNFQQMWITKQDVRQKPAHSISPPANSFYDTLQPPVAGYRR

SEQ ID NO: 956079 - protein, 67 aa, Homo sapiens
RGDLEDPVRTDAVPRAVVESVHVNEEYGVHESRRDRAVAQALEADGVTFHSYLDQLFFQPGSVRVRS

SEQ ID NO: 956080 - protein, 79 aa, Homo sapiens
GVTLRILAYGRYAHALFRKPGSADASEYTYLHLPKRCPMFNTRLKQELTALREELSSLLQVKESLESEMLCLTLDRVRS

SEQ ID NO: 956081 - protein, 76 aa, Homo sapiens
DLEVPGVRTHQAVGWPGKQLMADQQARTEQDFVMFSHPNLFVSDVAEYAQNIGAQADGKKVLAFFPKLDPRRASVA

SEQ ID NO: 956082 - protein, 122 aa, Homo sapiens
MAEVELEWVPLVGEELSEQWRLGNVHVVKQVGNADICHMTVPAPARTLSACVVLAIQVAVATDTPFLHACKPCTERRRVSGCECQAGCQGAFFQPRDILALLAHRVAADQSMHAAIPGGVRS

SEQ ID NO: 956083 - protein, 41 aa, Homo sapiens
MSVVCMTCRQPDLTAPIRAAAEKIDVSKFPLADAFTRCAKV

SEQ ID NO: 956084 - protein, 125 aa, Homo sapiens
MTSGGIVLRVNALRCNVRKVGEVGEETWRSPGSGVTLQRQTGRVIEVCIEYRPFAVNGVAKVQCASDCVVSIDRRFMTPAAEQFLCPYPAVQFRFGDRGRGQRGIGVERGLQEGRAPGHQIGFES

SEQ ID NO: 956085 - protein, 65 aa, Homo sapiens
CVRTHTFDIQDGKYLKISFLGALQTLSISRISSDDLFAVNPVNVRGGNIDRIVFHLRFAKRGVRS

SEQ ID NO: 956086 - protein, 137 aa, Homo sapiens
MTLSVASNSLWRASLLAAGPGSGPIKNTAFIQSEHLGRFQGRFAAQREQSLATRSGGVFDQTMPQRVIHPPGLLLPVQAPATWQAERGRRGLALSVDPGIRCQPLASFQQCADGRQQVLVERWVEEHYVVFSRCLRP

SEQ ID NO: 956087 - protein, 152 aa, Homo sapiens
VSALDYALRLAWWIATRLVDAELTALCAMAVCARVNGGSLQVVVGPMADSIADEIRLAMPGFVAAVPVAVAPVDKPVVVNVQEAEQWLNALGGRGNVRHLEAVAMTRLRVELGDDSRLSEAQLTALGCQVVSQLESGVWHLLMGDKASVAGY

SEQ ID NO: 956088 - protein, 113 aa, Homo sapiens
VQRGSRRYGRSPPARVDTEQRDQHHLEVFPFAEGLANRAPQALPSSFIFKKAGDSCRLMRIQVEMPSSTMENKNGMRQPHTSNCSPGVRSGRPLRTLSEFAPSMPHAVGSDGY

SEQ ID NO: 956089 - protein, 120 aa, Homo sapiens
GQRVPNFDLHGFQGHTGPSLENQIKIRPVRIHVSFIDRVGITQEVLALLGGRNLNLDAVEMVPPNVYIDAPTLSAEVLEELRDASVQRARRASGKGRRHPSGPASPLATRRPAGGHGVRS

SEQ ID NO: 956090 - protein, 215 aa, Homo sapiens
IALGSVIIHSLTYSSVNDLMLQTILGADAMGVFLGVTPDIEDDVMNIRFRINFLHCNRRLCPAAIRQRFGPMGWKGPHSSAKFFWRDYYIMRPRPGLDTTEATTGAMRPSPMERAMPPEMAVPMQATHSVAIARARAAAISMAMTRATHASEMGKLHRAGHSMETAPGQNGQGFTHPGTATAADGQTYSGQTSITKDGVTRSGTCTTLADRGVLL

SEQ ID NO: 956091 - protein, 215 aa, Homo sapiens
RRSLVTKGPANCLLDDFSDRYQRQKATHPLRPLPLSVADLPASDDNRRALPHSRKENAVKKLLLLTPLLALLLQGCGVTMTQYEPNFDNVQVLKRAAPLQPVSNAQVTAAPGEGSLSVRANPIRSPSGSIPAHIQAAITQELQLAGLLNPQAERHLQVLVVKNSLSAGMGSGNGTLAARFTLLKGNDVVYDATKDVTHTWSSSFFGFIAIRTPPR

SEQ ID NO: 956092 - protein, 202 aa, Homo sapiens
IPSQTPNAKKREIVKLPQELVSQLGVRSDQDLSTEFGFTLHYLKKERKARGISSVNVPKYPEEMLSLLGKVADRDLVARLGYSSTTLSILRKKLGIKRHHKVWTAERIALLGKIKDSEVAALLGGAFTKGSVGQCRRSLGIPICRGPRNGAPTALFLSLSRGLTSGKMEALPSAQPGETGQLTQFPLSLVQKPIRFKPKPKD

SEQ ID NO: 956093 - protein, 214 aa, Homo sapiens
AKSSGRRLAVIAVEERDQAIEDAGLKPGQDRNADDVPDLQVPFDHADEVHQGQAYSKGIQPHQRFELVMRLSLELAADQIQCIAVLTPQGMGDKTKNDSFRPELAPVVVRHRQHLASGDKQHQAFRQALQLGLRTSQQLFIRLGVLHVRAYRCDHLDGLAGIDELVQLLHQQVVLHLIHLNPVDNRLRPGIRVQGNGSLAQADILGQAELIASA

SEQ ID NO: 956094 - protein, 152 aa, Homo sapiens
MPGDRMALLETLLRWVRSSEVPAVEEPLSRAYSQLDALADPLKTPLQRGIAALRNTLGQDAADALLQPAPMRADEAACFHFPLPIDYTGQERRLRMGFPSKFPRGLLRLNVEPSPWLVRPHATTSGLSLHGFQGTPHIWALRRPWNRTALLG

SEQ ID NO: 956095 - protein, 238 aa, Homo sapiens
ASRPDGIAGIYGMNFKHMPELDIGYGYFVVLGVIAISCVFLFVRFKKAKWLWILPIVFFAVIWRLQRALYGSLSNPTQDEGASMTEQLTDALQAVQSFIAKGYDREYRVKDSNLVDLEPGSTIGPCGICVDAAFRLGSGDDGDNASTLYAITDPATEHKGLLIDAFDEICYRDPVQESGPQCRRSRLTSIRVIRSSKLETFMKAMGYKVPGPIAADARWSESIASAVLRIESVEGGAG

SEQ ID NO: 956096 - protein, 83 aa, Homo sapiens
LRGHEELLAGREDHRQVVEEAGLEGIATKPVLGDALVETKIQLFAGDDGVQGFWMFCHIVTLSSCLRDGGTVQIAQGSKQDEG

SEQ ID NO: 956097 - protein, 42 aa, Homo sapiens
CQREGSVKQVELVSGRGSDKFLVAKLKGLDDREEARLLAGYE

SEQ ID NO: 956098 - protein, 110 aa, Homo sapiens
IWLSGHHDAHQQRQQENMRHVECPHPTQDFQAGEEIALALQNLAVGQHGCVAGQEHEDFRGVTEPEVLHGDVGEGVVRHVIPENEDQRQAPKKVDARVASVQHGSGLLNK

SEQ ID NO: 956099 - protein, 67 aa, Homo sapiens
HSQVPAVGTFCAARTARFRSSRERGTPTRPYRFDRPGPGAKAAHQEQAVDRRRRVAVARFIGERTGQ

SEQ ID NO: 956100 - protein, 34 aa, Homo sapiens
SVSADTLKPAQSQAVRCRGIYNKAQYLEQRTTMM

SEQ ID NO: 956101 - protein, 108 aa, Homo sapiens
MRNSLVGCLFAAVLLGGLSSTVLAEENGSDHSTTVPVTATDKPATANDSKLDHGAMDHSQMSHESMDHDQKTKKEIEIMTSKFLRPTLMALAVSTGPAFFFMAQAAEE

SEQ ID NO: 956102 - protein, 74 aa, Homo sapiens
MTMASLAFSKLFQIDTGFSTLKLSFQVTAQCRLGLIKGIPKDLLGHYFLITLLVFVTEQNLPYDEYQKRYQEIM

SEQ ID NO: 956103 - protein, 55 aa, Homo sapiens
MTKARREKRYSCRNFDTRHDPAFNKGFQTERRSAAGSIGKRRGASQTFRYANSRR

SEQ ID NO: 956104 - protein, 45 aa, Homo sapiens
MSRLEPSQQSCALLIRFDFAVARKRLTQQGDDALGFEAGEDILAQ

SEQ ID NO: 956105 - protein, 104 aa, Homo sapiens
MCFYPALSLYEKPAQVGIGVYRRVLMTPSQASQLPEETELSDYCGSWLACDEALKLNRVACTEMQKAPPFTGRGFCFSACHSDLRVAHMQDLHAIGATGGVVAV

SEQ ID NO: 956106 - protein, 55 aa, Homo sapiens
RAQRAAGEAMLSWLIPAKSHLAAPGVGHPGGIVGVLHVVGALQLGQLVGREDTRL

SEQ ID NO: 956107 - protein, 48 aa, Homo sapiens
VAPGRGDQKSLATDQHMRWRFVGTGQRVESDRQRRGERSDMGGGRAAQ

SEQ ID NO: 956108 - protein, 89 aa, Homo sapiens
ETCGEFDERQHRLENDIKTLIIEALGLGDISPDDYGSDQTLFGEGLGLDSVDALELGLAIQKKYGIKIDADAKDTRNHFTNVASLAAFV

SEQ ID NO: 956109 - protein, 159 aa, Homo sapiens
ESCVATSMLRYCDVGYEKLCAAGQPVFDLGLLDRQLLAQHIEHGLVALAERVEVIPQPQCLALVIQYAGIGQAAGAEHFQQTVGGDVVQAGQLRVGAAAAQQFQAFDRTVVGDKEVVAVIAPVHLSRMFDGVVDFLAAELQRHRRQATQFGLGVLIDDL

SEQ ID NO: 956110 - protein, 144 aa, Homo sapiens
MINKPPLTDAIVVALARLIDDSQLSEKREPTHYDLDLLFAQVSITAGDQPGPGGRPVGKAKRIRGALNWALTNHPKGGEAFIPALISTVQGYGGFRQQSINYCGAEAIANLISAIAAQGWELSMDGNLTPNVLEAMKGRQLTHA

SEQ ID NO: 956111 - protein, 145 aa, Homo sapiens
PFTALLSQMALEAVTWYEGIALSMDPYLIITIPIVWLLYEVKLNKVLDTELTIGKLLLRIRHDFGRRQHYVLAEPHAALHSQILSMYMSLVIDNLYALGSDVVCFMAFEHFHTVKNQLVYDLMASTIVRYRSRSHVADISRDAPL

SEQ ID NO: 956112 - protein, 88 aa, Homo sapiens
MSVCQRLHAHQGEGWIRPWLKILFLKHCLTVMRLEGVVLNPCRRCFVNVNRFPSGATLDQVKKDAKKLARTQNIPLNQAQDAAALKHG

SEQ ID NO: 956113 - protein, 188 aa, Homo sapiens
RQIRISPEQEKGRMQRVHHTKIEPGNMVRRRSVPSRHGSRDGITDMPASTEHIDNKRRDQRRVRRSRRLRTGERELAVHRSTIPWHSGEAKISEKMPDDHAKTVRYPERISLIIYRRWIWNRVRSSNRRIRIVMHMRDKVDRIRQAAPGVSAAARCTAGPSNNVDNGQSTSVQPQQRRESFEDPLEAT

SEQ ID NO: 956114 - protein, 166 aa, Homo sapiens
ELPTDTQHAAALARQHEPRMNGKASMKAYAKKPLRHAVEIRNYTFAVPEYIQLLDKHGVALVVADTAGKWPYVEDVTANFMYLRLHGDKQLYASGYSAEALQRWGDRIERWAQGKQTADAHLIDPHHTPRRRKQRDVFCFFDNDIKVRAPFDARQLLQRFGLDQHL

SEQ ID NO: 956115 - protein, 227 aa, Homo sapiens
ATRLRKQQTQGRTGQRFEPHKKLNHVGADAGHNSGGIEHLAPERTQAKTAIELRQTVHAQFETQLANHIEDDGKRQYNTTVRVTGTVPQTGRSRLHWLPHYAASLAGSSAPVAAVSDLASQRLNALLNAGVANSPQTSMPMMRLPAANARRAWSTWVRRMPPWSQLVAASSLASTSLSMVIQIASVGRLAIIWSRKAPNPGRQVGQCSGFLLLVAGRPHRPRLDGMR

SEQ ID NO: 956116 - protein, 118 aa, Homo sapiens
RTPRRLLTPTSVTEVRPKANDGIPRSSNVDVIAVIMDCPPRLEHQLVRRLVADHPDHCQTALLNKNVLYPTAVADVVSLAQDHHSINVRRPMPPFDSRSVADRMPTDEEYCPAEQTIS

SEQ ID NO: 956117 - protein, 94 aa, Homo sapiens
GVGFLEHLLRAQCSIRRDDGYAPADYRLPAGRFAYRNCRVDVRKNRRVEDSDGQPERVLTRDEMLDDISLYWLTNAGASSSRFYGENNNNNFSA

SEQ ID NO: 956118 - protein, 61 aa, Homo sapiens
YRRWAEIIELSINLKLAGDLIERMLRKVQQQKTSQRRQFSEVGLEELSGLHSQLIANLRLG

SEQ ID NO: 956119 - protein, 186 aa, Homo sapiens
VASSLVVYCCVQRFRTIAGRYHQHAETVFVVIIGERQQRFTDGGHPGAQASPASMTWVEMLSISSTAALAYQQLVTGGVLEHYRQATTDKVARQFIDLAVGKRHLALGVSFRELHHRLVHQVYHAALVKAVEPGQGQHGVIALAKGIDVMLEDDLVLGAAQRFETLTRRTRLMACESTEHLLQVIN

SEQ ID NO: 956120 - protein, 118 aa, Homo sapiens
MVGSGLFEEEAEFSDIAADANLMDDMIVQIPEALTALYLLCNAPDEKTGDPQATSPLSRLPVEPMGNRPLLLRYALLAIGWLSVALGVIGIFLPVLPTTPFLLLAAACFARSSPRFYH

SEQ ID NO: 956121 - protein, 132 aa, Homo sapiens
RPKLCAGVRSFGLACRPDLEPVVVFSRVVVRQPFMGNHKIGIRRVNVEKILLAAEKVFANKGYGSTAMADIAEEAQLPRSNLHYYFTTKSELYSAVLFDLLELWKQDALSFETFDDPRVVLSSYIRAKMAAR

SEQ ID NO: 956122 - protein, 216 aa, Homo sapiens
CGACFEHGALSRWVSNGCGFCRSNSAPTGIRTLRLGTVGVVSTSRGSVSSGISCKVTCDTESWLSELVTETEASPSASWTITTDVSGTMPSACAWLPNISSRAIRPNAVLEHVIVMTGSRLGEMSGSEVTQVQNDGAVEGHFLIQGQVLRKVDGGVHLKLDPQLADEVGLTVARRSKCHIGSWIAIGLGRPAFAAVGGRQDLHGLGVPTGLGTTTH

SEQ ID NO: 956123 - protein, 116 aa, Homo sapiens
IGRSTSCMSGEALIRRMVEDLKLTPDDRLLEIGFGMGISASILQEFGPASHTIVEPHPQVLLQAERWKGVRKNIQLHPGYWQQLDTSSQRYSAIFFDPFADEMAAVDNENLRFLKF

SEQ ID NO: 956124 - protein, 70 aa, Homo sapiens
AAVLPKVYRRRLGRTAPDRCRCASHLMNHFPTHQRTEILRCGDATISIFNIETTRSIIGDTQVARGLLHV

SEQ ID NO: 956125 - protein, 167 aa, Homo sapiens
  misc_feature (5)..(5): Xaa can be any naturally occurring amino acid
LRGEXLVRDVRITQIYEGTNGIQALDLMGRKIVGSGGAFYTMFADEIRQFIAASGPELAEFTKPLGVAVGNLDELTAWVLDRAKSNPNEIGAASVEYLHAFGYMAYAYMWARMAKAALGKEGEEDFYASKLGTARFYFARLLPRIHSLSASVKAGSESLFLMDEALF

SEQ ID NO: 956126 - protein, 138 aa, Homo sapiens
LSTNVMDGAWRRPPKSLADYGHTEPKRGAELVGQEPFGYFGLGRHSGFSKVTRRQGGTLSGRYRSNGYVHNPTVLTARQPSRASPLVWIARRQVDGVGFQAVIAGKPTEGLRRAREIGIGCQAVFAGKPAPTVGSRRT

SEQ ID NO: 956127 - protein, 94 aa, Homo sapiens
GSLSTNVMIVSYLNGCADAAATQRASEIAELLRITGWRYAHCNARFAYLRMAPMMGKKSQVLIPAIIRLMARYEPVGVWESSDSYRVEVYLRSN

SEQ ID NO: 956128 - protein, 33 aa, Homo sapiens
MVLDPSRLYDASYVYAARRTNLCNLATVSGAVG

SEQ ID NO: 956129 - protein, 108 aa, Homo sapiens
QVDERWAPMAAPSSTRSSGINSTLDLIGDGVWVTIPSPPVGREVRLHWYGPSNRVEMLKYIETPGDVRIKTPAHYVLEDLKRLVKVYWQVSLNGTAHRYSKVVTLRNC

SEQ ID NO: 956130 - protein, 84 aa, Homo sapiens
  misc_feature (5)..(5): Xaa can be any naturally occurring amino acid
LARMXQANERVRLEHELCRAIEREELSLYYQPKRRLVTQRLNGAEALIPLAPPDLGRGPARALLFALGEENGMILANRRTGYWN

SEQ ID NO: 956131 - protein, 117 aa, Homo sapiens
PNVDHRGHAGKPIYQMSKWWARRRSSVFRSMLIAAATKAPEDKSHAARLVWDNYYANHQKKGTFKHLKGGGHLHGWRDHTSWKALASVCRLVGNDLNTGSVVRGQARTGLTYDPPEM

SEQ ID NO: 956132 - protein, 87 aa, Homo sapiens
GDSKDPFSTNVHCLRDMWCKRHRMQLGPLACNLMGASQAIGPLLSKYAWSLQVWWHRRSTRSSCARLFKPRPGLITGVHLLGNGVAY

SEQ ID NO: 956133 - protein, 105 aa, Homo sapiens
METSCEHPRAAGTLKTKDVQWPQGASSCLVNGNKQALSEPAILAALREHKPALIELIKAGEYTATKAGEVLVPFNGIPDNAERINPQYADPVNLKQDEIERIEIR

SEQ ID NO: 956134 - protein, 74 aa, Homo sapiens
MGSQVDEPHMGGGSSPGAVQSVLAWLGRRCQIVQTGVGWHSWFSFPTDLVELAEGLVQGRTHHRRVEVDIDDLD

SEQ ID NO: 956135 - protein, 131 aa, Homo sapiens
TVCHRSDPFTQAVQGVGEQQRMTVIQRFALGLSGVDLVAQQAPAFQWRGFGGALQPGAGIFQQRRELIEKLWRTVLNVAYTASSKASITWQQVNHAPAQFLGVAYRLRACAFVGQLAIIKFKGVEGHSGLK

SEQ ID NO: 956136 - protein, 61 aa, Homo sapiens
  misc_feature (25)..(25): Xaa can be any naturally occurring amino acid
  misc_feature (28)..(29): Xaa can be any naturally occurring amino acid
MYLSALVEQLHVGMDFNISREARRXHVXXVNGPPLLRYSRKKPRPTFSTRPGRGTESFPGE

SEQ ID NO: 956137 - protein, 47 aa, Homo sapiens
MGFTVELRMLKRQVEKALAAKPVASLIGRHALKTERNHRSLHADHVQ

SEQ ID NO: 956138 - protein, 91 aa, Homo sapiens
SVLKQAAKFVRLRVSAQQACLFIDKRGITVVLADNPRRWQDLRSSIMRELIRMISSAWYWYFYTTDKNKRTTPDKLAKNFVLTRAIAQHVI

SEQ ID NO: 956139 - protein, 139 aa, Homo sapiens
SAVQQPMRKTLRFPGKRFVMAANLFSSLFWCARMEIKVNFLDNLRLEAKFDDFTVIADQPIRYKGDGSAPGPFDYFLASSALCAAYFVKLYCQTRNIPTENIRLSQNNIVDPENRYNQIFKIQVELPADISDKDRQGIL

SEQ ID NO: 956140 - protein, 86 aa, Homo sapiens
HRVVLTSWKSQALVIEVNGFAGLGTDRDLLGFAAQYVSAYLIGPRHFRGRLADRSPIAYRAEVQGQTVTLEATEYPQILPGLVPNL

SEQ ID NO: 956141 - protein, 54 aa, Homo sapiens
GHSEDYEQHGTLMTIFVFTSEPEFQVKAIGIYQANWLLNRSSGNTKNSSPLLQN

SEQ ID NO: 956142 - protein, 44 aa, Homo sapiens
HIHAPYPKLPTCISGRIDGLGRRRVRLDMGEPVKIVEEADKMIN

SEQ ID NO: 956143 - protein, 63 aa, Homo sapiens
MADFMAKMAKHGPVWLAHLYTDFFAVGVVGFLDVQGDQPLGVSGGGRVAFQVDNDEVEGQDRL

SEQ ID NO: 956144 - protein, 63 aa, Homo sapiens
EHNVFSLANRRMIQISALPAFTDNYIWLLQDPTTQRCAVVDPARCHAKCWPWLRAECRCGRLS

SEQ ID NO: 956145 - protein, 98 aa, Homo sapiens
CSTNVVDSVSAQTFQPFPGQSHGYLPHRPYPDTRTHPQIGLLVIHIFAPVRLCRHPFCVHGVNHSPPESQTNGWGSVKPQKQTGFHFTQRAHVMGQIP

SEQ ID NO: 956146 - protein, 42 aa, Homo sapiens
ARMWYGSVDEGRYTSEPNPVLTTLTGCVIQTYMPWCADKKIT

SEQ ID NO: 956147 - protein, 101 aa, Homo sapiens
PRNAIEFPDYRYISKINPVQCADRSVWELAAGMPDLRSFSQVAVMLSQASQLPHLIEHIHTFEAILRLMNLPFFARRLLRPLLDPYRRFRHAKLIHAARVS

SEQ ID NO: 956148 - protein, 37 aa, Homo sapiens
LLRYSEDPLARIIAPVLRFLVRRGTLYIGDLRVDALA

SEQ ID NO: 956149 - protein, 41 aa, Homo sapiens
  misc_feature (14)..(14): Xaa can be any naturally occurring amino acid
  misc_feature (36)..(36): Xaa can be any naturally occurring amino acid
QSLEPMYISQRYTXSARNEEVFMNIQLKEAVVIGVXDAYRG

SEQ ID NO: 956150 - protein, 212 aa, Homo sapiens
ISTNVEIDKMLRGTAYMAFLIHRDEITQLLEIHKVLLIEKAGKSKWPLAPEAPSLAPIRRAYRAGSDNEQQFLVDSVYIGKAKNLKALLAGGIDQGQVAKRRVKCELVPSLARRVLDDLVVHAPRADVSSQCLIAHCGAPAPGVCTGGRVPGFRTPDDRAYLGFPVKAAGPNSLGHSPQAVREAICQQIHTGINPGLGLHNRAQLDLVDRLC

SEQ ID NO: 956151 - protein, 158 aa, Homo sapiens
PKDSSTNVIVYGDDVVKRHRDAVGPLACQLDGRFTGFGTAVEQIGLVAAGVVAQTIDKIQLRAVVQTQARLDHGCHLFGAMASLYGLGTVTQAVGPAALTEIQISAGRPASRKSQGTLPPVQTPGGGRATGGHSGTGLETFCTRGMHNQVIQTRRAGT

SEQ ID NO: 956152 - protein, 185 aa, Homo sapiens
ATLEDPLSTNYLDLPLTKPPRLVPEYAGWCAGLLEFTDCASLLTSSNGPCVVNCTSSFCALPDRFERVQGQGGLVPPARKRVAEQLGNQRGGNHRLAFRHSVAIIAPGLGHQAQFAVEVGDIDADFALAFLSFSVTVDALQGDDGYAGVRAFAGYGQRRVDNKKQTVQEPLAGFNQLAVDVEWGD

SEQ ID NO: 956153 - protein, 58 aa, Homo sapiens
QRMCPARTFAEGIEKVGLGEVIFDVPQANARIRHSIFSDRPAPDSVKTTQVGHPVVEP

SEQ ID NO: 956154 - protein, 60 aa, Homo sapiens
VSARRLTDTNTGRHGKRRTDHFRAAAMPKVRLRDRAEDKTHETGSRQTPTPGPRAEVTQA

SEQ ID NO: 956155 - protein, 123 aa, Homo sapiens
HECGTSGTCAQSASNTCPCWRLIMSDSKTLRPIIEAAPLKPQPTQNVHGWERIGSVAGGVMMVGKGLRRGGIFGLIQVAIGGVALARGFTGHSSLKDKLGTGAARESEQRCATKDSETGIGLT

SEQ ID NO: 956156 - protein, 93 aa, Homo sapiens
VRYGSRICTGLFRGGPSLGFLDVQGDHAPFGGGPRWWARCFQVDTDEVEGQAQPSSRSTLLGTTCRPRLISCATNAAAMRGEVFLKPLTPAFG

SEQ ID NO: 956157 - protein, 89 aa, Homo sapiens
VSSSDELTRRGLTNELAFDFTVLRDALTIGNLRLTDVGFDAGVTVASWSTRMSKLQLCPLPADASFDQSHSYSLDRGKTGSILRHSLPK

SEQ ID NO: 956158 - protein, 91 aa, Homo sapiens
MGLGGDVFVSGYWPKRSQIVGVGLDTQLINLSGLSVRSAAKNRHGDISQFDKFQVRPIRPKSRRKTLIERRWLTWRLNVGPTYRCSKGYRS

SEQ ID NO: 956159 - protein, 30 aa, Homo sapiens
  misc_feature (26)..(26): Xaa can be any naturally occurring amino acid
MASGDMRTSQWGRLNLPADQIASGSXLQLL

SEQ ID NO: 956160 - protein, 48 aa, Homo sapiens
MCTLRSGGRLNLSRRYNSFWFMYSSSLLVFWSLTSMSYFSSSDSIDTW

SEQ ID NO: 956161 - protein, 39 aa, Homo sapiens
MTTMEEEIMEVKITMILEIMTRRTSNYESMKSEHFGGSR

SEQ ID NO: 956162 - protein, 100 aa, Homo sapiens
VVKRNPATEHLSSWRKDINENSLVVASDAEPGQCRTSDLAERFWKDRPERVTAPYAKVKLSDLSRGGTTVVILSEHGGDHPSKALNTRMQPIVNWYRGVG

SEQ ID NO: 956163 - protein, 34 aa, Homo sapiens
SRIYSTTDYYSFFPAALLSEPNTTLFGGTTITCA

SEQ ID NO: 956164 - protein, 106 aa, Homo sapiens
MPVTSHRLREALRLNNAVPQGLSSCIFTTDVREAEQFMSAVGSDCGIANVNIGPSGAEIGGAFGGEKETGGGRESGSDAWRGYMRRQTNNVNYSLELPLAQGITFD

SEQ ID NO: 956165 - protein, 59 aa, Homo sapiens
ERLRTSESSVAVPADVSDELLSSHIVLEHMTGSSGEVGIPVWQALGNVRLGAVLSVHLQ

SEQ ID NO: 956166 - protein, 75 aa, Homo sapiens
NLRLVAGVLQTFDDVHCITAELSALQRMLAAIEHFSACCVLCCVRRKGERNDWDNFFRMGCPGWRDCSGKRRMTA

SEQ ID NO: 956167 - protein, 43 aa, Homo sapiens
MISLIHGNGLVVPGYSSFKPICDRRRLAMNLRKSSIIAGGYWH

SEQ ID NO: 956168 - protein, 205 aa, Homo sapiens
MPITSYCIYVIAVGILKTDVAPGWISLSLQQSGMFFLISLVLLVEGEYILNMASLSNEGPLYHVAQEFHPVREMTRCEKLNVEEWASESADKEIPTSDRACCRGLTKAKYATMRKSSGGGFYGAAIGIYLARQRGFKRILLIERESALLMRASYNNQARVHNGYHEPAQFYHLLSQSSKLAEIVRDWRRHKADSPSSCYAGQSKY

SEQ ID NO: 956169 - protein, 187 aa, Homo sapiens
MPITSSHKRKTKCMSSALATGITYLHGKKTSDDSFVIDTSSQFVVAMQVQRSEASDSFTEATREEMRDLQDSLVNANGEIFERPGDYGLTVCEEVPSWALSEDPTPSMIHQTRRLAGFFMGRNPPYTSMCSIPSYQAFATSGPTFRRVTMQHAIKKATSQPEMLDGFDQTKLPIDRDSIRGGYMAGY

SEQ ID NO: 956170 - protein, 70 aa, Homo sapiens
ALMAGHEDSNGCINYEASVKHHHVSLEWSSHRTSIVRKTGWQLIIITPMTNSPGLFTIIQDHKAIWTAHD

SEQ ID NO: 956171 - protein, 155 aa, Homo sapiens
AEEARLVVPGEIAVVDIHIVEITRTEQLRQARQLVAAFRESASGIRNPGRFGKQGIGSEHTLVGVGAVGEEAVEQQALVGQLVEVRGDIARTSQCAHRMTSEAFHQDHHDVLDRQGFLGRWREVTAHGSGVGVYQLLLREHQHVTHGLGGQRLFQ

SEQ ID NO: 956172 - protein, 40 aa, Homo sapiens
VNDSESHTSSRYTNMITSASCSIAPDSRKVGVHLDACLGR

SEQ ID NO: 956173 - protein, 99 aa, Homo sapiens
MSYPESLFTAYTGTCCDGFYTKYGDIIKASLHCLRQRLLDMGCADDYMMTLNSGVMGLTQQDAHILDHSIELMDELFPHAQGAYTLEGVLACHRRHNVT

SEQ ID NO: 956174 - protein, 52 aa, Homo sapiens
MIQQQSHMSCTDGQYPLYGTYRIIVVLAVCRRVRLSHGTIADCSSFRSADYR

SEQ ID NO: 956175 - protein, 35 aa, Homo sapiens
LEVHESTHRRRFIKRSVVCVDNTSCCTLAIIFNGF

SEQ ID NO: 956176 - protein, 96 aa, Homo sapiens
DDPETVILLSAREIDQERLMEFALCMLPKVRIGILQRYSRQKYEGRERCINVSNFNAEHLKPTVDDTGVVPPSFSAQILRKGQFKENDSEVEDDEL

SEQ ID NO: 956177 - protein, 113 aa, Homo sapiens
QDVELIALEWGDVDWVGGSIRIVRAKTRAGMRIDPEDASVRRTVKLLKPALDALTQQKAITFLAGGRIYMNPHSGQPCEESGRIRKILWLPAMKKSRSALPAAQYQKSQNLRL

SEQ ID NO: 956178 - protein, 179 aa, Homo sapiens
  misc_feature (8)..(8): Xaa can be any naturally occurring amino acid
MLVLQVEXARCRRSDRNSAILRTLEHSASVRRCAGPGSGQLRGDNVILAFAVQVKIIFGIDVFELRRNKAIAPVHWVLDSGSLRSSVFRLHGSGRLRGVQASFTYSAIRIERPAVFVNHITVSKVSVRSYGFSLVGEVEPPRMVRQLTIEGDLRQTVIRSDLQKSSPVDMTAGPDPICG

SEQ ID NO: 956179 - protein, 37 aa, Homo sapiens
  misc_feature (36)..(36): Xaa can be any naturally occurring amino acid
HFIVDLLAGNGIRIFHKFPALYQWQSIAPCGSGFHXG

SEQ ID NO: 956180 - protein, 78 aa, Homo sapiens
  misc_feature (21)..(21): Xaa can be any naturally occurring amino acid
RIREMIQRVHDVMNLRRKYAXSIATIIGIIVVIASVLEGYVLSHGKICALIQPFRSADYRRCRGTGPFFEGETHGYMY

SEQ ID NO: 956181 - protein, 69 aa, Homo sapiens
YLRIVISESTLWVGDSSTGECESVGLQACRAGSCAVGAYQLDGAVGVGARFVVWDSNITILNHQGPSSN

SEQ ID NO: 956182 - protein, 146 aa, Homo sapiens
MNTSYHTDESPAPHHGAGRQISKARLPASACTDARSWKALASRVTVFRLGSTVKIWSDGESPAWRDSAGDEIEPVSKLSLIIIKLHMEEAPSDFSGLQSRSLNWQRIEKVVVRVPTDNLNGLSESTEALAQTTSQASQLPHGIDVR

SEQ ID NO: 956183 - protein, 58 aa, Homo sapiens
MAAIHIGISGWRYTPWRVDFYPEVLTQKREWQFASRAVNSIEINGSFYALEDPQALRR

SEQ ID NO: 956184 - protein, 226 aa, Homo sapiens
SYPQMDHPSARLSGSKPKNTCSNAGHLASTTLCFKPARNTLQRQGRQVTVIRYLAQLRRGLGHRQVGFQLGRRTEAVQTIFVQPLVIALPSPVSRIENGARKAPVYQSLGKTQRFTTFDETRCGGLIIFKLVKSNRLRSAKLRRDHVLQAAEDTFRYRPGVLRTQSHQHLLDHLALQVTLGAAQVERDDREMLKSEYAWMSTRGISHRADHSCAIMEATGGWPEQR

SEQ ID NO: 956185 - protein, 34 aa, Homo sapiens
MRTSRHSIELMDELFPQPGAYTLEEFCLYIAAYR

SEQ ID NO: 956186 - protein, 190 aa, Homo sapiens
  misc_feature (6)..(6): Xaa can be any naturally occurring amino acid
MRRRSXDEGQGDSGADGAVGCWRPEQTHVDYNNALFSEVKQALEGYLAGREGLPVKSLSELIAFINRTQKPGVPDQKLLEMINGVQTNQEDRDALWKAILPIFQNTIDDPMKEHKLDAMVSNFQSHNYFFSAAAGYPGISVPSGMDEDGMPTALYVYGSANSEATLLSVAYGYEQASQAIHKPAFLPGAP

SEQ ID NO: 956187 - protein, 67 aa, Homo sapiens
MSCHVAVVLYSVAGVLAILAHHHVKGVDGVARRRDLQLDQQVFHGNLRVETTDLLQHFARNQHGRRR

SEQ ID NO: 956188 - protein, 56 aa, Homo sapiens
PNGIPKWNPYELIVEGFSADYVWGGMEPGFVLLGKALLSVSDSGVIAVRVLSFLIF

SEQ ID NO: 956189 - protein, 78 aa, Homo sapiens
  misc_feature (41)..(41): Xaa can be any naturally occurring amino acid
MEFALAAPKGAYWILHAFSRQKYEGRERCINVSNFNAEHLXPTVDDTGVAPSSFSAQIERKGQFNMRMTVKWMDDVLE

SEQ ID NO: 956190 - protein, 77 aa, Homo sapiens
MIQRVPIFMNRRAVPSLWLNNRHIVVIASVLGGYVLFHVYIAALDQPFEVLIIGGGVRRIFEAKPGYMTMHVVKESP

SEQ ID NO: 956191 - protein, 126 aa, Homo sapiens
SIAFSGYTPESLSRVSPLEPENMLNIGAWIKRMAKSLDLGVFSATPPATNREAVYKINALLQRCYKARNGFWIIFIITIDGNDALITLIERKGVGATKLCTKFSCCCLDQEPPHAKRLQLVQLQGT

SEQ ID NO: 956192 - protein, 72 aa, Homo sapiens
ITSYSDHTEPGGERQVFLARLHAPQARFRGGSGWVVEAATVGIGTLVGMLREKALAQVAVGKVQFDPFKSRH

SEQ ID NO: 956193 - protein, 161 aa, Homo sapiens
PPNGSTADSHQTSLPARPEWTGYDVTCNPLKAFLSTHGIVMKARLPEATLTASHRIHHSGALGFNLSIKSASEPFSRETSQWKWSGITTQANDVAEPFILGDPELLYDQAAESEVAEDGPAFKGVGGEQVNAVGLVIAADAAGVLKQVNQAFRGLSSDGVL

SEQ ID NO: 956194 - protein, 97 aa, Homo sapiens
LITAVVFDHTEPGGERQVFRPDFTHRSQGFEEEAAAVVEAATVGIGTLVGMLREKALCQVAVGKSAGFCSIQSRHRERWGPAIDRKFFVCTAGAMVF

SEQ ID NO: 956195 - protein, 42 aa, Homo sapiens
QRNYRRFSYNTFPASPSNTIPSTKITASLSFPMTSNTLDLTR

SEQ ID NO: 956196 - protein, 42 aa, Homo sapiens
LTLDGSPSFNWEHTMMEQPNYNDDVHWCAHMVVPDALNSVNP

SEQ ID NO: 956197 - protein, 38 aa, Homo sapiens
IPTKRAVSKLSASITLVLLRPLLITNKRLTLTHEHMWI

SEQ ID NO: 956198 - protein, 39 aa, Homo sapiens
PRFMFLRAKGLIGAVARLRGITGAVATGLHQHHMQVRDP

SEQ ID NO: 956199 - protein, 55 aa, Homo sapiens
MSAIIPDEKAPIVTDTNTAPFDTSALGSTLIDGGCRFGLWAPRAERVELALVADD

SEQ ID NO: 956200 - protein, 110 aa, Homo sapiens
ATYKVREGIYVKDQWNGSILPTRYEHLVQSFKKITNVLSSLGLLITFQIFYQCVHIKTIMTALALCICNMRTVPDVSRPLSPFTEAITWAGTVTHLLICLFRDGVSLHHP

SEQ ID NO: 956201 - protein, 108 aa, Homo sapiens
AWSGHGGSHLEYQLPGRLMQEDLPEPRSSKPKCRRIQAGRAGNAPALQPGNRVRPCLSLKKGGPISQLLRRLRQENGVNPEGGACSELEITPLHSSLGDRDSNSKKKG

SEQ ID NO: 956202 - protein, 100 aa, Homo sapiens
GPPMENPKVFSMAVLWNADFYFQKDRHKSELLFGLAPKPCTQIKPLGSSKNVRNVCSSLQSIDLLRKAPCRQSNAVHGLLGLRGKPPYWSPVIDVNRSVL

SEQ ID NO: 956203 - protein, 164 aa, Homo sapiens
VCLYIHSITSYKCTMETYSLKNLYESIDNKALYHTFTAFGKHPFSVSVVRDENGFQMATGFVHFETHETAERAIEKMNGMLLNDRKVFVGRFKSRKEREAELGARAKEFTNVYIKNLGEDMDDERLKDLFGKFGPALSVKVMTDESGKSKGFGFVSFERHEDAQ

SEQ ID NO: 956204 - protein, 38 aa, Homo sapiens
AVYVYEAKGLIGAVSQAKGITGAVATGLHQHHSKCGIR

SEQ ID NO: 956205 - protein, 104 aa, Homo sapiens
MTTTRGDRETGLTENLYDQKARIKTLPQICHKTTLSGSIIGHRSIQFKFYSYLNIMILMKQQKIDHFVWFEVNCDFNEYCRVQSRLSLNGRVYIQNIKALGIRV

SEQ ID NO: 956206 - protein, 219 aa, Homo sapiens
SDDIDEFSHCEHAPQLMAHTPCLGSGVKDLCDTLSSAKSWGELIEDEDSGKALVAQQPIGNLLMSGHRELICPQYLSVHLHVHSGHHLHKVLEHHGGLGRSDIGVVHGVHNAWIVLPKGQVLDVVGHVDVVKAKALQSHETCTWDCWKLFPGGKVEVSGTLLTSKKPYTWQPFILLLLHLLAEALSPALLNSIWVLEGPASTAICLPHIFKGVTALDIF

SEQ ID NO: 956207 - protein, 84 aa, Homo sapiens
PIYKTKPFAWTTLYHNLCTIDCLKLRKILPETFIIHTIIRIFHIKINSQVSGDPILFHLFKFALKFRLPFQLFLSSTNINFVFH

SEQ ID NO: 956208 - protein, 44 aa, Homo sapiens
MRLIRALQKCCLNAEVNNSNSCSVIVESSSNEISTFCSSQNHIK

SEQ ID NO: 956209 - protein, 57 aa, Homo sapiens
RYDRARYRLCDFEREESRNLIDEDSTITEQLIAVINLALRQYFSEQKSIHSLNLILM

SEQ ID NO: 956210 - protein, 43 aa, Homo sapiens
VSRADFLTRFYNSLQLAALSATLATLIAVPAGLAITRYRFPGQ

SEQ ID NO: 956211 - protein, 34 aa, Homo sapiens
MHQACLHVGVMRIGVSPAVTRSVAIPAHQAGGSP

SEQ ID NO: 956212 - protein, 116 aa, Homo sapiens
GKAITGISYHPEASFHEEHDLTQNYIFKEELALLAIYRYEPLNLMSKKKVLIDSYEHRLNAYFVVVVYVYAFSESYLGPYIYPPIFETKFCFLTSPFSVNLQVAIILKIVENYFHP

SEQ ID NO: 956213 - protein, 75 aa, Homo sapiens
MGVQRIPAYSVPHTPGKGVDRNGRFPHISDRRWVNGGTPLGATNEAAWRDEVPGSWCEHFWPQVSCGQVLGDAGR

SEQ ID NO: 956214 - protein, 68 aa, Homo sapiens
GAGEIESSMPLCKTYDQLAIRNRRCTYQPIIYGSMHVKAELLSALMSQRADRQTPKANHHPPMVSEVS

SEQ ID NO: 956215 - protein, 103 aa, Homo sapiens
QTHELLSASVRVLKKTVLSKSESGWTLIRHKMCLHLDLETCQPSATVRKKCVLFKPPKSMVTCYSTPLRDPKIFKTLIITCYLQSGTLHSSGWVYQVTRQVSL

SEQ ID NO: 956216 - protein, 35 aa, Homo sapiens
STMYDDELAGVIYSSILTPLLPFLASTPVDLEQSP

SEQ ID NO: 956217 - protein, 144 aa, Homo sapiens
VKRNYKKYTFCVEMESRSVTRLECSGVIWAQMNPPPPRFKRFSCLSLLSSGDYRHVPPHPSNYGIFSRDGVWPCGSGWSQTPELKRSAGLGLPKCGDYRHEPPRTALSPLALKQEEIPSTLEEISSNYWVTHLAVLKKSGDGDH

SEQ ID NO: 956218 - protein, 62 aa, Homo sapiens
RIPSHKQIGSREIIHASQTTRRWISYQVITDSSAQMFLTRVGTAESDRDKHPVPAGQMLRTA

SEQ ID NO: 956219 - protein, 80 aa, Homo sapiens
VPIIVEVWYGGVSIHYRQDQQKCPMFQYATGEPLSVAMIRAVYVLFFTCSKSSLSSSARMEMAPVSGLISSQLAVSLQLI

SEQ ID NO: 956220 - protein, 59 aa, Homo sapiens
RAQLEKRCNVEEARHPSEDLRSCLRIDWNHELAGGTNFSDTVQADPQTVTRLLYGFLIK

SEQ ID NO: 956221 - protein, 109 aa, Homo sapiens
RAVAGHGICDVTTTYTTLIVTATCMRNHLPQSNLHHNRRLRQLTHDAPVSNRCPRSMAVSHVIDTITVPGDPYIEVDTVNSYCKVLGILARRFYTGTIGLGHSYSVKIW

SEQ ID NO: 956222 - protein, 33 aa, Homo sapiens
  misc_feature (29)..(30): Xaa can be any naturally occurring amino acid
VSFIIMHMLHHFNRSASHSGHGIHTRGIXXQQS

SEQ ID NO: 956223 - protein, 67 aa, Homo sapiens
IFDTSLMLWDTRSCKAPLYDLAAHEDKVLSCRLDVVRHTSELEEQTINCIPTDIHLPLPMLGHESEQ

SEQ ID NO: 956224 - protein, 97 aa, Homo sapiens
VNTCRLAQYTIERYFTLVTSIADYETVKLHYLGLYSQSFGRMFCISFGKPTMPSTFLVELSWVSFWISLDSIPARTCIEDNKGNVEEVSITNIINSS

SEQ ID NO: 956225 - protein, 151 aa, Homo sapiens
LYGTIEVTVMWRALSVFQEKADGLRPSLQTWVSTLSARADYAVFHNRALAPAQHPTLRKRILHTHYCIHTEFTEVYYQVSFMNKQVQSPIWMAAIKYLGISAILYYKYKCPRGQGNQPEELGTGSILCGNFSLGMLFPVQMYTVKKAYRAV

SEQ ID NO: 956226 - protein, 32 aa, Homo sapiens
MIASGVWQRYGKCPDPVLHYFTPPSILPSLFL

SEQ ID NO: 956227 - protein, 42 aa, Homo sapiens
MDNQILQRLKYYGAKCISTVCSVAIQYSNLEQPMIRGSREGH

SEQ ID NO: 956228 - protein, 41 aa, Homo sapiens
MARASEPVQILQSPSPAYTVHASTFWAHPTLPPNALESCNA

SEQ ID NO: 956229 - protein, 79 aa, Homo sapiens
  misc_feature (26)..(26): Xaa can be any naturally occurring amino acid
GIVWCYGPGTHRPPLGALSAPPGSIXVSLCTTSVFGEFENLRLSRWFSNLLESCRSLENLQFKKNIGLIWPFVESKNPI

SEQ ID NO: 956230 - protein, 101 aa, Homo sapiens
MQTINGDKTKLTLTNGKYSKLYATFCSDSASTANWYALITLSKLKSKLKTMLRICGYCKSLMIEDLLFQKVCNSGPLFLWNGRKDLISHAKVPPHDSCLIF

SEQ ID NO: 956231 - protein, 69 aa, Homo sapiens
ESRGSQVRQEDDEDREDEEEVPNAASGKGSRPCFEAYQEHIEEQNLERQVVTGHNCRATGWPRHYSPQR

SEQ ID NO: 956232 - protein, 46 aa, Homo sapiens
TVALSAVSDKADTVVCRARYDGAGLLAYMQKQVVAEVQTRVQPVWV

SEQ ID NO: 956233 - protein, 35 aa, Homo sapiens
VYILNVSACFYQCPCTPTLTWRCRFLAMNVDDHLS

SEQ ID NO: 956234 - protein, 37 aa, Homo sapiens
DPSNQQTACKAGQQAKPAGPTPLPVFTAMLIPSIQHA

SEQ ID NO: 956235 - protein, 134 aa, Homo sapiens
PLRYIFAPRHELRYDYYFVIREIFQTLSPFLGAFCLQTTSILLFNCVFFSFSLFDLTVLFFQFINLVAAPVILITAYGRTASFHCSSLAVESHSAVVSRALLSRRVCSSISHFFTLAALCVKAIFSLSFSDFRC

SEQ ID NO: 956236 - protein, 37 aa, Homo sapiens
SNGHISTRQLSAYMIHVVVPQESLSPRSPSPVSVYKV

SEQ ID NO: 956237 - protein, 67 aa, Homo sapiens
SERAQTHYHVRVVILDKSSCSAYNDWYMTTYNKSEYLLSGSDKEGSIETKPVNTLQLLKDYLDYLLI

SEQ ID NO: 956238 - protein, 42 aa, Homo sapiens
YSPHSTPVATPDEGNVPATASTLNHLQTATACEEGAICRSAM

SEQ ID NO: 956239 - protein, 68 aa, Homo sapiens
RYAQPTALSPQQLAVGGDLDVSASFTLMSFLVLTQLPCHSLLVPAAGRLPAPPDVAEERDMGYLSSNF

SEQ ID NO: 956240 - protein, 120 aa, Homo sapiens
RTRMQVHNALPVAHHLRKHSEAQPMCAMCATVLSAWAAGLSHQCTHAEPTANPSFAASGTTRPSKSSRWSSTYAGTSLIKPTQTRVWAKIPSPPRCTCMMCSWRIPALLLLPLVTLDLSG

SEQ ID NO: 956241 - protein, 109 aa, Homo sapiens
TFTLPSKDVFQPCHKIIEVIAISFSDITPCPPCRFYRMGSFGWVMEGDVISHDISMLAVTPERSGRHCKSQPALAGVRGFSGRSHVSHIMCQPPPSRHFQGTDCGYVAV

SEQ ID NO: 956242 - protein, 46 aa, Homo sapiens
MSMASFTLMSSWYSTQLPVPYPACPCRSGGLPSSSVLVLELLTVGI

SEQ ID NO: 956243 - protein, 67 aa, Homo sapiens
LYAQPLIEWDVHYQEACSHYVRRARTKRPSKSLLPAVEVGELPPQGTLASKTRGGGDVAPMLAGAVT

SEQ ID NO: 956244 - protein, 52 aa, Homo sapiens
LPAAHHLRKHSEAKPMCECVPRAYAWLMPAHHASPHDGTFLRSDKGTSPCTF

SEQ ID NO: 956245 - protein, 101 aa, Homo sapiens
TTSCEEFEGFQYCLGTSQREIVHASLIDRPSELIFAGDSFGRPNTQFSIRLQNVPIGSNNMPHFRHLETANFLFVDGHVKAFNDGQRDKCEMWNRDASVCP

SEQ ID NO: 956246 - protein, 66 aa, Homo sapiens
ADVGRYTAAPLTNQFVCAPVHGHVQHSTANKSVHCEVHKHVALCVLLLDESQSSSRKISNLCPLLH

SEQ ID NO: 956247 - protein, 190 aa, Homo sapiens
PPIPVPQQAGGAQEGRTSKTTIKHSIALRRMPSHGAHHNSGTNSPGSGFHSSQMLTLGSRNSTLQTLTNLPKVISHGLKNMALPPETVDLLHHSFLKQKQSSLCFLKGQHKGCFGCVETASRISQSPLASDVIVDAGWGGGQRRVLFLLFGLIWPSQAQHPAYLPHCGYASSYAGPFLWLLSLPVQLCTI

SEQ ID NO: 956248 - protein, 94 aa, Homo sapiens
PGKLCGHSQSQHQISFSQFKEQVISTPHQIFSPFHVCQKWSSNAAHVQSYVSPVKHSFNSPVFISSCRQSNIWHSTPSSNIAIIIIIIIAIAII

SEQ ID NO: 956249 - protein, 61 aa, Homo sapiens
  misc_feature (37)..(37): Xaa can be any naturally occurring amino acid
MVSTERYRSVSHNDEKKLQLKTHTHITKEKKNIGKTXEPQHKEDLCVYIVPGEWDIKSSQE

SEQ ID NO: 956250 - protein, 45 aa, Homo sapiens
RLSVQVVSTHPPNLCSSCWKALSACAFTVSSSSWMASSRVHADEP

SEQ ID NO: 956251 - protein, 105 aa, Homo sapiens
KHGFLVDYHGLVHVTLDGDIRRNFGPVVTLPFCRHSFIPIVIYYMPELPLASCTQIPMDFLTLSLACPIRGFPQLRVIGCVFILDFSPSPLSPWGVAGTTPFSLS

SEQ ID NO: 956252 - protein, 37 aa, Homo sapiens
SVRDMWMGARGGLRRHQLPPVLIDRLVLYCGSLAGQI

SEQ ID NO: 956253 - protein, 36 aa, Homo sapiens
NHVVTGTPLPVHQGQTALPPPEAPPYKSNQGEFHYV

SEQ ID NO: 956254 - protein, 34 aa, Homo sapiens
VDRGHEEGCEAISFLLSLIDSAGPLLREPGWANT

SEQ ID NO: 956255 - protein, 75 aa, Homo sapiens
LEDTGALALPDGLLHNEGTRAVDRSDPFPRASGSPGADRTVLPCSPAPRATMSASRVPAGAPGISRPMAAGIARA

SEQ ID NO: 956256 - protein, 105 aa, Homo sapiens
MDLNTAAIQGNRDENLTDSKNEGQHGSTPYHDKMVKMRITHHLTKHQIPHGITQHQSPLIRVIITNIRNLESALNMDSLSRISLGRYTKNTDQRNLVTPVSSDSW

SEQ ID NO: 956257 - protein, 112 aa, Homo sapiens
VCVSIFKIALDIQGCLRFSFFSFLRQSFAVVAQTGEQWHDLGSLQPPPSGFKQFSHLWPSFSQHSKACHFIQFRINILLWLMMNVGEKETFVLHTGLLVIKWLYNFDCWKLC

SEQ ID NO: 956258 - protein, 77 aa, Homo sapiens
VFILLVQSKLATISDSKGKRFMQPDETQGSGGESLTLILSIMSLPTGLMFKTFQNHHMDGYGQDCAALLHNELSSPC

SEQ ID NO: 956259 - protein, 59 aa, Homo sapiens
RSRSRVHTYGELNTASVPVYYETRSSKVLEDSDLKKSDIDYIVLVGALDSNFIDSTPGF

SEQ ID NO: 956260 - protein, 56 aa, Homo sapiens
MSYGTVCICQGNFYSQLTHSANATHLLSPYRSICCWTIGWGPSSSYSCLLIHICWK

SEQ ID NO: 956261 - protein, 62 aa, Homo sapiens
  misc_feature (6)..(6): Xaa can be any naturally occurring amino acid
GLMQLXRSVVLNAQEFSNRAGAFLHSDTSDTHIRIKGRLDNRDGTLASNASHIVVEGQFDNR

SEQ ID NO: 956262 - protein, 119 aa, Homo sapiens
IHNHLYSGVGRLLVCACAISILVGVSGVMNLLLWMYREKAEKSNDGSAAWELISSRHLGLWHSHDNSSRTAKSKISARVSSLESVGIQGAESAQSGAENCYCLQIHDSSDRLEHDLYCI

SEQ ID NO: 956263 - protein, 54 aa, Homo sapiens
LATSLQPSYKMVVFFFIPPRGERRFRKRHITSLWPFKFVFSTRWNEEKDHPFMY

SEQ ID NO: 956264 - protein, 31 aa, Homo sapiens
MEKNALSEIRCMLKMAWLQVDVQSQAIDVEN

SEQ ID NO: 956265 - protein, 36 aa, Homo sapiens
KLNTHYLKTSPNIITLATPTHPIGPIYHPIRTGYER

SEQ ID NO: 956266 - protein, 71 aa, Homo sapiens
RRLKDPIGAGALYDSGHRSSTSYWFDTLLCLSVYLVIDIARGEYGYVIKITVRTTGNNKETNSSSIIAFMG

SEQ ID NO: 956267 - protein, 40 aa, Homo sapiens
STLRIRERSKPVHELNYGKPVTDYRLCERYAMVYGYNAAY

SEQ ID NO: 956268 - protein, 80 aa, Homo sapiens
TLEDLDDVLMLHGVGHAHPLQTVLGAVAPNAWRTINCLASDRWMRWEYLALTCIYTKKRGETPYFTYAIILRIGASVHHV

SEQ ID NO: 956269 - protein, 56 aa, Homo sapiens
ASHDLTAIIFVVASSSYHMVIREDNQTNRLQDALNPFNTIWNNRWLRTISVILKIL

SEQ ID NO: 956270 - protein, 85 aa, Homo sapiens
TQGSALISFDLRDIVDVNQDELMSIVGNDLRRRCAGLKLASRIVGIATANRVQLDDAGVLQSMSDFMRRLSVLRQVALTTLQIDK

SEQ ID NO: 956271 - protein, 64 aa, Homo sapiens
IYRILMFADRLTILYKPQRTLGTLYLLFVCISCEFLVHSSKPPYRAELGQPGNLLGNDHIYNRY

SEQ ID NO: 956272 - protein, 166 aa, Homo sapiens
VPVTLEDQHQHGAERLQIRLRRLTCVAPIFQVMSSNSPSTMGMTPVTHSTVTIQASQDTVRSTTLTVCDVREGHPQHFDRQADHSQRSQHRDNQPKHRQGQHAQEHAPGGQRQQQGQHGKQHPVHDMPAKPDGMRVTLLPTPQAQHQPGQCQTAQQNAGFGQSRAL

SEQ ID NO: 956273 - protein, 72 aa, Homo sapiens
NLEDRFFEHEAELNNVGLPETSSTFGVFYAFVKLKEQECRNIVVDSLRCIAQSPPSPTIDRLHPVSSRRPEP

SEQ ID NO: 956274 - protein, 144 aa, Homo sapiens
KDGRLKRIPCAPPGSVDSHTGNPMKGLSCSSCCSILAVFCHSGHSLVPVFENPNPTADCKTAVNCSSDFDACLITKAGLQVYNKCWKFEHCNFNDVTTRLRENELTYYCCKKDLCNFNEQLENGGTSLSEKTVLLLVTPFLAAA

SEQ ID NO: 956275 - protein, 109 aa, Homo sapiens
ISSPVSLEDSSNFFVTCGSIGRFHYGEDGDKGWLLWEVDTSSAVCTLQRTPARRTVDIVFDGKPDLDTLRDAVARQDVAGAFVRVRWTVADEDRHEVNRQAIQEALGIL

SEQ ID NO: 956276 - protein, 131 aa, Homo sapiens
ALISFDCGVTALDGATGRTVWQGKADVDLTSGPGSDGTLTAVAGEKGTVVAFDEKGAQKWKSTVNGEVLTAPLVGQGLVIVRTTDGRILGLDGSNGDRKWIYQRSPSALNLRSSLPMIFAGDNVILGFAGG

SEQ ID NO: 956277 - protein, 155 aa, Homo sapiens
MHRVRGRLELSHRHLDPPTPHWTLSLRTWLSYTPAVIGMTSPSHVNALLVFWGVHYRKSPVAHGSLPQIVASSLYLRLFPQERNTPLTCSNDSPCPSLFPVLNGPQGEQACSSTTSQLRALLQFFTGERKEGAPAQPGQENKTLSHGCGRLLPAC

SEQ ID NO: 956278 - protein, 47 aa, Homo sapiens
ARYQLGADSLTIEGDWRTLPKQSVDGKAPLATGEEDDDEVPDLVENF

SEQ ID NO: 956279 - protein, 39 aa, Homo sapiens
SARSISIEIETGAIDIVRKGKMKNYNQALYSKDYPYTKL

SEQ ID NO: 956280 - protein, 31 aa, Homo sapiens
TSSSVRLVHFVHVWKIICKRAVLQRLHSSQE

SEQ ID NO: 956281 - protein, 41 aa, Homo sapiens
IAASLSEYGSQGCDELTLAMTDLEIRSKPEEDVGYLKKNHE

SEQ ID NO: 956282 - protein, 180 aa, Homo sapiens
GWCAARRGTSLADKDMMAKDSKFKMPKFKMPSFGVSAPGKSMEASVDVTAPKVEADVSLPSMQGDLKATDLSVQPPSADLGVQAGQVDVKLPEGPVPEGASLKGHLPKVQMPSFKMPKVDLKGPQIDVKGPKLDLKGPKAEVTAPDVKMSLSSMEVDVQAPRAKLDGVQLEGDLSPADKD

SEQ ID NO: 956283 - protein, 44 aa, Homo sapiens
LMLKATLEVSPPGCFHAELGLQLYLQACSPSSVMKASLEGKLAE

SEQ ID NO: 956284 - protein, 36 aa, Homo sapiens
SSSMRIPSPDRSHFPAYVWYLICIRIPPIVSQDHAS

SEQ ID NO: 956285 - protein, 71 aa, Homo sapiens
HAAWLCSTQDQVEFSIFHLFVVTLINHQICASHPAELVPIRVSSVFIEGHPHMLASDFIFCFPEDDLLSEA

SEQ ID NO: 956286 - protein, 68 aa, Homo sapiens
LDVNEARHLSASCKESGSVRGLWQWDRKSHPDNAQRARHIYGTDNHIIGFGATLPTGLDALIRYTGCQ

SEQ ID NO: 956287 - protein, 38 aa, Homo sapiens
VYHMMSKKDIIPTTFSADEQLERLYAVTKISMVLRKMR

SEQ ID NO: 956288 - protein, 40 aa, Homo sapiens
MVGQDHVLGKGSFLFCDQRILRTPTALLCSPIFFPLCFED

SEQ ID NO: 956289 - protein, 92 aa, Homo sapiens
TLEDPPVCALQPRLGMVQASTHSHRAAIGSGAGMRQSLETGVAPPLVGFRVTVQAGSSSCGPVSLLQETAHFQLTPRVNHRISRKVRYSQGC

SEQ ID NO: 956290 - protein, 93 aa, Homo sapiens
SFPAWASLSSNGLIHALGTLSKRSRPQNLKGENISPSSDFFFGWGEELVLLGSRPHSAPWGQLVVRLPFLAEILFLCAPVSPRTGTNTHLKAV

SEQ ID NO: 956291 - protein, 75 aa, Homo sapiens
TTLICDIITIITHLLVAFAENEALDKFLSNSEVCGGNSKMSSGHKGYKVSQLPQQSLTKLLNLRVTGIGYVKTGW

SEQ ID NO: 956292 - protein, 93 aa, Homo sapiens
MEVSSLDNEKITMQNLTDRLDSYLDKVRALEEANAALEVTLHEWYQKQNQNSPEMRLQTILSRTLKSSEEKIMDNKQRQIQSHPGRSHNARMD

SEQ ID NO: 956293 - protein, 104 aa, Homo sapiens
MSAEINVIYTSSQSGRQKHHQHTLKSGMGYTSNTRAVYYYGIPSLAFPVFTLANPILYFRVRKFQKRSRPYQTTSLGIPASLCCSYGRTCTYSIALPINLYIQS

SEQ ID NO: 956294 - protein, 38 aa, Homo sapiens
PLPLSGKSLDQHSHKLSPQIVLPCQGPTTTFEWMIDWS

SEQ ID NO: 956295 - protein, 92 aa, Homo sapiens
PLHYLRLLHSLLPMWPQTFLSNAYYGHMSLLRTHQLSMCCATAKFLLALVPLAAVLLFRGRTQKVVVVQGRHKSESGYTYGSKAESKAAIVH

SEQ ID NO: 956296 - protein, 82 aa, Homo sapiens
GSPKSPPYPPNLTKKMNKIVYAVIKYKDSSGRQLSEVFIQTALDERSCPSYYESHPKDPMDFKEDNRSDFRNTQRTDSTQAT

SEQ ID NO: 956297 - protein, 150 aa, Homo sapiens
TISALHAPKTHITHHLLSLIHDSHPRGAGALSLLPCGRLTLTWQRAGCGPDPGHGARGRPGLQGMEPSSKWAAVVVPSGQEQRYTCHVQHEGLPKPLNLRWEPSSQSTIPIEGIIAGLVPFGAVITGAVVAAVIVEGGRGTNKKGGSYTQ

SEQ ID NO: 956298 - protein, 37 aa, Homo sapiens
HISDLLSNTRAGGDNTPTKSAAVSTLDRRMHGLLITS

SEQ ID NO: 956299 - protein, 133 aa, Homo sapiens
LSSPHYISVLLFNITRLNLYFKDTDSWNKFKKQIQLYSAYETFALLIKTLYRLKVKGYKNIFHAPKNQTQAEIAILISDKTDFTSTVVKKRKSLCNNTATNAPRKYHNPKYIWTHHCSTQIHKTSIAKPKRKI

SEQ ID NO: 956300 - protein, 57 aa, Homo sapiens
DTPLPPVVVHGHSNTNSKETYECKECGEAFNSPNLFHTPSKNSHWKGGPINVGKIVR

SEQ ID NO: 956301 - protein, 35 aa, Homo sapiens
MIGVESCLVVECRARAFLILRAKAYNHCAHHKGIG

SEQ ID NO: 956302 - protein, 33 aa, Homo sapiens
YRRSAGAAAAGAVSARACRSRSASPARRDRAMS

SEQ ID NO: 956303 - protein, 35 aa, Homo sapiens
LELGTMLLSSFYMNSRFQRILKAIQISTCRIHKKS

SEQ ID NO: 956304 - protein, 128 aa, Homo sapiens
  misc_feature (84)..(85): Xaa can be any naturally occurring amino acid
SVASIPLLLHIDSSNKYCACSPLAVPWFRCSPLLYQCSLVLQLYIGDIFSCPALRLGSAPMSSRPRFLMHVRYFMICVIVSPIXXNKLQLHRVFSSCCVMPASSRAGQFHWLKVKRQLNPRGAIHTGP

SEQ ID NO: 956305 - protein, 88 aa, Homo sapiens
MQADFVLFIHQRHLCYRLQVNSVLMQSCVCKHLVPDRRVLSWRYGSVVKYSVVCPYAQCRNPRLLGRSSSICFSLTYTTSSHKTVTSR

SEQ ID NO: 956306 - protein, 53 aa, Homo sapiens
LILNPRETQCTSIGPHQRTGSTDPIQVILALGDYMVSHLFMPVIECEQDVSEM

SEQ ID NO: 956307 - protein, 41 aa, Homo sapiens
VVKLRMAWERSHISTTKNSISAGKAGASCFCLLLQNGCFLL

SEQ ID NO: 956308 - protein, 55 aa, Homo sapiens
RSTDAAVDSKYPHVRIKDLTALDKYQVYTHMNLLKEIVTRTLPFTLYINNYLHTA

SEQ ID NO: 956309 - protein, 56 aa, Homo sapiens
MRGRSRKRQRQKQEAFYSRRCQKSYHRVLGEEQKQEANIESYFMQTFIYFSLKVKV

SEQ ID NO: 956310 - protein, 83 aa, Homo sapiens
MHYYKPEFIQDVFKGSVMKKCSSKNLFDGGHSPFPVVKIDTYNAAIAYTILSQDPELPDKNMFTINRNTGVISVVTTGLDRES

SEQ ID NO: 956311 - protein, 37 aa, Homo sapiens
RYLITTPVTHCKIKKPFTFERDVGVFIGMVAQQIKQT

SEQ ID NO: 956312 - protein, 51 aa, Homo sapiens
PDPYKTCTQAEAGSSRSRKQAEAGSASCFCRFLLLPLLCCFLLLPQWSCVR

SEQ ID NO: 956313 - protein, 35 aa, Homo sapiens
MHITYRDQTRSGRSQGGMAVDGRGRKASMLLPLTK

SEQ ID NO: 956314 - protein, 131 aa, Homo sapiens
MRAGWTRQQQVSHNAPHGAKTCVHYSLHFFAYSLLCGINILLKTSKRPKDTPVNISDKKKRKLLCLSIAQKVKLLEKLDSGVSVKHLTEEYGVGMTTIYDLKKQKDKLLKFYAESDEQILMKNRKTLHKAK

SEQ ID NO: 956315 - protein, 44 aa, Homo sapiens
SQDLTASSEDLVVCYVWPSSMYLSLVAATVIDSGQTLTPRGMSY

SEQ ID NO: 956316 - protein, 37 aa, Homo sapiens
SYCYFQGLGERVYSAGFQQKFNNFNMTLCSSYMECCS

SEQ ID NO: 956317 - protein, 104 aa, Homo sapiens
AARVMTDGSQPRSTRVKEELVPFLLKLFQSIEKEGILPNSFYEASIILIPKPGRDTTKKENFRPISLMNIDAKILSKILANRIQQHIKKLIHHDQVGFVPGMQG

SEQ ID NO: 956318 - protein, 39 aa, Homo sapiens
GRTVYLLNPRIFFLVSLQRHKLINKASRSFIFSIALNLE

SEQ ID NO: 956319 - protein, 71 aa, Homo sapiens
SASRVFGVYILPLLEEVDAAMNAKLTQCGWKSCATRKGELSPDKILKDHVPTDCEKDILLVALKKTLKNIT

SEQ ID NO: 956320 - protein, 167 aa, Homo sapiens
MTRGELHPVASSSSKSISSTRFDSNDVIACCFSSEMYRFVIEGKVYAAIPASVLAEARVNATTVIPTFLAIRALSSTCSVSPLRETVNEHLIAGGVAEKNVPAVPRPGDKCRFAQHLQFLGQVLGKQIGKPGTVEKKALFLAQQVGKLLAFVLGDPLKSLLIVGDEL

SEQ ID NO: 956321 - protein, 211 aa, Homo sapiens
PGSARDEGLRRQQQHHAGELLCAIAASLSLKLDTSFKILDRVTIQELTAPLLTTAQAKPGETQEEETNSGEEPFIETPRQDGVSRRFIPPARMMSTESANSFTLIGEASDGGTMENLSRRLKVTGDLFDIMSGQTDVDHPLCEECTDTLLDQLDTQLNVTENECQNYKRCLEILEQMNEDDSEQLQMELKELALEEERLIQELEDVEKNAR

SEQ ID NO: 956322 - protein, 39 aa, Homo sapiens
EYSTHRRPDSSLQLRYAFKLNTHYLKNPKHITELLSTTW

SEQ ID NO: 956323 - protein, 35 aa, Homo sapiens
DQHNLIFFNGFICFQHNLGTTSAQPQHNPSTNWGD

SEQ ID NO: 956324 - protein, 52 aa, Homo sapiens
SKQEHQQAAYIGVSKEGPYKADHYRYKPYLPADIPRRRRYHRGLLHETARLL

SEQ ID NO: 956325 - protein, 30 aa, Homo sapiens
MRRLILFSIVVVCCRLSVERPVRVDSNHVI

SEQ ID NO: 956326 - protein, 120 aa, Homo sapiens
SRSIAYWSNKGPADVRLKLELLSSPETSTQLAVVTMSRRCELRGELPRTGKTRRIRSSTPYVSRSCPMAGGDAPLNRRVFGLHKPRDGASSRRANSSCSASGLDAEPETSSPGASMDLTT

SEQ ID NO: 956327 - protein, 57 aa, Homo sapiens
RNYYLRGITICAVPKPLMVIFELSSAQAPDTAADITNKAIKGFNFMLSPRKFLHFIP

SEQ ID NO: 956328 - protein, 36 aa, Homo sapiens
SIRSVDDHTSNASSLVISTGTLFWMLRKTGPSVLMA

SEQ ID NO: 956329 - protein, 54 aa, Homo sapiens
MGQASESCCRMTCVTSSTRWTDLQVPPTYRYAESSMKNSFGLKYLHKFFNIPFL

SEQ ID NO: 956330 - protein, 120 aa, Homo sapiens
DEAVVQDSAQYLSCRSSRPSDAKVIIGLDTGIARLLGVVKFWVDPSALCNLSCRSAGVFHTPLYSGFCITGGTQSPSISSSQTSGYLSIRVRDMLGLVPVLRLGVCGIIDLGPLIPVFRF

SEQ ID NO: 956331 - protein, 218 aa, Homo sapiens
QETLSCGEDLREKETEEAEHGLGEPMDGLGTKQEGVLCVPGRGAKLQRGVCTTYTHRARGSSRDEVLEQTLCSVVPSVPGTGSSETGARRADVQRALWYAGRDRCATDVWCTDLAPCPTVYSCMEVTRAAVKHHSHVVGPFRRDHLRWHHCSTQVEPYLQWVLHSPHAEELIPSLKLIRTDIGQARIQPNVLFILREAPKSNSELELLRHWWVTFSTL

SEQ ID NO: 956332 - protein, 35 aa, Homo sapiens
GSGDSSDSVTRLFQVSDYLASTAIWTISKAPYNSR

SEQ ID NO: 956333 - protein, 33 aa, Homo sapiens
LRSRAGVCEPVLALAVRLDLCVSGWGSLPLGPT

SEQ ID NO: 956334 - protein, 34 aa, Homo sapiens
ITECDNVKYSPVHGHTLQPDMQNSKNKTLAHWDQ

SEQ ID NO: 956335 - protein, 42 aa, Homo sapiens
CCTHARLVLGCLLTLLISTAESILQKEQFPQPFCYWWTLVFQ

SEQ ID NO: 956336 - protein, 69 aa, Homo sapiens
MVRNVTDLTGDNNRIVITETTCKNKSVGILVSLVLRSVLSRLSNTFPKVGLSSGEKLKSKNLSPPGFRV

SEQ ID NO: 956337 - protein, 36 aa, Homo sapiens
GTSPVPDGSVWERRYHMSGVLVRQHNLWTAQAGDRH

SEQ ID NO: 956338 - protein, 80 aa, Homo sapiens
SSIIPSRRCVEVCACQKGHLRSRGGSRRRRHSHSGLICVLPTTKPIGPVIDVSDSRVGMKVKVWVYFTGYITREMIWDTA

SEQ ID NO: 956339 - protein, 67 aa, Homo sapiens
  misc_feature (6)..(6): Xaa can be any naturally occurring amino acid
VRSDDXENLPHTFYNELRVAPEEHPWLLTRPPETQEATGEDDQIMFENFTTQTLYVAIQAVLILVRL

SEQ ID NO: 956340 - protein, 39 aa, Homo sapiens
MDSSAADSLNPFGINAASVGSVLFNSPEMQALLQQISEN

SEQ ID NO: 956341 - protein, 44 aa, Homo sapiens
TSVENESMTRCGFHLAELSALGTPGTVPPAGVAVVHVVRAEPYR

SEQ ID NO: 956342 - protein, 33 aa, Homo sapiens
MVCSAYSVCQRYCLPALGPGSWCRGSRSSQFVT

SEQ ID NO: 956343 - protein, 44 aa, Homo sapiens
MNEEENRFERCFIFGAVWALKMRSLFTGFAARGVRTSYHRVLVT

SEQ ID NO: 956344 - protein, 37 aa, Homo sapiens
YSSLSRVCSDDVDYGLARSSTLWSDRLPTRMSRVEVL

SEQ ID NO: 956345 - protein, 87 aa, Homo sapiens
MDPGRSDMTSRASELSPGRSVTAGIGPTHDDVTFEAVAQAFGDELKPHPKLEAATKALGGEGWEKLSLVPSSARLHYGTDPCTGPSG

SEQ ID NO: 956346 - protein, 35 aa, Homo sapiens
GTILNQPDFSSNDISTMCGGVIMLGPLHLQSWSER

SEQ ID NO: 956347 - protein, 35 aa, Homo sapiens
DLSEAENRFERCFIFGAVWALKMRSCFLVCSGTGL

SEQ ID NO: 956348 - protein, 53 aa, Homo sapiens
GDTCFCPSQDLFNYSTLLYSLLAKSTFDPSSFSTGYRSFLGAEAVKRGSIQNV

SEQ ID NO: 956349 - protein, 32 aa, Homo sapiens
MRSRSSCLSSRRNGRVARRISLIFIRRNKRRM

SEQ ID NO: 956350 - protein, 39 aa, Homo sapiens
LLLLSAIAATDGTVPLQWRSSWSPPGHTDCFLLLPLTKY

SEQ ID NO: 956351 - protein, 73 aa, Homo sapiens
AEVTLDDPGPLGRGSEEHHVFKIGDRNCRRMSYYCSGSSDAPKFTCSPKCKQAKSISHEGALPLQNGLVQHRE

SEQ ID NO: 956352 - protein, 42 aa, Homo sapiens
ERSCFLLLPSCFCCFLLLPDCPLTGCVLSTVPKSNSQWSCVS

SEQ ID NO: 956353 - protein, 105 aa, Homo sapiens
MSLPVWYACAFMILSMLPDHPYVAGHQSTRRFCQALRHHSLFNLVLKGFIFHPIQQRLKFFLNCFTTLLSFLTFIELHSFLGNIRGTSSHQIREGPEYSIHPQVL

SEQ ID NO: 956354 - protein, 87 aa, Homo sapiens
ESSIDTINVRIESDNCILKMDYISSHLEDPHTVGSLFPFIVASQSTIYVSILLPFFREAQGPLCYKDILGHVKLLVVQPHTVHFQGL

SEQ ID NO: 956355 - protein, 66 aa, Homo sapiens
DLDISCKHPATHCTSGTIILKRLFLFQQHHRYHAVSVNSAEFLSNGNSNLCPCLFPVLFPKLLTWQ

SEQ ID NO: 956356 - protein, 34 aa, Homo sapiens
PEEGVLGQSCAAENLEMLKRVSGCHIRSYTLDQY

SEQ ID NO: 956357 - protein, 124 aa, Homo sapiens
LFLLVRRARAVACVVLCTSEPVVVVCVLLRLKLGSSAVWRLTSVSSVDFLQTCSVWPVTPERSRFMKSHDLRRPCEETVLLLGRLTLVARNEQPNQILREPPVILCTISLLPASCFCLRMLLLR

SEQ ID NO: 956358 - protein, 35 aa, Homo sapiens
GHQTAVKWIERTQGSAEHVRSSSQVCITGWRIGRS

SEQ ID NO: 956359 - protein, 34 aa, Homo sapiens
TLVCEHPALSTAFLLTINKEDDEFRGVYWVADMS

SEQ ID NO: 956360 - protein, 49 aa, Homo sapiens
DLEDPGRSDHGNPELTQDYLRIQKDPVPYICALSPSLRIFSSGTMSSER

SEQ ID NO: 956361 - protein, 67 aa, Homo sapiens
PRVPGRSDDRDGEKFAAWVTSINWSQLIADVKEFFQELDKGVQALGGWKVVLMALLGLKIISMVVRA

SEQ ID NO: 956362 - protein, 37 aa, Homo sapiens
  misc_feature (16)..(16): Xaa can be any naturally occurring amino acid
RGYPMPVSPLSFFTQXTQHTPAGVTLRLLMLPYAPLT

SEQ ID NO: 956363 - protein, 50 aa, Homo sapiens
RCIIQEQAPYTRTQTLRELGSRLAALAPAWLWANQPGTKSDFPDIAMRDF

SEQ ID NO: 956364 - protein, 47 aa, Homo sapiens
RIPLRGDSLISQCRVCASKASGCKAILSGKKWLWLIPGVDDGTGRIR

SEQ ID NO: 956365 - protein, 39 aa, Homo sapiens
MDNFEELLKVLGVNCDAEEDCCGCSVKPSSGDQQEGDTF

SEQ ID NO: 956366 - protein, 63 aa, Homo sapiens
PDYLHATAYRNTALGRPIEGPTANITVYTSEGFSGFYYHTFYRGQEYCLLLLELLPMRRNERF

SEQ ID NO: 956367 - protein, 90 aa, Homo sapiens
WVTLDYPKSLIAGDVIAECCPGVVMPRSLLLEMALRQIRVRDSRVWGEDFRSRSNWKWFQEKPLSFSHTRPYRKPTQVGEMSILRRNERL

SEQ ID NO: 956368 - protein, 45 aa, Homo sapiens
MTTRTCGSFSGICAIARLLYDYVFDWNMLKFGASRAADYADAGGT

SEQ ID NO: 956369 - protein, 118 aa, Homo sapiens
LPDEAGAAPPKLTDLRLLYIGFYGLLAPACLDNLIRRRPIATVVCIASFYIYRALFLAGYNLVKGEDYLYAVRDREMLAHMKLHPENFPEEDKKTYGEIFEKFHPITLKSSKCLLQFH

SEQ ID NO: 956370 - protein, 43 aa, Homo sapiens
MAPFSPSGLPQFSVCTSICSLNPPKHLHLRRCQPLHTGPAART

SEQ ID NO: 956371 - protein, 36 aa, Homo sapiens
GKSAVGGRRNENLVITGNNQPIVFQQGTTKLSVEIE

SEQ ID NO: 956372 - protein, 57 aa, Homo sapiens
LTTYSMLVGNTALLVMLIEFQGEAEVDRVGLELPSTTREVLVLTLFVLVWVYGVPTL

SEQ ID NO: 956373 - protein, 66 aa, Homo sapiens
  misc_feature (54)..(54): Xaa can be any naturally occurring amino acid
MIATALGVCCTLCGARLPQHPPGQEIWDAWMLEYMCSQRVTPQTPPGSHIMSPXSSARKTAKMENI

SEQ ID NO: 956374 - protein, 34 aa, Homo sapiens
  misc_feature (7)..(7): Xaa can be any naturally occurring amino acid
LSVGHTXHLHHHTHTHTHTHTQTDPAASLEHPEV

SEQ ID NO: 956375 - protein, 44 aa, Homo sapiens
MTVMLMVSMLMLVMMVLLMLVMMVVVKVVMDSDDGEVMMVMSGD

SEQ ID NO: 956376 - protein, 42 aa, Homo sapiens
GGRQRTDGPWAGGRHSTLGTTYSCVGVFKNGRVEIITTSHAT

SEQ ID NO: 956377 - protein, 75 aa, Homo sapiens
  misc_feature (59)..(59): Xaa can be any naturally occurring amino acid
  misc_feature (66)..(66): Xaa can be any naturally occurring amino acid
  misc_feature (75)..(75): Xaa can be any naturally occurring amino acid
SISTLGKEVYIKNGDKKGSCERDAQYAPGYDKVKDIQKVVTPSVPLVLRGVESLMLDPXILAEVIXGGPLDSSQX

SEQ ID NO: 956378 - protein, 45 aa, Homo sapiens
MGKFRKQQNRTAVGHRNPLVCHHLLHLGAANIQETLNQVIVIGFD

SEQ ID NO: 956379 - protein, 84 aa, Homo sapiens
GSWQRRVALQCGIVVCSWGGPMEGRMVWLVACGKENMTAALQADLKNPPMSHAKSQPEAPTEEVDSTSRRWHSPEAVDRWTAQR

SEQ ID NO: 956380 - protein, 105 aa, Homo sapiens
VGSYGSVTVTLLLLLIHGDTPRPRPPPRATRRASPRATRRALNEPTMRHAKSHTTRHTTSRLFAWHLEWLFARLFVPVFSLEMEFTTRNVPHQEPRHEPPNEPGT

SEQ ID NO: 956381 - protein, 66 aa, Homo sapiens
AVVVYLYKGFDDHVCPINFRGSRRAYHGDQIGQTIRKARRLPSKGDRADVEMETLTQQDHYSEEID

SEQ ID NO: 956382 - protein, 43 aa, Homo sapiens
YQTREAAVSLERSGVAFRMAGTSLVNARTSLRLELLFKSSLRL

SEQ ID NO: 956383 - protein, 45 aa, Homo sapiens
LEDSRAWGTDCQRPVSKYSQAVPAVYRGAHSQSSHTTSRTKSLTM

SEQ ID NO: 956384 - protein, 56 aa, Homo sapiens
TSRRSRLIGWLLVWLIGGLVVWLIVWHLAGLLVLVAIFPIFLLDDILQVVVNLCPH

SEQ ID NO: 956385 - protein, 49 aa, Homo sapiens
TIEHTVTDMTCEQQHPGWHGAGVYLMGTDGHPFGGASNGFPGPQAPYYC

SEQ ID NO: 956386 - protein, 51 aa, Homo sapiens
SYDLYVGPLRTSTGATQMSHPKSHPKSHPKSLADVPPQEPHDEPPKEPPKE

SEQ ID NO: 956387 - protein, 50 aa, Homo sapiens
  misc_feature (46)..(46): Xaa can be any naturally occurring amino acid
LKEMKPVEPEFELERPGILKLVPGSPSCLRLVAPQFPCPRPPPFLXHLRL

SEQ ID NO: 956388 - protein, 47 aa, Homo sapiens
GLVGGSVAAGCIACHQAHPTLAAQPPSQSVCHVLCTACCCPQQSLHF

SEQ ID NO: 956389 - protein, 104 aa, Homo sapiens
PQRGEDECCWCMRVFFAAAYMSTSLGERSTCCAFRDRFISSRPLRLSERPMRISERETVTLQQVLRKASGRESPCPRFWGMILLVALKELNDVPHIDWFDFHRG

SEQ ID NO: 956390 - protein, 152 aa, Homo sapiens
RIPREERTWLTGASEFPAQQHPCQHHCESGARSLPFKTVSSLTGPRGFQSGATRIYERELSLCSRCSGKLLVKSRSVPGSGASYCWLISKQLNDAPHIAWFDFHTGQGDMKCALRRAYWLPNVFEDRVAIFVLYAFQTQRGAASMIMTFLVN

SEQ ID NO: 956391 - protein, 40 aa, Homo sapiens
GSLCGLVVALREALCVALSVAPGGARDEPPLSSHTKRPPT

SEQ ID NO: 956392 - protein, 71 aa, Homo sapiens
TKNGMHHHAHTRSHTTGHTKSHPKSPAMSTLGARNEAQRATLRALPMSRTTSHAEEPHKEPRKGPPHEPHY

SEQ ID NO: 956393 - protein, 53 aa, Homo sapiens
MLFSSIFVIRAAVLNEDAVRSTPGAASISTLISPPTRRHTTSHTKSHTKSPTM

SEQ ID NO: 956394 - protein, 98 aa, Homo sapiens
HCVTLVWLHSGGLREALRVAHRLARGCGLLAWHVERPMVWHVRGAPSGRMGWHVGRLFVWLLGWLMVGLFGWRMVGPIVWLLGCSLVSCESAVFGVCT

SEQ ID NO: 956395 - protein, 90 aa, Homo sapiens
DSRGSPAVVALGVAHGVCSVVWLIGGLSGGAYRVDLRVAPGRGSLRDSRGWLFATLGGALCVALGVALCVAHWVAHWVGSLGGIFVCRIC

SEQ ID NO: 956396 - protein, 56 aa, Homo sapiens
GDSTNSALSVLVEMRHEIRKVSEHERDARSGKFHHVTSCDKSQSTRHTTVYAATLR

SEQ ID NO: 956397 - protein, 40 aa, Homo sapiens
MAHCGDSVELEHQVYTVLSPAPPSSVLSTSSVLSTSSVLS

SEQ ID NO: 956398 - protein, 35 aa, Homo sapiens
EYRNRRSPWAVSTQVTGRWTLVCHMLPSSVPSSVL

SEQ ID NO: 956399 - protein, 84 aa, Homo sapiens
WTAQRVDSTEELDSTEEVDITEEVDSTEEVDRTEEVDRTEEVDSQEGWVGYSEAKQGRSGCSSPWLLPSFRDSQSWAQPWIWQC

SEQ ID NO: 956400 - protein, 39 aa, Homo sapiens
TEEAVVGLVGMLARELAYRRAALQLGGAPVRSETSASVL

SEQ ID NO: 956401 - protein, 53 aa, Homo sapiens
VTARELNGGFLNPDLASYVLSTSSVLSTSSVLSTPRAVHPSVLSTSSVLSSCP

SEQ ID NO: 956402 - protein, 47 aa, Homo sapiens
MALLQGDDVWSSQKMLRVWLVVVVSQGNVLQALSVLSSPLCCPPPLC

SEQ ID NO: 956403 - protein, 43 aa, Homo sapiens
MAAESSKAETEVAGGTVSVAEGGVIPLQLLLPGCVLGVALLPL

SEQ ID NO: 956404 - protein, 35 aa, Homo sapiens
RYSHTELWLQGLPPLCCPPPLCLLCASSVLSTSSV

SEQ ID NO: 956405 - protein, 35 aa, Homo sapiens
PPVLSLLSAVHLLCAASAVLSTFSVLSTPLALLCA

SEQ ID NO: 956406 - protein, 43 aa, Homo sapiens
TEEDRGVHNAVVHWLTEEGGGMYHKRGGGFAEVTGWVGVLLCA

SEQ ID NO: 956407 - protein, 43 aa, Homo sapiens
CEPGVDTSPGTCETLSTSSVLSTSSVLSTSSVLSSCPPPLCCP

SEQ ID NO: 956408 - protein, 74 aa, Homo sapiens
DRGGASSWVDVLSVCSDYYVPVSQLPRSSWPPRLSTSSVLSTSSVLSTSSVLSTSSVLSTSSASSVLSTSSVLY

SEQ ID NO: 956409 - protein, 36 aa, Homo sapiens
SSEAEKLESYLEGECVEWLRRYLENGKDKLERADPP

SEQ ID NO: 956410 - protein, 33 aa, Homo sapiens
PNQTAVYFCATSEQGEGPYTGELFFGEGSRLTV

SEQ ID NO: 956411 - protein, 30 aa, Homo sapiens
LPPKHLCYFCASSDSTTGELFFGEGSRLTV

SEQ ID NO: 956412 - protein, 33 aa, Homo sapiens
MSTLLCAVHLSTSSVLSTSSVLSILLCAVPSVG

SEQ ID NO: 956413 - protein, 38 aa, Homo sapiens
QNYYVCPPSVQYHSSVLSNCPASVLSTSSVLSTSSVLS

SEQ ID NO: 956414 - protein, 37 aa, Homo sapiens
LRRSTLAAHSTLRKVALCLTRQEAAAVLHGNVKRSPQ

SEQ ID NO: 956415 - protein, 33 aa, Homo sapiens
IGSPHRNPNEGLVDGWDDPRLPTVRGVLRRGFD

SEQ ID NO: 956416 - protein, 35 aa, Homo sapiens
LGPCGEGDVRRGDVEKVSSQNKLVSFSLDQQGLLD

SEQ ID NO: 956417 - protein, 44 aa, Homo sapiens
  misc_feature (2)..(2): Xaa can be any naturally occurring amino acid
  misc_feature (22)..(22): Xaa can be any naturally occurring amino acid
TXEDPLIKPYRTFVGRSSKPYXCVNNPTLGEFCFTIGFDDQGLM

SEQ ID NO: 956418 - protein, 60 aa, Homo sapiens
MQWSYPTPGGDSRGQVERGDWRFTDLQSTNKRSTHYSRMRALPLNDKDHLPYKPTTDHDF

SEQ ID NO: 956419 - protein, 35 aa, Homo sapiens
SSNPVIKPCHRNPIQGGHYSQFTRVFGGPSYIASL

SEQ ID NO: 956420 - protein, 45 aa, Homo sapiens
WDPRAIKPFIEAIEEGPPNTPLMAVVVYLEGFDEGLMTGFDEGFD

SEQ ID NO: 956421 - protein, 35 aa, Homo sapiens
  misc_feature (22)..(22): Xaa can be any naturally occurring amino acid
DSLGSPHRNPKSLIASSETLTXFHFGLQSSRLGFD

SEQ ID NO: 956422 - protein, 39 aa, Homo sapiens
GSPNQPVIKPFINPKSLIVLSNPSSNPETRIQVDHYSQG

SEQ ID NO: 956423 - protein, 57 aa, Homo sapiens
IPKPNYQALDCSPTNRVSMCHRNPLGAFWGILVQKGQIFERFPHTTSKNNHFTIGFD

SEQ ID NO: 956424 - protein, 67 aa, Homo sapiens
MYCPSFYRLEVLGAHRVRILQQGLELVVLGDGDDLQNCAELGENLVQHIQGHRLEDDLHDDTPLCVW

SEQ ID NO: 956425 - protein, 47 aa, Homo sapiens
VQDIDFTEDGGHVDPYLEFGSSMWDDERDFACNCCYCTVNWLYCTTV

SEQ ID NO: 956426 - protein, 86 aa, Homo sapiens
NPASRTGQDDSAYSLEQAMILVNGLKPHCGGAETPWETESSHPTHHPPGKYPGLVGSSHEGNEGRDSLDSQSGRRKTQSPVSQNTL

SEQ ID NO: 956427 - protein, 63 aa, Homo sapiens
EYVALCEINQLNLVDRAVLNLALSPSGKHLLISISEMQCVKVKCASSRGNLLNDMSPLCVWGT

SEQ ID NO: 956428 - protein, 127 aa, Homo sapiens
CAYSAGLNPNIDALQMALVYAQGMFENAQGIDIRSSYLNELLQKLRQLAYTADDVLDELVYFRIQDALEGTYHATAFMIQAAIDGLVVHVPHIAKDVASTLKLPSCSCAASSGDLDERENGGTQGCL

SEQ ID NO: 956429 - protein, 104 aa, Homo sapiens
EDYKRREEHSPLYLQDCWFFLLTPVVLLHGTLQTPWRCQVDHLLGPSRSRECAKRLPRLPWPSPPPRSPESSCCANERDHIILSAFANAERDHNLIVTTTLHLN

SEQ ID NO: 956430 - protein, 62 aa, Homo sapiens
MVRSWLEVDALLASESLIKQISESSAQSLHKSRKVPFPASHTTENMCGQTEDECDSPLFSDR

SEQ ID NO: 956431 - protein, 121 aa, Homo sapiens
TAGSEEVALLSLGDVDRQKGTAALHMPGTHQGQLLYTFCKKEEDLECTIMNGFACRKGGEVKKKMEVEMTDSIRKLSCTEKHIKALGGRYQIQILSPGHIGISSGGCGPSSESKTIISSLA

SEQ ID NO: 956432 - protein, 47 aa, Homo sapiens
MFTGAVAYSQTQRGEATERSSSSNDHEVILNSYLRHAELKTCSFPDS

SEQ ID NO: 956433 - protein, 36 aa, Homo sapiens
RYQCTTKRTEKCRTSALHREHGCLWVPQLTTPPFST

SEQ ID NO: 956434 - protein, 119 aa, Homo sapiens
MCEEMNGTVISARGDPAAAPMEEINELNLQIHEAELAEVENAKCQNSKLEAAVAQSEQQGEAVPSVMPAVRLAELECAPCRKAKQDMACLDQEYQEVMNSKLGLDIEIATYRRLLGLQG

SEQ ID NO: 956435 - protein, 31 aa, Homo sapiens
ASTNQTSMYLCASSPGPGVRVHLRFGDQVNR

SEQ ID NO: 956436 - protein, 101 aa, Homo sapiens
LDFKADIWSCGITAIELSMCEPQTLDSTPCAVCSVIPMNRPTTLQGSNSNAFKEFVEGCLNKDPPFRATGKGAPEAQVHHTLNQEDLLPHGRLIDCLDYKG

SEQ ID NO: 956437 - protein, 33 aa, Homo sapiens
ASTNQTSMYLCASSSRGRGRSEAFFGQGTRLTV

SEQ ID NO: 956438 - protein, 124 aa, Homo sapiens
  misc_feature (70)..(70): Xaa can be any naturally occurring amino acid
TCAVVTLDYPSLLSKQSLLALIWPVLCTRSSSIGPPRCLRGDHVAADGRRHCATLGSAQYSMTCSQPRTXSAMPITCSPMEAIVQRPRGAGGPGKAEGDRAVGAERIPSAGDGTYTFAECTFAP

SEQ ID NO: 956439 - protein, 32 aa, Homo sapiens
ASTNQTSMYLCASTDRGNIQPQHFGDGTRLSI

SEQ ID NO: 956440 - protein, 31 aa, Homo sapiens
ASTNQTSMYLCASSGGSRKEQYFGPGTRLTV

SEQ ID NO: 956441 - protein, 81 aa, Homo sapiens
PSRRVAINAYVFARCNSASTVVTVKRNIRRCVEVAKRIAERLTHPFEPFVNSNKQPKSKSTFVELPPSNDEKKPFFCGACS

SEQ ID NO: 956442 - protein, 35 aa, Homo sapiens
ASTNQTSMYLCATTAAGGPSGDNEQFFGPGTRLTV

SEQ ID NO: 956443 - protein, 84 aa, Homo sapiens
AAVSRGPGRSDNTTSSTRSDEETPFYTNTYSDFSVTREVYILYSTRLREEFFPLLVTYYFGKKRTIWIHRYGPSGTLNRRLLIS

SEQ ID NO: 956444 - protein, 33 aa, Homo sapiens
ASTNQTSMYLCASRNLQGLNEKLFFGSGTQLSV

SEQ ID NO: 956445 - protein, 32 aa, Homo sapiens
ASTNQTSMYLCASSLTSAAGELFFGEGSRLTV

SEQ ID NO: 956446 - protein, 41 aa, Homo sapiens
  misc_feature (32)..(32): Xaa can be any naturally occurring amino acid
DEKSIRGEDMSDIYGSKAGFLAMKKTNRKQMXITDLWMVRA

SEQ ID NO: 956447 - protein, 34 aa, Homo sapiens
ASTNQTSMYLCASSALAWREDGELFFGEGSRLTV

SEQ ID NO: 956448 - protein, 31 aa, Homo sapiens
ASTNQTSMYLCASCYVWGYEQFFGPGTRLTV

SEQ ID NO: 956449 - protein, 33 aa, Homo sapiens
PAPTRHLCTSVPAVTRTGRKDEQYFGPGTRLTV

SEQ ID NO: 956450 - protein, 57 aa, Homo sapiens
GSSVRSRNRDLWEQLDALKADVERLASINEVLLDENATLKARLGSMGKCPLTDAPLT

SEQ ID NO: 956451 - protein, 32 aa, Homo sapiens
PAPTRHLCTSVPAVLRSELGELFFGEGSRLTV

SEQ ID NO: 956452 - protein, 92 aa, Homo sapiens
PGRSDTEDTTSPDLHLAHLECLCEQTVPASARKSQTGLSVQTGALVNILLITSQAPSDYRYYPLTVLSRLQQHPQASSSQDNEGCPGSPGSY

SEQ ID NO: 956453 - protein, 53 aa, Homo sapiens
SPSSANPDEGYNSKRSTHVKTLVQREPSEVARNVLHFLPQKTTIALMKLKGRR

SEQ ID NO: 956454 - protein, 31 aa, Homo sapiens
DSSIYLCSVEVTRTTSNPYEQYFGPGTRLTV

SEQ ID NO: 956455 - protein, 30 aa, Homo sapiens
DSSIYLCSVEGAGTGSSREQYFGPGTRLTV

SEQ ID NO: 956456 - protein, 30 aa, Homo sapiens
DSSIYLCSVEDGTTPAQETQYFGPGTRLLV

SEQ ID NO: 956457 - protein, 30 aa, Homo sapiens
APRHLCTSTSGITPNQDQPQHFGDGTRLSI

SEQ ID NO: 956458 - protein, 31 aa, Homo sapiens
LAVYLCASSAGTGQAGGTEAFFGQGTRLTVV

SEQ ID NO: 956459 - protein, 70 aa, Homo sapiens
MLYSINYYSINYYSINYYSINYYSINYYSINYYSINYYSINYYSINYYSINYYSINYYSINYYSINYYSI

SEQ ID NO: 956460 - protein, 46 aa, Homo sapiens
MHAKMHAQKLSPAHTPTGNSSDKPLAINESLTNTILTPGIGQISCH

SEQ ID NO: 956461 - protein, 30 aa, Homo sapiens
MGLHVWKLLQRGYGATSGLISIKEKYVKDM

SEQ ID NO: 956462 - protein, 59 aa, Homo sapiens
SINYYCIDYNSIHYYMHKLLHAYTIPPSILNYNITPPNNVQPCNYYYSNAHYHTNAPVG

SEQ ID NO: 956463 - protein, 41 aa, Homo sapiens
LREQQYQLNINESHYAILTPGLVNFVPATAVTRLTQVNSLC

SEQ ID NO: 956464 - protein, 33 aa, Homo sapiens
GPYKHKLLHAYNYSHAINYYMHKLLTCVLLCVS

SEQ ID NO: 956465 - protein, 105 aa, Homo sapiens
EPHDLRILLNSLCSSIQYTRLRRARESQNQVRKHSLIYFQIRQKFHLKCGDRAPTQFFQMVYFRIQKELPVEFDQWTNCRTPGEQALSVFTYKVRSVMGQSVTCR

SEQ ID NO: 956466 - protein, 31 aa, Homo sapiens
MAVGLGAVGESYDGVVVVVPFNSVGSCLVSA

SEQ ID NO: 956467 - protein, 34 aa, Homo sapiens
IQYSMFTLTPPLSYSFTHSTNPTSIANPTKTLTK

SEQ ID NO: 956468 - protein, 64 aa, Homo sapiens
SIVQPFSSKPPVSFTGAVILIIAQGAYFLIDYSAQQTQSYERTHSRSIFLSHGLQTRLPVIVHA

SEQ ID NO: 956469 - protein, 121 aa, Homo sapiens
LELMSDEEHLFVFQRSLLDDEQDFRNGLAELDANIARLQKSIRTGLLEQHESSKQNIIRCFVFHKHSQLGSYCNVYFSPQCKCMFSCSFMCAQSIIMVTKSHHNVIVAASYCTRGILLEIE

SEQ ID NO: 956470 - protein, 61 aa, Homo sapiens
IADCIQHYYYSINYYSINYYSINYYSINYYSINYYSINYYSINYGSPEGFHSLCCNSLCCN

SEQ ID NO: 956471 - protein, 112 aa, Homo sapiens
YNGDVMLNRLFGPYVLRDIVTSFSLHPAGSRAEMYTTPLLTDVALIFCYCSNSKIVFQYHLAHNHVHVHHHSSNYETFFLSVRSHHLFWESKATPRTLISKILTIMLWGISH

SEQ ID NO: 956472 - protein, 106 aa, Homo sapiens
EAVTPKTTGSCHRRFAVINYHHPFPTSSLCPPCKHIPQQASIQANIKSFSQLLLAQFLKHNQTKHSTCTQAQHVSFTASSMHSIASLVFNISFMLVEASSQQSAPA

SEQ ID NO: 956473 - protein, 108 aa, Homo sapiens
SSQPLLAFTWTDPDAIRLSKLPGLYCRKASQTAPLLQSSPNFILICYLSQHNSHKNTRALPADRVRLIPQTSIPYKTTTPFLPRHGSCGQNSYTRGRTAPCSLSVQTT

SEQ ID NO: 956474 - protein, 33 aa, Homo sapiens
IELDLFTSPFEYKNKHYLMRIHVWGGIEWYGGI

SEQ ID NO: 956475 - protein, 42 aa, Homo sapiens
PYHSIPPYTTYTTLYHPIPHVIAAWLLWFTGAGGVALVYPVD

SEQ ID NO: 956476 - protein, 46 aa, Homo sapiens
SSRPELYTITTIITHCTPKTRENNLTCFHLSFLNVYIAHTYFNGGI

SEQ ID NO: 956477 - protein, 59 aa, Homo sapiens
  misc_feature (22)..(22): Xaa can be any naturally occurring amino acid
PLSPFAAEYLSRRSSFMPPLPXVKRPEPSVFDNCSNLGLICLISFTERRQDDKVAHLLY

SEQ ID NO: 956478 - protein, 35 aa, Homo sapiens
APPAGASRSVSGVPRCAGADTSYPWSLTNLNNKLY

SEQ ID NO: 956479 - protein, 36 aa, Homo sapiens
RTLLKYSAIYLRNFGIRRPFVGASRREGHRPGGGIR

SEQ ID NO: 956480 - protein, 55 aa, Homo sapiens
YRICYTPLPKCNGGSKVRCVRSDIVLKCNGISVLNCETDKTSRYESKDIVIRWYQ

SEQ ID NO: 956481 - protein, 38 aa, Homo sapiens
NSDYYHYRNMQSVHIWGNRRSQHIRSAMDRALALVVSG

SEQ ID NO: 956482 - protein, 36 aa, Homo sapiens
LCAWVVGAWVVGAWVVGAWVVGALPHWTPRGAHLRH

SEQ ID NO: 956483 - protein, 61 aa, Homo sapiens
PTRLLVVVVIPDKRSLFGFVTYSNVEEADAALLLPHAVDGNTVELKRAVSREDSALLGLLK

SEQ ID NO: 956484 - protein, 37 aa, Homo sapiens
SDSGFYLCAWSVLRDTLSRVGGYTFLTMATPSVRGPG

SEQ ID NO: 956485 - protein, 31 aa, Homo sapiens
RGHSTVFLCQQGSGLLYVGELFFGEGSRLTV

SEQ ID NO: 956486 - protein, 33 aa, Homo sapiens
ASTNQTSMYLCASRLDRASSYEQYFGPGTRLTV

SEQ ID NO: 956487 - protein, 30 aa, Homo sapiens
ASTNQTSMYLCASRTPGLNEQFFGPGTRLT

SEQ ID NO: 956488 - protein, 36 aa, Homo sapiens
IAEVSSLGFSVIYSRHEVWAVPLFLEGGRNWLLLGS

SEQ ID NO: 956489 - protein, 41 aa, Homo sapiens
LYHPALFEVPSLKLLACLCIVGHQHMIPENALEEITTNMDT

SEQ ID NO: 956490 - protein, 71 aa, Homo sapiens
VDLQDPLDRQHHPDTKTWQRHNKKGNFRPITLININKILANQIQQHINKLIHQDQVGFIPGMQGDSAYANQ

SEQ ID NO: 956491 - protein, 99 aa, Homo sapiens
MQCRNPLGQPNINALKRSLLTPCVTSSVIADARRWAPSGLVAAPPLLVCSGTAFAPRLPIMVLALECLQFFYGNWCKLSVDLPFWGLEDEGLYLTDPLG

SEQ ID NO: 956492 - protein, 30 aa, Homo sapiens
DSSFYICSARHPSPGVGETQYFGPGTRLLV

SEQ ID NO: 956493 - protein, 49 aa, Homo sapiens
ACLLMQAGLSQWGAGLAFSVSARAHLFVGLHVVGSVSINIVLKEQGMNT

SEQ ID NO: 956494 - protein, 38 aa, Homo sapiens
QFKVIWSSAMSNIFHVGGMVQLLQATNTGFWPTSKPTL

SEQ ID NO: 956495 - protein, 30 aa, Homo sapiens
RPSHTSEYLCASRLGGETQYFGPGTRLLVL

SEQ ID NO: 956496 - protein, 94 aa, Homo sapiens
MPVEYTLSTKLYLSVKELSSWTTVNLQGDVEGTVANLKSQLDSILDNQLSPGSVGLSPLPINLPTIELHRRVCSFSFFLGSSSGIGGLSFGPYR

SEQ ID NO: 956497 - protein, 31 aa, Homo sapiens
ASTNQTSMYLCASTSGQAYGYTFGSGTRLTV

SEQ ID NO: 956498 - protein, 375 aa, Homo sapiens
MDDDTAVLVIDNGSGMCKAGFAGDDAPQAVFPSIVGRPRHQGMMEGMHQKESYVGKEAQSKRGMLTLKYPMEHGIITNWDDMEKIWHHTFYNELRVAPEEHPILLTEAPLNPKANREKMTQIMFETFNTPAMYVAIQAVLSLYTSGRTTGIVMDSGDGFTHTVPIYEGNALPHATLRLDLAGRELTDYLMKILTERGYRFTTTAEQEIVRDIKEKLCYVALDSEQEMAMAASSSSVEKSYELPDGQVITIGNERFRCPEALFQPCFLGMESCGIHKTTFNSIVKSDVDIRKDLYTNTVLSGGTTMYPGIAHRMQKEITALAPSIMKIKIIAPPKRKYSVWVGGSILASLSTFQQMWISKQEYDESGPSIVHRKCF

SEQ ID NO: 956499 - protein, 30 aa, Homo sapiens
TAVYYCARDYYDSTGYYYVGAYLGPRNPGH

SEQ ID NO: 956500 - protein, 114 aa, Homo sapiens [sequence omitted]

SEQ ID NO: 956501 - protein, 227 aa, Homo sapiens; identical to SEQ ID NO: 804621

SEQ ID NO: 956502 - protein, 204 aa, Homo sapiens [sequence omitted]

SEQ ID NO: 956503 - protein, 330 aa, Homo sapiens
MASAELDYTIEIPDQPCWSQKNSPSPGGKEAETRQPVVILLGWGGCKDKNLAKYSAIYHKRGCIVIRYTAPWHMVFFSESLGIPSLRQPVVILLGWGGCKDKNLAKYSAIYHKRGCIVIRYTAPWHMVFFSESLGIPSLRVLAQKLLELLFDYEIEKEPLLFHVFSNGGVMLYRYVLELLQTRRFCRLRVVGTIFDSAPGDSNLVGALRALAAILERRAAMLRLLLLVAFALVVVLFHVLLAPITALFHTHFYDRLQDAGSRWPELYLYSRADEVVLARDIERMVEARLARRVLARSVDFVSSAHVSHLRDYPTYYTSLCVDFMRNCVRC

SEQ ID NO: 956504 - protein, 35 aa, Homo sapiens
MPLTPTVQGFQWILRGPDVETSPLGAPRAASHGVG

SEQ ID NO: 956505 - protein, 558 aa, Homo sapiens
MALKGQEDYIYLFKDSTHPVDFLDAFRTFYLDGLFTDITLQCPSGIIFHCHRAVLAACSNYFKAMFTADMKEKFKNKIKLSGIHHDILEGLVNYAYTSQIEITKRNVQSLLEAADLLQFLSVKKACERFLVRHLDIDNCIGMHSFAEFHVCPELEKESRRILCSKFKEVWQQEEFLEISLEKFLFILSRKNLSVWKEEAIIEPVIKWTAHDVENRIECLYNLLSYINIDIDPVYLKTALGLQRSCLLTENKIRSLIYNALNPMHKEISQRSTATMYIIGGYYWHPLSEVHIWDPLTNVWIQGAEIPDYTRESYGVTCLGPNIYVTGGYRTDNIEALDTVWIYNSESDEWTEGLPMLNARYYHCAVTLGGCVYALGGYRKGAPAEEAEFYDPLKEKWIPIANMIKGVGNATACVLHDVIYVIGGHCGYRGSCTYDKVQSYNSDINEWSLITSSPHPEYGLCSVPFENKLYLVGGQTTITECYDPEQNEWREIAPMMERRMECGAVIMNGCIYVTGGYSYSKGTYLQSIEKYDPDLNKWEIVGNLPSAMRSHGCVCVYNV

SEQ ID NO: 956506 - protein, 95 aa, Homo sapiens
MSHSYKKAISDEALRPFQMDYFGGLPPGQYATRMTGQVHGSGCHLRSAPCDLGASQRKLSSNFSEIDAGLFSQGKSAAYTDIGATKPVEQRETAS

SEQ ID NO: 956507 - protein, 66 aa, Homo sapiens
HYTYTLRKQFYYNRYNVQSYVICQKVILIIRLGCASKLEGWQVDGHEFRLHFSVSPLYLFWESVTL

SEQ ID NO: 956508 - protein, 47 aa, Homo sapiens
EIWVALTGALEGWSGKMLLRSVHDSPLCWGKTEAVVRASPGGLLVTL

SEQ ID NO: 956509 - protein, 103 aa, Homo sapiens
LSFSQHLSPVCVSMSAWNETPLHGLHCHGMYICIHVCVCVACSAFCSASGAVPHCYQTIAVTVVPDVLAMATDNLPSPGNAGAALQRAGSPSSQGLLCRIELE

SEQ ID NO: 956510 - protein, 77 aa, Homo sapiens
VILSIPVSATPSRCCKEKYIWKVLRGTGRHGYDKRNRESGPLNICIHFTVRALLRAITRTSIVFCNHSTFACNIRQV

SEQ ID NO: 956511 - protein, 40 aa, Homo sapiens
SRGSRSIVYTIQHWTDIRTENQQRNIRLNLHYRDTISVCD

SEQ ID NO: 956512 - protein, 54 aa, Homo sapiens
  misc_feature (24)..(24): Xaa can be any naturally occurring amino acid
MTVLGDDGLNDADNLNVPTKIIAXDCGTQGVLTFWDYNSNSQPYSELYLGSLNA

SEQ ID NO: 956513 - protein, 56 aa, Homo sapiens
MPRNGVMHVDECVDFHRLWSAMQFVYCIPVGHTSSQSSSALVMGYTGLAVMIIALR

SEQ ID NO: 956514 - protein, 45 aa, Homo sapiens
ILTGSTHGVNVSMQTKPKNSKAIAPRLPLPSVLAMRPSLSSEEDS

SEQ ID NO: 956515 - protein, 182 aa, Homo sapiens
RCTVDIAAVRDDIDDSVFDLVPSPFMAFRSDLWICDQGKKSIEWPHSSLQLYSGHCTRFPHLIGHLRCLREELASSIIFFPQTASRRVFLYSPEVSYLIMLQRDFSYLVRKISRMSSMSNSLRETMMRIRGVVPSPQALHSLEEPFSTIFRGCSGLTSWAACPQSGPRVICEECQGGGRRRS

SEQ ID NO: 956516 - protein, 38 aa, Homo sapiens
FHYDRSCHSHRNTSMTPPKFQNHFDLLAWIEALAISCL

SEQ ID NO: 956517 - protein, 99 aa, Homo sapiens
CDRDNIRTTAHQEEIAAAQETHNTMLVRKLKDLKITGECPFSLLAPGQVPNESSEEAAGSSESCKATVPICQDIPEKNIHYKSSSKKNQSEPSLSSTLG

SEQ ID NO: 956518 - protein, 104 aa, Homo sapiens
MHRHLKLVALPIFNFHQIISHWVECYCFKSQYVKMKLSSPDYILFENPPFLSVVPSFLQFPTLEISYFTLVRTVISITTTYYYELEAATLLCATHGAGWFSYFA

SEQ ID NO: 956519 - protein, 81 aa, Homo sapiens
LYRIVHVRVTLFVLEEQACPDIRRRSCTSPTPLCRCSPGHTWPQPTVQQEQQLFLQEVHLHSLHLPDLAQVRETPGAQEQL

SEQ ID NO: 956520 - protein, 37 aa, Homo sapiens
TDIDSAKMQNNEHIPITPLTISSKPLINSYADNSHML

SEQ ID NO: 956521 - protein, 101 aa, Homo sapiens
ADPLNAGRSISQSLGRVSSVLSESTTEGVTDSSKGSSPRLNTQGNTALSSSLEPSYAEGSQMSISIPLTSSPTTPDVEFIGGSTFWTKEVTTVMTSDISKS

SEQ ID NO: 956522 - protein, 59 aa, Homo sapiens
  misc_feature (20)..(20): Xaa can be any naturally occurring amino acid
MPQCRISVGHVVGFRKFSCXSDAAWQAVDLLVANIFSLLRGDENNRPWRAIVFLVCLFR

SEQ ID NO: 956523 - protein, 64 aa, Homo sapiens
LEDPLINVFISFLMYCIKLEILHWLNSRCFCQCAGNSFKCLSKLLNSILFKSRTCLSLKRISGY

SEQ ID NO: 956524 - protein, 76 aa, Homo sapiens
  misc_feature (60)..(60): Xaa can be any naturally occurring amino acid
  misc_feature (75)..(75): Xaa can be any naturally occurring amino acid
MRISLIRLSRCFRRRLPLLIGVIGVKFWRRAQGTCGPHVPLYVRMNTVFGLPGHLTCQQXGAPTSGPRQAQSTPXS

SEQ ID NO: 956525 - protein, 78 aa, Homo sapiens
AITYHGSNYPLPCYRMCRAPCKNLEEKTGRDGFCLNEPIIPFSATENYIFIIGFKKSCNSLLFFGALLSKVPSLDNVI

SEQ ID NO: 956526 - protein, 80 aa, Homo sapiens
LYRISLIRLRRYKIFHMLQSCCVGRHLTPLMTAIKKYPGTSQFCRSISIVMARSRFAPGRKRVGHDVIIRDNTDWPNLVL

SEQ ID NO: 956527 - protein, 77 aa, Homo sapiens
  misc_feature (54)..(54): Xaa can be any naturally occurring amino acid
  misc_feature (66)..(66): Xaa can be any naturally occurring amino acid
LDDPGYHISSVFSIQLVIPYEASLFKISKVLESTWNPNSICASNSADGYLRTPXKSNYIQKLNAAXVLHLRHYVRTS

SEQ ID NO: 956528 - protein, 105 aa, Homo sapiens
MSETGIIDVFLLLGPPSLMFSQQYASLTGTQALRPLFSLGYHQSRLNYRDEADVLEVDRGFDDHNLACDVIWLDIEQLDGKRYFTWDPSRFPQPRTMLKGIRGDR

SEQ ID NO: 956529 - protein, 84 aa, Homo sapiens
DIALHNICRQVRGQAELVTTSPVELLSQAVAQASGTPAAVPHEPGLGQHRGLLQIHAPKSDGHQHRPASVRAAGSHLLTGGHEA

SEQ ID NO: 956530 - protein, 133 aa, Homo sapiens
  misc_feature (14)..(14): Xaa can be any naturally occurring amino acid
SSRDPLIVSTRGFXWVPPTSRGDRHLCYWRAVWQAVCWLLTLSLGRKPVHACVYAWLCFVLVISGFLGKFLVKAPSFAWLIQGKKRLSRSWVGKPECSEAVTKVYRAGAKALLGSFISYCSWSNFLSPYPSCL

SEQ ID NO: 956531 - protein, 51 aa, Homo sapiens
MSVSQVKAGLYCHLHANERISEPLLEPQPIVTPFPFTAFAKGEPAHKFKTW

SEQ ID NO: 956532 - protein, 78 aa, Homo sapiens
  misc_feature (71)..(71): Xaa can be any naturally occurring amino acid
EADLEDPAIHYRQGPVGSLKSVAAILEEALDTHKLVTAAQRDGRYWDSSTSTETRDFVNIESPLTERGLFXISGECDK

SEQ ID NO: 956533 - protein, 93 aa, Homo sapiens
  misc_feature (30)..(30): Xaa can be any naturally occurring amino acid
EYAVVVLVTCIHSHVLVLCSTFPGQVGATXTPLCRRRLPTFRQPMGRRAPSVPREHPTSVCDVAFSPSALRVRFAIEKDNLYFFLLYFDKHLS

SEQ ID NO: 956534 - protein, 119 aa, Homo sapiens
MMRDKHSEQSSSVLESSELKDKHSDPSISVLTPYVRDKHSEPSHCVLKSYLKDKQFGAVVELDPWNPYSVGQTHQKSYSSVLESFVTGQTNRAQQPCIGIPSGGQTLRTQKQCSGILCD

SEQ ID NO: 956535 - protein, 34 aa, Homo sapiens
RYSDGLTDYGLTRLTRLTRRIRRLGRRDDTTRTM

SEQ ID NO: 956536 - protein, 42 aa, Homo sapiens
MTSCLLLHDLVSSAGFSTIISLSVPGGLTTYGPPDVHVAFPL

SEQ ID NO: 956537 - protein, 85 aa, Homo sapiens
HVCIWVSRLSGGASEWSRTLCIDHGSPTSWEVNAGDLVISGGASCVVLSPVDSILGNPRPLGSSIPGVPVLPGSSILGGFPSSLS

SEQ ID NO: 956538 - protein, 85 aa, Homo sapiens
MQIKNSSMNPQNGMNVDPASTGCVFLQTPADASQSHTLISKGGHLDFILVIHELDIDFVVTHLSGHHLASKVIYVLGLRRCTEMV

SEQ ID NO: 956539 - protein, 70 aa, Homo sapiens
IPGNSYTSYFYLSISYYFYRYDLSYMNFSTYFLYHSQLESRRTFLTNLDESARTQPWLAYIFLHDIIETK

SEQ ID NO: 956540 - protein, 79 aa, Homo sapiens
  misc_feature (1)..(1): Xaa can be any naturally occurring amino acid
XCVTQLTAIGAVLRISLQSMLSFVLCQDACSFRGRVLGAHYENLHKERKIQMKIHHFNGWINMKQNFTNRIMAIQLYRF

SEQ ID NO: 956541 - protein, 118 aa, Homo sapiens
YRVNVLNKKRAEDISDYILANRHDYVLPSLYRKLDTAMAFEPMDGGKQLGTLHIPMSAMMLINDGQHRRFAIELALKSDPSLQNETAPVQIHFDQGLRRSQQIFADINSKAVKPSSAL

SEQ ID NO: 956542 - protein, 36 aa, Homo sapiens
MPATTSKRKYPRTQDVEVYLWGYPGLGLPGGYGPRI

SEQ ID NO: 956543 - protein, 35 aa, Homo sapiens
TYQGTPILAHVFDVNSSFVAQNGIGFSNRIACTEV

SEQ ID NO: 956544 - protein, 37 aa, Homo sapiens
CVETDEDTRDSDSSARDFVSAVQAVSLNALIECIFSH

SEQ ID NO: 956545 - protein, 121 aa, Homo sapiens
QSECDKTLGEASPEDVEVGVPIQRGKSGPKGLLSILMSKRSEPNSLLPENLNDNKIINQLIDLHARDKDLRVVLVTKDINMRLKARACGIAAEDYSTDQLVDDVSMLSRGYHMMTGSFWDR

SEQ ID NO: 956546 - protein, 124 aa, Homo sapiens
VQSECINLMGVVKGCKAFLPLLEKSQGRIINIASMAALMQGPAMSNYNVAKAGVVALSESLLVELKQQEVGVHVVCPSFFQTNLLDSFRGPTPAMKAQVGKLLESSPISAADIADYIYQRVAEG

SEQ ID NO: 956547 - protein, 33 aa, Homo sapiens
EGFAYLWSGARASYGVRRGRVCFEMKINEEISV

SEQ ID NO: 956548 - protein, 41 aa, Homo sapiens
MAERKLFNKGIAIYKKDFFLVQKLVSWALFQGKWGPGAACV

SEQ ID NO: 956549 - protein, 57 aa, Homo sapiens
  misc_feature (13)..(13): Xaa can be any naturally occurring amino acid
  misc_feature (49)..(49): Xaa can be any naturally occurring amino acid
YNYRCEDTMRMLXLDTLTLMPKRGSNGQIPVVTPNDLLVSGLISWYALXVSRPLGVG

SEQ ID NO: 956550 - protein, 36 aa, Homo sapiens
EDPGYHIILSEITQEQKTTYPVFSLISENYSIVYTR

SEQ ID NO: 956551 - protein, 60 aa, Homo sapiens
AECALTCDYSLQTTKTLGNTIPIISAHYSGVLGTASYSLLIRVELGQPGDLLGNDHIYNV

SEQ ID NO: 956552 - protein, 42 aa, Homo sapiens
TCVMSVCLKNVVVPHKKVAVATPDKKAAVTPGKKAAATPAKK

SEQ ID NO: 956553 - protein, 35 aa, Homo sapiens
MSDFWFSRVSESTQDTAVRQRHSDVAFDLDVGSSI

SEQ ID NO: 956554 - protein, 46 aa, Homo sapiens
MTSDNLISALNKHGLGTALMARLEINYDILKSFQTPDTQRRRGVGG

SEQ ID NO: 956555 - protein, 94 aa, Homo sapiens
LSHYHLWQKNFWGPVLRINVRNGDEIQQIESTSEFNNLKLHFWKSPFSFNRPVDCLVPSVNLQAFKFFLRILGLEDGGTIEDLQALLDNEDNVI

SEQ ID NO: 956556 - protein, 119 aa, Homo sapiens
TSYPRIIKGYTYYIFIFILFLLIFIFFFLLLLLIFWVSCFFFEPVWAVRGLLSCVHFCPCARYAPISFSYFSSYLSCFLCIWLCIFGLSVHTTFHPISLQFPPGYATVCTFDLWAMCTA

SEQ ID NO: 956557 - protein, 131 aa, Homo sapiens
AEGGIKLASSYTSKKMEKNFAPIWILPRASPTPDLDTTSMIRFGTSELIKCCSCFFQDGVSFCHLGSASRVEQSSYLHLLSSWDYSHVPPHLANFFFFFFLEMGSGSVTRAGVLGCSLGPLNPLPLGSNQV

SEQ ID NO: 956558 - protein, 43 aa, Homo sapiens
MEHLELFWSKVNIPKVLRAAEQAHLWAELVFMYDTYEEYDNVI

SEQ ID NO: 956559 - protein, 115 aa, Homo sapiens
SRLSHYQQTGVSPVPLHDGTHDCTRTLGALPGPPISDPCTAASPSLAYAGNGIICGEDTDLDGWPNENLVCVANATYHCKKDNCPNLPNSGQEDYDKDGIGDACDDDDDSDADDG

SEQ ID NO: 956560 - protein, 71 aa, Homo sapiens
PLPHDQVNLRDELLQLYSDSDEEDEDEEEEEEKEAEEEQEEEEAEEDLQCAHPCDAPEAVSSCLCTCKSFL

SEQ ID NO: 956561 - protein, 102 aa, Homo sapiens
LEYTGYHIISICMKAADSVSSEQPILQRQDTRTHRPAFRPEHSMPRGTSGAPQQKLKFRRCSQSGTLTGLGDERVSCRGEGPGHDPASKLGGGTCTPTDTCS

SEQ ID NO: 956562 - protein, 59 aa, Homo sapiens
MSVLGSDDESGRYRRQLGMVSVNAPDFAYGTALRTDERQEVSSEGTVMPSASRRRAAVR

SEQ ID NO: 956563 - protein, 97 aa, Homo sapiens
MAGLRSVCLVFDQMKAVPRFVVNASNRRMAVNADALFHRPATLGEDRALEPLLEQYHFMHKCHHANEHLLITGRREHPQIVPVCACFGWVENPWEQD

SEQ ID NO: 956564 - protein, 60 aa, Homo sapiens
ADRRGGLAQAVAMRAVSGVGLDVFENEPDIHPGLLGQPNVVLLPHLGSATLEARQDMGDR

SEQ ID NO: 956565 - protein, 125 aa, Homo sapiens
RGSPSYPRGRVWAAREPQGALAFAETMAEEEGPPVELRQRKKPKSSENKESAKEEKISDIPIPERAPKHVLFQRFAKIFIGCLAAVTSGMMYALYLSAYHERKFWFSNRQELEREITFQADSAIY

SEQ ID NO: 956566 - protein, 50 aa, Homo sapiens
DFIPTVRASNQYLREYGAGVWALSCKWLPSGKRFKRRGEGWFTRFFKSSG

SEQ ID NO: 956567 - protein, 103 aa, Homo sapiens
MQLSHLLPRLESNWCDSRLTAKFASEVQAIPRVLKLPSSCDHKHAPPQPANPALLVETGPLHVAQADLELPTSGDPPTFASQCDGTTGASHHAQHRMIYLSQM

SEQ ID NO: 956568 - protein, 45 aa, Homo sapiens
LSHYLPEYFNSGLAQIQLMAPQGGGGALQSTASLFVGSLSLLHLY

SEQ ID NO: 956569 - protein, 71 aa, Homo sapiens
LGTLQQQVAGFIKNETLKGCGILQHYGHEERRSQDRRFLFVWNADNIRAFGVRQSKASIHGGRTDREADWL

SEQ ID NO: 956570 - protein, 105 aa, Homo sapiens
LIDHKSICDHHETTRVTCTCNADTPEEMHHMRYTLLKRVQRGHQREEGQEFIVRGWLHTEVKNSPKMSSLTLKKRWFVLTHNSLDYYKSSEKNALKLGTLVLNSL

SEQ ID NO: 956571 - protein, 50 aa, Homo sapiens
YRISVRKSAKCWMMAGVLQGDHPSSNLNTPLMTENYEPTPSEALVSAQKH

SEQ ID NO: 956572 - protein, 77 aa, Homo sapiens
MICPYCLTALPDEFSPAVSQAHREAIEKHARFRQMCNSFFVDLVSTICFKDNAPPEKEVIESLLSLLFVQKGRLRDA

SEQ ID NO: 956573 - protein, 52 aa, Homo sapiens
VVHANTSKELKQSARRNLFKKLGNDKNIHFSKEDIQMINKYMKKYLTSLIIR

SEQ ID NO: 956574 - protein, 117 aa, Homo sapiens
QRLNGCVCVCVCVCVCVCVFLKSSLVCILLFMSFLLLQRGVRNIERSWCRCGRKRQMTCGKKLSTQYSPFGYALYRLQPALFIRVTVDSWDSYPYVRGEGERVFSLHSVLLDLIQSP

SEQ ID NO: 956575 - protein, 93 aa, Homo sapiens
AQCELIYNMESVHNLVYAHAAVHPIHRRAVDINRALGAQLAEASRVVDQLAHPKSVFNGTQSRSTRSASSSLAIYQTTPDCRRSFIGLIVYGT

SEQ ID NO: 956576 - protein, 136 aa, Homo sapiens
IAHRTPDNLEGSIREGLVRDGIDTFERTVPNPDMRAAISEVAHQCSSAPAWFELQPPRVKDGYSSSVGDRQYFIDYNPAVSRSKCNSQLTFLHLLSERNSRFQNIIINGRLTEPSRSACTRFSLPKAYPMTSSSVA

SEQ ID NO: 956577 - protein, 42 aa, Homo sapiens
MDSVHNLVYAQLHVHRTTQLRGYINRALTPTTRHEAWCVDHG

SEQ ID NO: 956578 - protein, 123 aa, Homo sapiens
SDTVHGSRNLLAPDESYKDFMQAVVRPARDILHEHGLKGFHELRAAYACERYEQLIGFLAPVNGGRVHQEDRALDQRARKQISHELGHNRIDVVSAYIGGGDDGRFRHSVVPAPRTQRVRCRY

SEQ ID NO: 956579 - protein, 96 aa, Homo sapiens
SDTVPPALVNNPSTQQLTRLEDASQKREYGRYDPKNIPKKERTNQNSLWTFVFLCFLILFCFIFFFFFLKDIEAKGNSYPNFQDTNMTYPSRITHL

SEQ ID NO: 956580 - protein, 108 aa, Homo sapiens
MGLVLVAQVSGVRQLKALIFVNEYPVRAETFPRWSINPANPGMNSAPQCLAPMLDKLPIGVISHAGNTTTAHSTPQGCLFQLQRFGVVPAHRSDRPEVQRLDTLIVQR

SEQ ID NO: 956581 - protein, 59 aa, Homo sapiens
IGERTVENVISVRNGLGQQARGTEGEWGHTIPSTYHTTDSTWDEIKEDFPLKEVDIVMV

SEQ ID NO: 956582 - protein, 42 aa, Homo sapiens
ERCAPASGRNPSNPPVTGSLSSTRSEESMPDVLLMLIMIIAG

SEQ ID NO: 956583 - protein, 113 aa, Homo sapiens
PAIGIHGLILLYMVSGFQYDSYVSFGSSTPLAHSIHLSAFLGYSPYSFIIDSCPFFRHVPFTVRFIAPDCTSGKIQAIHYPHAFQSPNHSFQIVHRTLISLLPHGRCTICIVV

SEQ ID NO: 956584 - protein, 115 aa, Homo sapiens
MNVSRMAVFVSGAATKLSKLFQSRQMGYFDVEKAPESPTNSTSFAAKGDAMLFPVLDGLKLHKVLVRTIKEFVDDEMPTYASALAYQMLFSLFPFLLFLIALIGFLHLPDFFSWL

SEQ ID NO: 956585 - protein, 32 aa, Homo sapiens
MSNESYQTAPRDPHSAHSLAGERTRARGSSNS

SEQ ID NO: 956586 - protein, 145 aa, Homo sapiens
  misc_feature (19)..(19): Xaa can be any naturally occurring amino acid
TFSDRSGGGECPEQCANEXAMTTTTNTQVEGDDEAGFLERLVGEERRQKRLQGALERQMEYDPTITDASLSLPSRRMQNDTAENETTEKEEKSESRQERYEIEETETVTKSYQKNDWRDAEENKKEDKEKEEEEEEKPKRGSDQR

SEQ ID NO: 956587 - protein, 43 aa, Homo sapiens
SWTFSVASFLSLFSDRSSLIAISLICSFSDLLFSDLLPPPPLT

SEQ ID NO: 956588 - protein, 72 aa, Homo sapiens
VFFKRATFEAIAPQVGNDAVIPEYLLNELYYDGTEYANSSVAGPILASRRLEVRATEARNSVDQWSLACSIQ

SEQ ID NO: 956589 - protein, 58 aa, Homo sapiens
CSSEEPEVITLEMIMEDQEELFVVPETVECWDVVLLNFLAVTTMTIHLSLPCAGSGAV

SEQ ID NO: 956590 - protein, 40 aa, Homo sapiens
MFSRNALDLLSAGRSRDEGSITSCSLETARIPMECIGSQE

SEQ ID NO: 956591 - protein, 77 aa, Homo sapiens
LQVIRIFPSSTRLDFLTASSSDEAPIISNSERVVSSTKTDFNESSRQVKVGVTTEVDCLSRDSFLSMSSYLLFSTKD

SEQ ID NO: 956592 - protein, 31 aa, Homo sapiens
MSISSCATLSVSTQHKGLFGKPGPSVNLRNR

SEQ ID NO: 956593 - protein, 76 aa, Homo sapiens
VLYKNSQVHYQAVILHVKYSIQGSSRSQERNERNNQQPCSQGGLKTSLLYLGKTPLPPTPIPNCIYNFVTEDHLFV

SEQ ID NO: 956594 - protein, 33 aa, Homo sapiens
MNHPHLVHQCPLWALCMSTYWTLSVSPFYTCET

SEQ ID NO: 956595 - protein, 79 aa, Homo sapiens
PTLTQGFFLVSKVLFLFGLTVKLYKVDLEGSVGKFNSGTKILSMDNLAITTARLGYVDLYSINSSHLFWLHYDGVCVIL

SEQ ID NO: 956596 - protein, 53 aa, Homo sapiens
TLSQDSWYTPYSWQQFLFALYLWYARAAFKIGFGTFPGTSSQHTNHSSVVSSV

SEQ ID NO: 956597 - protein, 78 aa, Homo sapiens
MELTDTIKQTKIPKKRVLLQPQHYIADRSGNVLAAFHSPSEENGGSTQATVVWLLYTQLPIMCWVMDGSTLQGNHKTH

SEQ ID NO: 956598 - protein, 36 aa, Homo sapiens
GSPSCSSRIVLSDDEIYLRLPFGVSPIMTVVWFVWG

SEQ ID NO: 956599 - protein, 39 aa, Homo sapiens
EEIQHVPSSQYEAYVDSKVDMVTSTAGFIEQLIKIYLLV

SEQ ID NO: 956600 - protein, 182 aa, Homo sapiens
VTTEHLIEQDASFATSLTAGPYSYFHEMDLVELYSLACHINVPVVTWKTIPSLHIPKSASLQGPSWSQQDIVQFPISIDDSFIMEEHESRNDFCSIEASSCFIKTDETSECGDIKVTPIHKLHHKKQTIGGLKAAKQLSEEGVIAGQRQDPFLGHGAFHIIILQNHVLLQHLHSIEVSCFFY

SEQ ID NO: 956601 - protein, 38 aa, Homo sapiens
RVGRDSPSMKTKTLNYILLAIYLYRTKLAIQLHVTLFF

SEQ ID NO: 956602 - protein, 92 aa, Homo sapiens
TKTESYQNRALDIQDKVKPKPKIKQSKSSQKQKPKCRYRHAIGDQATLPLKWSGQVPKTSLTKFQMSRLQVPVPSRCSATALILRGGCHTLV

SEQ ID NO: 956603 - protein, 82 aa, Homo sapiens
VYFRATAPNDVERNYETALSRPRGQVLQQINQIKKNHRLFPFPPVRFNQSAFATVVDFLDTSCRPQSTGEEAPILRKFILKN

SEQ ID NO: 956604 - protein, 153 aa, Homo sapiens
DDTANEYMTVKRGASRSFMTFERLKQEVSETVTIGISIIVSCKRTERRSPFDRSISVRSYSIVNAEYIQAVECAPLIRERDAVGDERALRHSVIYPYVLIVVGGPWVNSCSVREEPQVQTFGVCAWLRSQWGEATICGIMTERLYSQNPGQVG

SEQ ID NO: 956605 - protein, 69 aa, Homo sapiens
NLLPYVAHELGHNLGMNHSWRDRTCGSKELHHRIQEHRVPEHFSSSSAEDFEKLTLDKGGNCLLNNSKA

SEQ ID NO: 956606 - protein, 94 aa, Homo sapiens
FPKVINHRDRGLYERLQLIMLLCAADNTEITPVFHSNFSEKTDHPQHGALSVLHNIHEYRTHIHEDGYCPGKKQKITSVVRDVEKLEPLSYSVY

SEQ ID NO: 956607 - protein, 54 aa, Homo sapiens
VGRFHPSVAMDGSNKNYTYVFLIANLFPHQTKDISQSFKGLVPGEDNFDMGPFL

SEQ ID NO: 956608 - protein, 63 aa, Homo sapiens
TRICSSLHGSSIKDILISHFLYSFFSLSIQILESLPEIFQLRLRLLLSCHQLNFVFSVTNGEE

SEQ ID NO: 956609 - protein, 52 aa, Homo sapiens
RSDLNVVVMQCCRTAGNGPPGPVCGSRVEICWQDVPPGELQMVLSSFSYVVE

SEQ ID NO: 956610 - protein, 56 aa, Homo sapiens
GSAHLHYAATSDTFMAGSEYLLRNDANPGSVISSGYNAVHYSAAYGHRLCLQLIAS

SEQ ID NO: 956611 - protein, 52 aa, Homo sapiens
MRATQVLWMWIEMKETIIAFDWATKWTVSLLCCTERLRRISVSFYHVKNNGK

SEQ ID NO: 956612 - protein, 47 aa, Homo sapiens
RGTFDVNLSVVLGDLPPSPGRMFFSIAQIIPGRAVQNTEGTVAEYTH

SEQ ID NO: 956613 - protein, 85 aa, Homo sapiens
FPVGPDLPTPQMQVSHSHKAKGVAELDRLIWINKQTPMLRLGAPREFVSIGQELSQEDMGHPSALGKHILNLNVNFCFGLTSENL

SEQ ID NO: 956614 - protein, 41 aa, Homo sapiens
HKVPVYLTMSTGVELIKIIRRRLQLSANPAFSLFGDRTQHW

SEQ ID NO: 956615 - protein, 46 aa, Homo sapiens
FVCIAIITDSPYFSYLSQSYAADITILLTDRKLNTTLLRPRREDES

SEQ ID NO: 956616 - protein, 38 aa, Homo sapiens
MTDRVDDTLSFEIEDNVSGFNSFGNWMSIEGFRARGGT

SEQ ID NO: 956617 - protein, 36 aa, Homo sapiens
SHHRRAISQTPRFLRSPLNSCRHILKAMIYSKWINE

SEQ ID NO: 956618 - protein, 36 aa, Homo sapiens
SVGYNQPAEISLHEEEEQEEHEKLASAFWHWCKPCF

SEQ ID NO: 956619 - protein, 127 aa, Homo sapiens
AATSCHTYLSHRLFAMESRVSCPELKCKGTSSAQCNLRHLGFKQFCCISLPSTWDYRHVPPRPANFVFLVETGFCHVGQAGLELLTSDDPSALASHSAGITGVSHHARPLSHLYTCLLILTSVFTFG

SEQ ID NO: 956620 - protein, 132 aa, Homo sapiens
LPIFRTCHLMCTPYLSHLFFEMESRSLAQAGVQGHVLSSLQPPPLGFKQFCCISLPSTWDYRHVPPRPANLVFLVETGFGHVGQAGLELLTSDDPSALASHSAGITGVSHHARPLSHLYTCLLILTSVFTLG

SEQ ID NO: 956621 - protein, 56 aa, Homo sapiens
AQCSNEDEQLQSVSSSIWITQQQLAAAVYICLSTHRIIVEKPKKLPPNNQRKSEPT

SEQ ID NO: 956622 - protein, 54 aa, Homo sapiens
WRRHKWLRRLLDELTLGRADLEMQIENLKDELAYLNEEPRGGEMNRLCAGLGGV

SEQ ID NO: 956623 - protein, 41 aa, Homo sapiens
TEWVAMAGEPTTLRMKKLNWQKLPSNVAREHNFYVGVLSRD

SEQ ID NO: 956624 - protein, 220 aa, Homo sapiens
AGGAILLAASTLLQVAPSKVDGTSHVTGKGVTVETVCSVDELAASVLTGKTDHMASFQLSTQLCWWWVCQVTAWPVWVFLFRTKKKHPAVIYMANLALADLLSVIWFRCKIAYHIHGNNWIYGEALCNVLIGFFYGNMYCSILFMTCLSVQRYWVIVNPMGHSRKKANIAIGISLAIWLLILLVTIPLYVVKQTIFIPALNITTCHDVWPEQLLVGDMFN

SEQ ID NO: 956625 - protein, 38 aa, Homo sapiens
MLSSCLLSVVDDLARYNWLQCSASTSLVCPAPAAVDPL

SEQ ID NO: 956626 - protein, 34 aa, Homo sapiens
DEGKKHLTAPILRPVYTYIWNDKHLDHTHSHLRI

SEQ ID NO: 956627 - protein, 104 aa, Homo sapiens
NGHLSTPSNRCLVLPPSPRTCPLRWEEDLQGSQQKAGTKSALRHKLCRHPEKGHMDKLCCLQYPHGYIWARDPPSHLPQGLRQCGETNRLRRQVTCLHITTKVS

SEQ ID NO: 956628 - protein, 102 aa, Homo sapiens
PYGRTVNGRTLYHTCPALELQAPHELLQHQAIQVVLQVGIFDPSIQVGVVVDLDHHNPVARLFEVHAIKPIADQVGGFHRQLHHRLGCLMDCQGAAFASVRS

SEQ ID NO: 956629 - protein, 63 aa, Homo sapiens
PEDFLSNALMTPTQMYGLISRTAKRTTGESSEKLSTHMGLPGTIINNGSITRLQKYRAIYQLL

SEQ ID NO: 956630 - protein, 51 aa, Homo sapiens
MNGSMRVQLSLTYKPDEIDLPDEEAGMTQQDEKTLWSFNLFNANSPAPGIL

SEQ ID NO: 956631 - protein, 36 aa, Homo sapiens
TLYCWSLYCILLLSPTVFFYYLLLFGHPSESDLSLF

SEQ ID NO: 956632 - protein, 74 aa, Homo sapiens
ETVITRRQDHREPASLRGTLRRGRDGDTSGHAQHRCRSATRADVSSSNEQCDSFPECIDGSDELMCEVTKPTAD

SEQ ID NO: 956633 - protein, 36 aa, Homo sapiens
MYILYLPRPSLNKYIVTNACTFRSCNPHYGNYPRDN

SEQ ID NO: 956634 - protein, 71 aa, Homo sapiens
TDQPLVRRSGCAVIDETGTLCTIFVSAAEEDWKLNCQRRCWLNITPQAKFAPIWGADIHSLKSMRIKWVTD

SEQ ID NO: 956635 - protein, 56 aa, Homo sapiens
MPSVCSPDTPPSATRQPCKICPGDQRNFPITYLAGLSLAESYAGSYANILGPSQAP

SEQ ID NO: 956636 - protein, 61 aa, Homo sapiens
TLCSLSSLYWELGMRVDVSAQARCVDLLIRVLLTDRSLVFQRTDAFHRDRFDPMVSSTQSA

SEQ ID NO: 956637 - protein, 39 aa, Homo sapiens
VCYLGVTRSIVKPLLDGQCFQLAAVAIHITKHVTHHQRT

SEQ ID NO: 956638 - protein, 52 aa, Homo sapiens
SRVPFYYVALFEPRIACARISGPLSAAFDTSQLSIWATRELNREWLCRFHYP

SEQ ID NO: 956639 - protein, 47 aa, Homo sapiens
MGLRHAAVRKTLAFLPAALAPTLLPFAFGAIETGSWAGKTTCEKLYA

SEQ ID NO: 956640 - protein, 76 aa, Homo sapiens
LPDPQARLMLARMVGHITYLSDDSMGEKYGRGLKSEKLNYDFHSVYIPRWKSYPALPGATEFSRAYSTPNNLTLLD

SEQ ID NO: 956641 - protein, 113 aa, Homo sapiens
GCYPAHLKLDEAPSAPSGGGSHTTLSLAWDLIRSAATRDLQNSPVERARGSLPSATTKDSQLAKALEKILRRGAPQYLNDGRLTLDVLKRIAVQPTGENEVLDNAIQVVSEIL

SEQ ID NO: 956642 - protein, 59 aa, Homo sapiens
RIPDGRFVGRQRIDSDGCVRVLLVVGNMLYVYGNGGKLEPLTIKYRFDYAWGNPQVNRP

SEQ ID NO: 956643 - protein, 56 aa, Homo sapiens
RILMRCLTHTFCVESGPGSELEGYVVAEVEHIHRWRSCCGRTPNKCGGFCRVPGNK

SEQ ID NO: 956644 - protein, 71 aa, Homo sapiens
LLTGLLLHVHTLAVCYLNNAGHCRTTGYYPRRPACRGIGRRLSLMEPVPTNIFYGRSDVMFVSLARGPERC

SEQ ID NO: 956645 - protein, 139 aa, Homo sapiens
LYFRQKLRCFQEAFIKAYYSLETLQNEYAFSSWITRIVSRLCHDPAFQKKRKEEVIARDNILTGKPLTQGFDGTFVGCGFISKRAMQKLSPEQPGKLIGITGDIPGAFNLLTENLPEILTDTRLDRVTRPVGGNPSSEI

SEQ ID NO: 956646 - protein, 50 aa, Homo sapiens
LDHIGFEHDSSISILTRLILAPGRPQFPNYSELSASSAKQDKVYGQVSAE

SEQ ID NO: 956647 - protein, 77 aa, Homo sapiens
EDPEAVPQRAVARYSPREGSPSWIAAHCGVPEDYSYGIRKRKNIDKNDRCQRSKVTIGHFRTIGVVNDHGQGTLLLR

SEQ ID NO: 956648 - protein, 56 aa, Homo sapiens
TVSLSITQVISFKNMHYQIYARKANGYRLQIYYLSPKQFVLSQVGDPSRSQTLQGM

SEQ ID NO: 956649 - protein, 36 aa, Homo sapiens
LTHALPRRLHRLRHPSQRDKLQPLVDSIQLAGGEAH

SEQ ID NO: 956650 - protein, 109 aa, Homo sapiens
YSKIGTDRECLKQLHCHKRYDSVMRHRIEERGVRTITCSGTREISVQASRRVRCTTAFTSSQTLRVSRWCSGPRTTEEHASELRRAGGGFRYNSHSKNPCIPGRGVPSS

SEQ ID NO: 956651 - protein, 34 aa, Homo sapiens
AINWSREVVEKEFLEKVKHLENQIAQSPAIDPYH

SEQ ID NO: 956652 - protein, 66 aa, Homo sapiens
VSNKSDGITSILPTPIWHLFVATGAAVHYYAIGKYLDRSPTDFMRAFYDLVCTITTPNQYNFIYGT

SEQ ID NO: 956653 - protein, 33 aa, Homo sapiens
EDPDVSLENKTSQRKKNYLYTSLAHFWLRQVVG

SEQ ID NO: 956654 - protein, 64 aa, Homo sapiens
LDTSIKYPSPRFMCLTKCGIYTIEYHSAIKRPKVLRLQYYHMLHTRNPHVKAAPPVTTISTTIV

SEQ ID NO: 956655 - protein, 53 aa, Homo sapiens
ALEDAECLKSPPIEADPPVTHDLRVSLEEIYLWLYRLKMKISHKRLKPLRGQG

SEQ ID NO: 956656 - protein, 77 aa, Homo sapiens
LEYGRSWSPHFRLVTELYESLVEMSVTFLMETKVHCLTLDELCHVRIVTPVVVISAHQRKTLSKAKAINAEMKSHER

SEQ ID NO: 956657 - protein, 45 aa, Homo sapiens
VFYNEAVRRKETPDSSGCFMQSGGIIYLVVYSDGQFYSPPEIRSR

SEQ ID NO: 956658 - protein, 83 aa, Homo sapiens
MLTHTRQLCTVSALLYQLLLLTVLDQAVCTCPCTSPNSVLQDVILFVITLISTTALSDLNSFMGKSGIASVFYNNCSFSRYTY

SEQ ID NO: 956659 - protein, 40 aa, Homo sapiens
SLGTATIIDYEEPSQVLKNEQDIYTHLVQSLLESDSINQL

SEQ ID NO: 956660 - protein, 83 aa, Homo sapiens
SDIKSIDEVYSTETFFTYCVNTLGSLSLKRGSIMTLPYQRQAGNLNVHRYGTTSVAGLQYLNLYLAGSSKASRGRHHCNSYRS

SEQ ID NO: 956661 - protein, 33 aa, Homo sapiens
PRSVVQDLFHLVVNVFQRIPLYNSCEMFSKLHV

SEQ ID NO: 956662 - protein, 140 aa, Homo sapiens
MAAGLRPCDVASTLTFLRLMSTECSQNITYHCMNSVAYMGSADWQTYKTGPCSLQGSNEIEIRAEGNSRFTYSVTVDGCTSHTGAWGKTVIEYKNTKDLPGCPVNDGGPPRDVGAPDQEYGFDVWPCMLPVNYLHPNPRS

SEQ ID NO: 956663 - protein, 46 aa, Homo sapiens
DSDNVVTLIVEQTNFNSGCTLGDVPDPPSRSYNPIVDMDSRIGLRC

SEQ ID NO: 956664 - protein, 39 aa, Homo sapiens
PETIDLAVQCLHELTTTCTASTSLDVIDLPFATPETRVC

SEQ ID NO: 956665 - protein, 46 aa, Homo sapiens
DGDLQPPRLKTNPAHSSPFNASFSISTAHTQQTFSQSSCDSPFQHS

SEQ ID NO: 956666 - protein, 38 aa, Homo sapiens
GLAVTNDAGRDYGWLVLASRRFLTWSYTEPTFSTDWLA

SEQ ID NO: 956667 - protein, 43 aa, Homo sapiens
MQCAKATGKLVVGKNPELGNMLFFWNLLMLTFYLFSNIMGEYR

SEQ ID NO: 956668 - protein, 37 aa, Homo sapiens
YSERKSEFEDDQIPSYIDINDSDGMRRVISIVPAVGS

SEQ ID NO: 956669 - protein, 37 aa, Homo sapiens
TPGTAGEKQPPPPRLHTSSKTLEDPLKFQALGKNYRP

SEQ ID NO: 956670 - protein, 33 aa, Homo sapiens
MRIPCLLSLQNGLGHGRSRHVIDQGTEDQGTED

SEQ ID NO: 956671 - protein, 59 aa, Homo sapiens
RLIYRTLIFRPHTGLAVKPNGSKKTFPSEDKSNKLRADIKITSQKEVATSRLCIECTDG

SEQ ID NO: 956672 - protein, 65 aa, Homo sapiens
MGKETDPLRYQSKKSKGIGLCWPTMQRISLHEKSGLVILELGGALHFMSLSRREKKGGTKTQNKT

SEQ ID NO: 956673 - protein, 50 aa, Homo sapiens
AGLAKAVIGVGPCLTGSRREALNLDLVLYQQGKVHLPAISCVKTSLRPRV

SEQ ID NO: 956674 - protein, 36 aa, Homo sapiens
  misc_feature (27)..(27): Xaa can be any naturally occurring amino acid
LHFYVSLCVTIDSAAVWPLVQVGEKRXFGPFISPLQ

SEQ ID NO: 956675 - protein, 61 aa, Homo sapiens
MSCSRALVLTAMVNLTCVTSELETGVHSRQLVVHCNGQTLRHQHVFAAKVGDELVDVEVTR

SEQ ID NO: 956676 - protein, 152 aa, Homo sapiens
GSDYTICWRHRSVRMLERCQLGCNGSMRFSVRCLALETSVPAASFLLGCPGASSLHLSASWDKDSTLRERSCSLCISWYTPTSTSLTGETLARGPRANFTIFSPFCSRTVTLSSFCSWSNTKKKVLSSGQELAQRVLSSDRATTGCEEEGAF

SEQ ID NO: 956677 - protein, 59 aa, Homo sapiens
  misc_feature (59)..(59): Xaa can be any naturally occurring amino acid
IREGLGAEVSKKAVAVWGWQDVEDCSSALTWGLGPDTAWFTPQPEKTGPPVPVDSYRWX

SEQ ID NO: 956678 - protein, 131 aa, Homo sapiens
MRNTNEVLVPRGSCPSVSERACDMHVADMLVKVNALIKDREGYAPGTEFHRCNEMSEYWRTLGRNFTCFQDTLPHDVTFPMIHAKWKPLDHRRVRVWKVSKFNVDISFGSEEANMTRDAPACSVQKRAVRS

SEQ ID NO: 956679 - protein, 62 aa, Homo sapiens
  misc_feature (9)..(9): Xaa can be any naturally occurring amino acid
  misc_feature (16)..(16): Xaa can be any naturally occurring amino acid
  misc_feature (35)..(35): Xaa can be any naturally occurring amino acid
MCSQKVGEXGLVDVEXQLERTQILAKSQSYFASEXRKIGFSSPGDLVELDGNGDNLVLAKVL

SEQ ID NO: 956680 - protein, 46 aa, Homo sapiens
KTGFRVREWEGSQLRKEIWRVFGVGTPQRGPCWPWLPEESLKKHQE

SEQ ID NO: 956681 - protein, 54 aa, Homo sapiens
MKRSFQRSGKHKQDHEEDVTTPQRKPENSRELNNECWPGAVAHACNPSTLENME

SEQ ID NO: 956682 - protein, 42 aa, Homo sapiens
SVPDVSSVCLAGGWWRWRAHRPMFSSTSPVPMLCCHRKAGID

SEQ ID NO: 956683 - protein, 49 aa, Homo sapiens
MVICTLSVLLYSSLRTHCKPNGETKVLVSTQHVQRKTVDIMMRLVQIFI

SEQ ID NO: 956684 - protein, 117 aa, Homo sapiens
TNPGADRDLPRWATEADKAELEPEQKSLKQTDRLSTWQILLYSGSVVSFIRGLFFHECREQTIEDGASSGQQVVVIEDGLAQPSQYTLDANSLGGLNATDIQVMHQSSDAAEAWLDQ

SEQ ID NO: 956685 - protein, 153 aa, Homo sapiens
IVVGRKLSLTQKPIGCIRLLMSAQTEAGPDEIDMITCLWEGMKKPVLRPVKFSKLQEVTQEPSENLTLFQARLVEAMRKYVNLDPESPEGQSILAVHFVSQAYPDIRQKLQKLEQGPQTPFPILLNTAFEVFNNQEKTSKIKKAELEEEECHH

SEQ ID NO: 956686 - protein, 154 aa, Homo sapiens
YHIGWTKAVPDTETIGCIRLLMSAQTEAGPDEIDMITCLWEGMKKPVLRPVKFSKLQEVTQEPSENLTLFQARLVEAMRKYVNLDPESPEGQSILAVHFVSQAYPDIRQKLQKLEQGPQTPFPILLNTAFEVFNNQEKTSKIKKAELEEEECHH

SEQ ID NO: 956687 - protein, 76 aa, Homo sapiens
GLGTLPDTAITSRRYRCHDTASPAVDDVTGRRARNARETRDFIQFHINPLMTLKIEVKAVLGLTMTSRAVIQSSLC

SEQ ID NO: 956688 - protein, 110 aa, Homo sapiens
MGSNHAETRSEENSLCCYKITKETPNIVFLLLFDILLLAGSTLWYAYLLRYGLRYYSLCCFKITKRKFYTLPLLYHFYPIHGCLLIILFFCSLSFVLYLPYRVVVSQLLY

SEQ ID NO: 956689 - protein, 62 aa, Homo sapiens
SPEADPEDGKPVMDKVKEKAKEEDREKLGASTHESISSMLIDPDDVSDQNEWKPVLLSQSKA

SEQ ID NO: 956690 - protein, 36 aa, Homo sapiens
MAQSAVCSYILSTCLFFSSVTYSEFPIAHYLSLLDL

SEQ ID NO: 956691 - protein, 47 aa, Homo sapiens
FDGSSARLVCVLYILTSWSFFSSVTYSEFSSAHIVGFWSTSPVPSVI

SEQ ID NO: 956692 - protein, 88 aa, Homo sapiens
MPPPGGYGPIDNKRNLPRRGLSALQLARPYEIWKPLVYGTCHPPSRCYRPIAKQLNFPRTSLSRYRMFALGIGSLISEPLDLYDVYPS

SEQ ID NO: 956693 - protein, 39 aa, Homo sapiens
FDGSSFSITERMTGVLSTTSLNGERDFVCSHDVVCLQPL

SEQ ID NO: 956694 - protein, 33 aa, Homo sapiens
NHIKPQTVIETLCEVTKGDAFVTSDVGQSPDVR

SEQ ID NO: 956695 - protein, 35 aa, Homo sapiens
RRKHSHIASPAEINVCFITYKYNIYSSDRWIKNVV

SEQ ID NO: 956696 - protein, 130 aa, Homo sapiens
RPNKVGRWSVIRFIAGSRLGFRGMGGDELQQQRVSVVYLKGINRSPQSLDLRAFAETFQARAHLLQYRIAQFTVLKASQQSLHVGEEFGLQHGRLRYFVIDDECLTGLSSLAADCSKRRSWVICGRASSR

SEQ ID NO: 956697 - protein, 68 aa, Homo sapiens
FDRSKKNRVRQRRCKDGSIGQREVKMLGILVLKMEEEVMSSLLKAEEARNGFSYGCFQKEPALLTARF

SEQ ID NO: 956698 - protein, 67 aa, Homo sapiens
SPVFTLDQQHRLLAATHSVGVRFICACLPTRPGLSARTIYATQLACSGALLPRIRYRARRIACPAQP

SEQ ID NO: 956699 - protein, 37 aa, Homo sapiens
EQNRVPEVLAALAIELNRRGFKEIPMTGNISEFVLLQ

SEQ ID NO: 956700 - protein, 40 aa, Homo sapiens
PFYCPGAQYRRIMTAWRGAALGSAISAMLSLRGNFRRGTS

SEQ ID NO: 956701 - protein, 48 aa, Homo sapiens
SSGRSLQDPHPALVDSDTSGRSRRPPIPATTQCPPSGTRARFPLSLFL

SEQ ID NO: 956702 - protein, 48 aa, Homo sapiens
RRRGMEEQPTVLGPNCPLSIWQELRTPPDCKGSAKCVHQSGGHIAIYW

SEQ ID NO: 956703 - protein, 30 aa, Homo sapiens
MADSCSLPPSEYSSFRALFLRRSPRCRLEN

SEQ ID NO: 956704 - protein, 35 aa, Homo sapiens
LAGSPDFNTSNDVSSCEGNVYGCQQPAVNSSSVIS

SEQ ID NO: 956705 - protein, 35 aa, Homo sapiens
SYTDPPLLILEPGPHRTPPVRRQQPIRTSAPINFR

SEQ ID NO: 956706 - protein, 57 aa, Homo sapiens
LLEIVVSINFYELTVTEFRCSEESEDPHNLLELVVTIILILRLALVTLAFSQYPFST

SEQ ID NO: 956707 - protein, 48 aa, Homo sapiens
ESGRDMVDITQEPGFGYHVRREHAVRIKNHVSCLNTYCSLHWELIHTS

SEQ ID NO: 956708 - protein, 95 aa, Homo sapiens
ENGTIEIIKKYTPTWQMYQRAQAIAGERSKRTTTYARITPICDRASLQPVHITIWYYLRVNRNITAMPNWLLEVRMAAVEHRHSSGLPYWPYLTA

SEQ ID NO: 956709 - protein, 84 aa, Homo sapiens
HGYPYNVVVVGRIIIADCPPKSISDCGRVRYRVHHSYTIEPFGLDCCTMPPVGSMHQPERAILKPQYTSCLLYSSKVPQSPLIY

SEQ ID NO: 956710 - protein, 44 aa, Homo sapiens
THLYASNQNGHTAESIMMPHTGIHHLAIMPGEASISLEVSAHGL

SEQ ID NO: 956711 - protein, 105 aa, Homo sapiens
MTKPMESRKTARKQTMFHRAHELRRRAEDYHKCQIPPSAKEALMQTGSECRQRIIVILQDCPTGSYLTAETLKNRMGHQPPPPTQQHSITDNSLSLKTPPECLLT

SEQ ID NO: 956712 - protein, 105 aa, Homo sapiens
MSTVLDKINGKRKTAKAHLRQTKNDRHVSTRAKERQVSEAEENGTLDMTDIHTYMEMINVRKRSGGGQRTTTDAKSPLLQESLFSNRCTYNLVLPGSEKNYYSHA

SEQ ID NO: 956713 - protein, 36 aa, Homo sapiens
GIRVELLQPFASLSFSVISPAGKELSSVIFTITTRH

SEQ ID NO: 956714 - protein, 58 aa, Homo sapiens
QDPRYDVWKPTTHWSNASTFKGLIMRVMNLTYSQQMNMASTATTTAHGNKRRHKQLEK

SEQ ID NO: 956715 - protein, 45 aa, Homo sapiens
QNATLGDWTTSEYFEVYMKARGLLSFCHPKIASTLSLRQMVIDHM

SEQ ID NO: 956716 - protein, 47 aa, Homo sapiens
VTVDAELENSRPQDCRLKFSGTLDCIGLCLDQVKSRIFNRTGTSSVY

SEQ ID NO: 956717 - protein, 80 aa, Homo sapiens
MAGPAHVLGPGKMVNYAWARYAEGKLWWRSVAVRDVQIGRPTWSIGAKDLSIHLVAGSLRSFPHDSWCSRIPYAPPPTHF

SEQ ID NO: 956718 - protein, 42 aa, Homo sapiens
PVLCRKLHRFTLGLHMDYTGATQDYTGLHRTMQEHTGAIQEL

SEQ ID NO: 956719 - protein, 34 aa, Homo sapiens
DLEDPVSYRISSSCPRSFLRMLACGDPTHPATQF

SEQ ID NO: 956720 - protein, 35 aa, Homo sapiens
GFPAEGPVCPGPLGSESDFVPSCAKAYSLRASTVP

SEQ ID NO: 956721 - protein, 73 aa, Homo sapiens
IHRQHRRSEYEQQEEYLIVTAGPGSDISSPDLTDLYILKQTPQGTFLVGQPSPQTSGKQLTTGSVVQGTLGVS

SEQ ID NO: 956722 - protein, 43 aa, Homo sapiens
RFCRIPPGTVDVQFYEGLEKAQPVRVRFSGDYVAELSSLNGSK

SEQ ID NO: 956723 - protein, 49 aa, Homo sapiens
PEQIDNSGEGGGGGDDNSCGCGSNDGGGSDNGDGDYSSDGDADAVVMVM

SEQ ID NO: 956724 - protein, 52 aa, Homo sapiens
YFTSPTLPAPHLYPMLLLLIYTHYGALAYGMRNLQGFQERYISKYQCWPLRK

SEQ ID NO: 956725 - protein, 60 aa, Homo sapiens
MQLDLPPKPHEYQSNSFSLRWAFSYSLTRMPARGYPCASEYWSLTTMYEGSTYSPADRTA

SEQ ID NO: 956726 - protein, 54 aa, Homo sapiens
LADSHCCRALPFAIGFDHQTGRTRYVQHALCGYDQIQQAVQNGHGTLMPISNRP

SEQ ID NO: 956727 - protein, 48 aa, Homo sapiens
MPENQAASLGRTRPRAFGFSSRRRLMSAAGNAGLRITYPADLAPLWHG

SEQ ID NO: 956728 - protein, 50 aa, Homo sapiens
CRGPGAAASSGSRDSRSSSTSFSLPPRPTCGFFCCSITDGVGRGGGSGGP

SEQ ID NO: 956729 - protein, 45 aa, Homo sapiens
MSISSSIPSAMVGWLSARHATCYRFTGARPPPEPSDVRQSFFQGE

SEQ ID NO: 956730 - protein, 123 aa, Homo sapiens
MLTAAQKSVGQNSHQGWAGLPSLLFRSPSLLIPSSLLNNLTWLCTGVNPQETAAPLGHSGHTLYYVGPPSCTSSLHRSSQTGSLTTPAVSIKPVASMPLTETMLPVRRVGCHLCCLQALDQST

SEQ ID NO: 956731 - protein, 141 aa, Homo sapiens
SRFFALRNDFDGCSQQFTAFFQTVTYRAAATWGGRCITVLGVLTIRGRRLSIMHEKKVIPLVEGVEPAAAANAILAWHVRDHAIVQIRPLPITATARTSTRKPGIASCEMADSGPGWITFREVFVLYLSKGVHFALQIGMK

SEQ ID NO: 956732 - protein, 117 aa, Homo sapiens
YVFAMQNFARCCLGRQCCRLYPLVDGPPFEQALTVPMGSVIASVSPWSCPRSIARAALAATCNRRFRRCVGSAWNARNSLSMPHRPISSSSATTRRASTPIEPVRGSIPCSNWGICR

SEQ ID NO: 956733 - protein, 115 aa, Homo sapiens
RFFAVVGDVLGRPRVRHQAQEGKQDSHIGRVGALAAILELESIGHALAEPDMPLVLGVLADVPVLLGHTGLSGVHAGLTSLHVAEDFDGIQVAALVGVNPVLSTLPVRVAHLEVT

SEQ ID NO: 956734 - protein, 33 aa, Homo sapiens
MSLIRSTMIRSLLLTHVAGDTLELARQALVFVG

SEQ ID NO: 956735 - protein, 73 aa, Homo sapiens
DSLPMVNTSISPERPPMSICASCAKLQFPTKCYCCKRQDCSIWLTDEESPMRINPPLVALSVGAFGIGVTEFA

SEQ ID NO: 956736 - protein, 46 aa, Homo sapiens
TASADIRAVVYDFSPSRSGEHARNFLQDWKGKLVCDDFGGYKASFA

SEQ ID NO: 956737 - protein, 101 aa, Homo sapiens
SILPSDENVGDAGLGLFMPVADGVSVRTITSRAGGVTWMPSVMLSHTLLTAIAHSDDVIPIAVQELDAEIRLITHIAPANNLTLTDEVPIDGHATVQVNYL

SEQ ID NO: 956738 - protein, 125 aa, Homo sapiens
MSGSGESMSDGFQFEYGGQGSDPADVVIQLTLLRLMCTEASQNISYHCKNSVVYMDQQTGNLKKALLPPELNEIEIRAEGNSRVHLQQSLSMAARVTPEPGAKPGFEYKNHQVCDGVPEARNSEI

SEQ ID NO: 956739 - protein, 63 aa, Homo sapiens
HATGELEQYDSAYVLAKRLVAFAPAIEFCGDFELERDDLGIWWKKFLSGKVFKKKQRIKVWKM

SEQ ID NO: 956740 - protein, 43 aa, Homo sapiens
DPNTGMLIRKGYKKKKELGKSYPAVYKNITSSITVLEAPLPSD

SEQ ID NO: 956741 - protein, 79 aa, Homo sapiens
SSSYGACQRYAVSSELRDRNSREQRQVAVLISVRYDVKRAHDLLSFWFSRSVEKYTGYWLVRQAVIRRPFDPSCRSSYM

SEQ ID NO: 956742 - protein, 42 aa, Homo sapiens
LEDPMLIPPWIKRFLVTSNFKVSASPLLYTLIEKTMHNVQAS

SEQ ID NO: 956743 - protein, 38 aa, Homo sapiens
GSLHRQGEDISRVYQCDLCLGDHHIHVMRESLRQLKRC

SEQ ID NO: 956744 - protein, 115 aa, Homo sapiens
  misc_feature (35)..(35): Xaa can be any naturally occurring amino acid
VSLGDLEDPKLQQDKVRGNIKRRLSSHTIENSLGXINNLRKKENEKAPAKDYWVGTKGLAKTKKVTEEKVVREKGHGKEKLSSSSLQIDLCHPQQPSAITPRFAKKKILGGEKNA

SEQ ID NO: 956745 - protein, 63 aa, Homo sapiens
ARGDRSNDKEHPELFSGLVWSGEQDIAAGLIDGLGSASSVARDIVGEKELDGFYGEESPFDRF

SEQ ID NO: 956746 - protein, 50 aa, Homo sapiens
ISPCMNIMSSKENGRHLVLLTFIFLSLILSLGMGVLRRVSRKEEVIILNS

SEQ ID NO: 956747 - protein, 37 aa, Homo sapiens
DLEDPVLISVIWARGDGSFGGDWEKTINIQGVIVILL

SEQ ID NO: 956748 - protein, 33 aa, Homo sapiens
  misc_feature (8)..(8): Xaa can be any naturally occurring amino acid
YYDEVITXVMIIIEILLQFTMSCLFAFLPFYQL

SEQ ID NO: 956749 - protein, 46 aa, Homo sapiens
PGIKAHRITTGRCEVDYQEGLEGSRIVIKNLMPPRHCGMRVFVLDL

SEQ ID NO: 956750 - protein, 60 aa, Homo sapiens
VINSELMDPNATDDNQAPDHQNTDYRLNPMLEKPVKADIPKILVTGTLDQRGTRGSEIPL

SEQ ID NO: 956751 - protein, 38 aa, Homo sapiens
SRLRGILPSTVRVERLWSFWQLSNGLQAWLSPSLAVPS

SEQ ID NO: 956752 - protein, 74 aa, Homo sapiens
MDEELWLGFTTVLLRTAPCLLCHIPTRISLPREVRGSLYGAMQNWCRETKTDGRDGVIFTAGVERAELRTQSTE

SEQ ID NO: 956753 - protein, 120 aa, Homo sapiens
DDRRTISAPSKTSKSLCGEREAKVINRLAVDQQHRHGWASKLWPNLLGEIGIYRVSSPGLTDHKIAVYSFSRGTLMSRLAVFLLTALLGANAMAADVIDPNRTKEFGDITVRYNTFTSSF

SEQ ID NO: 956754 - protein, 73 aa, Homo sapiens
MALGFMAWATLPIFSIMKRFILMSFSCQSKVMRSSGRPWHRGKPGLDPGSCSGRTDGHRGNPLRLDGCPIKRR

SEQ ID NO: 956755 - protein, 91 aa, Homo sapiens
TLEYPHTNAFGTGRAGNSLPMALRRSVGGDVTLRVVPGLYYERLSLEAKSSFFAEPWTVGSEADRIGYRFKGGSALSFQPREQPFGAGSDP

SEQ ID NO: 956756 - protein, 37 aa, Homo sapiens
CAVDCDTIICIIHQQSMVQNTALSSITLYRVPPKHVG

SEQ ID NO: 956757 - protein, 81 aa, Homo sapiens
LLYDEQPRFLLWRDTKISHKLCVEVPSLGPIGNVLGTQRRRRVNFSNSDGYVSLSLYWAGFIAEKPLIQSHLSLGAQVIVK

SEQ ID NO: 956758 - protein, 64 aa, Homo sapiens
RNAFRGHATPTRVGVALPLALESRPRARVQPPPPQMLMLVADVQTRTLTFEAEKAIPVRTEIEL

SEQ ID NO: 956759 - protein, 39 aa, Homo sapiens
RLSRAPYSHNGNYSQRGSRGSTPSTTSSSVPIKRMPSRS

SEQ ID NO: 956760 - protein, 107 aa, Homo sapiens
LHDTAPTAVLITLENEKQHKSPLLGESQIGGYHRMKHYSLLDLSSSQATKRTCGQLNAYCKAKLYILYASNYMIFRKRDLAIAKLLESAAKARNPEEVKYRQLSSRA

SEQ ID NO: 956761 - protein, 93 aa, Homo sapiens
LRRKLLIFIAIHERIDKGIVRRIIASSYRRMFCKFIRKNSAFLKPISRSNSAAIIVKRCHMKHMLAFHFMESRRLSHSFSRVFDERRIERGTE

SEQ ID NO: 956762 - protein, 98 aa, Homo sapiens
KIPACNEGHRVVQISTCRSCKKSVSNVNFERKVQLGDLNANITKKILRLLLFSQLKLSRFQRIPHRGPNMHLQILQTVCFYNCYIARNAQLCEEFTDN

SEQ ID NO: 956763 - protein, 103 aa, Homo sapiens
MAQQGWQPGQPLELKPTIITAGRRNTYWGGEGGGYVGSGDGWGLQEGPRRGEGDRSRFKQFDFPSTTADFIGEQKYNQSLIDAEYSARSATLTTETEGVTGYR

SEQ ID NO: 956764 - protein, 90 aa, Homo sapiens
RNAFPQRIPELLASNPSYVFFSARPDSNEGPRGSLNVPLTAGYSVAVDRKVIPLGSLLWLSTTKPDGTPLSRPVAAQDTGGAITGEVRST

SEQ ID NO: 956765 - protein, 72 aa, Homo sapiens
LILIVSGKLSEEVVVHQINKAFMNSGHAMPIRSLTFPRDSQLLVTASDDRLHQRSMTVQHTQFWLGTRDKRP

SEQ ID NO: 956766 - protein, 193 aa, Homo sapiens
AKRRMPDKAHLWKLRQGRWARWHPELFGPGMQHRFGGRGTTEQGTWIEADALDTAIAQQAVEHALSITLGEELFMTHLHGQRPINAIEKSSQLRQAWRRKALRELQPQRRNALTQRAHQADKTFCRRQLFTQIASMADIAGEFGGEAKIIRHDFGPALHSGGRGASIKSGIALNGVEDLGIEPEVIAGTCLNG

SEQ ID NO: 956767 - protein, 61 aa, Homo sapiens
LSTVGQAGACLTYRGYDVRELAAELQFEEVAYLLLYGELPTQAELAAYSNKLSKLRVGTEL

SEQ ID NO: 956768 - protein, 179 aa, Homo sapiens
TYRLRVPPTSVLESQVLERLIVENLQLQIGERSGIRISDEELNQAVGTIAQRNNMSIDQFRAALAHDGLSYEDARDQIKREMIISRVRQRRVAERVQVSEQEVKNFLASDLGKMQLSEELHLANILIPTPDGANSEQLNAAAAKTQAIYERLKAGADFAQMAIAQSCSDNALEAEICRR

SEQ ID NO: 956769 - protein, 138 aa, Homo sapiens
HLDVNLRTVHFDQIDVLPYPVVCIGCHGFVQHSRFKGADRQPHLADAQFKLTSALPRSCRKGSEAQPDDLRLDQGQIVMRCVLFHKTPESNNYPPEGNFTNRKYCSFPCLKTLVRCLCRRLLIGCRKIHPMIGRKRKA

SEQ ID NO: 956770 - protein, 33 aa, Homo sapiens
  misc_feature (19)..(19): Xaa can be any naturally occurring amino acid
LADRVSVSAVYDNETPERXLTQAVCSQWAECSY

SEQ ID NO: 956771 - protein, 58 aa, Homo sapiens
NEKHVYINQHLNWGPMSVENRGAYKTRRWDSYPQTPDTALPKVDHKALEYHARLHASE

SEQ ID NO: 956772 - protein, 31 aa, Homo sapiens
MGLGTRHGCINARKMTFALLKGVLQMSEGST

SEQ ID NO: 956773 - protein, 57 aa, Homo sapiens
MAPTQRTGSTDPKGNSGSGDYMGATCHACIGGTNVRNEMQTLQAEDTTYSSRYTRVK

SEQ ID NO: 956774 - protein, 36 aa, Homo sapiens
GVVSVRCQWVHGRGSQEREGYPHAGNRSREILFLAP

SEQ ID NO: 956775 - protein, 60 aa, Homo sapiens
VLAHRFHGNPLIRALRIKEDTSAIATVSGSVPRDGDLQVLAFLHLDTSDDGRLKRGNSIH

SEQ ID NO: 956776 - protein, 65 aa, Homo sapiens
KPWKSGVGLVSTGPGLLRTTALLVMRGVHWCSGMTLVRPCSLAATGMIFLSVIKLIAEATLQVVG

SEQ ID NO: 956777 - protein, 38 aa, Homo sapiens
YLVTSDDMMLVLSLVAPSVLLHHSGWLASVPENLCSSG

SEQ ID NO: 956778 - protein, 62 aa, Homo sapiens
RRGESGVPQPGRVRLAGGAIKVSQRASCSSLNSHRIGASRFRQLSAAPRNDNSLNASGSPPQ

SEQ ID NO: 956779 - protein, 55 aa, Homo sapiens
MGVGDELGSLVISVVRLQCYTFSMLTATPCERDEEGESLYHMRAEPSSPWAPLTM

SEQ ID NO: 956780 - protein, 36 aa, Homo sapiens
IIIALQPGSRTVRLDVIPRSVLVLVVCACPLLWIVA

SEQ ID NO: 956781 - protein, 115 aa, Homo sapiens
MLVFLPGPNQQLIWIPLRHLKPYYELDAQEEILGGSRGPRSCSHVEIDTEEDPNCHEQYPSNIATYLGTDQEAVTDGWNKNLRKAGQPVTMSNLMVPMIAVITIAVSIPSTTAAI

SEQ ID NO: 956782 - protein, 104 aa, Homo sapiens
GRLYTDPLCVGRRAWLWLDGPYCTDTLYGHMFTCNVCCRRLYIAKLRPFIFCNAQDSDTLCVVGFIRGLDSPDLPQWTISKDMRKAIGIQQSNSLLQPGECERN

SEQ ID NO: 956783 - protein, 60 aa, Homo sapiens
LYSVVDSLHGSPTTVRLFVVIALLIGSRCSMVIAPAVDSINTLFWRSDERRPPLRSVSQF

SEQ ID NO: 956784 - protein, 83 aa, Homo sapiens
GSTQHGEICLDKGIGAYSDQSNNFSNRIHRLSLPYHHNRSRAIECTHCHAAKTSHDYQIVQPVCVEARHVNKYWFLRQQDHDD

SEQ ID NO: 956785 - protein, 35 aa, Homo sapiens
SMRLPHDLLTPPAENPKGQKDRGSLMCRSLMCRSL

SEQ ID NO: 956786 - protein, 55 aa, Homo sapiens
MFQRVLQQFVSLQQLLSLIGEQHEYLQANAPVDATAVRYEVPGKGFFGVIANESV

SEQ ID NO: 956787 - protein, 88 aa, Homo sapiens
ARSSTIPHISSSVAAPGAPSPGPLHCCDYDLSVHSHPGQALPASSSRPVNLFDQNFSTFGILSSDALWQLQGSIPCLHSLDAKSIPLM

SEQ ID NO: 956788 - protein, 164 aa, Homo sapiens
AQQPAMTPRLLKIDTPESYDLSCHLNDLTDAWKLYAGATWTLLDARLKDITVKNEGVSWRITLAARLPQAWPAHINVNDHERVQLTLWAYAVVYFCTMLTKAHVGTCVPAWHSTMSPTNNTDRSPRIPTGDRTIFSLGLGYQVMDNMTIPGYSYLKEEDVKDLR

SEQ ID NO: 956789 - protein, 104 aa, Homo sapiens
TLAVIDNLSLRSVRTQDLTDAWNSIAVHLDTLERLKELRQETKAVSGANGGALAPGLVSTIKEDQNWHDTWAYAVCTSYQLTKQVVLRTGLTFEPSATNKTGSL

SEQ ID NO: 956790 - protein, 62 aa, Homo sapiens
PDLSGRTELVVTNVTLRLQEITVKASNVLSEGRAARVGGWLMFLGRSSKYPSHITFDPFIFR

SEQ ID NO: 956791 - protein, 127 aa, Homo sapiens
MQRGWYEILRELANTFGGIDLVPHIESKPLSMSIEELCARSPMPFQKAEHKIKVEFAKLLKQIESVKLTLGSCGQFNVIMTTNYDFTIEEAYAGTLHSPGSLARESRYSLYRRHTAGKKGFWHVHGD

SEQ ID NO: 956792 - protein, 95 aa, Homo sapiens
  misc_feature (19)..(19): Xaa can be any naturally occurring amino acid
LTAVTSMKAEDLIKNDQRXPERLFTPIRHPVLHVYPCKNIAKEISETSYTYLLCRAGRKFAELEILGRPGANISLVRIEIEEVMLEADVIKVKTV

SEQ ID NO: 956793 - protein, 34 aa, Homo sapiens
HYRLLHVRPLHIGVSRVNEGFMLLMWMGEGAIME

SEQ ID NO: 956794 - protein, 78 aa, Homo sapiens
YSDLNGCYLQVQTGNDYANASEAPVEDSILADKICIHCGFKVVVDNPLRYAAKERQGRGLCASEHPSPGSPRGIGPTT

SEQ ID NO: 956795 - protein, 199 aa, Homo sapiens
RSVPPGGCCPGARPGIRAPATRRAGEDVIGEVIGGAVARKFFGGDKGSHFLRARLALEVRSQAIDVSHVTAQQRRLHRVHLTRGVIEQGQHLPSKTARVVDHRTPQRACFPPAVVGAAVAKTDQHHQCRAEQGQGHQRQIDLGGEKQHEIHRHCHIPQQQPEQRPAHIAHGLDDQAVFLQKGSFQTRTSRWGGGHNPLL

SEQ ID NO: 956796 - protein, 45 aa, Homo sapiens
MYIYCPHQSKAVQQNFQIPVVWGACIPFPSPVTLVCAVCDETLIQ

SEQ ID NO: 956797 - protein, 116 aa, Homo sapiens
MLLPSDKRFAQFIHVNKLLEQMSLNVIGKSALWVQLQGTLMPKTTLFDLDGKIAFVSGASRGIGEAIAKLLAQQGAHVIFSMPQCWMGCQHVADAIIAEGGKATAIACHIGEMEQI

SEQ ID NO: 956798 - protein, 66 aa, Homo sapiens
YTRKSAHDDSDNDYNSELLALLAMYRYVAQRRDDHVGDYVIEQLHVDHSAPARQRNRCSLVRASAS

SEQ ID NO: 956799 - protein, 66 aa, Homo sapiens
MPLSETLSAGNVYANNGTTPWPAAGAMTNCNGNMRGCDDYLPTPSLPASWLDKPFADYSQELASLK

SEQ ID NO: 956800 - protein, 74 aa, Homo sapiens
SRTVTNGNLRQAHFKTAVEQVEEFWIDTARGNRGLRPGEEFHGAPRRFVGQANVADLAGLYLFIQGFERFLQYA

SEQ ID NO: 956801 - protein, 61 aa, Homo sapiens
DRAGRSVQLRISVQDTGIGMIQPGCERHMFQAFSQADNSLSAPALAVPGLGLVISKRLIEQ

SEQ ID NO: 956802 - protein, 115 aa, Homo sapiens
SAWSSEVGPTTVITARLARPHEHRRRQRIHAGHQQAMYKVQAAAADLLAHAGIGLIVRQGVSGAGLNLAFAQLHGFPRRQVGAEHQPGGRTEQRQHRAQLRHHGDGAHCRLNLHQ

SEQ ID NO: 956803 - protein, 61 aa, Homo sapiens
ADKHASTTSRVTTGNSPQAVIGVTAQKGMSKSNKARRIADTRGPVCTTASSIRSYQESAHK

SEQ ID NO: 956804 - protein, 71 aa, Homo sapiens
ASTDETGLADSSAQSMENARPLAWALPGELMAQGIELAAQAEHLRMGHQAAACNSVKVRMPLTMRIMSRAE

SEQ ID NO: 956805 - protein, 61 aa, Homo sapiens
AWRTTTLNARITGPGYTDCQYLLYSDKGVLRRLHAHHLLSEGHANVRVYRPALRRGPRVTL

SEQ ID NO: 956806 - protein, 113 aa, Homo sapiens
TQYAYGSQDEDVLTMRIEALPLLAQTIAQIRSQTGIGSKQGIALAALKHRPEPLPDSATPAEAIRGNRRRCSSSRMTLELPSSKPDHFNRNIADRNVNADSTLLWIFSTPPAG

SEQ ID NO: 956807 - protein, 101 aa, Homo sapiens
EVTLRILKVCYLLRCVILSSLYWDLGMPVDVSMHRRAVLIYLIRVLHKRAKLVYFNVLMRFTEIGSIHGLVSQVRKLALQRLYHLCIGYGHETDPGLKTLG

SEQ ID NO: 956808 - protein, 53 aa, Homo sapiens
LLRLLQPDLSGRTELGVTKVTLRLQEITAKASKVLSEGEQRALGDGYMFLCRA

SEQ ID NO: 956809 - protein, 67 aa, Homo sapiens
MNICLAKHPSDATAVRYEVPGKGFFWCGSANDERTRFLLQLVRGLRLSSTGWVAWVAVCPSIAIMSV

SEQ ID NO: 956810 - protein, 125 aa, Homo sapiens
ADSSLTSYLEATGITISISPLILCLRVLWVCVYITFSFKNTFRAAMRGHKNSSPSSIPRLTSYWFRLLRYRQNHHLVFYATQHASVENALPLLQQIPSSSLPGPLSTQETWCVRRRMASALLGKR

SEQ ID NO: 956811 - protein, 41 aa, Homo sapiens
MRRHAASYTPRSAWKAALCSELDGFVCSRGRAFFTEALFVV

SEQ ID NO: 956812 - protein, 69 aa, Homo sapiens
LLPDPPARYDAGADCRHITYLYDDSMGEKFCAVAIKSEKLNYDFHSVEFQCGKLPAVTMGEEFSGRIDA

SEQ ID NO: 956813 - protein, 61 aa, Homo sapiens
LYRILTRSVTTLLHPGMYRFRNEFLPCAALDGNYRAPVEVAHATDVTWHQYDMISWHKQIF

SEQ ID NO: 956814 - protein, 36 aa, Homo sapiens
MTAMWSICEYPAVPPVFKLPQETSCNSYCLIHMLYD

SEQ ID NO: 956815 - protein, 34 aa, Homo sapiens
ADRYLNGDVVALDSQHRVNDEMARSLYVSVRRDN

SEQ ID NO: 956816 - protein, 74 aa, Homo sapiens
TYPPAQLGLSVPRSPCILVNSSNLLISLPHGLQLLSSPQTLCPRLSLAPHVSASPSPGDYEHSSAYGFSVPYSP

SEQ ID NO: 956817 - protein, 30 aa, Homo sapiens
MLRSFLGASGVEIACCNNAGHFGGEQLMSS

SEQ ID NO: 956818 - protein, 37 aa, Homo sapiens
MLVVATLRGCLGRLQSGARHQRPRPAYPLCAAGSRVN

SEQ ID NO: 956819 - protein, 70 aa, Homo sapiens
LLLNSTDDTNEVYCALNTRLGYQTLHGSRYLLDDSLNKYHFQPYFMADIYSFGLIIWEHGSSLVSHEGSW

SEQ ID NO: 956820 - protein, 158 aa, Homo sapiens
GDSTGSLTVCYPPAHPADVAGALAGNGWRQKRSSRPPATQRFTVAPVLHLWLRGALEVEKQRRQYPGIDRRLQLQQQGDDTGQAHHHKFGAADPEQRTNAAVVHQAPADQQDTRRHARDRNMRINAAPNNANNATHSSENNPGNGEQAREQTVGVPEL

SEQ ID NO: 956821 - protein, 75 aa, Homo sapiens
YLPRRLNVFSCACLPRVMLFGEVSIHVFCLLFTWAVCFLTIRFESSLYILDTNLLSDTRFANIFSQSVTCLLGTD

SEQ ID NO: 956822 - protein, 87 aa, Homo sapiens
MSRFSLGDTPPESQSAHALVKLGATGVLHRPDEVTQLGITVPTIDADTVLHRHRNRHRIAQCAFTQSATRAGCAMKDLRRIIVVPAP

SEQ ID NO: 956823 - protein, 76 aa, Homo sapiens
AIEDIIGGFHLLEDRYSHWARPGCPCALSVLQASARTTGLNAVLGPEECPATSFSQLLILPPLFLRTGPTRIGGLY

SEQ ID NO: 956824 - protein, 56 aa, Homo sapiens
LCGTARGRDVQDAVGLMSKVTSIWGTPLGARRDAAQLASAPHRLLSFAHGPRRPRY

SEQ ID NO: 956825 - protein, 37 aa, Homo sapiens
KYEDHGEQNRKDAEAWFTSRTEELNREVAGHTEQFHL

SEQ ID NO: 956826 - protein, 98 aa, Homo sapiens
LVCTRGSRLSGTAPAKWNCSASHRPSSDFSHSCAGQVPVNSSQPNPSGTEASHFSAVFCPRDFSKKKALGSSPHPHTIMVEKYGRLYMPGGQPRSSST

SEQ ID NO: 956827 - protein, 71 aa, Homo sapiens
MQDPAYGFDRHHAIAGQPAPTQALFVISYAFEIRRWRRAHVVELPLAVPIHNIHHAKLIRLGDTSWLDMPQ

SEQ ID NO: 956828 - protein, 65 aa, Homo sapiens
LILRIPPNVELLRRVSGGWVGDFIFQDAFPLLWGLAASNACAAPPALLGPVGYSSTCDVPVLPRR

SEQ ID NO: 956829 - protein, 168 aa, Homo sapiens
MNLSGLLRPVYDETLCSWATRCALSPNIKLISESNIDEWSSPDNRQYFNPDWLLGREFELYESQAVELARQLKLDIDEIAHFFRPRSEFLLAPASRVAYCHLCIQSDVAFKRYPSWRKSWCYSTNAYCFQHRCLLRFLGDALVADKQWKAFWKGDAGDYLPGKRGSHI

SEQ ID NO: 956830 - protein, 32 aa, Homo sapiens
MIVSLEMMNNMGGDRVCRFTSRVDGMLVPLKA

SEQ ID NO: 956831 - protein, 57 aa, Homo sapiens
PKVELHEIFSVRRLIQNIVYDITRLKTALDHRDIAFCVKETKNVLPIYEIQAKFFIN

SEQ ID NO: 956832 - protein, 66 aa, Homo sapiens
EVEHERTLLGPVKIGDLLSWRRATARAKLCAARSVAAPARANPVVRTWCLGGDNALPRNPSTYSAL

SEQ ID NO: 956833 - protein, 47 aa, Homo sapiens
WTCRVAATSRFNSSVRLVHQASASFRFCSRMPSYWLRMSLRILARSV

SEQ ID NO: 956834 - protein, 86 aa, Homo sapiens
MWNCSEYSDLFHEDLGVYGEGEFSMQARLRGSQKAHCFILKVMKTTKAPHLEEPGSAPASHVDKGQQKEQGGGLRQGIVKRSSYPI

SEQ ID NO: 956835 - protein, 103 aa, Homo sapiens
  misc_feature (98)..(98): Xaa can be any naturally occurring amino acid
TPHCRTTTEACSSSTNGGTHPPKVPLYNSILANVVVVISQTFFEHLNTGEVRLSIFMRGYLYYRALFNRHWPQNIFGMPGVKQQSSCQLLFKMASLLXILPDV

SEQ ID NO: 956836 - protein, 65 aa, Homo sapiens
GVTFPCRRRESGSGRSDRAPPDSAIILPSIVAQREDDADKAEYSAETVLERLDDLVHGHTRGQAE

SEQ ID NO: 956837 - protein, 58 aa, Homo sapiens
VKTGTHGLYTHTLYSLYAEYGAKTIYFGGWEYASTILKTLKKNTQAVLHACRVYYACV

SEQ ID NO: 956838 - protein, 84 aa, Homo sapiens
VVKYVHQINQRNGVVTVTAQNFGDTNIDDKSITLTPYVAGTGGNTALDVSAANKDQGKAIAEWRCGPEATNGIAAKYLPGSCKG

SEQ ID NO: 956839 - protein, 46 aa, Homo sapiens
KTPHRLFSLYTEYGAKTIDFRRLGVCQFNSQALKKNTKRFARGARF

SEQ ID NO: 956840 - protein, 40 aa, Homo sapiens
EDIFFTSNTGSAVGFQAIMRIALRSSRSLVSEMSGITIVI

SEQ ID NO: 956841 - protein, 92 aa, Homo sapiens
SKLTGVVDQSVVLVLIQQQTYSWASGITVTGAALVKGSGGDDILKLGVGARRYRQVVIVIGVRVEVVQWLGHLSGRYLAETTPENSSPWYAG

SEQ ID NO: 956842 - protein, 42 aa, Homo sapiens
SPAPHQVDFTLSSDKRLRTPQFSRCPLKDAKTLWPPFNSLRG

SEQ ID NO: 956843 - protein, 51 aa, Homo sapiens
TDTYGFKDSTLGPRGTQSRGFDRSGNQGTVAESDNDPLAFGGNVLIPGWCR

SEQ ID NO: 956844 - protein, 61 aa, Homo sapiens
QPGPYSKTYEFGVVNFVDWYSERMLNNLGAAPAPYLKGVAAHEERLCGSGLARDGIVSVKA

SEQ ID NO: 956845 - protein, 46 aa, Homo sapiens
IPTYVAYLIENNANQYNSSTALLQLLLGVSILPYLQAYRSNIEIYH

SEQ ID NO: 956846 - protein, 126 aa, Homo sapiens
AQHCPDHGNTICWLRRVEESPQKHRKCYAAGSSSHQTRPGFFLIGRGVAGIMGSGRGKRRRMATDRCPRARSIFSGDLESRFEFADALCCCMSWKRPAISSGSRLGPMQDERRKLSPGDPASNLVN

SEQ ID NO: 956847 - protein, 98 aa, Homo sapiens
LETAIAASLARPGTTGTARPTIFSSAEQLLGCQTERTEAKCRGAQQTDRSKYAAQKRRVRAAQAEVEAVLIISNNSGPGIRITNQAQRPLNKQPGTPG

SEQ ID NO: 956848 - protein, 34 aa, Homo sapiens
MRATARRYCSTNELTRVLSEKFGIDRYINPTKEI

SEQ ID NO: 956849 - protein, 56 aa, Homo sapiens
MVTVRHSAGRNFMVHFMEEDRRRDKEPGVKALTTGGGVSMLVLEERKDFPPGSFRL

SEQ ID NO: 956850 - protein, 76 aa, Homo sapiens
LVPSLPELGGLLTTACGIRCVCEFRFNLLRRIARFGALHFHGQQVLRGPVFIGAQFKGETPVCIGCFGFLDLDVLD

SEQ ID NO: 956851 - protein, 71 aa, Homo sapiens
THRQDPGTSVLMKLGLSDAKLSKQQFVVNIGKESRSQCDLVKEARKNEGALTIWWIKLGKRIPGWSECYKC

SEQ ID NO: 956852 - protein, 52 aa, Homo sapiens
TLKGLTVHPSQACSLGKVKKVKRNSATVLPRLFTDYITSCITSIRGTVLPVS

SEQ ID NO: 956853 - protein, 71 aa, Homo sapiens
QQHTGFQEPVFDEARTELSKLASSIFVAEYRKRVQEPLRFGEGSQEERRSANYLVVKLGYRILGWSECNKC

SEQ ID NO: 956854 - protein, 81 aa, Homo sapiens
PSHFLQTAPSQDPGTQCSDEAYGLSDLTRASSSFVAEYRRRVQDASCDLVKDARKNEGALTICVVKLGIHGFQDGASATSV

SEQ ID NO: 956855 - protein, 56 aa, Homo sapiens
MDAHESHEEAEGRRRQLGRRVHGILRLVKLSPFFVFLDYMLSLLPLYVLFIPFLAV

SEQ ID NO: 956856 - protein, 36 aa, Homo sapiens
KKCLSDITRFPQLGTINSCAPDFSHSLIALSFRAEI

SEQ ID NO: 956857 - protein, 71 aa, Homo sapiens
VVTRLISHNDLTYQDVVCFAPETTRIGSFDSCFHVVGHVMPPGLVMLVDRTEHVKDSSRSSAEEPQCASFC

SEQ ID NO: 956858 - protein, 42 aa, Homo sapiens
MVSPIHLLPVKKISITSTTTTITIITITTTTITTITSLALSG

SEQ ID NO: 956859 - protein, 63 aa, Homo sapiens
LETQSSACLIQFEPGIATCRGQALRSSSTATPCPIGTSCGAEWHNKLMAESQAVTSSGHTISV

SEQ ID NO: 956860 - protein, 70 aa, Homo sapiens
VSTRSPPETQSSNTWPLLDQARTRSQIALAASVGFFAAIQAPLGDPFMPITRMSGLRCEFLAVRSESVSS

SEQ ID NO: 956861 - protein, 40 aa, Homo sapiens
VVSSTDPPLETQSPTSLFGLTYAILIFACFVSNLQCDREL

SEQ ID NO: 956862 - protein, 46 aa, Homo sapiens
DSTRIPPSKPSTDFVQPSGLAPLSPLIALRVVSNSVIGKPPGSPYC

SEQ ID NO: 956863 - protein, 54 aa, Homo sapiens
CTLVGRPYTIPPRNPVLPQPALAQHCGLEPPPHPHTQTQSRWLPPLDVVKIPCL

SEQ ID NO: 956864 - protein, 36 aa, Homo sapiens
SLHDPPLKPSNDLSGYARIKDSSERASACCSRILYA

SEQ ID NO: 956865 - protein, 54 aa, Homo sapiens
  misc_feature (41)..(41): Xaa can be any naturally occurring amino acid
LAGSPPKPVVDAILGVLINIQITYNMPLVSTLIQCGYETIXGTGRYYILYLLSV

SEQ ID NO: 956866 - protein, 100 aa, Homo sapiens
LLDIAHLLLCGSSAAMAQELGTPALGASNSEPSHTSLHSGQGQQPLSSQGMCVSWHFVTINSKWSLSHCEVTYRKSPASHFALAGSSELPPGKPNLCPNP

SEQ ID NO: 956867 - protein, 68 aa, Homo sapiens
LIGLSLLLLQNLEQVENRLQELEETNRTCQNVWNSRSSGRECIQVRVECKQNRMNVENLLELDCTALH

SEQ ID NO: 956868 - protein, 45 aa, Homo sapiens
HDFPFVTSDVAVLHDLAPSLAACFIFISLSHSGKVGAPLDDRPCT

SEQ ID NO: 956869 - protein, 176 aa, Homo sapiens
  misc_feature (5)..(5): Xaa can be any naturally occurring amino acid
PDSWXCCPSRHILIKTHVLSLLIVSDYISQTPTSSTKQQLLSFRGMVGYFRLWIPGFAILTKPLYTLTKGNLADPIDPKSFPHSSFRSLKTALKTAPTLAFPDSSQPFSLHTAEVQGCAVGILTQGPGSRPVAFLSKQLDLTVLGWPSCLHAAAAASLILLEALKITNYAQHTRKV

SEQ ID NO: 956870 - protein, 81 aa, Homo sapiens
MVAIQGMLQLWSLIKNTGSLIVTNICRLYSEARASQHVLSSGEGCSRCIKDMGGGTSGKVSVSMPREITPEVSPGLYKQPR

SEQ ID NO: 956871 - protein, 53 aa, Homo sapiens
MRPDFLVCMVFLQIPQLSKEHIHNKERPLVYPKYPKFLNSDKGRMTTNTPMEG

SEQ ID NO: 956872 - protein, 39 aa, Homo sapiens
AQREVTLSSQCHRLLMGELNSKPGCLPEQRDLHTERGSS

SEQ ID NO: 956873 - protein, 43 aa, Homo sapiens
MDLALNVRRQAMHFKCMQLTDFILKITAQCPTEVCPDKPGRRQ

SEQ ID NO: 956874 - protein, 59 aa, Homo sapiens
VGLVVMSIDCMLASVNISGFAGCKVLQLLSFAVVIVSLEPSTVSYVRYECAQLGASTIL

SEQ ID NO: 956875 - protein, 45 aa, Homo sapiens
IACRTYFWMGTVRKLEDEISEQQHLKGMAMSPSLECKVHRPKPCT

SEQ ID NO: 956876 - protein, 59 aa, Homo sapiens
MRIAWCTCVAHERLRSMALPSVRRQAMPFTCLPLTDFILKFPHSAHQKSVRHAWQKAAL

SEQ ID NO: 956877 - protein, 126 aa, Homo sapiens
MRNCPGDDMGEAHRLGAVPDGQSVDVTGLTALMLPSLLQQLDKLRMIIESVVTSSYTLLSMSSVSPAKFLYRELFTCQVDGACPFPMACEQERVQAHTSQPKSLWRGLFVIRVLCVFMARYTSSST

SEQ ID NO: 956878 - protein, 66 aa, Homo sapiens
GYNTTRVYDSKDRKLVNLGRRITKYTRVTKNPVREYKILKKRHRLASRKRRLEKDRRKKNLSDRVG

SEQ ID NO: 956879 - protein, 48 aa, Homo sapiens
PRKVVSSILPITERNVVLRELRDRDDVVGVSHSSSRQLIGHLEVQDAV

SEQ ID NO: 956880 - protein, 61 aa, Homo sapiens
  misc_feature (9)..(9): Xaa can be any naturally occurring amino acid
  misc_feature (59)..(59): Xaa can be any naturally occurring amino acid
EAERDVVQXGHCQESCRVIEPLGHLSLWVHQLGPQVELRWCHPRVAGYRMVKLHDGQCXRE

SEQ ID NO: 956881 - protein, 36 aa, Homo sapiens
RGLTRVGVDMAARAVPRVGVVSRPVFNGGRAFNTAG

SEQ ID NO: 956882 - protein, 38 aa, Homo sapiens
RTDHLRIDKPSFAIDRYLQNERTVDFALSFARIVERSD

SEQ ID NO: 956883 - protein, 34 aa, Homo sapiens
  misc_feature (34)..(34): Xaa can be any naturally occurring amino acid
FGQLSNALLRDCRYLSAIGMHTQGMTQEQSRKMX

SEQ ID NO: 956884 - protein, 75 aa, Homo sapiens
GSARIARRHRVSEALDIDAALAQADLVVTCRGSGVPALSAEAARRAVDARRGRDLMVLDLAISGDVEEPVPAGVE

SEQ ID NO: 956885 - protein, 106 aa, Homo sapiens
MSQEKEFHEDNVYQFKAGTGHFRYFGGVMSSVKARTGHLDVYVQVTGRYDGFSLGSDGLTFLSSYITKRNTLTIGVKCLGHAKIFGGGMAEIMADVSQGCFEPVVR

SEQ ID NO: 956886 - protein, 52 aa, Homo sapiens
DLYEDPHDCTSGMHTLEREEWVAMVCSWMELSPGEVALELGALGFLSPGDIY

SEQ ID NO: 956887 - protein, 151 aa, Homo sapiens
MSDLLRIPHAATEGQTPSLSRRKLSRGSGKLCVAGVSADRLFMTWPRPEPGSGASSVAEYMGLYTPQTLENLSTDADSHIAQLSSVGSQVGLPLSPDAVHLPGAEFRRAQILDYDGVMIGQLTYLDARNGPVALCITAAKKGAVRMATRTG

SEQ ID NO: 956888 - protein, 40 aa, Homo sapiens
LFLCILVLQHVNNCARLGACGCEDGRTCTVTIDWLHTPEA

SEQ ID NO: 956889 - protein, 67 aa, Homo sapiens
SEKRADIADLATELVYDILNSLSALPLCVQRYGRRVGVRADKRHRGADSVAGAIRQPGNVAAFHRAE

SEQ ID NO: 956890 - protein, 70 aa, Homo sapiens
MPVTRPSISALCKCLGLVLASSCDPKATGGLMADSRTPGPEDVDNADGTNPALLSKGMLGGDDGMTMASL

SEQ ID NO: 956891 - protein, 115 aa, Homo sapiens
TYYGIAVPRVYWYSGRPVSMVAVSSDCWVHLQTNNRQNRHTGINMRFIIVVLPMVLTQVTGLRFARPSATPAIASVPGTKFKWAFDASKICSFNLEMSKVRLSSLPCRWRLTMSQ

SEQ ID NO: 956892 - protein, 128 aa, Homo sapiens
HLLGAKIYSPCLTGTPAYTKSKENLPCNRHRFPYNHNSNPQSLPKSQLFPQTTALCTVIPVSYWQIHMCHRVSFIVTQHKNNKLGNSIPSTIPNNGVPYHLFPHSFLSPFQLNHSSILFNLLTHSAFV

SEQ ID NO: 956893 - protein, 71 aa, Homo sapiens
KTNATEPEPSVNPHIYGQPIFNKGPKNIQWAKDSLFNKWCWENRITIRRRMKLDLYLSLYTKKSNQDGLQT

SEQ ID NO: 956894 - protein, 132 aa, Homo sapiens
SDLLQSLHSGAWQSSRSTFLVRLTVGFSGGWRCLSIEDKDLVGLLAASRDEMWWVDDGLCSFQSQMAGQSQDILGVLDSQVWSDNTGSYPFSELISEASSGTNPVRRGCSCESPCAARLGEVKDLGWGTQEA

SEQ ID NO: 956895 - protein, 61 aa, Homo sapiens
KIMPLHSSLGKRARIVSKYTERTHAGQAPVAHTCNPEHFAGRARQIAGAQEFENRLGNTVK

SEQ ID NO: 956896 - protein, 106 aa, Homo sapiens
WRQRLQRVDFVPLYSILGDRVTTLTKKTQFDILDGFTTSWDVNQYRWGLCRLASRCPHSWFLREALREKFSSLSPALRGCHILGARPLPSIFQGNQQPVKSSSMNP

SEQ ID NO: 956897 - protein, 115 aa, Homo sapiens
DHLYQEMEAAVQSWHADGPLSTAVKATMQSYTGSQQLHPLRDHHGPFTHRQCGAEEAIPLYTQEEAIPLYTHKAPKSSVSNISASPRAPLCAFARDNPAEVGSTHQPPGTRSLSF

SEQ ID NO: 956898 - protein, 133 aa, Homo sapiens
  misc_feature (75)..(75): Xaa can be any naturally occurring amino acid
PVEVQCSGTILIMKSPPPRFKRFSCLSLWSSWVYRHVPSFPPNFFFGIFGKRLGFTSVGLDWSQIPVPRRDLAHXRPPKCAGITRCAVFWFGLFGLVFGFFFFFFWKQILALYPGLRSRVAISAQWHPSAFQS

SEQ ID NO: 956899 - protein, 47 aa, Homo sapiens
MHTTIHQSTSIFSNTFSHRITQQFIVRLQQHNTSIRIRRRHLQHSAS

SEQ ID NO: 956900 - protein, 51 aa, Homo sapiens
MRVESAYEVEYGIRNELGNPKSRPERLYEVRNYDGRIGEDARRSRQLDGGY

SEQ ID NO: 956901 - protein, 49 aa, Homo sapiens
MVHLPHVVVPEWAYYNRLKKSTIELNAMIRITDTAQEHFAKLLANQEEG

SEQ ID NO: 956902 - protein, 31 aa, Homo sapiens
LIELGPGEAAVQLSQDRGHMISLDNKSETPS

SEQ ID NO: 956903 - protein, 100 aa, Homo sapiens
MSGPGDGDCRGKPGSLKTGSPAKIGAPAPPQAQLQGRVEFWPSTIPKLVSCSRTKFPPFVAAHVSPTTAHIRATLQFIRVAPLRKAGGRGQVTLARASLP

SEQ ID NO: 956904 - protein, 31 aa, Homo sapiens
MVPASRRGQRDRALLAAANVEVNRPAVEAGL

SEQ ID NO: 956905 - protein, 50 aa, Homo sapiens
GAVNRQAACRYAVSPRQPHAGVVGGVAAVHVDRHRFAAAAEFPLRVARRF

SEQ ID NO: 956906 - protein, 53 aa, Homo sapiens
MTYRQDISIPKQEEYIYIYIFFSTLYTLSPRLECNGTISAHCSLCLLDSSDSP

SEQ ID NO: 956907 - protein, 48 aa, Homo sapiens
MWRWSVSMLVRLVSELRDLSVIHPTSGLPRVLGITWRRATCTRQPSQG

SEQ ID NO: 956908 - protein, 178 aa, Homo sapiens
WPETQREKKKEKIQSLLIKMKKALLIKSATRLKVGKHKVSSALAGKSYARGTCTGAARPNYGPRFSKQCSRSIFSSTPAIFICSFWKPSGSSITHFILFYFILFFETESTLSPGLECSGTISAHCNLRFPGSNVSPASASRVAGTTGDRHHARTIFFSFSFLEMGFAMLPGCLNSGLS

SEQ ID NO: 956909 - protein, 156 aa, Homo sapiens
MMISVSDSQYTFIRSDGLQTMTEGSKLTNVLDWIRTTACTNIVTTSTGSRDLLKAKQTEKEKSQEVSSKSGSMKDRISGSSKRSNEETDDYGKAQVAKSSSKESRSSKLHKEKTRKERELKSGHKDRSTSHRKRETPKSYKQWTANTEIRSPTGSV

SEQ ID NO: 956910 - protein, 42 aa, Homo sapiens
PGTGVGDVSDRLQFNRYIFGSHTENLDLSNLVSFDNFGLQGY

SEQ ID NO: 956911 - protein, 197 aa, Homo sapiens
KTDMMAGVVVGTRNRYLLKRLRQENCLNPGGGNRSEPTSSTLHSMPETLTHRGTVTVLRLTVDWPLYPRAERFNLFGGGGGGRDVDGKMRHEVKHMEHNRRDWLTLAQTQHSRPGERVGAGSSRPPSDPPCRLGRAQTSKWSLPNLFRGQEAGRGRGERSSPQRTSAEGGQSIMTEAEMQVWWPTERSFPTSPFAGL

SEQ ID NO: 956912 - protein, 33 aa, Homo sapiens
GSGKGESEQTKIGPRASLVPPRTRPLIAADVCG

SEQ ID NO: 956913 - protein, 35 aa, Homo sapiens
GAGSIRFHTCLEASFVDTLLHTSPSDLVVHLPVLV

SEQ ID NO: 956914 - protein, 67 aa, Homo sapiens
PPSSYHVFSLYKWELNDREHMYTYEQNRHWLPIDRVAGWRGSSTQNNYRVLAWVMKYFIQQTTDDTS

SEQ ID NO: 956915 - protein, 47 aa, Homo sapiens
MAAQSRSLCQSANSSCSGKRSWLQMDLTLLLLRWRKATSCQTKATGE

SEQ ID NO: 956916 - protein, 80 aa, Homo sapiens
VHCSRAQIDGLDKWSELSNPARSGQDFFHARLRCMALAARIRRLQVHTVWPCLLHCSRVYLYWRWPPAHVEDFDFDGRHR

SEQ ID NO: 956917 - protein, 104 aa, Homo sapiens
  misc_feature (3)..(3): Xaa can be any naturally occurring amino acid
YSXYCSVVALLPMLRYCPTVICIERCIGLLRTSLLDASADDGGRGGVIAWLASLPVSSCRLNAPLLCRSVEQVQQLRARRDVAIDQCAQFSAADTVVTIAVQAG

SEQ ID NO: 956918 - protein, 131 aa, Homo sapiens
MHHHTWLIFVFLVETGFHRVGQAGLELLGSSDPPALASQGAGIAGVSHCARSISTLSVSLCLCVSLCLCLYLYFCFSISLHICLCLFLCLCLCLSLSLSVFLSLCLFISLSLSLPLSLSLYLYLSVSVSLS

SEQ ID NO: 956919 - protein, 160 aa, Homo sapiens
YARKNSSGPLEMTQHLTDCLGQLYRYGLGVSYVEREHGGEIPYTIYVMEDARSMGAQLRVFRGAVWFYLVQRRCGFAGIAAFILQWSLRTLRRVINELTKVQRGEIQRMSEQHPRETGADDRKINAFIESERDNLERQQHYRCAILRIASRRPIAVLRTH

SEQ ID NO: 956920 - protein, 176 aa, Homo sapiens
  misc_feature (159)..(159): Xaa can be any naturally occurring amino acid
SVPISTWCSTCDRSPSRFTPIQDRCGLCTREHPIQLRWRQPPQTAEHPAEQAAVIVEHWVIAILQQLRLFDRQLFASDATAAQATSQHPVRGAVPVIGALAAVLAEGAAEFGDDDHHGVVPGRAQRIGIGSQPFAEIAQVCWPGHLPRYTWLACVSQAXDIDESPGDERSRINVAM

SEQ ID NO: 956921 - protein, 62 aa, Homo sapiens
IYLRHSSNSISGMKKMYSLMMIMEGNDVLSEMNIRYAEMPKTDLRMMSYGMMNKGIWIWEFQ

SEQ ID NO: 956922 - protein, 38 aa, Homo sapiens
QYYSPFYEEEKQAMYPSPTVPMCPEVEVLVGESSPFFS

SEQ ID NO: 956923 - protein, 203 aa, Homo sapiens
LDGVLVVLTVLWLFSSVKADSKAITTSLTTKWFSTPLLLEASEFLAEDSQEKFWNFVEASQNIGSSDHDGTDYSYYHAILEAAFQFLSPLQQNLFKFCLSLRSYSATIQAFQQIAADEPPPEGCNSFFSVHGKKTCESDTLEALLLTASERPKPLLFKGDHRYPSSNPESPVVIFYSEIGSEEFPIFTGSLYQKHAANQYVSN

SEQ ID NO: 956924 - protein, 35 aa, Homo sapiens
MSVGQRVRRSRKRSREKKDSVPAPNWPPILFSVHA

SEQ ID NO: 956925 - protein, 97 aa, Homo sapiens
EPRTGMCCKQQKYRDQLLRGRPSMRTKNAKPRERDISFYPSLFFLTKILMQCSEIQQPSSDHEDKNLKLGRKEDTGSWMKSLSSCISFGLSPLAYST

SEQ ID NO: 956926 - protein, 77 aa, Homo sapiens
  misc_feature (75)..(75): Xaa can be any naturally occurring amino acid
GPDVLEASVYLFRFHGASGARRSPSCSALLGFKALLLFGVLAARAARRRPEHLDTPDTLPRPTTVSCSPCLRDLXVA

SEQ ID NO: 956927 - protein, 157 aa, Homo sapiens
MAGIWQEHQTLEVLDRDYSSVGKLLVVPRAALEIYTEWAPSGCDSSELRPPQVGRYLLDVRHYTKLTPVTARVQRKVCEGEESKGPWVGRRLTEGAWGEHQGRASGQCLGQCRPKRSLAAALLLLLMDELGDGAGDAAYQGPVLIEADAPIMIGIQV

SEQ ID NO: 956928 - protein, 45 aa, Homo sapiens
MVSEIILDTGYWPPRCTLQKFVDYLFETIFSKAHRGSALPLAYST

SEQ ID NO: 956929 - protein, 114 aa, Homo sapiens
YPIRHKTNSAMKRMPTERDNSAAMSVVFFSSCKFCVQTKSSNTARERLKPVVETFARMFEMTSSCDCWASIPVLEIHRERIMFESLVDSNQASLQAWRSSSLADWAFVSLAYST

SEQ ID NO: 956930 - protein, 44 aa, Homo sapiens
KTEYRQESHGCGSLILKVFSLLCGSGNCLILTCELWVVVGVDIG

SEQ ID NO: 956931 - protein, 84 aa, Homo sapiens
VRKYMRQEEGKIMTSFTTDWQKGVAIPNVFGTRTRFVEKNFSTDGVGNQKVSGENCSTSDHHALDKARNVHPLYVQFTIEFALI

SEQ ID NO: 956932 - protein, 69 aa, Homo sapiens
HVCRQRALLSAEVAEHQCDAPVGMGTMLREDLVLSKPSRYHAQHTFTQKQTWQRFRSLVISYRNSFITN

SEQ ID NO: 956933 - protein, 39 aa, Homo sapiens
MAAVLVGFIIIGVALPVLPLHVKNDLGFGTFIVGLVAGA

SEQ ID NO: 956934 - protein, 56 aa, Homo sapiens
MTPKPAPRAVNEPGLCAASSRTILKRAIAPLADALPPAQQERVAQALSLVYGTEVF

SEQ ID NO: 956935 - protein, 35 aa, Homo sapiens
MSLIEGHVLEASATLYDYYNPERRCSVFYGAPSKS

SEQ ID NO: 956936 - protein, 142 aa, Homo sapiens
CISNSVSRLVILMQRSFTSLVSCIPRYFIVFVATVNGFAFLIWLLVWLFLVYRNACDFCTLILYPETLLKLYNISRNFWRETMGFSRYRIMSSTNRDSLTSSLPIWIPFISFSCPTALARTSNTPLNRNSEKGHPCLVLVFK

SEQ ID NO: 956937 - protein, 44 aa, Homo sapiens
RCAVTVLTYVIGLAPRHVDLRPYVLCGKDIRTVPGGLCRVALTE

SEQ ID NO: 956938 - protein, 154 aa, Homo sapiens
LLDFTLSAAARGSAEATEGMATIDMNTTFLSPGTGDLVIEARCLRRGGSIAFCEGDIRRADGELVARATATFKITAAARAATERRRAPRQTGREQAYFLKSRDGGTVGRGSSGMELAHELMPEYIASCMARIAAASQVPLPHITMRVSVVLGPA

SEQ ID NO: 956939 - protein, 121 aa, Homo sapiens
MPSVSKNAPQRQLMSHGSHSKFLCTKEIRALKSYTPILKHCSISSGSKPKQFFSSRSHQHAPVFQTRLCTTTSKIKTCKFPDTAVHTIHFTHIFQHSIHTLVSGFCSFIQFEHHHQTIKAT

SEQ ID NO: 956940 - protein, 44 aa, Homo sapiens
SRAQLLIGSFLYFVTCSIFVSSTPEGISCTMSAASHNSLPLSIC

SEQ ID NO: 956941 - protein, 37 aa, Homo sapiens
  misc_feature (6)..(6): Xaa can be any naturally occurring amino acid
CIRKAXEVVEGSGHVEMKKLPIVCAPYLRLAHMLRVS

SEQ ID NO: 956942 - protein, 33 aa, Homo sapiens
IRKVQGGCGGETTLRNKKATCELCPYSGLAHMQ

SEQ ID NO: 956943 - protein, 33 aa, Homo sapiens
SAVTDDPKCAKLTPVIKLINHIIHRRSPVQHLR

SEQ ID NO: 956944 - protein, 42 aa, Homo sapiens
QWQEKSECCGRSRTMCAYSQSPAIKKQLDRHLPSPPTLAYST

SEQ ID NO: 956945 - protein, 77 aa, Homo sapiens
PTPSHGGQVDVRIELARFTDGDCGPYWSVVDIRQRHRKLIRFLQGLFEQVLHCPIESEEAIVECDLCQSVRIASADV

SEQ ID NO: 956946 - protein, 35 aa, Homo sapiens
PLAVCLILERYDRPMRVSSVGCSMKPTFQPHASPF

SEQ ID NO: 956947 - protein, 104 aa, Homo sapiens
MHWKIQSTGRRVQGEVRWELHSLDHQLVLDRIPMNLFERKEEVKEVLIYGFPSRCGATSIPTRHRSARAYTDTRGSPIPLIMHVNWGRHSETPVLERNLLHFRM

SEQ ID NO: 956948 - protein, 68 aa, Homo sapiens
IARSKRDTCSLAGPTAWRHASLSSQGLMLYDARLAHASSMPHSGAPPRHTSVPCPYATGTRARTSLNL

SEQ ID NO: 956949 - protein, 33 aa, Homo sapiens
MSSRGASSRLFNSRGISDKCPLPLHYSLASPYA

SEQ ID NO: 956950 - protein, 42 aa, Homo sapiens
LIVSYSYSPSSPSSLLFLFLLLYLPLTPYSHLLYTYQWTLHH

SEQ ID NO: 956951 - protein, 35 aa, Homo sapiens
WSDHYWLTHVHGQYWLHYGLLTAASLIYAIGARIT

SEQ ID NO: 956952 - protein, 66 aa, Homo sapiens
SDLEDPGVTLVKAVVGQVQLDAHAVVGGRGDFQCFFVVVLLEVLLEARVAYQVRYRLAAVLRGLEA

SEQ ID NO: 956953 - protein, 39 aa, Homo sapiens
ETTRAETPYSSEAIAICMPVTYLKLITFRTKFFFLKPVV

SEQ ID NO: 956954 - protein, 45 aa, Homo sapiens
CASLGVPDNANAHAGSAWKLLAASMTFYLHTISKQTRMNVSAIRD

SEQ ID NO: 956955 - protein, 64 aa, Homo sapiens
ELGSRRGGQRRPQPPTVCKRPPLRSEGEHPAFGSGTLPGFGEASPASCAPLPVRMDLPPGSAAA

SEQ ID NO: 956956 - protein, 93 aa, Homo sapiens
LLRKLSDTAVADTRRLNSKPQDLTDAYGPPSNFLEIDIFNPQTVGVGRARFTTYEVRMRTNLPIFKLKESCVRWRYSDFVRLKNELVRDSKIV

SEQ ID NO: 956957 - protein, 83 aa, Homo sapiens
  misc_feature (27)..(27): Xaa can be any naturally occurring amino acid
  misc_feature (49)..(49): Xaa can be any naturally occurring amino acid
MFCHGTEEQIGELKEAFFLFDKDGDGXITTKELGNCMRSLGENPTEAEXQDMINEVDAGGDGTIYFRECVTMMGGRMKDTGCV

SEQ ID NO: 956958 - protein, 172 aa, Homo sapiens
EDVAVCFTQNEWASLHPTQRALYREVMLENYANVTSLSAFPFPKPFLIFQLEHGEAAWGPDPWTLAGGEALRGMCTGGKTKTENEEKTAQLNISKESESHRLIVEGLLMDVPQHPDFKDRLEKSQLHDTGNKTKIGDCTDLTVQDHESSTTEREEIARKLEESSVSTHLITK

SEQ ID NO: 956959 - protein, 100 aa, Homo sapiens
  misc_feature (20)..(20): Xaa can be any naturally occurring amino acid
WGMGNRYCWAEGGRRWKHNXWQFLQKQLKYLAFSVAVNTNLPRRYHFRPHRFWRPASCCPQNNEASRLDRSGLTITAYTEKAWWFLCLKSALKPQKFAIG

SEQ ID NO: 956960 - protein, 92 aa, Homo sapiens
  misc_feature (19)..(19): Xaa can be any naturally occurring amino acid
GGGRRLGRDGGPVLGGVGXQPGDPLAPGPPSPRSFPPSQFFLLRNLHPSSGCGTLGRRPGTAALSGGPEAVNGPVSKVVKPVPSVGALGQGS

SEQ ID NO: 956961 - protein, 121 aa, Homo sapiens
  misc_feature (52)..(52): Xaa can be any naturally occurring amino acid
  misc_feature (78)..(78): Xaa can be any naturally occurring amino acid
AAAGAAGILLWFLQEQNRAYSSQDVFGFLQREHGLGLAVVAKTLEQLAQQGXIKEKMFGTQKIYFADQDQFDMVSDAXLEVLDGNIAALTAQVQSLQQSCRSMEAELKELSCALSTPAMQK

SEQ ID NO: 956962 - protein, 75 aa, Homo sapiens
  misc_feature (22)..(22): Xaa can be any naturally occurring amino acid
  misc_feature (27)..(27): Xaa can be any naturally occurring amino acid
  misc_feature (53)..(53): Xaa can be any naturally occurring amino acid
  misc_feature (59)..(59): Xaa can be any naturally occurring amino acid
MGSVLARCLEPLPSSGPGFGGXGEEAXFVVVEPGAEQEILDNKDVVAQHVHFXGLGRSXDALIICEIGDVFKAQN

SEQ ID NO: 956963 - protein, 158 aa, Homo sapiens
  misc_feature (40)..(40): Xaa can be any naturally occurring amino acid
  misc_feature (142)..(142): Xaa can be any naturally occurring amino acid
  misc_feature (149)..(149): Xaa can be any naturally occurring amino acid
NFICTHICSSGLFDRIGSKKSDYIKLYVRRVFITDDFHDXMPNFLNFVKGVVVSDDLPLFVSRETLQLHKLLKVIRKKLFVKRIDMIKKIAVDQYNDPFWKEFGSNIKLGVIEDHSYEHVLLNFLGFPASHYATDISSLDQXVESVKAXHDLFYLMAW

SEQ ID NO: 956964 - protein, 104 aa, Homo sapiens
  misc_feature (5)..(5): Xaa can be any naturally occurring amino acid
  misc_feature (24)..(24): Xaa can be any naturally occurring amino acid
  misc_feature (60)..(60): Xaa can be any naturally occurring amino acid
  misc_feature (65)..(65): Xaa can be any naturally occurring amino acid
  misc_feature (79)..(80): Xaa can be any naturally occurring amino acid
NLEPXPDMGLEDEQKMLTESGDPXEEEEEEEELVAPLTTVFFACEQLEICVKARERLELXAERVXSRSHSEEDWTEELXXFLPARDHCVAHKLSNNLKLMWGLN

SEQ ID NO: 956965 - protein, 149 aa, Homo sapiens
LALFVQQFDLRNHGLEIVRLQAHGLLQGVLRIRQQGTVDVQARQLNPVFGGFGLGLDFLHELIEHLLQRPEVQPQGVRGQAEQGIGSGKPYALFRVIQPQTSNRVLLTGRHQAGDAVDRGFAHQRQVAGQVFVGKLQGLGAGVVRQFGM

SEQ ID NO: 956966 - protein, 128 aa, Homo sapiens
LNLFLFQGFRLVPFLVELRAVMDWVWTDTMSFPVQLAVCGGRDANIFIIKCSRETEKVHEDLPFSSKSSIAVALKFRSLIHFEKYPQPIGLEKKKIVKYGVGGLIILFLIAIIWLPLLFMSLVRSVVG

SEQ ID NO: 956967 - protein, 165 aa, Homo sapiens
  misc_feature (2)..(2): Xaa can be any naturally occurring amino acid
  misc_feature (61)..(61): Xaa can be any naturally occurring amino acid
  misc_feature (104)..(104): Xaa can be any naturally occurring amino acid
  misc_feature (113)..(113): Xaa can be any naturally occurring amino acid
  misc_feature (124)..(124): Xaa can be any naturally occurring amino acid
PXNKVPAGMILPTMNGESVDPVGQSALKTEERKAKPAPSKTQARPVFVKIPTCKIFVGETXLTSPEELYGVFTTQELVQAFTHAPATLEADRGGKFHMVDGNVXGEFTDLVPXKHIVMKWRFKXWSEGHFVTMTLSFYCKNGETELCMEGRGILVSEEERSRQGW

SEQ ID NO: 956968 - protein, 47 aa, Homo sapiens
  misc_feature (23)..(23): Xaa can be any naturally occurring amino acid
RREDEEEGSQIPELQGFTTNLQXMRDMLWSSDQVEHGYKSPANTTQL

SEQ ID NO: 956969 - protein, 48 aa, Homo sapiens
SKRGFQTQSTGDAVVSRGNEQGSGGRSGTDSIPRVCGASPRPTFHLAR

SEQ ID NO: 956970 - protein, 40 aa, Homo sapiens
VGPKKTPLDLRAVLLPPHWAALRVNLFSFTKPVTVMDLIR

SEQ ID NO: 956971 - protein, 78 aa, Homo sapiens
HNRFHVFLERTELNPNLFDRPQTNADPRQAAIEYRLVARIELRCFAVHSRSFKTYVASPMTFSTYGQQLQSPLHYSLL

SEQ ID NO: 956972 - protein, 66 aa, Homo sapiens
HQARLNIVAEWQQRRYRRAEGESLASFGFSEPLDRSAARPFQDWLHTLERILEVRLALRTHHRNRS

SEQ ID NO: 956973 - protein, 38 aa, Homo sapiens
SRNILLPLTSPMTVPVLVNLACPHCVSQCACLWHARHC

SEQ ID NO: 956974 - protein, 125 aa, Homo sapiens
MCSHRQQTASSGNSGASPYADDARPPPLDIHFVSILCHSHSESAARVSTGSFPTPPEPQSASGPREAGQAVTGNGVSARGTSPGQGEGREGRERGCCPTDSTVSSGCGFSSHNNRAFSKMGNFSF

SEQ ID NO: 956975 - protein, 51 aa, Homo sapiens
EPNVGQAHQGSYTGDKKDEYIVQGKGLEIAQHLRVTLDKLDFINYTSCLAP

SEQ ID NO: 956976 - protein, 64 aa, Homo sapiens
ALRGLLSGSAYYLKHQFYPSVVYLDQVPAPALEVLYIQAFVLVFLLGKADRQGVLGSTEGSRDG

SEQ ID NO: 956977 - protein, 33 aa, Homo sapiens
FNLFSLKLEEKKSAPTSNTWNTEARTVLHLRTY

SEQ ID NO: 956978 - protein, 194 aa, Homo sapiens
HIVRSVVRECLTGECSRMLRQIDLGSRRWFPRFRCEAKFRTAVMIAVSLALTGAVCGYAYYLKQQFYSSVVFLIQYSVPSHGSPCYPCLSVYVFLLSKVMGKVFFGQLRAAEMEHLLERSWYAVTETSLAFTVFRDDFSPRFVALFTLLLFLKCFHWLAEDRVDFMERRPNISWLFHCRIVSLMFLLGILDFLF

SEQ ID NO: 956979 - protein, 31 aa, Homo sapiens
MLQRLDIGNPEPEALNPIVKFCKRTQHLRFG

SEQ ID NO: 956980 - protein, 108 aa, Homo sapiens
RHDTIELGTVRSSARHRMGWFPGRLPEWRSPQRVGNGSSVPTQAILRRGELTAVYVETANGWRLRQVRLGDRVDQEHVQVLAGLAAGDRVALDPVKAGLIAAQAARGD

SEQ ID NO: 956981 - protein, 49 aa, Homo sapiens
MIHIYPGEGKGIGADTLHSCVYHKCLEYEKQQRIFTFTDDPCVPMWSPT

SEQ ID NO: 956982 - protein, 34 aa, Homo sapiens
ARYLSKRRSANVLMFVTRSPIVKFCKWTQHFRFG

SEQ ID NO: 956983 - protein, 45 aa, Homo sapiens
MPAPFKRRSGLEMRVVCNNQKMLAGHVLPPEALEENPCLASFGFW

SEQ ID NO: 956984 - protein, 39 aa, Homo sapiens
LLSKRRSAEGETLTRVMEVVVSQDCAIDPSLGNKSETPS

SEQ ID NO: 956985 - protein, 32 aa, Homo sapiens
CFLPLVVGSLMLSAHDNWAKLQRVSWAVLVYL

SEQ ID NO: 956986 - protein, 32 aa, Homo sapiens
MCESSQRDSGVRNRVRMYGETKVLSLMAIGFD

SEQ ID NO: 956987 - protein, 37 aa, Homo sapiens
MTTQDQYQSGEHSEIPSPSRGLQRDEVPPPLSWDWAI

SEQ ID NO: 956988 - protein, 43 aa, Homo sapiens
RTLIAVSICADTVKNNPGYGTSRTKEGLKTWGRVRWLMPVIPA

SEQ ID NO: 956989 - protein, 73 aa, Homo sapiens
RTIWVSIGIGMGDAVMAGNGENGECTEAEANGLKHPDLIHLETENAILSVVAPRSRFEKGETVLCPPHTVQGH

SEQ ID NO: 956990 - protein, 44 aa, Homo sapiens
MPPRLHARQYARRTDAHRGLSRSRHAAAPHRTAVPKSRDRCRKR

SEQ ID NO: 956991 - protein, 33 aa, Homo sapiens
LDKLAAAVQQKGYACVCLFWYWSKHLVKCEIAL

SEQ ID NO: 956992 - protein, 92 aa, Homo sapiens
RVPVRCLRDNDMDAPALSPGASSSSTAGAITDHIYFGCDLIYTYYVQRPAGVPLTSAPVRAPERSYGGSSYVLALVSVVFIRLHWIAHRQFN

SEQ ID NO: 956993 - protein, 73 aa, Homo sapiens
MHLMPVVESRVIPIQSAVAIQQSRIQSALQAHLTQNNPFASYTLHTWGFFWQLFLGRNTSPEFCFWEPGPWHT

SEQ ID NO: 956994 - protein, 33 aa, Homo sapiens
AVSIVKSKNPTVISQISTQYCMHTILGPHPSED

SEQ ID NO: 956995 - protein, 85 aa, Homo sapiens
CCESISEANDPTQSQIKDYTDGPYAAWTPHGADAAFPAGYLDVERCIPAATHYILQCLAPRCWRMRPGSRAGVIHVIVLNQATGH

SEQ ID NO: 956996 - protein, 34 aa, Homo sapiens
PSIAGAICLLRDWHYFFILIGRVMVTAAQTLCQM

SEQ ID NO: 956997 - protein, 101 aa, Homo sapiens
TLKCLKVNLEYPHSIARAIVPSRKQYVFNNGSNVQRIVFPFDQMCYYFKIALSLAHDIFRVQYMCTEITFVYFNQCLDYMPFCCMFAFSVMILADVQDRAS

SEQ ID NO: 956998 - protein, 36 aa, Homo sapiens
MNDNEDTNWHGEEVTRSLSLRALPALSLHNWLTADS

SEQ ID NO: 956999 - protein, 44 aa, Homo sapiens
RTAHRQWSPAAPARRGVFKSQSKYILQCMAPRCFEDEARAARAG

SEQ ID NO: 957000 - protein, 46 aa, Homo sapiens
PSRNHKVTSCMQTLPGESRLPFEALKLRNYFSPLALKILHRSPHFQ

SEQ ID NO: 957001 - protein, 40 aa, Homo sapiens
QLICLWGHIDVDPVRNANLRHTSGPVPGAHRSPTIRASIV

SEQ ID NO: 957002 - protein, 45 aa, Homo sapiens
ILRRYRTPPLRPGPAGYQCLSAVGAPGGLGPHHSLALALGLHWLH

SEQ ID NO: 957003 - protein, 75 aa, Homo sapiens
STRLARSSTERAHVLSRLSALQLLVHICPEQSSSRCLAAPSSLLLVHITFSMRGHQLRKASCGCLYPVNPTANTS

SEQ ID NO: 957004 - protein, 64 aa, Homo sapiens
STCWDFCPAHSSSSCLATPSRLILVPITFSSGDNSSVRLPVDVCPQCLPLKTLPKSVLNEQMTD

SEQ ID NO: 957005 - protein, 106 aa, Homo sapiens
YAVHQSKVSYDDPLLTLFVARSKLAVTIRRTTLTRECLFHAIGHFQAAFWLVSGLCVTALFRIGYALHRNTTCRMRARCINSLLETASLAWVIRPGIHIYTLLTAL

SEQ ID NO: 957006 - protein, 88 aa, Homo sapiens
AQDLMAGCTFAIKSITCVSCTFIMTAILRDLELEIPFDPAIPLLGIYPNDYKSCCYKDTCTRMFIAALFTIAKTWNQPKCPTMIDWIK

SEQ ID NO: 957007 - protein, 44 aa, Homo sapiens
AFGGQADGSLKASMVKAIPTKNIKISRAWRCMPVVPVTWVLRFG

SEQ ID NO: 957008 - protein, 34 aa, Homo sapiens
PKLIPKRYRTLSQWNVRAQSESAQSNDAELELGV

SEQ ID NO: 957009 - protein, 31 aa, Homo sapiens
MVKAIPTKNIKISRAWRCMPVVPVTWVLRFG

SEQ ID NO: 957010 - protein, 62 aa, Homo sapiens
VGPCDGLILGCSADEGSETMSETQGQGPAKRWYVVHAYSGMEKAVERNLRERIERRISPFAC

SEQ ID NO: 957011 - protein, 31 aa, Homo sapiens
MPSSASVGIFGTRGIPDFAKGCTAGDQSVRM

SEQ ID NO: 957012 - protein, 86 aa, Homo sapiens
LRDEHACFHFQFALFVSSCDRSAGDGPSYPIHSRFAKMSSFSRVYMTFLDHPVENCNSRAQWLMPVIPALWKAEVGGSPEISPFAC

SEQ ID NO: 957013 - protein, 39 aa, Homo sapiens
ILRIPHVERTDRCLSRSETRRIVFASRIFTTPIDQIRTH

SEQ ID NO: 957014 - protein, 63 aa, Homo sapiens
VPTVHLDGFIILQHPYPVIIYCHSHNQTVIIYCQQPNRPVIIYIAHSQAPIDHLMHTSQTPSD

SEQ ID NO: 957015 - protein, 41 aa, Homo sapiens
MANGLIPTPFQDKLRTLSCSLTIYRTTTMGHCRTHDQSVRI

SEQ ID NO: 957016 - protein, 33 aa, Homo sapiens
MPNHVERTDPIFVTNIRGAKLSVKSVLDQSVRT

SEQ ID NO: 957017 - protein, 70 aa, Homo sapiens
MIVEGDRDYGMIVESDPDYGMMWRVISDYEMMLESDRDYEMMRQVIAITDDAAGDRDYEMMRRVIAITDD

SEQ ID NO: 957018 - protein, 71 aa, Homo sapiens
LVGGSAWSTRLSGDSGPCPRAHGFNQHPGRLWTVLGAAVLNCCPRELVLGPRAPGVDQRSAATPVQVKHGY

SEQ ID NO: 957019 - protein, 204 aa, Homo sapiens
CSFVCCLCRRLAQPVQPVRRQNVCPTDSPVPSSNISDARACAAGTRDANRNEGILALILAGHAQDAGEEGSTPCDRGWIGLWLSGERGLDALIQIISTHQLAERALRIAQWEITDHADVMAAAYWATGQRQLWLLDHPDTFNVAGQIKGAVEVEPVICAAYRDIATVATDQWVRWLELQETVAAIACRKQDASIRSKRLLCSPL

SEQ ID NO: 957020 - protein, 146 aa, Homo sapiens
VATKDTSRTHGVRICGMQMYDAQHDKLVFQDKYYGRNVKPHEFTSVLESFFHNGYQVLVHHIPPLVEKLHCLARHACKLVGYRFYASSWLLIYDGDIRRQNTLWQGFEADVWQGARRPSAQSDANTEHSESFPQMTPGSEASTGYR

SEQ ID NO: 957021 - protein, 36 aa, Homo sapiens
MCNCSQVNTEILVNHENLGRDLDVFLQGHQSYWIRG

SEQ ID NO: 957022 - protein, 59 aa, Homo sapiens
CVIWLDLSQDIRGDRRRAEPTFFVKSSPCLYPSKAYGGQKGREEERKGCMPPEYWPSFH

SEQ ID NO: 957023 - protein, 67 aa, Homo sapiens
EYSRQVTGAVVMPVSQHPGSAEVGRSLRSGVQDQPGQDGETPSPLKTQKLSVAWCVGTLQSHATCGG

SEQ ID NO: 957024 - protein, 69 aa, Homo sapiens
HPAKLHAQGNHMHGRLHVSIGLFNCPVPVFSICTPGFMRTGSTCIPCSLHHSQIQFYLIRDGGHCSYAI

SEQ ID NO: 957025 - protein, 51 aa, Homo sapiens
MLYLSCVCELHHSSWQCQILNPLSKARDQICILMDTGWVLSPLSHNGTVNL

SEQ ID NO: 957026 - protein, 78 aa, Homo sapiens
TPLPGLSTGCLGYPSGTSDRDNGGSSSFSCSSAHSCIHSMHAVIAYGQSLCSCVPSAPAAAHHCCTAGISSFSTGIHG

SEQ ID NO: 957027 - protein, 55 aa, Homo sapiens
PDVISSNNGKKSDVKYDARFDKYLDPSFLQHRIHWSPIFTSFMMRASSMVGFSCN

SEQ ID NO: 957028 - protein, 49 aa, Homo sapiens
PSRTHSPVSVMHHVHLCLGCKLGSSSGSSLSGHASYLTFPNSRLNGRRR

SEQ ID NO: 957029 - protein, 68 aa, Homo sapiens
PYSRHVTGWLIMASEMAIYSSWHSAAWGGNRRGQNTLFPFTSHLLTTPFEEFPKVNDKDKKKAVNLSG

SEQ ID NO: 957030 - protein, 42 aa, Homo sapiens
MGLFRDSTSSWFSLQRGYVSRNLSISSRFSSYLPRDVGVFLM

SEQ ID NO: 957031 - protein, 63 aa, Homo sapiens
VPLKGCAVGGVARFFGVLLLKPLKGVCSGEAPVGVCYPVLFYLPISSLRTLATPVGVATPTAS

SEQ ID NO: 957032 - protein, 36 aa, Homo sapiens
GLVDNDRDRHNTELIFVYGMCQLYLKIKESQTHLHV

SEQ ID NO: 957033 - protein, 37 aa, Homo sapiens
CIRTAERTSCVDLRQIISLTEPHSPCQSNADSSCNSN

SEQ ID NO: 957034 - protein, 175 aa, Homo sapiens
ARGLPASSLIALCPDSKCGQETGLTHRNCRSLGRVGQHSSGYNRNKTTTPQIPTQPHPQPKPNKYALPVTKTDRLTLHHHVGVVYDRVTMSICGMNKGKPTVPKRNDTSIHSNACGSMAVIYIQNYNGKAISYPITSALDRQRIIRYLWKLQAANEAMCHLSRSVTDTTRVTYPD

SEQ ID NO: 957035 - protein, 102 aa, Homo sapiens
RSLIGCWSCNGVISAHCTLRLPGSSDSPASASQVAGITGLHHHAGLIFVFLVETGFHHVDQAGLELTSNDPPTSASQSAGVTGMSHCENRRELPPGLQLQQP

SEQ ID NO: 957036 - protein, 48 aa, Homo sapiens
GPTSTHQATLGQWYEALPLKEEQSFCPTVNLKTVDLVSEQTRVNASVE

SEQ ID NO: 957037 - protein, 46 aa, Homo sapiens
MRYRGRCMLISAIPDTSYPKHLLPNTSFTNTSFPNTSFPNTCNSNS

SEQ ID NO: 957038 - protein, 157 aa, Homo sapiens
MKLTKLASTVNTGRICDKLGNVVHAIQATEQSIHATDLVPRYCLTLANLNRVIYFICDTILWVRSVGLTSGINKEKWRTRAAHHYYYSLLLSLVRDLYEISLQMKRVTCDRAKKETSASQDPLWFSVAEEETEWHPSLLLLLFRSLKQHPPLLLDTV

SEQ ID NO: 957039 - protein, 104 aa, Homo sapiens
MAQFTSFRIQHRPRLVYLEWPVKGHLLHDGLTGPLTSRPYFSFTGLFLTNDNSVAKITPTAPIVAKVKTLREAVSGLSVVPECVRRILLYFFSLLVLLAVYQFC

SEQ ID NO: 957040 - protein, 32 aa, Homo sapiens
VINPEAKKDDEVAQLKKKCRYPCGTSQKDLKD

SEQ ID NO: 957041 - protein, 75 aa, Homo sapiens
SGQCVCVCASACACSCDVCLVCMFTRVRVSLHVGVCVQVCHVCVCMCAVCASFSSHVFFITMATPITRAPLIVAL

SEQ ID NO: 957042 - protein, 102 aa, Homo sapiens
MPLLGIYPNDYKSCCYKDTCTRMFIEALFTIAKTWNQPKCPTMIDWIKKMWHIYTMEYYAAIRNDEFMSFVGTWMKLETIILSKLSQEQKTKHRIFSLIGGN

SEQ ID NO: 957043 - protein, 45 aa, Homo sapiens
PVVYYYCSDADKTTDGEFHTLGTDVGWMEARSITTNHAGLINCLI

SEQ ID NO: 957044 - protein, 109 aa, Homo sapiens
FLRWSLTLLTRLECSGMISGYWNLCLPGSSDSPALAFRVAGTMSAHHHAWLIFVFLVEMRFHHVGQAGLEHLTSSDPPASASQSAGITGMSHRNWLAATLTGSVSEARC

SEQ ID NO: 957045 - protein, 36 aa, Homo sapiens
DRRESSSSYTPGTSCASWAGEGRPALISFLLNALAS

SEQ ID NO: 957046 - protein, 34 aa, Homo sapiens
TSMSWCYFIILILNDEETEAQCRLSNLPKVTWPL

SEQ ID NO: 957047 - protein, 118 aa, Homo sapiens
PVTILRSRTKIPFDPAIPLLGIYPNDYKSCCYKDTCTRMFIAALFTIAKTWNQPKCPTMIDWIKKMWHTYTMEYYAAIKNDEFISFVGTWMKLETIILSKLSQEQKTKHRIFSLIGGN

SEQ ID NO: 957048 - protein, 114 aa, Homo sapiens
ARIQALALSQDDATVATASAFDVVMLSPNEEGYWQIAAEFEVPKLVQYLEIVPETRRYPVAVAAAGDLMYLLKAEDSARTLLYAHGPPVTCLDVSASQSAGITGVSHCTQPKSS

SEQ ID NO: 957049 - protein, 35 aa, Homo sapiens
LVSPCNTHRASSHPTLSSHEKHCFSSARGVWADNT

SEQ ID NO: 957050 - protein, 176 aa, Homo sapiens
TSAVWSPLLECVIAGHESGELNQYSAKSGEVLVIVKEHSRQINDIQLYRDMTMFVAASKDNTAKLFDSTTLEHQKTFRTERPVNSAALSPNYDHVVLGGGQEAMDVTTTSTRIGKFEARFFHLAFEEEFGRVKGHFGPINSVAFHPDGKSYSSGGEDGYVRIHYFDPQYFEFEFEA

SEQ ID NO: 957051 - protein, 42 aa, Homo sapiens
GSDRDCIFNTTKLMNRRWSPSLVNEERQSDSLIPIRNGVGIN

SEQ ID NO: 957052 - protein, 151 aa, Homo sapiens
MAIIKKSGNNRCWRECGEIGTLLHCWWDCKLVQPLWKSVWRFLRDLELEIPFDPAIPLLGIYPKDYKSCCYKDTCTRMFIAALFTIAKTWNQPKCPTMIDWITTMWHIYTMEYYAAIKNDEFMSFVGTWMKFGIIILSKLLQEQKTNTTIL

SEQ ID NO: 957053 - protein, 91 aa, Homo sapiens
PVPNVSSNTILTKKNKAGGIMLSHFKLHYKVTITKAAWYWYQNRYIDNWNRTEASEITPHIYNHLIFDKPDKNKQWGKDSFFINGVGDNIT

SEQ ID NO: 957054 - protein, 54 aa, Homo sapiens
GYFNRRTGRSFNSTYMRFTALDFCAFFLSLFEAIKIFLDNGGCLSTLVSGNLVS

SEQ ID NO: 957055 - protein, 96 aa, Homo sapiens
FISVQYAGDKVLMFSGQGLKVNRGASLREKKNDAFCFVSLRQSVFGGLRQPFGDDLQPKTASNVNLKRYQGTWYELARLPMYFQRNCAQCRRGREF

SEQ ID NO: 957056 - protein, 116 aa, Homo sapiens
  misc_feature (17)..(17): Xaa can be any naturally occurring amino acid
  misc_feature (24)..(24): Xaa can be any naturally occurring amino acid
QGFDHVDFKLRELIIYXSNLGNRXGPFDFHWSFWVQEALDRDEQVITRSSILFFMFNLPDGAFEFADSAYCGFQLFRIPMNGVPTHTFCFKDGNKAHIALNNLELLTRAVDAAANL

SEQ ID NO: 957057 - protein, 117 aa, Homo sapiens
YGKNADQPLFRRRDTLMVYFRFSYFRVKAKRISAKLGNECTMPRRLLCALSVWSYESGDLSAYLPLVVKLPSSRDGCSTALITGFAFDYRSSRFHTFAILSSENTVAFMLAACPNVD

SEQ ID NO: 957058 - protein, 107 aa, Homo sapiens
RSRRLFCSRPWGFTPKELFSNRLRFRTMLVAWSSAFCIMLFMYQILQMFPQLSPRNLVFWFITSLALFGVERMVMLRLFRNLMANGKYLQRTVILGFTDTAVRRRGR

SEQ ID NO: 957059 - protein, 33 aa, Homo sapiens
AEKSNSVVLLISETPCCMCWADSGHPTSSLHLQ

SEQ ID NO: 957060 - protein, 33 aa, Homo sapiens
SVLDGSLFIEATEPRIRKHMATHDLKQKSRKSH

SEQ ID NO: 957061 - protein, 77 aa, Homo sapiens
VGNSGSETDPSVCMVSWDEACDVHGVSPLVSTGQPCRASAEARHKSSVGYTSSQGPGESHSISRYSRPASEDRTRKE

SEQ ID NO: 957062 - protein, 73 aa, Homo sapiens
VFNCGVGHIDLPRAKKGGRQEDVRDLRSDAIAAEECQWRYNTPDMESALSTTLAMAALLTRIERQAEDRLRIC

SEQ ID NO: 957063 - protein, 168 aa, Homo sapiens
VESETSVIKLGDGGSSGDGYPFEGKDGSWLMLFAPEQWGWGDSHLDDDELWILGMKAKWSGERMATPYGEYWRGSPFLFKGEEYNSLRWVTAVSDGFLWCSTTINFEEGWQVRLSVPDEGPGPPWGGNAEEESLEVVHSSFQRTSYDRCTTEGTEGWLPNGAVLAEDY

SEQ ID NO: 957064 - protein, 50 aa, Homo sapiens
TQSAAQFSTLPAHIGSGMGSRFNIGQASPQPEHRHTHSLLSHTVSSTFFT

SEQ ID NO: 957065 - protein, 56 aa, Homo sapiens
RIGKLNTEKQITCTVHHILYKAEVNFSCRMLSTFEETNRYPPRPPEGTEPQLKDCW

SEQ ID NO: 957066 - protein, 97 aa, Homo sapiens
SYRFNGMEWNGMEWNGMYWNGMEGEWNRMESIRVEWNGMEWNRLEWNGMEWNGMEWNGMEWDGLQWSGVECYGEELDCSGMELNGPEWNSVESSSVE

SEQ ID NO: 957067 - protein, 100 aa, Homo sapiens
YIIHWLQIHGTKYSAFDPSMVSAEELEVQKGSLRISQEEQCVSLAVNDELTRCVLVYVSGISTRQPAFSFRYVRLTGSHCVWEVGPMVIFMTGGISTKPV

SEQ ID NO: 957068 - protein, 80 aa, Homo sapiens
DLLIAYYDVDYDKKLEGPTYWRDRIMMVAKKFLDAVHQLYYAVASRITFSHELSDCGLESTAGEIPVVAIRTAKGVVPVL

SEQ ID NO: 957069 - protein, 37 aa, Homo sapiens
ICGSRADPLWRVTKMKMQSTIVIRRDYLHYNLQLKDA

SEQ ID NO: 957070 - protein, 54 aa, Homo sapiens
VLRLSTAVGISDLEGYSHLQKRKSMALSFTGLGFNTLCPLLCISLQQVAHSCVD

SEQ ID NO: 957071 - protein, 72 aa, Homo sapiens
TGWRHSKIMVIRLPFNVVIIQAQAQNTFKKTFGAGQQWLTPVIPVLGEAEAGRSGGQEFQTSLANMVKPSLY

SEQ ID NO: 957072 - protein, 69 aa, Homo sapiens
CDVSPTPENRMKALFTCNSFYPVYHVYLSTENYNSILKMAENAVCKMTEQCITNQEYSQWQRVYGQITG

SEQ ID NO: 957073 - protein, 74 aa, Homo sapiens
NRISSSYKSSNRHESQETNSFTDAREAYTKLYSCARIRCLAPVFPLLGEAEEGGSPEVQEFETSLANVVKHCLY

SEQ ID NO: 957074 - protein, 61 aa, Homo sapiens
MLSPTPDNRMKALSTAIPFTQCIMSTINRKLQSILKRQKMQFEETEQALEPESVVAGVLGD

SEQ ID NO: 957075 - protein, 32 aa, Homo sapiens
MLTRLCGGTPNDTRVLTPPNVLAGADDSGGLW

SEQ ID NO: 957076 - protein, 45 aa, Homo sapiens
MGLVRSVPDDLIILGPSTVRTPSDDRNEVTGERVYISLGSGIPCG

SEQ ID NO: 957077 - protein, 52 aa, Homo sapiens
VPHLLDDQPYKEKGELLAHVQQRGIVGSHFVSSLDQLHITQDYNGAPKDCLS

SEQ ID NO: 957078 - protein, 108 aa, Homo sapiens
SLTVRNPIELSYLGLALLCMSLSQRKGSFCAATAFFIVVAGRSNVAIVSALAMILIHISHGRSVARTTRLALLVVLPCILIFFAAFLPDIYLEPGSVDAAANLVVVGA

SEQ ID NO: 957079 - protein, 80 aa, Homo sapiens
IEAVSQWRSIEAVSQSVEVYVKQSASQWRSIEAVSQPISGGLLKQSASQWRSIEAVSQPVEVYVKRSASQWRSIEAVSQS

SEQ ID NO: 957080 - protein, 50 aa, Homo sapiens
MRSNPPRQRGIADVSGSRKVSPASGVFSKSFHTSYSRTIPMPDNSEASRR

SEQ ID NO: 957081 - protein, 131 aa, Homo sapiens
  misc_feature (7)..(7): Xaa can be any naturally occurring amino acid
SLRGTGXASMNALATFLTHRGQINPQTLHLKKEQRSARRCTREDVVMLCKAFVAGIRTNGKFCDFIAGGLWPAQFFNQTGQVSLSKLFPRANTVVNIHTALARPSVNDQHFAAIAHQSLKCKVTTTKEPVD

SEQ ID NO: 957082 - protein, 136 aa, Homo sapiens
IAKSSNHTLYRDANKDATEFVEQKLRDNPWIYPDKNTVATLVPLEPLPLKLERIRTRVWTKVKSGTEPAWHSSLLAEGYMAICKETKADSHQLVTLIKMVEAYEAQRTHGLASLGNDERLLNRIKALLHKHDGGVA

SEQ ID NO: 957083 - protein, 109 aa, Homo sapiens
  misc_feature (13)..(13): Xaa can be any naturally occurring amino acid
ASTIATLPASPSXCRVEVVAEASALDSRRDSAGDDRSTTSTQGNITCGRPRKNIARRVGDGQGGPRAGAHALDCCCTCALSAAEPIGVSIRKRASRKTGDVDAAADLVV

SEQ ID NO: 957084 - protein, 78 aa, Homo sapiens
MLDSDLQCDISSILHYKKNQNGKGCVRTNPHFCQLMDVQHFGLPGSHLTTEIVLSHVYVNCSKSNVFRGKVIYFLGRR

SEQ ID NO: 957085 - protein, 73 aa, Homo sapiens
  misc_feature (18)..(18): Xaa can be any naturally occurring amino acid
MFCGNLAILIHGFDPNRXAFMDDSNNKPPTFWQMLHSVMAAAFGVQSGRNRARDFTHGKPSHFVILVDAAANL

SEQ ID NO: 957086 - protein, 108 aa, Homo sapiens
  misc_feature (35)..(35): Xaa can be any naturally occurring amino acid
TTTKFAAALNGSGSPALRAQTSGLVGHLVEVTITXFFRIDHHPLTVFLQEISVDLSYLQRAVDRRHIQQTHQTVSAVSRVFISTWVPRTPRGREGTGVRVHGLSTAVD

SEQ ID NO: 957087 - protein, 100 aa, Homo sapiens
VDLHRCGVGMVVHFHKVKERSLPPLPAEWVHGETRSGTPSPLIRPPCFRSEWLYSVNGVSIPTTRLKQPVSSDQGRIVEKLKRLQSGIEGLDARRRGREF

SEQ ID NO: 957088 - protein, 40 aa, Homo sapiens
LSRGSRDVSPNNWRIKEMESAYSVIQGDYEGGYELCYVTV

SEQ ID NO: 957089 - protein, 69 aa, Homo sapiens
LLSESRLRVSHSSSFLLNRTASLIPLQYDVCPHKLIHIILAGRGIDLINENHEMASDFTLFASSAEFDS

SEQ ID NO: 957090 - protein, 92 aa, Homo sapiens
MTGKETNIAWVLTTGIAATKQTSLGKKVDPVFTKNLKISQVWRCAPVVPTTQEAEVGGITWVQEVEAAVSCVCCHCNPDLSDRAKLYVKKRH

SEQ ID NO: 957091 - protein, 116 aa, Homo sapiens
YTKPLMKTLMSKGYELNAEKIEHSKAEMQRLIEVLNQKLIANHGRYFVGDRLGLADIAVCSMLAPVLEIKGTPWEKDHEESLSEAFSAYKTYLTNLPLGQYVLRRGREFSSSSRRP

SEQ ID NO: 957092 - protein, 102 aa, Homo sapiens
KLDRPRARLIKKQRAKNHIDTIKNDKGDITTDPTETQTTIRASYYHLYANELATLADMDKFLHTYTLPRLNQEEVESLNRPVPGAALVAIIERYQPKRVRTR

SEQ ID NO: 957093 - protein, 126 aa, Homo sapiens
  misc_feature (10)..(10): Xaa can be any naturally occurring amino acid
VIDSNGMDPXKNVLDRNGLEWNLFEKNGIEWNDIVWNGIKWNGIEWNLIKWNGMECNGMERMECNGMEQSRIEWNGISSNGMELNGMDWNRMELNGMDKSIMESNRTEWNGMECRRGREFSSSRRP

SEQ ID NO: 957094 - protein, 61 aa, Homo sapiens
QYQRHSAQKEEKNPKIYTGTTIRPRIAKRNPEQTAHQQLEAITIHLTSTFISQQCISQTQT

SEQ ID NO: 957095 - protein, 45 aa, Homo sapiens
  misc_feature (7)..(7): Xaa can be any naturally occurring amino acid
  misc_feature (31)..(31): Xaa can be any naturally occurring amino acid
  misc_feature (33)..(33): Xaa can be any naturally occurring amino acid
RPFFSTXETHVTVTTFPRPPDGRGRTTDDLXGXVVPRYAVDATLL

SEQ ID NO: 957096 - protein, 39 aa, Homo sapiens
LTFGHRCRRCRCRILNGHWSGTSYLRDTAARCVAYSLGD

SEQ ID NO: 957097 - protein, 36 aa, Homo sapiens
KLVVGYRAPSAQLYKVSSRFLGRMKTIAYYPLPDEV

SEQ ID NO: 957098 - protein, 64 aa, Homo sapiens
QKHRAIKSTISNMLIVEVVLDYSTIVRELMDYGVYIVMKNFYDQDSGEEEFTQRCVADRGILYS

SEQ ID NO: 957099 - protein, 39 aa, Homo sapiens
RSARTSHIDCGNYITFPQCYSQEIPNKFLKQSYDSLRSE

SEQ ID NO: 957100 - protein, 40 aa, Homo sapiens
MASEWTRRRTRGSRALIFYLYSIPESGSKSKAEGRCCCCM

SEQ ID NO: 957101 - protein, 43 aa, Homo sapiens
NAPVRSEALAEIGQQVVTSVQVYAMAGTRAAPFSIQLPLNCLT

SEQ ID NO: 957102 - protein, 35 aa, Homo sapiens
AQNRHEGRELISARAALSLPVLKAMVGYSCCVRGH

SEQ ID NO: 957103 - protein, 52 aa, Homo sapiens
STSERFASRFSRLIALEGTGEVMEEPGEDGEVASYPVYAFCRVRARFHGVEL

SEQ ID NO: 957104 - protein, 78 aa, Homo sapiens
MIVRTAGRGRPVSVRRIAWTGVALGLIVAAVVVGPVVLLRHEITGVYSNDPAVRALAASLLLWAALWQFFDATQVCAI

SEQ ID NO: 957105 - protein, 51 aa, Homo sapiens
PVRVTVTLLQATYSCTILEAATLAISTINLPSTLIVFTILILLTILEMVAN

SEQ ID NO: 957106 - protein, 38 aa, Homo sapiens
LRDDNLPENEDSPGSQAWVMPVVSATGEAGVRGLPQPG

SEQ ID NO: 957107 - protein, 35 aa, Homo sapiens
QGEAGGGSLDVGQDPLSVLGGTSSLKKNQPSQPPI

SEQ ID NO: 957108 - protein, 43 aa, Homo sapiens
LVTVWDKEFPPVMGGFPQSAQTGGRQQTCVTAVLATGLLHSQP

SEQ ID NO: 957109 - protein, 105 aa, Homo sapiens
CLAVPALRVLCVPLAAALAVSLAVSARHHSACFLGQSSGAGARGVIAQLRQHSGTVRSHRVAVLGSGTGPSIAPCRSGMSRGTPAGHPSGHACVRGSPQPRHIRH

SEQ ID NO: 957110 - protein, 74 aa, Homo sapiens
GDLEDPTSYHHEVSLRLNVTFDIASPTGYTQCLCCGQHLREKSTSITITNDEGRSSKEYIDRMFQEADRYRVQD

SEQ ID NO: 957111 - protein, 107 aa, Homo sapiens
MEYIERMAQAADIYTAEDEKQQGHGVIQKFTSFLFLQHVKQPDVNDEIHLQGTITDEDKHKILDKCNEYYQAGLISNLNAEKEESEHQQRDLDKVGNPIITNLYQSA

SEQ ID NO: 957112 - protein, 103 aa, Homo sapiens
MTSQRDTVSSMNSLESYAFNMKATVEDENLQGKITDEDKQKILDKCNEIINWLDENQTADKEEFEHQQKELEKFANPIITKLYQSVQEACQEDCPWVGGVYRA

SEQ ID NO: 957113 - protein, 36 aa, Homo sapiens
VLRSMTTFYMGPTKKKEKMVSAAFMKRYIHVAKIIK

SEQ ID NO: 957114 - protein, 111 aa, Homo sapiens
  misc_feature (20)..(20): Xaa can be any naturally occurring amino acid
  misc_feature (110)..(110): Xaa can be any naturally occurring amino acid
MHDRAQILVETGVVGVPVRXIQHDGVTDRRVEDRRAGSSYKRKRKTVIWAWRQDGNCKAGRRRSGWTYSSVMIQEKFEAPSSAVMAILDTRLVGQEDPRLDLQEWQTREXQ

SEQ ID NO: 957115 - protein, 69 aa, Homo sapiens
RPYIIRTASLTVYQNRKNGNRVVRTCCLTLNKQEMYDDERDNVVLLVQKHLISKIWDYVSLRSWSSFFT

SEQ ID NO: 957116 - protein, 58 aa, Homo sapiens
LYEDLPLAYQDKIGGGWAGFFCKWAYAAKAGQWTWLTSRSTPSPLLPVLVRADARSGV

SEQ ID NO: 957117 - protein, 122 aa, Homo sapiens
DSLGSPRTTRSMSVSAERAEAGASADWPAQRKKLGLYLQLITSGPTLPPHSWRQRPQAELALPLLLGIDTGWEGAAEDSSLYNMEQKDLYLVGPMSTLPDPRPLREGRAQAHLRLKCTSHGN

SEQ ID NO: 957118 - protein, 55 aa, Homo sapiens
MIHTSKLLGMKRIALRIQRNVHTSSRQYMSSKLPISHICKNPTTAKAPGDINSKT

SEQ ID NO: 957119 - protein, 49 aa, Homo sapiens
  misc_feature (27)..(27): Xaa can be any naturally occurring amino acid
  misc_feature (49)..(49): Xaa can be any naturally occurring amino acid
AFGERAVALSALMRDVRVSCRWSVCRXLVVSLRESQSLVTTVECCVWSX

SEQ ID NO: 957120 - protein, 43 aa, Homo sapiens
MTWSAWTAPDKTTPCSSSHTGDRNSTTRWWTTVVFMVTRSYTV

SEQ ID NO: 957121 - protein, 129 aa, Homo sapiens
MVKMTILPKVIYRFNAIPISYQVTFFTELEKTTLKFIWNQKRAHIAKSILSQKNKVGGTTLPDFKLYYKATVTKRAWYWYQNRNIDQWNRTEPSVIMPHIYNYLIFDKPDKNNNGEMIPYLINGAGKTG

SEQ ID NO: 957122 - protein, 58 aa, Homo sapiens
MSQNPNVSYMIFTKDTTISTISKIHMHTWIGQSLPYHTPEDWESPAMPHQIETSNHKA

SEQ ID NO: 957123 - protein, 128 aa, Homo sapiens
ILWADEARFMCQVPCWSLIHSFIHSFCGLVKLTLCARCHVGPSFIHSFILWAGEAHFMCQVPCWSLIHSFIHSFCGLVKLTLCVRCHVGPSFIHSFILWADEAHFMCEVPCWSHIRRRGREFSSSRRP

SEQ ID NO: 957124 - protein, 84 aa, Homo sapiens
KQEQIVTDHSHRTSGSNPTSKTQRAANAQSNLWASRSDSKRVSTSPSRTGPYTLRTDGSDRVVHDFHAHLRCTVPENRSCPEPW

SEQ ID NO: 957125 - protein, 56 aa, Homo sapiens
MNYPTMASNCSGERKRLTSLTLNQKAEMIKLSEEDMLKAETGQKRGLFLRRRGREF

SEQ ID NO: 957126 - protein, 40 aa, Homo sapiens
SRVSPDVESSGQHPQSPNSIFGCIFYTLTAIVRLPAATLG

SEQ ID NO: 957127 - protein, 48 aa, Homo sapiens
MNPPLYQMKTASRSSSRRKSLGGAQRARCPIDVCPGDVEGGTVPACTS

SEQ ID NO: 957128 - protein, 98 aa, Homo sapiens
MIFSNQIIFNGIGSNSYTLGNYSSTSLTSSNTLYGNNLTQNVTFTDYNRDGHMDLLGEDSVYADGSRAGHSMARRRTVPGRVGGQVDAAANLVVVGGR

SEQ ID NO: 957129 - protein, 38 aa, Homo sapiens
MISTRGMPDPLTLRWKLSSQPTIPIVGIVAGLAVLAVL

SEQ ID NO: 957130 - protein, 73 aa, Homo sapiens
LEDKIRDKFEAQNPNVKIHIVGFAKKVGDLIDGLVMVVMFFGIAFVITRCCCCGLPTASQYRRGVEHHAGGRR

SEQ ID NO: 957131 - protein, 55 aa, Homo sapiens
MSPAFSLNGNYFLKQMINGNTIYHNLEHTSKNIREILAVSTYIRKRRKTPNKHLT

SEQ ID NO: 957132 - protein, 50 aa, Homo sapiens
STQKLPMPTIFQVVMAAYWEKFSISNNLPRINLIGYGRRGREFSSSSRRP

SEQ ID NO: 957133 - protein, 32 aa, Homo sapiens
MEAVRLAVIKPGHRTWSLAVRGADSEEDARSF

SEQ ID NO: 957134 - protein, 59 aa, Homo sapiens
IVRVSRHGSSELCWGSSLLLSSELLSMLCLTCVGARPGCGTSSIVSGCFPVMFRYPRRA

SEQ ID NO: 957135 - protein, 133 aa, Homo sapiens
RRLRNGCKCLTIVVQGKEEQVTSYMDGSRQSKSLCRVFLKLQNLVRPIHYHEKSMGKTYPHDSIMSFRVPDTTLGNYENYEMRFGWGHRAKLYLSMPGHSQISYLHISKPSCLPHSTPNSRRRGREFSSSRRP

SEQ ID NO: 957136 - protein, 61 aa, Homo sapiens
MLKENAPVVNRACEGSRLRCPYENLIPIDLSLSPISSGGTIQLQENKLNNAHCFYIMLLGR

SEQ ID NO: 957137 - protein, 49 aa, Homo sapiens
MSAGLHIIVQANHTDCVVRTRSEAFEALRCLSSPIRCRGIRSLDSILQG

SEQ ID NO: 957138 - protein, 41 aa, Homo sapiens
HYLRWSLLPNLVFLCCCLVSSYCSCSRVSFVKFSIDRSRIG

SEQ ID NO: 957139 - protein, 67 aa, Homo sapiens
GLDVQELGVFIDVSADQPRTGDTVDLRMFPRNPFHGTTSQGEFQDEAYDGAGRYDLDHTAFELEQRN

SEQ ID NO: 957140 - protein, 36 aa, Homo sapiens
MPRHRTCSLSVSDGAEMVSRPLHPPDRFNFPLGLKK

SEQ ID NO: 957141 - protein, 53 aa, Homo sapiens
HQFRADKRKRAAAMALVTKQLENAGGADNGQENVDQRKAEDRTWDSKARFTVW

SEQ ID NO: 957142 - protein, 49 aa, Homo sapiens
MRISSYFGKPKLWGDCLSQCEGAMSRDHATKLQPPRSSPGNSRTSCLKK

SEQ ID NO: 957143 - protein, 201 aa, Homo sapiens
TDLTSEIAVLHHFTDSIGSRTRPRRDLAVTLILQRRSTMALKQNLNLSIFVGGETFASKIAGNFSEAISDPTSLGALVASALALFVITFVVDATARLIAAKGVKRRAPPPLTTSPTMADNTPGQLDLSRPSGKRTIKSGCASAFMIVATVLAVIPLAWLVNAAVRRSIGSLFHASCRTTRWILLRLGEQGASTYRRNLEMA

SEQ ID NO: 957144 - protein, 146 aa, Homo sapiens
MSVPVFGPLEAPATSFGPTANPANGLIKVNGRPLEMIEPAPRYQYQLLEPSFAFRQGAICWCRPSVSRVKGGGHRWPQIYAIPPVPFPKPWWPISQKYVDEASQKEIQDILIPYDRTLLVADPRRCESQKFGGLLVPALATQKSYR

SEQ ID NO: 957145 - protein, 177 aa, Homo sapiens
ERKNWASAWESIVETQAVSRPVPGRQLEYGLTRYLDGDLSWRRRCAWEEIAEAVNMEKQPQNSRRGLAPREVPPAVGLLLIMALMNTLLYLCLDHFFIAPRQSTVDPTHCPYGHFRIGQMKNCSPWLSCEELRTEVRQLKRVGERSCKESLPVCSDTSTKSHSQQLTSLEMTDDFLH

SEQ ID NO: 957146 - protein, 88 aa, Homo sapiens
ADLASKRAGIYTALMPSHPARVYMVHNIISQEHHVNADAYHINKLTVIVTHQPVDVYFPRVHFADHRWDVDNGAINGMSRVSSSVVRS

SEQ ID NO: 957147 - protein, 136 aa, Homo sapiens
IHVSTGESFQIKCSLSLKKLAQVLPPSCSFSHLLLLTSISPYCLFFFFWRWSLVLSPTLECNGTISAHCNLRLLGSSNSPPSGSRVAGITGARHRTQLIFAFLVETGFHHVGQAGLELLTSGDPPTSDSKVLGLQA

SEQ ID NO: 957148 - protein, 34 aa, Homo sapiens
SRGFLSLHQLAYPEEDAQSITRKSLKSTLKTSYY

SEQ ID NO: 957149 - protein, 105 aa, Homo sapiens
SLGRACCQAGVQWRDLSSPQPLPPGFKQFSCLSLPSSWDYRYAPPYPANFVFLVETRFHHVGQAGLELPTSGDPPASASQSTEITGVSYRTWPLLHLLSHNKHSN

SEQ ID NO: 957150 - protein, 68 aa, Homo sapiens
  misc_feature (34)..(34): Xaa can be any naturally occurring amino acid
RERVKAKNVLKSEVLKMKSVWEDEGLKGKISEAXKKKVLDKCKEVILWLDVNILVEKDEFEYKRKELE

SEQ ID NO: 957151 - protein, 66 aa, Homo sapiens
HSLVYVRLLFVFLVSSGVHLRWAGMVSLRALVIPPPLPRRVLGLQACVQWPRPAYLFSLSRTHLVA

SEQ ID NO: 957152 - protein, 48 aa, Homo sapiens
MHDDGDDGDGGADVDGDDTYDGDNDCDDVDGGDGVMTVVMVMVMMVMG

SEQ ID NO: 957153 - protein, 35 aa, Homo sapiens
RHAPLVPGSVAALAGVCGSVRARAARSAAPSFVSY

SEQ ID NO: 957154 - protein, 75 aa, Homo sapiens
LLSHKNVIGGIRHLTSSCSTRHYSEQYTAWYWYQNRDIDQWNRTEPSEIIPHIYNHLIFDKPNKNKKLGKGFPFN

SEQ ID NO: 957155 - protein, 116 aa, Homo sapiens
IRGFRLHCLPRFYFSSSCSPPSTSLYLMHLQPPDANTICIIISMSLSFLALSALHFSISTHFHKMDNLLKNVLVRGRARWLTPVIPALCLKKEVREQVLKSERVSVSHLRGTKKWS

SEQ ID NO: 957156 - protein, 33 aa, Homo sapiens
MFGQERSVCSYIFSDLLRSRARKEMRFCMTAAG

SEQ ID NO: 957157 - protein, 59 aa, Homo sapiens
GDSEDPPHHHIIIITSSHRHHHHISSVINIDPPLSSTFTYAYILLHLIISITIIIIITI

SEQ ID NO: 957158 - protein, 48 aa, Homo sapiens
AANFVFLVRDGICMLPRRSRTPSSVILRLASSLHTGVILTLPPRTSLR

SEQ ID NO: 957159 - protein, 57 aa, Homo sapiens
ETIKIPADFGSEYSHLPEQAFYMVEPIEEAVAKADKLAEEQFIVRGLCPLYCLSPSD

SEQ ID NO: 957160 - protein, 55 aa, Homo sapiens
TDPPPAPWVQCQVGSLTGCWYTFTLVTALCLMCELSVGHETYPLDAVEHIHLLHA

SEQ ID NO: 957161 - protein, 43 aa, Homo sapiens
MLLPVSSPLSLRCPVLLSQGAVSVWSKLCAELEWQLRPVLGPL

SEQ ID NO: 957162 - protein, 75 aa, Homo sapiens
TPVADDREHAICDHQQRTWSLPLTQRKGTENLDTVSVSGQSNNGIWSEKAEGTGDLELILMTGGRRDCERALPIL

SEQ ID NO: 957163 - protein, 76 aa, Homo sapiens
CFKAGGWGGSVRCTFKLQMCRVGKASDMARSAGRAFQAAGTVQHAWLFPRLADSSVPRLGSQGSVAMFCGVAAGQQ

SEQ ID NO: 957164 - protein, 67 aa, Homo sapiens
MHAGGCMLMLVEQLELELVVAELVELALVVTMVEQLEQNPGAAGGAAAVLVVMMVMVMMVAVLVVMA

SEQ ID NO: 957165 - protein, 36 aa, Homo sapiens
QEEVYWYRMMSLTSSKAKELNGPGTWDFPDVISVSG

SEQ ID NO: 957166 - protein, 40 aa, Homo sapiens
SCMCAIDVITYRLYDCDDVMVVWCDDSGMGWDDGMVGYEL

SEQ ID NO: 957167 - protein, 55 aa, Homo sapiens
VLLSICCLSWPLGRRVKSGSRSESEVKSKCPGTRAPVVGYKNRSLVAWELVEQSM

SEQ ID NO: 957168 - protein, 155 aa, Homo sapiens
AIYCTHDNLVPLSVIGPAILAPDPPKRLILLMSQAPLVLVDGSSYLYRAFHALPPLTTSKGLPTGAVKGVLNMLKSLRKQYPNSPFAVVFDAKGGTFRDELYAEYKANRASMPDDMRVQIEPLHQSVIALGFPLLCVEGVEADDVIGTLARSSAA

SEQ ID NO: 957169 - protein, 42 aa, Homo sapiens
CITTITATIITITIITTITIITTIITIIITIITSIATTIATT

SEQ ID NO: 957170 - protein, 53 aa, Homo sapiens
DDSDDGDDGDDNDGHDCLVMVMVTVMMVMMLKVVMMLMVSDGHGDGGDDPDDG

SEQ ID NO: 957171 - protein, 43 aa, Homo sapiens
YIIAIIITITIITITLLNLYFYATLNLLHLIMTITIITIITIR

SEQ ID NO: 957172 - protein, 42 aa, Homo sapiens
  misc_feature (1)..(1): Xaa can be any naturally occurring amino acid
XIAIIITITIITITLLKFYFYLTPNLLHLIIMITIITIITIR

SEQ ID NO: 957173 - protein, 69 aa, Homo sapiens
  misc_feature (1)..(1): Xaa can be any naturally occurring amino acid
  misc_feature (8)..(8): Xaa can be any naturally occurring amino acid
XLLLRGYXIYYARNSSSSSHHNLLESGVCTHLTSVCQPLCAHGKTRTPPARVGASPPPHLLGREGPSLS

SEQ ID NO: 957174 - protein, 32 aa, Homo sapiens
PPKVVAALLAVCLPAFLILPLPGLLTYAPDQS

SEQ ID NO: 957175 - protein, 84 aa, Homo sapiens
AWLRILLCDEAVSERHLTLKYPIEHGIISNMGRHGVNLATDLLQCSCVMAPEEPPVMLTEARAEPDEAKRKTMSQVSGPARHFW

SEQ ID NO: 957176 - protein, 61 aa, Homo sapiens
VLSLAYIHGQISYQSTPEFLPKPRDEVVLLARAICKSYYYPVRAMPRTSGISIMIRVTDQR

SEQ ID NO: 957177 - protein, 41 aa, Homo sapiens
MVLAMTIKRCHEAVCAMIAAMSPPPYLQPGLGSSSRVAAEA

SEQ ID NO: 957178 - protein, 60 aa, Homo sapiens
EDPGIVDDSDDNSDDGGDDVMVVIDGDGDYGGSDDGDGNGSGNGGDDGDDNGDDGGDDDV

SEQ ID NO: 957179 - protein, 82 aa, Homo sapiens
YVVMTVMIMVMMVVMMYGGDDGDGDGGGSDGEVIGMVVAIGGDDGDDNGDYCCDDDVVVVTYGDGDDGGDDGGDESFYISED

SEQ ID NO: 957180 - protein, 54 aa, Homo sapiens
SDEVMIGRIDDNDGMIVVVMVMVTVMMVMMLKVVMMLMVSDGHGDDVVMTHDDG

SEQ ID NO: 957181 - protein, 43 aa, Homo sapiens
MNSSYLPVSKRITYQPSRKSIHNVVDSYREISYREARGMIVYP

SEQ ID NO: 957182 - protein, 156 aa, Homo sapiens
ASAHASGFFNFYFYFEIIVDLHAVEIIQRFHVPFTQFPPVVTSCKTIAQYHNWDTDIDSCDIEHFHHHKDPSCFSQPRPILSHPHPLLNTATTNLFSISIIMSLQERYINGIFWYKTFLNWPFSFSIILWNYKLLPVPIVCSFLLLSSTHGMNVLW

SEQ ID NO: 957183 - protein, 103 aa, Homo sapiens
MGIPDWSLRLSSQRPHRQGQATPPGPGHTARAGHTAGARPHRRGQATPPRQATPPGPGHTATAGHTAGACLIAPQSGMLCTASEGESLSITKENRKRSLTAQG

SEQ ID NO: 957184 - protein, 104 aa, Homo sapiens
THGPELLDLSLLHFVLFSFPCRERGCGLRRHHGGQQGGPQAPPALLGSAYAADRSGDYRHASPHLANFCIFSRDGVSPIGQAGLELLTSNEPPPRPPKVLGLQA

SEQ ID NO: 957185 - protein, 127 aa, Homo sapiens
TRPAVQTPQLYTTFLPPPEGVPPPELACLPTPESTPELPVKHLRAAGDPWEWNQNRNNAKEGPGRSRGGHAAGGPAPRVLVRPPPPGCPGQAVEVTTLEELLRYLHGPQPPRKGAEPPAPLTSRALP

SEQ ID NO: 957186 - protein, 81 aa, Homo sapiens
FRQPLGTYALKKVDKTQIRSIQEVPAPVLSSLSVPRGVRDSRHPSLDHARHVERLQLLVSCPCHISMLILFNKKARSELEA

SEQ ID NO: 957187 - protein, 113 aa, Homo sapiens
SFVPHWEVTGLSVHRNDRSAGSKSRPSMFPANRKLRTLQNHKSSKSRLSREDRTQGCAIPPPGTAFLRLTLRPVNDVQRILRLLSQKHPDSFHTPAYVFKYLILLGEMRTDNT

SEQ ID NO: 957188 - protein, 48 aa, Homo sapiens
  misc_feature (1)..(1): Xaa can be any naturally occurring amino acid
XLLGIDIVILIISRRPLARSCIRFFIFISILFLTITFFFLLLFLPTFF

SEQ ID NO: 957189 - protein, 102 aa, Homo sapiens
VVNRRAIDRCLCLRCAAKSNNANASTGITGILFIGHHSRGLLGVYAARLKLRIGGATTILVTHHKVRISLTFFEHDFPLVLVLFVVFNRMHRLTTRREQDTP

SEQ ID NO: 957190 - protein, 52 aa, Homo sapiens
MSCGMWIRPGQWQRRACDHWREPHHSPRTPLHSLQPYARYTERSHPIHCTDM

SEQ ID NO: 957191 - protein, 68 aa, Homo sapiens
NRLCRCSKGTCGLDGYGYYDSRATSNIAITSRKFDSAVRPEESSSEGILQVFKSTPQLGTYTEDCNMS

SEQ ID NO: 957192 - protein, 73 aa, Homo sapiens
TKASAPATPSLYSHEYFTSYYFVPVLQETSPLPNLTNDSVLSVYIRYLTEARQNNSLPFLMVKYCNTICLQCR

SEQ ID NO: 957193 - protein, 70 aa, Homo sapiens
LIFDSPLTEIEVALASCRLYPTQAMLMPLSRFLCCVSPAGHTVPHSPSKALACPLPPSPPWLAAYLSSPT

SEQ ID NO: 957194 - protein, 36 aa, Homo sapiens
YTPSITSTSCANHFSMQHSQHMHSQHHPAASPLSHK

SEQ ID NO: 957195 - protein, 76 aa, Homo sapiens
NPKMCAITANQDRPGQCKALDHQVLLDHLSQVRNPSSACASHITFIVPPFRLRRLHPSATLRESRVNGFFCSRQSS

SEQ ID NO: 957196 - protein, 31 aa, Homo sapiens
MSFLVPGESRMSAGLHNSPENGLDNPGGNHA

SEQ ID NO: 957197 - protein, 105 aa, Homo sapiens
TAEWSNYYCIRLPFADTINSVCLVNATRMKITSHNRFYGPNELIDESAKISSPSFLGTGLAWALSCALSASCNHPVRLSKSLRRRIILSSTKYLHYRICMHLLAI

SEQ ID NO: 957198 - protein, 38 aa, Homo sapiens
RIYKISSQWVRDPYNKIYALQQRTNGAITPVIDKRRYL

SEQ ID NO: 957199 - protein, 105 aa, Homo sapiens
MLASLVIHLTHSCCAFTGMLSEYTGAKDIAIRQDRHSPQFVKEADNKSANESDNCRQCSSDLKNLEVHGECRVICRCWSVPLSVVKEGTGRRQRYAPNSSLNSQR

SEQ ID NO: 957200 - protein, 105 aa, Homo sapiens
MIRDRAEGWESQGDQSLGPFKTSSSSGRDSHPYPSTQIIPGSSGGVCWGCVQECSESTGPEVAGGMMWTPGCLAFLLLTATSFLWEIVPPQFLVVHGTRLLSLAD

SEQ ID NO: 957201 - protein, 45 aa, Homo sapiens
MCASDYSVIIRPKYQEDQCCVNPTLDVARYFTYLCFVSFSVVPNN

SEQ ID NO: 957202 - protein, 59 aa, Homo sapiens
CIIFHDIIFPFCVTVSFSSLRLDILQTQRIRSGIPCVICCRLINNTSPLSVDMNVESPR

SEQ ID NO: 957203 - protein, 34 aa, Homo sapiens
MADGNGTAVVVVLTDVDLDLSLEHTEFPQARLPV

SEQ ID NO: 957204 - protein, 42 aa, Homo sapiens
YCHHCSESLFGKKYILREREPLLRVCASETLFANTCAVVWER

SEQ ID NO: 957205 - protein, 107 aa, Homo sapiens
MYRTAEWFKRILHYTALSLHVVDILNLSVYRYRMKITESIMYFRAQVTDRLSAKNLFTIFPGHWSCLGAILYLGEPVVITQDIVDDFESEIIFPQNTFIINFIHFWP

SEQ ID NO: 957206 - protein, 112 aa, Homo sapiens
VFTSEQEMSLQKIAFTSLGACPGFQLELNRMRNFDLDRRALCHPQDAPLPGCCQGLKEGVEVMDHRCFIRAIIRHSDLITKEASFDYLQNVRERLLLAAMRELGGMRRRLPL

SEQ ID NO: 957207 - protein, 66 aa, Homo sapiens
YCSNFLTLHYAQNRGRFKLLTLTSQINEWAKKHLYGSMEGMRETRHSRVLEECTEYRVPGIPMSQG

SEQ ID NO: 957208 - protein, 45 aa, Homo sapiens
MTLIRSCLVSVLQLRYSPALTLTVDQSRPHSSVSDVAPDPRSIKT

SEQ ID NO: 957209 - protein, 72 aa, Homo sapiens
TNLRFTRKRSNQRLILESTLRNIQNKVVIGYRWWWNISVVNYCETTLDDETNSKRLPYHYFEYTTNTTTIAY

SEQ ID NO: 957210 - protein, 83 aa, Homo sapiens
CRISNKLLVIDVFIVKAPYKLRIKQVVPCGSMDQSAFAAAASNAPLVMYRIIIVYRDVMTGYAIADAVRSVIFFKQINDQQFI

SEQ ID NO: 957211 - protein, 50 aa, Homo sapiens
CVITHDIYYAIHSDILSIYPPIHLSIYPSIHPCINPSIYLLIHLPIYLLI

SEQ ID NO: 957212 - protein, 37 aa, Homo sapiens
MQRIGRKRKTYSTYKSIQVTTHLRNDRTATDGQHDSI

SEQ ID NO: 957213 - protein, 53 aa, Homo sapiens
LVTYSKQGDVQWGPSLPSFLGGVDPSQVGELRVHLRRPALHSPACGKSSARLL

SEQ ID NO: 957214 - protein, 40 aa, Homo sapiens
ARIPYFDPGVGSVQSLEVEAKWGAGRREREVTGNRESLLV

SEQ ID NO: 957215 - protein, 40 aa, Homo sapiens
DHVSQQEAVQWWPKPPSFRGVLIQARCSELMSPPMTPSIF

SEQ ID NO: 957216 - protein, 44 aa, Homo sapiens
SIFSSISSISFSFAASCSNGLCNFQHRHSPGIQPTSATRMHVAG

SEQ ID NO: 957217 - protein, 38 aa, Homo sapiens
KTPMLKNVAHIGIAVTPLGPSHELYRKLHGAAHSTVAA

SEQ ID NO: 957218 - protein, 51 aa, Homo sapiens
VIGVVKDRTCSFMSMGTMRITWFMPLISVSTAIGLGGLEQAGILDLYLNVV

SEQ ID NO: 957219 - protein, 119 aa, Homo sapiens
HGRHFRCGESGCRVMAQQADHVRLHAGAEDHLQILGHLVVGLAGFQAADQLKTALEQGRRQVIALQLLAQQHAHRAPCTGNRNHAGSTDLWGCQAGDHCAFTVPEHKHLAKARVAFEFL

SEQ ID NO: 957220 - protein, 60 aa, Homo sapiens
ALKRIQTEALLLQSSSHPYPKTRSLASWSLQQKKLITLRGAPPAKEAQLHRKPGQRASRW

SEQ ID NO: 957221 - protein, 59 aa, Homo sapiens
MSLAWPGPFLFRPCYVFFCLTTTLPLDGTGTFLVTLSGSGFVLAATWTAVRGFVWGAPL

SEQ ID NO: 957222 - protein, 62 aa, Homo sapiens
GVKRRGNIQAAEVAVSLHYAAAFYFSIGNSRGGEFRTSAYSLSSDNPYSLISMHHTIYWRYR

SEQ ID NO: 957223 - protein, 56 aa, Homo sapiens
GLFLFRRAQFSFACSSTPHGWPCLPFLCIFLGQGLCSLLHLAAVSGLLVGASSQRR

SEQ ID NO: 957224 - protein, 60 aa, Homo sapiens
WLPPAAMGSRVHESCSFWAGGSWHSDAPFTPILLTPMLSYQCSTTLVCSALQQCLARMVP

SEQ ID NO: 957225 - protein, 103 aa, Homo sapiens
SLDADSSQVKSPNIEENMLSQNALEGVARRGDEHQETECAVEAMQSIEMDEENSASQTVCACYSFFSVVRMLRSLPSGGSSLGCETPSTTLSPVVRTRPVLDS

SEQ ID NO: 957226 - protein, 116 aa, Homo sapiens
SFGLLVAELEACLPDSSISAYNIIYFVGNVVNAYEVFVDKSLAMALSLYVGFQQLYLGIAQHKKTGAYPFAGHRLYFIMVFAEKLPEEFIGLPEMLHGNADVFYFFEHGCFLKVQK

SEQ ID NO: 957227 - protein, 76 aa, Homo sapiens
LYRLTSNTSIHELHSTHRFIKHVIKVRRKQSRLPKIKRTLGSEIQQALKLRNAYRQPPKRKKVQHRSIDIGITPHN

SEQ ID NO: 957228 - protein, 33 aa, Homo sapiens
HVQGGACEVVTLTSRQSPSRNQLLAWATYCLVA

SEQ ID NO: 957229 - protein, 113 aa, Homo sapiens
MTRTPEMTATSLNGRMNGSEKVKQRWYSPYRTNCPLSDRGIEMYVVVEGCTSRKRGGLGVQIGDGITETKPAKRGRKRNKVGDTIFRYGLTLNPRDNPFLTSYHRQYQNNMKK

SEQ ID NO: 957230 - protein, 118 aa, Homo sapiens
EAALEDPLLATESEYCAGSRRGRMIDQERLQRKRKAPGQCRREWDAEKTDGMFTDGPVPAHEPSHRYDDQAWARAPEAPQLFGEFLSQHKAEASSRRRRKSSRPQAKAAPRGLQVTIE

SEQ ID NO: 957231 - protein, 98 aa, Homo sapiens
MSDLIWDLETQLLGDSKRTVLDWTNGSGHQKEIQGHPQNGRNLGFPEVESREETFNKTSIYCTRLRMCQARVLDPRSQKKKTKKQVQQAANHKILTGE

SEQ ID NO: 957232 - protein, 78 aa, Homo sapiens
CDAVFLCRLVALLWARLQDTTKVINSVHIKQSRTYRLATGSDDNCAEFFEGPPFKFKFTVGDHSPLCQTVCDSLLMGT

SEQ ID NO: 957233 - protein, 95 aa, Homo sapiens
HSCLDIRRISSDLFIEINIWLTTDRLSTIFFGIHYISLSSKEIFPTELLNVYDRNISLSRYRVLRIRHFVALILTRVIAISSSRILRRMLIDFNL

SEQ ID NO: 957234 - protein, 73 aa, Homo sapiens
DLVDAVEVVRVALFRIGDEVVGRIVVHHQAVLRGQRAGVRQQHLRLRGGTAGGDAHDVDVAVVEAERVEVADH

SEQ ID NO: 957235 - protein, 47 aa, Homo sapiens
MILVVASSKDLWASDRDEFVQRSIRTTRRSHSVLSDMRLALTIYNHS

SEQ ID NO: 957236 - protein, 86 aa, Homo sapiens
AEANIGVPVRPFPRWMRCVKCGLLSPFDTGLFEIKEHRFRPERTRFVHKSCRGSKGDQPAKDPDAVPARFLLACRNGHLDDFPWHY

SEQ ID NO: 957237 - protein, 71 aa, Homo sapiens
MLDLGYGFDLKYVPAFVFFESIPYVIVPRYVSCFVYFGIYVRAWEEMDRNYFRIDVIVPTCLGIVEHNTTQ

SEQ ID NO: 957238 - protein, 46 aa, Homo sapiens
HRIVTIPKSVCSPMPVSRRRARPRCPREGRSLFMRSWSIEWSVNAS

SEQ ID NO: 957239 - protein, 94 aa, Homo sapiens
PLVDSLLSASPFLHPVGPHVPVALSPRAENLAEEIDGEGVVTHVGGDLVPPEGRTERARADKVFENSVASPPDGLGPTAPPPAFLTAEAIDVAA

SEQ ID NO: 957240 - protein, 77 aa, Homo sapiens
CEGRWDPGIRSGIHLSSQRPCRPVALPVRPPGGTQISTHVRDHPPPHQSLSEILAEWERATGPWGPKEGEKGLADEQ

SEQ ID NO: 957241 - protein, 59 aa, Homo sapiens
VWCYDSITLTSTDSNQNHKLICRVKELFLIGAQLNVGVMAYTDGYSLIPSVLLTNTDGI

SEQ ID NO: 957242 - protein, 49 aa, Homo sapiens
LASTCYFNFHLHVCLRCSVGASISAVCTCQAMPSLATWPVCISPHVCSL

SEQ ID NO: 957243 - protein, 114 aa, Homo sapiens
SLIHSHMTPQYPRSGRRSIEALQARSSGHHQSHLYTPPCTGYPHSPPPSLHGKGEEASDIRGPIPVDNAIHIPTEYRTCDPSWSQPNIRSYSGACTPGMKSHLWGKVPTRTIPT

SEQ ID NO: 957244 - protein, 62 aa, Homo sapiens
CAPSTPSHNPATPRKFWGYSPDGPILATLHPPIHRSPNQTTVTTPPTSIPPGRYTPQSILAR

SEQ ID NO: 957245 - protein, 53 aa, Homo sapiens
CRCAALYSGQRWARGGCGSLVVWTLRRRSGSPGDLLRPVPATFRRPCASGGRG

SEQ ID NO: 957246 - protein, 88 aa, Homo sapiens
MILKGTLDVRLLYRRMNECEAKFTGFVDADFVGDLDTRRSLTGYVFTLFGCAVKLESSTTSCSQVHCHNKRRKGISLVEGIDQCTITP

SEQ ID NO: 957247 - protein, 78 aa, Homo sapiens
MSMHEQLGKFTIAFCNPHLKYGYVRPKLCLDDRVCLKTEFGTYGGDDKAHHIAFFLGFIATTFDNAVVKIVLPITPHN

SEQ ID NO: 957248 - protein, 63 aa, Homo sapiens
KSRHTTEILGYSPEVPSWPRYLPPFTCSPKPSHDLPLPQNSIPHVTDTPSSLYSAREYHLDET

SEQ ID NO: 957249 - protein, 65 aa, Homo sapiens
  misc_feature (13)..(13): Xaa can be any naturally occurring amino acid
HRCGLERAALRIXLGWGYHWLGLSLRYAGLGKRLAAAWREGFGFLVLVGLSWSLSVGVYGVSSSP

SEQ ID NO: 957250 - protein, 38 aa, Homo sapiens
NLVTHGCHDRRCSYWTTGTGGDGDAYRSTSPLYGTCLG

SEQ ID NO: 957251 - protein, 37 aa, Homo sapiens
MCPPRSFTYPHTTEIRGYSPEVTSGHARSPHYTDPRN

SEQ ID NO: 957252 - protein, 89 aa, Homo sapiens
MQKSKQQEQAASSKSKQQTATSNKKRKDKDCFPCLLNTTSFFSPMSQGSNFNSSSLHYLNKYISSRLIAAHKYMHFSAWGSLSSEFCNP

SEQ ID NO: 957253 - protein, 33 aa, Homo sapiens
MLARRVRVGILLGEAPVVCCFSDRAVVWAWRGV

SEQ ID NO: 957254 - protein, 31 aa, Homo sapiens
MVALPTLLASRTLLTPVPIHSSHHFIFTWRL

SEQ ID NO: 957255 - protein, 41 aa, Homo sapiens
PGAHIMAAGSGGGQGQHTSQPPVGLSRASRQGALFRVSLHG

SEQ ID NO: 957256 - protein, 66 aa, Homo sapiens
MQAELTLGDTALCSPFSPLVPRPWSLPSAENLAEGLVGRGVITHVGGDLGAPVEAWTEKGHGRDNG

SEQ ID NO: 957257 - protein, 53 aa, Homo sapiens
YCEKGVSGRCYMERVGGGGEPTISPPVGMSRERGEVALFRVSLMGGGMAERGV

SEQ ID NO: 957258 - protein, 49 aa, Homo sapiens
LRDVENRAVGILSTTYLSVYPGHWLSSSGCFRTCFFQSAMADSLRIRMS

SEQ ID NO: 957259 - protein, 69 aa, Homo sapiens
SFTRIRHTTEIGDTPLEFSILATLPPPHSPDPANQAMIYHSPKLHPSWADTPSSLYYARVLHLRENPPP

SEQ ID NO: 957260 - protein, 48 aa, Homo sapiens
IYHLTHEGHPERGTLHTLPRLSNMGTGRRLRSPPYPLHDIQRLVTPFS

SEQ ID NO: 957261 - protein, 41 aa, Homo sapiens
LISGGTGFEADYGIAWGSPTAQYPPRTGVNVDSRRKGELDS

SEQ ID NO: 957262 - protein, 105 aa, Homo sapiens
MSTLAMKLALRNRVRRLLSVINLNCYWVNLVVAVVNFPNKQIGPIQSECLVTGFHDSDAGVVLCVPDTDVPDRYQATIIEKEKPKLSLGFSLEQSDPTIATIDET

SEQ ID NO: 957263 - protein, 79 aa, Homo sapiens
QAEPDPRWTPALCHAPILIPWFPTVLVGLSRSARISLRDWWGGGGHCTRVEILVPPEGRTGRARADKVFENSDGIPLLM

SEQ ID NO: 957264 - protein, 152 aa, Homo sapiens
HGARIRSDSIQSNVLVPLGEYIPLSGLLKWVLTAMQNDPSISGFSRGEQQQQPLSIHQQHLGASICYEVAYPNLTRLNARQSDFLVTVSNDAWSPGTAGPLEDLQMVQMRAKENGRWFIRATNTGVTAFIDHQGPIVERAPQDVATVLRWRT

SEQ ID NO: 957265 - protein, 33 aa, Homo sapiens
GETDVVGECMGRDERTGEAARWASYHLSSIDVA

SEQ ID NO: 957266 - protein, 77 aa, Homo sapiens
VPDGRSLSQPDQQSETPSHKKKEKEKRCDHGVTTTTKILIGNGPIIYKDFYYSCHFPFKIPFPFGGQVKKNQYSDRP

SEQ ID NO: 957267 - protein, 50 aa, Homo sapiens
AAVIHSYHSNMTYSSILRVLDGDRYEGPFKPPHLDTTNPTCHTLRSHEVV

SEQ ID NO: 957268 - protein, 46 aa, Homo sapiens
LIEIKRDIERDSPKCPTVTKCAEPRIILQKLTLILKTRSDTNGVWL

SEQ ID NO: 957269 - protein, 45 aa, Homo sapiens
YDIRPLMYCQNNYTSVMMWPCDFHDFPSVPSDSLHTSVYTRFLTA

SEQ ID NO: 957270 - protein, 52 aa, Homo sapiens
LFLQSHIDSERGWDTWAEEIPWLILNLRLKSMYHQSNHLSAPDPSSTLYDCG

SEQ ID NO: 957271 - protein, 39 aa, Homo sapiens
MLRRPCLRPPRSLFHVYPPAVYSVSWSSLFPSVTDGPCY

SEQ ID NO: 957272 - protein, 91 aa, Homo sapiens
LVASTVLQSGDEPDSVLTKRKKDLNVRPETINYKKKHRENSSEHRLRQIIYEMKYHDNTGNHKQTVDNMEITFKLNNLLRLQTEICTRDRT

SEQ ID NO: 957273 - protein, 69 aa, Homo sapiens
PVTWCYISSLSGRLRRGGGTMAIMERDATEFSKTLSCPGPSCPGLLVGHQYLHPDAVSTTLPTNPSARF

SEQ ID NO: 957274 - protein, 124 aa, Homo sapiens
DHCTHCSFYLLGSCDPPTSAPVIARTTGMCHHAWLIFKLFVEMGSPCGCSVLVSELSRLNVILSASASLKGLQSRSRCTWAYLEGHFLKNYILFQSFGLLIGSTPDHFASKNNSLGYRSSEIRN

SEQ ID NO: 957275 - protein, 50 aa, Homo sapiens
SEGVYTTPRLVPFGEYIPVSGLLKWVLPAMQNDPSIRGYFTVVNNSNNRF

SEQ ID NO: 957276 - protein, 47 aa, Homo sapiens
FPFSSVTFTRNVAGTWADVRSQAIPNLRLKIQYHQSNHLSAPIPVRP

SEQ ID NO: 957277 - protein, 38 aa, Homo sapiens
MPDRKGQGGQGLGELGGIRLLMAVVPTALPQAFLTAER

SEQ ID NO: 957278 - protein, 49 aa, Homo sapiens
GSSWDRGKVVTLVVLDLMAEIRDRLGISSAHYPPVTGVIVTLEEGGIDV

SEQ ID NO: 957279 - protein, 53 aa, Homo sapiens
LVGAVDQRIRSGMHRVLKTFRPWPFLSGLQGHRSPPSVYHPFLNKSLSEILAE

SEQ ID NO: 957280 - protein, 55 aa, Homo sapiens
LLSVTGWLSGLVCDSSAIMELGCHLSSTKTLYLPCALSCTWPSSGGTMILHAMCC

SEQ ID NO: 957281 - protein, 50 aa, Homo sapiens
LSRKAEGWGGGTQAIRSVVHRVLKDLVCLAFLSGLQVAPDLHPVRDHPSP

SEQ ID NO: 957282 - protein, 82 aa, Homo sapiens
SFTQDPPHHGNSVDTPQRFPSGHAPPPIHRSANRTHVTTPSCSNPLEDDTPSVYTRTRLHLVKIPRPESTLPRPTPSMLGSV

SEQ ID NO: 957283 - protein, 46 aa, Homo sapiens
GAVWTQAIHGAGMPRCSQMTLFVAMALPVLASMWGTMISTQCCDYP

SEQ ID NO: 957284 - protein, 43 aa, Homo sapiens
TTGDLSSLDICKCRCIDLIPHNRTVDTVWMAVDESCDKPAENP

SEQ ID NO: 957285 - protein, 47 aa, Homo sapiens
TRSASTTHYGHPEHGTSYISRDIPTWVDWTVGYPYPPPTLYHDITAP

SEQ ID NO: 957286 - protein, 33 aa, Homo sapiens
AQLYSSAGQIIVVEFWDGSGSEGGTVVHATIYL

SEQ ID NO: 957287 - protein, 39 aa, Homo sapiens
MAWGVGGVPMAIMELGCHAMSSNDLVLPWPFLSWPPVWH

SEQ ID NO: 957288 - protein, 33 aa, Homo sapiens
ECGGYWAEEIPGDRTPLKSSTTRVTTLLPLIPA

SEQ ID NO: 957289 - protein, 38 aa, Homo sapiens
CLVVCPPSTPFIQESATPRKFGEYSPEVPSPATLPPPI

SEQ ID NO: 957290 - protein, 46 aa, Homo sapiens
LSVCPPSTPSTNPPHHGGFGDTPQRVHPATLPPPITPDPRNQPTVY

SEQ ID NO: 957291 - protein, 103 aa, Homo sapiens
RSLSIKDDTQIVSIQSPVVVAKINFFLFFFFFFFFLFFFFFFFFFVVVVVVVVVIVETIREYVLCNMVKIEIHSLCMGNCCFRVNDIARNEFDEIHGNLSLAS

SEQ ID NO: 957292 - protein, 42 aa, Homo sapiens
AVAASYHEQRRYNEVMVECLGRGERIRECRHGGPRYHLSSID

SEQ ID NO: 957293 - protein, 35 aa, Homo sapiens
  misc_feature (1)..(1): Xaa can be any naturally occurring amino acid
XWKIDCSVAHVLASRICSPRSKHSTHHFIFTCAGC

SEQ ID NO: 957294 - protein, 94 aa, Homo sapiens
KSIHSYHSNIDLPQYPSIPGRRSDPEAPSSPLTVDTTNPTCHTPLAPGLHPLPLPRSTERGRSLGNKEAHPMGTTPSTSRPISDLRPSLDPNPH

SEQ ID NO: 957295 - protein, 35 aa, Homo sapiens
MACGPRVLGKVSRGATVEECGVGKLSCRMSKIDVA

SEQ ID NO: 957296 - protein, 53 aa, Homo sapiens
AADHVSPSTPSYKSATPRKFGDTPQRSIRPRSSPHSPDPLNQPTVYLLPTTSY

SEQ ID NO: 957297 - protein, 34 aa, Homo sapiens
ILENRWYACHVPASRYRHPCPKHSTHHFIFTGGC

SEQ ID NO: 957298 - protein, 43 aa, Homo sapiens
PRVYDSGTWLGTGLRRSPGDFEPPPQIQCHQSNHPTAPIPALT

SEQ ID NO: 957299 - protein, 41 aa, Homo sapiens
AGPRSIDGECAGVVGTVADRLCQGVDAVRCGDEDSAHACRP

SEQ ID NO: 957300 - protein, 34 aa, Homo sapiens
RETGSHSYARETIPTGGLDVGSLPPLSLLHDIQR

SEQ ID NO: 957301 - protein, 36 aa, Homo sapiens
RAYSERAGQMNCGSSVWDGLSGCGSAARVAHATIYL

SEQ ID NO: 957302 - protein, 43 aa, Homo sapiens
ITPERGGYWAEEIPRRSRTYRLKYQYHQSEPPYCPDPRLDTYM

SEQ ID NO: 957303 - protein, 38 aa, Homo sapiens
MYDNLAVSKRHLVHSSKAVDTPATNLNKRPEYTAKVGL

SEQ ID NO: 957304 - protein, 35 aa, Homo sapiens
QWKIDGRVATVRPPHPLTVSKHSTHHLHLHRAAAH

SEQ ID NO: 957305 - protein, 75 aa, Homo sapiens
IQSSRATMPGIDDAFFSSPSETDAFNVMSQLPFLPFSKPTIDEATISAVGDVLRSGWITSGAKVQAFEAQLSEYF

SEQ ID NO: 957306 - protein, 57 aa, Homo sapiens
HTLQLISDEGCEVIAKSDLVGMAAFLTINNIYYSAVPAKSSMCGIVELRLLRRGTAL

SEQ ID NO: 957307 - protein, 54 aa, Homo sapiens
LSGSPPQHTQSSPAEERPSSPYSWPQLSCCYGLLPKIERSASAPSLHRTQADEL

SEQ ID NO: 957308 - protein, 46 aa, Homo sapiens
RSWNKAGADRLRPQKHRPLRQEHTGSIEAGGGKAAHPEACLSDETA

SEQ ID NO: 957309 - protein, 43 aa, Homo sapiens
ARNAFFLLMRNIIRVAVLDKGTDFLFLTVKYSFILWETRRIKL

SEQ ID NO: 957310 - protein, 50 aa, Homo sapiens
KIARYRQHRRLTHTFSTPGPVPAACGGCATVYAQLTGGNFSISFLFKISP

SEQ ID NO: 957311 - protein, 107 aa, Homo sapiens
NLEYPALHGYSSSIEEAFSPEKASTFLPPNAQLTAFYIFYYSADSFWFISVSLTLLLLLLEMAGPVNEKHPNFHSNVHMFHIPQSFYFGLKSYCFIQHDSPGFEIIS

SEQ ID NO: 957312 - protein, 53 aa, Homo sapiens
EPVRLRGWSSSRSRVVSAFVVDLAAATSRHPVDEVEHVLPAAGRELLVVLAVV

SEQ ID NO: 957313 - protein, 37 aa, Homo sapiens
TETHHHKKKNLAAKRTEEKLTKKNKPGKKDPYKFFPP

SEQ ID NO: 957314 - protein, 63 aa, Homo sapiens
FAERSGSVFQSHIIAGRNKAEREVGVGGLEVLVEQAVDGCLHVGGIILTNLGAHGLVGEKELT

SEQ ID NO: 957315 - protein, 32 aa, Homo sapiens
MAVAGGAQGLLLRYELDQQVRFTPVSEDDYRQ

SEQ ID NO: 957316 - protein, 71 aa, Homo sapiens
SWYGLIFWHTLGVELPGQMATVQLPEELLDCFPKQLHHFTFPPAVYKGSDFSRSSEDTIFINIIAILMGVK

SEQ ID NO: 957317 - protein, 69 aa, Homo sapiens
IVTRNPAGDTPLGTYGLIAALAGLHYGSEKLLPLGSFVLALYLPCALHIVRGVRQPARRARTQSAEASS

SEQ ID NO: 957318 - protein, 37 aa, Homo sapiens
VTSSVNRILSSLFPGVNAARASCNSLSSLFPVYNDGP

SEQ ID NO: 957319 - protein, 49 aa, Homo sapiens
SLTGPILPIEYTIARHLRVVSPGWARWLMPVIPAFWDAEAGRSQAQEDK

SEQ ID NO: 957320 - protein, 47 aa, Homo sapiens
LQADTRVSPRQLTGLNPSSLSPVPQDPCLLGKGLLGYESIRLEDTKY

SEQ ID NO: 957321 - protein, 35 aa, Homo sapiens
EPLVPMPLDLYIPPDALEVFLEAFQGPLDLLLYLI

SEQ ID NO: 957322 - protein, 45 aa, Homo sapiens
MYAVLFKPKQAWFILMASNGNGGFTHVQTIDFQVTNGCIELLNPS

SEQ ID NO: 957323 - protein, 72 aa, Homo sapiens
LQQSTGACKLAKGSNMCTTQASFRRFSFNVKTFRHVVSNGSSTSGSGPKCCHANVQGPCSRWVLAKASEGIL

SEQ ID NO: 957324 - protein, 102 aa, Homo sapiens
VTGDQPQIFEVCSFRVQIIARAMERGAVAVVRKASTSSTEKSFETTAKPGSATASTSTPTGCGLVAQTIHFPSCDKLNLGPSQFASSGFPKAFFDTSDCTGT

SEQ ID NO: 957325 - protein, 73 aa, Homo sapiens
SILSLRSILLTFRRRLPSTTPHGPRTSGSCTDQENEFLLIQLTHAAKCMLTDDTELTASVPKADPRINSARTA

SEQ ID NO: 957326 - protein, 55 aa, Homo sapiens
MKGGSLLRGELEKKSKAIIEGNISILHDVKGRQSSAVEELGSPSLLFIFLRLPAV

SEQ ID NO: 957327 - protein, 54 aa, Homo sapiens
LVVPIEMGFLDFVTERRQAEGPDALLFSELRFDEKHLYSRAASRFFCGPETGAG

SEQ ID NO: 957328 - protein, 45 aa, Homo sapiens
RSSVKHTTAIIVAYNPLSRTSNSTPTNSFLMTSSQASQASPFIPP

SEQ ID NO: 957329 - protein, 39 aa, Homo sapiens
TGFFDDVFCCTDITIASCQRLGMPHGFLLHSLFHLFEPI

SEQ ID NO: 957330 - protein, 33 aa, Homo sapiens
MSYGNSSLPIFKWSCLGFLVLSCRSYFSLRRKV

SEQ ID NO: 957331 - protein, 45 aa, Homo sapiens
PHLLIKRVFGFRINPSLTFSHHSLEASFRYLPSAFFLALNILWLY

SEQ ID NO: 957332 - protein, 39 aa, Homo sapiens
  misc_feature (16)..(16): Xaa can be any naturally occurring amino acid
TRGLSYALAQCGVLQXITLQQLKLEVTAKAHIQSLVLEL

SEQ ID NO: 957333 - protein, 35 aa, Homo sapiens
GNISEYKHLWMANTAPIDEDIVEVSYNVLRVVEYD

SEQ ID NO: 957334 - protein, 58 aa, Homo sapiens
  misc_feature (50)..(50): Xaa can be any naturally occurring amino acid
RYKYITLCIIIFIITGSSASLSLSLLSVAMLPCVPQKPPFEEVVAVRCLXVVRVLFVV

SEQ ID NO: 957335 - protein, 51 aa, Homo sapiens
VSPGILVITRTISIREVGPWSAHNRDSGRLTAFYTVFFFIAGLELKREFVE

SEQ ID NO: 957336 - protein, 48 aa, Homo sapiens
LDTICNIPKGRQFQPAASGGWHAWSLCMLPSVMLRKGLYSKPPDNIRL

SEQ ID NO: 957337 - protein, 45 aa, Homo sapiens
MGSSSSPQVRNWARCRDTIRYGRYRRAPRSIRRHIATPSKTKTCG

SEQ ID NO: 957338 - protein, 48 aa, Homo sapiens
VPSLAVTRDILVTCIHPHDATMGIWLPNANTSEDLNWLPDEANKPIID

SEQ ID NO: 957339 - protein, 56 aa, Homo sapiens
RPKIIGSRTISQQSLAGADMKCTITASGKDADSHRHIGLFRRKYSPHLITHQDTSN

SEQ ID NO: 957340 - protein, 49 aa, Homo sapiens
SSVTLRIPQECPVPDRVPAESDVSGPAAGVITAALRRAIRSQTGAARAY

SEQ ID NO: 957341 - protein, 45 aa, Homo sapiens
MAKGHKQPAGMATVHCIHANCIAPKHARGISHARMAVQAGNGNCM

SEQ ID NO: 957342 - protein, 101 aa, Homo sapiens
CGITARCSRGGPGPRAPSTSWARHVGVLAAGSGMVPRGMGLDPLSSALRSLTCIPLLGQAEGWTCLSESGMAIRVGKCNVGTSGMAIRVGQRKVNAMCRVT

SEQ ID NO: 957343 - protein, 69 aa, Homo sapiens
PPAYCDGGRNCTPEHIAGVPKEEEEGLRTITGPCFANFSLYWPLKDCRCSKQGIYIKQLQVLSRESQRW

SEQ ID NO: 957344 - protein, 61 aa, Homo sapiens
GLNMLTFARLGVKLELLLPAYARATAVPDLRCVFDQHHSSWQRWILNPLSKVRNGAKVNDV

SEQ ID NO: 957345 - protein, 61 aa, Homo sapiens
LLLMSPLSCVHGYSLSFLMAAACSCALLLQWSLAFATSAWPLLHHSASPASTIHTPAVLFF

SEQ ID NO: 957346 - protein, 104 aa, Homo sapiens
MIRKSVMNTNDLVGVQAAHGERSIGIWYARHLIEKSLRDIVSLLAASEAEVQQLLSERAPLTGHSCYPDALLHFRTHYFNCALPHVRLCFETFVLAGQTLLRAV

SEQ ID NO: 957347 - protein, 45 aa, Homo sapiens
MCQCDGSCAIDCAKEVIECAWKVCVHYNRHVVCQCDAVACHDDGE

SEQ ID NO: 957348 - protein, 109 aa, Homo sapiens
MCPGMVCFACSWLKKICQCGAEHANRAFRNVVHFLCRFRAPPISPLQTRATLSRSPARHSSGLHCPLPEEKVDLIVVPREAVQTLRYIGRAYIVRFVDPEGHVLCLHGV

SEQ ID NO: 957349 - protein, 41 aa, Homo sapiens
VLLTEGTVTDKDSKGGESLCVDLLKEAHVCRAQWLTPVIPA

SEQ ID NO: 957350 - protein, 111 aa, Homo sapiens
MRHCMSSIFLIISTAYVYVTIRLVYIITRRLSYQTYSEILSIIDIKEAEGNRAIQMQIFYILIEIEFYFNLNKIVTNYTQLKKVVNWHVCKIAVYDFVLVFIFPSKKGPIY

SEQ ID NO: 957351 - protein, 157 aa, Homo sapiens
HPKCGRIKTNFASALLSYLSISLGLTSVAQAEVQTGFHTCKPGWSRSPDHHDPPASVTPKCWDYRCEPPHPRPVFNLLSYRLMIHLGLISSYRVRTWSSSLTWDYRYRDYPPPLVEKTILKIVGSYMSGLISWSRICNIRVPCLSLGPVSYCLNYYS

SEQ ID NO: 957352 - protein, 98 aa, Homo sapiens
YRDKRRRRIHVQQLTSKQAKQRDPQSRHITVELLKATDKGIFYIFFFKDRSHHNMAQVGLKRLASLDSPTSTSQRAETMACAPLAGGNTTQEKNPLPS

SEQ ID NO: 957353 - protein, 132 aa, Homo sapiens
YRKSAMPGNSSEQESRITMKQLSLGNIDDLAPVLPVIGMIHETDHPRAHHNLSTRNTLVINLSLFETGSHSDAQSGAQWRKLRLLKTLPPGFKQFSCLSLPGSWDYRHSPPHPANFRIVSRDRVSPYRSGWS

SEQ ID NO: 957354 - protein, 46 aa, Homo sapiens
SFGRWTLHSVRRQAMPFKCMQRTDFILKFPAQCPPGSMSDKPGRRQ

SEQ ID NO: 957355 - protein, 30 aa, Homo sapiens
MPCSACSSLIHPQFRTVPPEVVRQAWQKAD

SEQ ID NO: 957356 - protein, 47 aa, Homo sapiens
MDLALSEETAMPFKCMQRTDFILYIRERAHLEVCPTSLAEGRHQYSC

SEQ ID NO: 957357 - protein, 37 aa, Homo sapiens
ILPVYQPSSLTFSILLAGALEQALDNEIHVNFLILQN

SEQ ID NO: 957358 - protein, 40 aa, Homo sapiens
MPKQVHAASTDIILQVSCTVPTKSNVTDKPEQKVQTYNTT

SEQ ID NO: 957359 - protein, 51 aa, Homo sapiens
MPFKCMQLTDFHPPSFRYCAHLEVCPTTPGSKAVLQELHVLLRGYRVSYTS

SEQ ID NO: 957360 - protein, 67 aa, Homo sapiens
LVYMNLTIMLDMADREGVVDIYNCSGAAVTEGEHGAIQRSRYVFIHECDPRKPVFVRDTVWCAASQC

SEQ ID NO: 957361 - protein, 47 aa, Homo sapiens
GPELKARSNSEGSLISDHLPSGPFIYTKPPVTGIEKFGSLAPERVEN

SEQ ID NO: 957362 - protein, 35 aa, Homo sapiens
RRPLPFKCMQLTDFILKFPLRAHQKYVRQAWPKAD

SEQ ID NO: 957363 - protein, 43 aa, Homo sapiens
LRCRTYFWWHCAETEDKSVSCMHLQAWPVSSLQCMSIDQSPVL

SEQ ID NO: 957364 - protein, 65 aa, Homo sapiens
SAQGMRRHCLQCGAQALPFKCMQLTDFILKLPHSAHPKYVRQAWPQADIHTHVQPGATRARTSYI

SEQ ID NO: 957365 - protein, 40 aa, Homo sapiens
LQLGDRPCLSRCMQLTDYHPQDFRTAAHHKYVRQAWQKAD

SEQ ID NO: 957366 - protein, 50 aa, Homo sapiens
MSAYAGLSDILLVGTVRKLEDEISESACILKRHGLSPHFSAMSTRPKPYS

SEQ ID NO: 957367 - protein, 40 aa, Homo sapiens
MVRRQAMPFKCMQLTDFILYFPLLVPTMKYVLTSLVRRQT

SEQ ID NO: 957368 - protein, 49 aa, Homo sapiens
MRVLALHTVGIQCPHYTSGLGQLFALFAHVQNTDKKAPSWKAKHSRPIR

SEQ ID NO: 957369 - protein, 41 aa, Homo sapiens
VYRSVICVPTSYNRTASLTRVCLLDINSPIMERAVGRTGSS

SEQ ID NO: 957370 - protein, 47 aa, Homo sapiens
CCHDIDHTFYRDDAKQQTGYKNPEIKIDETGSTPGYEGEGEGDKNIS

SEQ ID NO: 957371 - protein, 71 aa, Homo sapiens
  misc_feature (60)..(60): Xaa can be any naturally occurring amino acid
ASASGQDLIGLICWQIYKEGREPKLNDNVSAYCLHIAERCWGRWTPDFPPAGFQVSPFIXFGFRYFVPWLK

SEQ ID NO: 957372 - protein, 42 aa, Homo sapiens
RSVQSSGSGVVQGVGRQQGGAPAQHQVVVAVWFNTTSVSRAC

SEQ ID NO: 957373 - protein, 39 aa, Homo sapiens
QCSSSVIQAGVVVQRGPAGTTVAGTSINIRLLLHLVQTT

SEQ ID NO: 957374 - protein, 45 aa, Homo sapiens
AAHIHSAVGGCVASTHSCVSGHVHVQMVSPSSMGRARIQLFSHMA

SEQ ID NO: 957375 - protein, 52 aa, Homo sapiens
  misc_feature (52)..(52): Xaa can be any naturally occurring amino acid
TGYGRQVRYVLTDGGVVTRGSDGQQVGDTTLHTTVVVDFGIHNTLRTTGLTX

SEQ ID NO: 957376 - protein, 53 aa, Homo sapiens
CGYKRINCFHVTTPIRVWPQDGRGIRFQPSEPARMQRCMACASFIYRKLRSAL

SEQ ID NO: 957377 - protein, 86 aa, Homo sapiens
EEICTSAACPVKPYVTILVGWSFTVILHSHQCEQTIKLRTASVLSKMSNMWDSYTHILGSRQCHTYLAHAQVVCSILDCRPCSALQ

SEQ ID NO: 957378 - protein, 44 aa, Homo sapiens
MPIIAQMTTQTPISAIAVSRTILLWCKIPLGTTKLRRDLSAGYR

SEQ ID NO: 957379 - protein, 34 aa, Homo sapiens
MSSTPCKKTCRCRSDMGRILTVTSNTNASQISTS

SEQ ID NO: 957380 - protein, 44 aa, Homo sapiens
PSKKLDIISPTVAEHYTGEKAASFSLMPSIMKELIPDKVNVLFV

SEQ ID NO: 957381 - protein, 83 aa, Homo sapiens
SRLAGLFPRLCRTAAWPVHSCMRRPRHLHSLLPFPPDVPRAALSLVSSIWRPPPGSRPGLGLPYYVRCEGRTPGDSSTTSTLQ

SEQ ID NO: 957382 - protein, 44 aa, Homo sapiens
ASSGHIEILSECCCSRLETKWEPAKPRVLNMLNISPFSFGLVIQ

SEQ ID NO: 957383 - protein, 35 aa, Homo sapiens
VALYRSVACWAPFVSSLAQLPSLRISMVPLYACLL

SEQ ID NO: 957384 - protein, 33 aa, Homo sapiens
LSSISPEEETPFYTNTYADFSVTLKIALKIDWL

SEQ ID NO: 957385 - protein, 84 aa, Homo sapiens
VCGAQCALMFFSRIGCTSDGLSEMPLERGAADVKRQRHVSGADHVCYQGVHDSLIYARRLSGQIHRILSLGKAFDPCHLIVSSS

SEQ ID NO: 957386 - protein, 47 aa, Homo sapiens
MYSDRISSSYATLIPTLAIITRGGNQPERLNAGTYFLFYTLPEDCWW

SEQ ID NO: 957387 - protein, 70 aa, Homo sapiens
MHPNVSKLSVEPYNSILSSHTTLEHSDGAFLVDNEAIYDICRRNLDIERPNYTNLNRLISQIVSSITASL

SEQ ID NO: 957388 - protein, 61 aa, Homo sapiens
MALVLCNGRLCGGRLLAGRVIPSIVATSQTSGVDGGKGQQDSYVGDEAQSKRGILTLKMLV

SEQ ID NO: 957389 - protein, 42 aa, Homo sapiens
MRILYYSICFLEILCIGLMFKSRESHSIAPLKIVGGPEDCWW

SEQ ID NO: 957390 - protein, 49 aa, Homo sapiens
EPVGDAVVGHALLEDLGAMYPWVPTAGMGLLLGEVTGQAQVRDPHGAMR

SEQ ID NO: 957391 - protein, 54 aa, Homo sapiens
MLDSPKRKRPKSLAQVEEPAIENVKPPGSPVAKLAKFTFKQKSKLIHSPEYGWL

SEQ ID NO: 957392 - protein, 55 aa, Homo sapiens
MEILSDVQLIKTGDKGGASEATRLNMLNISPFSLGRVIQQVFDKGSIYNPEDGWG

SEQ ID NO: 957393 - protein, 46 aa, Homo sapiens
ALGCHRCTYIFCVSFRLAGCFNAFVPLPSPTGSLSVCVLSPEDCCW

SEQ ID NO: 957394 - protein, 84 aa, Homo sapiens
CYRRSIMLHGLTAYTVGFHFFTLHGYTAFKHAAWNPLHSIEIHWATLHGIHCIQSGIHLTPLHGIHCINRDAFYHAAWNPLHSM

SEQ ID NO: 957395 - protein, 69 aa, Homo sapiens
VPAGLGPDKDVRSTAIQPIRSGFRADAGSTRCPRRHGPPCRGAVRSTCCLADSDPCPSSRGVDYAIPAD

SEQ ID NO: 957396 - protein, 55 aa, Homo sapiens
MLVWTLIECICSLYINGLRTVDFEGSDSASGSLPLALVKRVRAVPPSLSGASFGF

SEQ ID NO: 957397 - protein, 63 aa, Homo sapiens
MFLPVRYCVEFMLTAIGCPHTRLYSCVSQNVTAQLVVPDAGLATPLCRKYFQHQGELTEIKEH

SEQ ID NO: 957398 - protein, 36 aa, Homo sapiens
MGDKPAYVISCTRGSWAMAILLTRRFMQQAPHGAPP

SEQ ID NO: 957399 - protein, 39 aa, Homo sapiens
MSYVYSDSLTTAHDGNSAAASYIQLPGPGNFHVSVPRSN

SEQ ID NO: 957400 - protein, 85 aa, Homo sapiens
MSYAPGSLRYQIRCCRAAVVWVADAARDPELLWLWQYAGGYSLPLNLNSNTTNVNNCCFQICLPTQCQPGAQSQVLTQGSVGHNR

SEQ ID NO: 957401 - protein, 93 aa, Homo sapiens
MSYGVLRLNLIYRLLSLPSSIRKEPHLFLVDLSVGHIDRESPWSALSTLLPCELQEVHESAGDHPRLALVPEAHNSRWYRRSNFDKSLAHSLF

SEQ ID NO: 957402 - protein, 44 aa, Homo sapiens
GLLSYVLYRNSVNHCATTGTPQLHLEIQLSCVLVNFHVSVARTH

SEQ ID NO: 957403 - protein, 52 aa, Homo sapiens
MSYGSYEYAIGPRFYICWLFGTEAIITQGRPRVHSYLRRLSLNILETGRTDW

SEQ ID NO: 957404 - protein, 77 aa, Homo sapiens
MTLTTEGECAPAAEMPGTVSDSWPLDCVSRAFPDSIQPPANLWHPDHCWPPRMGSWVLLFIDGLYLRRVTTYRVWVP

SEQ ID NO: 957405 - protein, 50 aa, Homo sapiens
LPWKTPCRGDCTYSPALNQRCFAYTGQERALMQRVGKIPQPPTRHPLLRA

SEQ ID NO: 957406 - protein, 48 aa, Homo sapiens
AYPRTHHALPTDTPAIPTDNHAIPGTTRYYPGHHALPTDTSYYPRKPA

SEQ ID NO: 957407 - protein, 36 aa, Homo sapiens
AAQSPCLLDEGGFTRDFTKADGPVTTVYDASVNYRE

SEQ ID NO: 957408 - protein, 75 aa, Homo sapiens
SFKSFNTRQMTYFMQVNVAHSILGVIAIACKSSAAKVDSIFETSLSQVIGKKQLLICLSFIMRSQQFSHIFRLHF

SEQ ID NO: 957409 - protein, 70 aa, Homo sapiens
MGPSNGLSLRSDDDLSIIIAQKSSTVEQKRREPNTNKDVAGFHRDLMWVMTRMSGSHSVVNMRMSITPHN

SEQ ID NO: 957410 - protein, 54 aa, Homo sapiens
TKDGSRAWKSKARQTKGVPNPMQTAQCLPVQSYQELSVSPPSGRLYVRHLSEVL

SEQ ID NO: 957411 - protein, 35 aa, Homo sapiens
HSAPESSKIEGQQVANKHDQRSSSRDQTMRPDIGS

SEQ ID NO: 957412 - protein, 201 aa, Homo sapiens
MEEHPELQQFRGPDGRRLISQTQAPSMTGGSGCVKRDLLLTPKCWYYYRTRNSQTGPRRGPGERRLNRKIEIERILFVLVSARQDDLVILHEQEYDSVLESVCKTEFLSLLAKRNEEKTQKQLPLKYSNTLELKLKKDNWGPWSAGGSGKVQFHQGFGDLAVLKPSNKVLQVSIGPGRAKNSRPTRKDNSQNKGNPVGLKC

SEQ ID NO: 957413 - protein, 129 aa, Homo sapiens
LTRPHVNDSRVHPEVKDNIAMFTEPSENKDTTYQHSVERPYKDSSCSSRIVIGACNAYRVNRGGSATTLELAGLQTGPWTSLSNEYLDSPPRGLVTSSVPLSILGPTCCISFFFLPCLVVPGEFVPGGY

SEQ ID NO: 957414 - protein, 53 aa, Homo sapiens
ISLQQVSGELGAVGLQVQTLTSLSVRSKGVMDSRRAPRDAPVALALRHRQLLP

SEQ ID NO: 957415 - protein, 159 aa, Homo sapiens
MHRCRRLHPGNLFCPINTDSQGGWLYHEETSYPVYPGSLGGQYIPENTVSSVYTGCLGARYIRKSSARTDTPMAEGQRESHTSHSFSTVLSWYRITLQVMEAKVMVHKKASYSSQMFMRLNGKYDSGDPPASASQSVGITGVSQHAQLRSRYIKYSPLL

SEQ ID NO: 957416 - protein, 43 aa, Homo sapiens
DSAQRIPDYSINQRQIGEAFKLRRKSNHSSATIVALYLYIRQT

SEQ ID NO: 957417 - protein, 76 aa, Homo sapiens
MVADPAFGSYPRRMYQHDRVDAIGFHGELVMASRGGDVILSYCSLIFSSSKMQKYTNFLTDTRMEYRCSHSSSIIG

SEQ ID NO: 957418 - protein, 36 aa, Homo sapiens
MTIVPNTQEAEAGGSPEPRSSKVAMNVPVHSSLGSR

SEQ ID NO: 957419 - protein, 69 aa, Homo sapiens
VTSTVKCKQPGSPSHSQGLAMRDCAIRPRYYAFPTVSAICRSGDSLVAYTTRTLNYKDSTGWMSGQTPS

SEQ ID NO: 957420 - protein, 33 aa, Homo sapiens
MCTEYGGNYGGPYTSILNHLNAQLQYYSMAHHN

SEQ ID NO: 957421 - protein, 73 aa, Homo sapiens
QKGSERACSTSNTSSENGSTGTVAGASERQEAQQHQHCHGILKALMQAHMDILFSLWLGEQVEGSGGREAVAR

SEQ ID NO: 957422 - protein, 58 aa, Homo sapiens
VVWLSAAHSASFVGHVAFVLFSTHSLLHPAPPHSVPQAASSVCPKPSVLRGSLHSLQG

SEQ ID NO: 957423 - protein, 59 aa, Homo sapiens
RWALHDARSGAMFMDICSNRLASTSTFVGHPSCFKYRAISVSQPHTKPRNQNYPKSHAC

SEQ ID NO: 957424 - protein, 68 aa, Homo sapiens
LHGIICSNSRFKHVGSRMQASKQTARHWVHHSKQASKQAFKSNKSPSASTASSVQPTHHTAPIVGTQH

SEQ ID NO: 957425 - protein, 52 aa, Homo sapiens
  misc_feature (46)..(46): Xaa can be any naturally occurring amino acid
  misc_feature (48)..(48): Xaa can be any naturally occurring amino acid
MDPMLSQDVSYTSIDGFMTYESDLLHRPCDITNGVVFPDTAKNLEXMXALAG

SEQ ID NO: 957426 - protein, 30 aa, Homo sapiens
MMNINSILQNNCSSLQFLTSCLNSSSVCYV

SEQ ID NO: 957427 - protein, 89 aa, Homo sapiens
DAGTRFAAPPYLDYAGYHQYIEEMLPPESPALYGLHPNAEIEFLTVTSNTLFRTLLEMQPRNALSGDELGQSTEEKVEGLSFLFFFIEV

SEQ ID NO: 957428 - protein, 101 aa, Homo sapiens
EFDGFSVRETSIRPILTKKKKKGPREKPAVSKLKDQKKDSQQNKNFWIILACPGKIAMKRDRLFPLPREHGSYPDGEQRSVHQPQPEKQSSNLSIPVGFGG

SEQ ID NO: 957429 - protein, 57 aa, Homo sapiens
MPQKGSGSKFPGDGKDTRARALQVEGPHNLGNLAGSLFLQPLPNIVPSRGLHSSFIF

SEQ ID NO: 957430 - protein, 35 aa, Homo sapiens
KVGQGYKRRLSEQDFWKLTTGASWDNWLVAAKQFI

SEQ ID NO: 957431 - protein, 100 aa, Homo sapiens
  misc_feature (88)..(88): Xaa can be any naturally occurring amino acid
MGHSDQDLLRPQWVPPGPELGGARAGPGLALESLTDWQPDRGWAWSGSQGGFLGEAVAPGALEGEANHTGCGACGQGTSQDQGLEAAXGVCLLGYLLGWP

SEQ ID NO: 957432 - protein, 32 aa, Homo sapiens
GLPVSGIYVLNIFVATGFHGLHVIMAQLSSTG

SEQ ID NO: 957433 - protein, 114 aa, Homo sapiens
ACCRSIWDPPVLFPSINKNNKNMCRGSSQTTFFLYSHTTTTIINTEHICDQKCGGFSPLHQAVDTSSVFSNSGWGLSLQDCLHTPGHQLHVWGPGSHDPLSSCWCSHDPLFGFG

SEQ ID NO: 957434 - protein, 82 aa, Homo sapiens
MKVACFDLSKYLDMGVIHPLNKSTVGGRRFATLVITGNNQPIVSQQGTTQLSVENNKTSITSDIGMQLTDPRTQHIFIQHST

SEQ ID NO: 957435 - protein, 83 aa, Homo sapiens
MRRQLVWCLYLVLIRSSELSFVYPGSTGRSLHADSQGSHLSLSDSRKQGCTPVDWKDGDSVMVLPTIPDEEAKKGLGRKEFSP

SEQ ID NO: 957436 - protein, 142 aa, Homo sapiens
MMTEEDVKLLSISGNRLPLEVEQGSTEKSKLAADEDDDDDDEEDDDEDDDDDDFDDEEAADPAPVKKSIRDTPAILCTKVKSDWTRLKTIINTKIKKDHESFKKQEKTPKTATGPSSVEAHYSHNASKYRNKVVLFPKWKAQ

SEQ ID NO: 957437 - protein, 36 aa, Homo sapiens
HFSITLKSKLSSQYHLNQARCKDSHLYPSVLRGKDP

SEQ ID NO: 957438 - protein, 73 aa, Homo sapiens
  misc_feature (2)..(2): Xaa can be any naturally occurring amino acid
RXSRYGGRDGESKEDKARQDITTNTYTSQELKSALAKCKEGAEMESTKEDKARQAEVKRLFRPIEELKKDFDQ

SEQ ID NO: 957439 - protein, 74 aa, Homo sapiens
LLLRSLYRSPSLTVSFFRFPGASLTRLFLLLFFLLLIIFIIIIFILFVVVVLLVLIILYFIFILSPVLGFPPGT

SEQ ID NO: 957440 - protein, 40 aa, Homo sapiens
GECSIFTNDKTVPVLLLHRMLSVERQINEMAPAQPGPQEV

SEQ ID NO: 957441 - protein, 51 aa, Homo sapiens
MKAVILERLLQTVELEGTVRTHSDAVRRQVPDKIRQVIDGVAAALGAQAEL

SEQ ID NO: 957442 - protein, 40 aa, Homo sapiens
SDVHVPHVYDWREVEILMFLSAIVMMKNRRSMFLMTCGTW

SEQ ID NO: 957443 - protein, 38 aa, Homo sapiens
ERRDRKYRRAKDRKYRRAKDRKYPAFVPLFVLHRVVAL

SEQ ID NO: 957444 - protein, 57 aa, Homo sapiens
APISGSTSVPILAKGNHTLITSQKWTTIETRNIREAIEHFGIKIYQFPDCDSDGTKM

SEQ ID NO: 957445 - protein, 41 aa, Homo sapiens
RFFFSFLIIKIIIIIIFIIILFIIIASSSQQQFTFFWALLP

SEQ ID NO: 957446 - protein, 42 aa, Homo sapiens
IPHFHHVLTHDEAERDVSRVALSGKLQSIEPLGHLSQEIPGT

SEQ ID NO: 957447 - protein, 74 aa, Homo sapiens
DGYLSGVYERYRTYYPYPADDKGAVDKTSMTRNMSWSDEAAGEQYAPISICPQLVVPPSSYLVTFLLIALYLFP

SEQ ID NO: 957448 - protein, 35 aa, Homo sapiens
ICVHLNSVIVYTSLTAVLITNKRSMYRNPADWTKT

SEQ ID NO: 957449 - protein, 47 aa, Homo sapiens
ARFSFVHFLVHFGHVAAHSVIQGSSSKPMWAVAHQYPFPSSPAGSKQ

SEQ ID NO: 957450 - protein, 66 aa, Homo sapiens
IDYNKQHLPSTDRRKTAHGILFNAAAYALVVAVILIRTALKLHRRIHSHRSPTGFLLITILPSKLK

SEQ ID NO: 957451 - protein, 50 aa, Homo sapiens
GAAIQLYITGLSLTLNHAIPLTWPSFTQTAIHALACRLQITSYTMLLAGV

SEQ ID NO: 957452 - protein, 115 aa, Homo sapiens
QAIDREYFLVILTLLAGLCCHSQTGRPELTYLQQQYLCQVAEATWEQEAIPDSAARELNPSVAVQFTFLQLIPNPVQHVVTKQSILLLLCSNLSGWASRNRQSYTGSPLTIMGVL

SEQ ID NO: 957453 - protein, 55 aa, Homo sapiens
SAAKYVNTPETPVYKKSHVLYGLDPGPGPTWSKKSQAVIVEGYTDVMAVHLSGID

SEQ ID NO: 957454 - protein, 34 aa, Homo sapiens
SRYRVAMNTMKLYLDYRIYGYRYDQPIAMIKSNK

SEQ ID NO: 957455 - protein, 41 aa, Homo sapiens
  misc_feature (1)..(1): Xaa can be any naturally occurring amino acid
XPAIHALASFNTNSYTMHGRRLTLTAYNHALAVVEHKQLYP

SEQ ID NO: 957456 - protein, 99 aa, Homo sapiens
EVKWHAPRLLSLPVCYPNCNKAPTQREKAQTEPTPAPAWPRSFDSYSNPTSEISMPGSLNRPTNNMQYANAAREIYRREMLASTHARHKAPWYNVTMWR

SEQ ID NO: 957457 - protein, 111 aa, Homo sapiens
MRIPCTGRSLSTNRLKPCTGRRLPLTSLYPCISPALYTNSYPPALGRRYPQGALTMHWLSVYSYPQWPTAIGDPFIQITINQSESDLSVIYTITQFLEIRNCCSCLHYNLT

SEQ ID NO: 957458 - protein, 69 aa, Homo sapiens
HAHLSSILGLIYPSVLTSQTLAITCYSHCTGIPFLDRLILDIICWFPIMFHEDFALTCSMHMSMVFVVT

SEQ ID NO: 957459 - protein, 50 aa, Homo sapiens
PHTPTYYQPSSSNAPEDPPVTIILIIAHGLTLLITILPSKLKLRFDLVRV

SEQ ID NO: 957460 - protein, 102 aa, Homo sapiens
MGLVRSCDYPKTLFFLNGISLYLAQARVQWRDLGSLQPPSPRFKRFSCLSLPSSWDYRHAPSCLANFVFLVETGFLHVGQAGLELPTSGDPPVLASHRAYLT

SEQ ID NO: 957461 - protein, 36 aa, Homo sapiens
MTEVASGKLRKGLGAFERSILTQIDHILMRQREITS

SEQ ID NO: 957462 - protein, 52 aa, Homo sapiens
MPASSTHCPETHAQSDGPRSTRTPGRLGPLSMGPRCQTICPGPHALGTDSTW

SEQ ID NO: 957463 - protein, 45 aa, Homo sapiens
TYTATSPISLQVSLCITKYFLITMAWVWTEKVTLDDGWMWPGCGL

SEQ ID NO: 957464 - protein, 51 aa, Homo sapiens
VLKRTVTGLKQCSSTYCMQKACEELNNAMAATFWHLILDHEECDEMIINWT

SEQ ID NO: 957465 - protein, 71 aa, Homo sapiens
MASSKRKKVEIYDVLMSTHMHTLRLIGFLGHMVCESLSGLRIQESLKKENSLGQWLTPVIPALWEAKAGGS

SEQ ID NO: 957466 - protein, 33 aa, Homo sapiens
KSSELYDYIYAGGGDLISTLYAAHATVKVQSRD

SEQ ID NO: 957467 - protein, 34 aa, Homo sapiens
MLGKQVSSRACRRQQEVCSEDMRVTTGRGTRGGM

SEQ ID NO: 957468 - protein, 51 aa, Homo sapiens
TLEDPPILKTDTLEFILEDKGNLWDSQYFIYSTNMNLKLSPLKAPYYEVDI

SEQ ID NO: 957469 - protein, 143 aa, Homo sapiens
TFGKCQVRMIARTVDSQFKFAGKGRKRRGQAHRLRRADWSSSRIGGRTSAPALSYKVPYCGGSIARQSQLAGYLARRRGAYRLVHGGDALDLLVPVVLKPGAFVAHGGGSIQAVDPRALGVQLLFVGQFGFQAGNFTGESRAI

SEQ ID NO: 957470 - protein, 66 aa, Homo sapiens
MQVIAWFQACTLPGAYCLHSVSNEGTSSISTAWLFSDFIAMKEYIIQVKQRTQHGYILQAVRFFNL

SEQ ID NO: 957471 - protein, 68 aa, Homo sapiens
QPQALGRLFLDQQVAAGAGYHGRDSHVGAKPLCTSHETSSQNSRTGMAQALCKLPRTPAPARKFHASS

SEQ ID NO: 957472 - protein, 35 aa, Homo sapiens
GVWICRENVEGEGLANRHHTRGIKRPLDGDELLPN

SEQ ID NO: 957473 - protein, 35 aa, Homo sapiens
DNTIGIAHYRPELLGSSYPPTSASRAVPIRRQGHR

SEQ ID NO: 957474 - protein, 108 aa, Homo sapiens
WTVTRQVGVVLPTCGTRIGSHALKRGSHAVISASCVRVYLRHHGTVDRIMNELNGRALDAVAGSNQERPAKTDPAAEGQVKQAPEPHKDLLAGEEGAAPVLPGLHSQF

SEQ ID NO: 957475 - protein, 37 aa, Homo sapiens
LAARSARIRRLRAVPSDSRLMRRIIVYSVPMSLWFVE

SEQ ID NO: 957476 - protein, 63 aa, Homo sapiens
DCLVHEEKHQPLHTWNKPTLPDQAEKAFCHGNLARVTLLLSNGSQEHEMVHYDYLSMCQVWRS

SEQ ID NO: 957477 - protein, 45 aa, Homo sapiens
SADLGLAQLILAPTQRSRGQGVVESAGKEDPVELDSSPKSAKKRR

SEQ ID NO: 957478 - protein, 72 aa, Homo sapiens
DEYRGAEYVQTWNIADGIDLSMIVFKRFKRRADSSDHGSTLMESSSDSRPCGGKGAVFFFIRQKWTFPKRCT

SEQ ID NO: 957479 - protein, 38 aa, Homo sapiens
IYIQVAVLDVKWTECWYFVVHARNKPVGLSLVWFKTRS

SEQ ID NO: 957480 - protein, 53 aa, Homo sapiens
SSVISSCHIVNRRDLAIFAASGRRPRELSRSFHDIGKKVRPGGIRIKPQIGHA

SEQ ID NO: 957481 - protein, 30 aa, Homo sapiens
MKSRVCRRNWRIDFLLSLFPFLLFLLTLLA

SEQ ID NO: 957482 - protein, 94 aa, Homo sapiens
MLPAGAVVDDAGVNATSVHKPVTECDFFVKIVNGLEKPHKHGLFTPFGLALWHLPHAPAVVHKTCTRTKRYRFTPFCEESVDPFEAQMGHFGAG

SEQ ID NO: 957483 - protein, 56 aa, Homo sapiens
VTPSQCANEGCGRDDTVRGVPRCFYPNTIDVPPEEECEFKTLLQGSASILTRCSPR

SEQ ID NO: 957484 - protein, 58 aa, Homo sapiens
LFATGTVLGGGVEGADQVPSPELSLPGSEGNGLCLVGGGGAGLCGTARERAHLSHFIG

SEQ ID NO: 957485 - protein, 93 aa, Homo sapiens
VSRLGTVRYRATSITQHEGVGGSVENDSTEHEKDYSPKGDQQQVLKEEVVSCGWGKTRPVSYIGLCLVIQGQSDLFSACRPSPKSEKTVPSGE

SEQ ID NO: 957486 - protein, 75 aa, Homo sapiens
MTSRQPIEKRSIDTKSAGHSPVWGFFAEQAGGNDLLETGIMVIDLVVPFAKGGESRAVRVVPGVGEIVNMMDLIR

SEQ ID NO: 957487 - protein, 105 aa, Homo sapiens
VTYERCQCPCLERIFKSGCVFACAPTTSIGCTKSFHARYCSILVRRRVRAAGIIKWASLGLQPKLIAVLKIRIDVLFVLQFSLRVHRKAVLSYSQINGHIDVLVA

SEQ ID NO: 957488 - protein, 38 aa, Homo sapiens
MTLYVRNDTLRTVIVSASAWIRHLSSVPQRGLAISVNE

SEQ ID NO: 957489 - protein, 39 aa, Homo sapiens
QVCGNSICLALNLLDYNGRSSFMAVSDRRRRDAYVQPSR

SEQ ID NO: 957490 - protein, 196 aa, Homo sapiens
MPNGRLPESFRPHDTFRLRLPRVRCDLLKPCRCFCEVLVAFVVHEPRRTLAGLILHVDVQHVGAAGVSDEPARTTRIQFADELATLCLAHTLHRDIRRCAIGMLTRAAWLRSLYAMRRGAIARIDCEIATHRLRRLGKDRGELRIDLILTGMHEVQLAAGADWRVFRLADEAGQPLTVRVRDLCTLPFIALEKIEV

SEQ ID NO: 957491 - protein, 100 aa, Homo sapiens
AGRQVCAQLFLRQTIRAPSQAALDITWIDDNRARDIKRCRFVHPAKDIARFQANSFQLMTAARQGKRPCTREVAAKRPSNRNHLSSVLPPFLSNSKRRQR

SEQ ID NO: 957492 - protein, 83 aa, Homo sapiens
MDAETKKRSVELTVGGKLRSFDIDDPVLPDWVEENKLSAGDFPYDKKMKRGEYDAALEALQVELVKVQFWLQATGKRVMAVFE

SEQ ID NO: 957493 - protein, 43 aa, Homo sapiens
MHDPIVQALGPDKLVLGYCRYFPNESQWVLVFAFGVSRSVRCH

SEQ ID NO: 957494 - protein, 70 aa, Homo sapiens
RILMSEDTLQLGTPCALGTTRRTPALAKTILAEKKKEGAAKVTDAQAPKKNTRTLIGLLVSDKRAKTVTV

SEQ ID NO: 957495 - protein, 37 aa, Homo sapiens
IAICQRQTGEYRVGTYLLVRNNTGKPVLIPDKPLRGK

SEQ ID NO: 957496 - protein, 120 aa, Homo sapiens
IRLAKCRSAKTTCIYYHTDDQDFSYYLNGSLANEALEPSDAVLSPNATRQCVDIYGGPFVENNPELLISVPDRKITSTKSGQHRALRDNPSLPERHRKDGAQEMLVHAITPPNEDNYGEG

SEQ ID NO: 957497 - protein, 48 aa, Homo sapiens
PKPDLPCNDLACRLQTSNGALSMLIHKLADKINHFSAKFDSAPSVRAT

SEQ ID NO: 957498 - protein, 114 aa, Homo sapiens
VRTGIPILFPLRIYASQTCGSNAIAFFHVSFAYTSNNEPTSRKKPESIKSCANNWSLTTTKSGISFPEDKASRKFRFKSTIYIRNVPNCLNLNSQLFISPSSSDIICNRFPVLK

SEQ ID NO: 957499 - protein, 37 aa, Homo sapiens
MCMCSVCMCVSVYVCVSVYVCVCIVCMCVGSVCNIFA

SEQ ID NO: 957500 - protein, 36 aa, Homo sapiens
GVDVGVAGVLYGKYWALFQRFLGELILVTMGTKPWF

SEQ ID NO: 957501 - protein, 57 aa, Homo sapiens
LGNRDYSLHNHKDIGSPYLIILRLRLSVLGTASCLLIRADLGQPGDLLGNDHIYNVI

SEQ ID NO: 957502 - protein, 31 aa, Homo sapiens
MSLGTALCFLIRADLGQPGNLLGNDHIYNVI

SEQ ID NO: 957503 - protein, 51 aa, Homo sapiens
DYLYKPQRHWITIPIILRMSCVLGTALCLLIRPDLGQPGDLLGNDHIYNVI

SEQ ID NO: 957504 - protein, 39 aa, Homo sapiens
MTYYSALELEVLGTALYLLIRADLGQPGDLLGNDHIYNV

SEQ ID NO: 957505 - protein, 56 aa, Homo sapiens
GNQEYSLVTTTTLRSPYLIILALETVMSYGTALSLLIRADLGQPGDLLGNDHIYNV

SEQ ID NO: 957506 - protein, 119 aa, Homo sapiens
MDGRRQRIRFEQSYPPISGELSSHPVASVHLTIFSLSPERVSSSILVGIDFITTIINYKTPLPYTQYQTPHLSSDPFLITAAYFSLSLPVLAVCFVIVLTDRNLNTTFFDPAGGGDPIL

SEQ ID NO: 957507 - protein, 55 aa, Homo sapiens
QLVDILYKPQRHWIAIPIILALELWVLGTALSLLIRADLGQPGDLLGNDHIYNVI

SEQ ID NO: 957508 - protein, 51 aa, Homo sapiens
DVLYKPQRHCITIPIILRLAVFLGTALYFLIRADLGQPGNLLGNDHIYNVI

SEQ ID NO: 957509 - protein, 135 aa, Homo sapiens
EWSGSGMECNRKKWNRTECSGVERIAKEWEGMELNGLGWNGVKWNAMEWSGVQWNAMEWNGMDSNGMDSEGMDWNGMDSNGIYYNGRIRMEWNGMDWNGIDSNGMDQNGMDSERNELEWNGLQWNGIEWNGLARN

SEQ ID NO: 957510 - protein, 159 aa, Homo sapiens
MNGIGGIELNGVEWSEWNGMVIGRMELNGVSERRIEGSGRSAMRIGWTAVQWSEVQCNAMQWRAVECNGMECNGFEWNGFETNGLQWNGLKWNLLERNEFCMEWNGMDWNGIDSNGMDQNGMDKKRTNSNGTDSNGMELNGMDLQGMDSKGIDSNGMKS

SEQ ID NO: 957511 - protein, 65 aa, Homo sapiens
GRSAAACRRLTLRGIPQVDSFSDSELDEYKERDTKVFLLTSNPVSSQKQPAFKATSGKGKPAKIV

SEQ ID NO: 957512 - protein, 88 aa, Homo sapiens
HLTGLKCSAMQYGGIQLNGSAVQCNEMQCNSEQMEFNGSAVQCNGLPRNGKELAIEWHCGGNAVKWNAMQLRCVQCNAMPWNGMDSNG

SEQ ID NO: 957513 - protein, 64 aa, Homo sapiens
MPGSDHEAPVLGGDYGLGRNIAGIFVIAHCLSRDFSRMRRAAACLTRAATGFNVWKYTSCPTHK

SEQ ID NO: 957514 - protein, 138 aa, Homo sapiens
DLGPHLINNMICTSFWFKTFPPYVAFCTNNKCRKNHVDVMNRTTNKTEKPTNNSGTDLIKVGITRKRLSITLKTEDESETIKMPIGDNAIKLSNNTMREAKTNHDTLVREDTLFRFIRTNDGKNVFFKTLRNFNTLIN

SEQ ID NO: 957515 - protein, 50 aa, Homo sapiens
MTALATISLEFRHSSFPFSYFSRMRRAAACLTRAATGFNVWKYTSCPTHK

SEQ ID NO: 957516 - protein, 94 aa, Homo sapiens
CCVPGELRASTGTSRIHVHHDASSDPNRDSDAGYRYQIAPVPRWRLRPWRNIAGISSQLIACLCFSRMRRAAACLTRAATGFNVRKYTSCPTHK

SEQ ID NO: 957517 - protein, 54 aa, Homo sapiens
MVLRTVIGGVVNLLICVLEGLRRIGKKPMNYSMISTITQGKEENPSAFLRAATR

SEQ ID NO: 957518 - protein, 54 aa, Homo sapiens
MIDGTDFQLSGIQEVYVSLLMDSREVREDLRLPEGDLDMEIEQTYDCGDEILIT

SEQ ID NO: 957519 - protein, 39 aa, Homo sapiens
EHHQYTEHHQYRERHQYTERHQYNEHHQYREHHQCTVHD

SEQ ID NO: 957520 - protein, 38 aa, Homo sapiens
SGVGARVTVPRDPSPKHASTFSQGKALEQVPKEPLLIL

SEQ ID NO: 957521 - protein, 33 aa, Homo sapiens
MTSFGHTIFSTQLNKSRGALLAWDDIAIIQKQV

SEQ ID NO: 957522 - protein, 98 aa, Homo sapiens
MVALSLHCSRHGCRRFFVAYRGCDSAQATCSGKFNNLVRFRGFPYVPDSRDRDLTTPRFNPQTRQTRVFLFEDEHDDTTADVSNLLVQVASSNSNKQL

SEQ ID NO: 957523 - protein, 53 aa, Homo sapiens
EDFRLVQAYWMVASSMWRARIASGRFNTQVVTADKRYFIGLAVRLLTGVVAGI

SEQ ID NO: 957524 - protein, 140 aa, Homo sapiens
RWLLHLCGGRGLRLARFNTQVGTADKHYFIGLASPAAAGVVAGIVWAFSDYGIQGSKMSFLVALMVAAAGMLMVSNIKYNSFKELDLKGRVPFVAILAVVLVFAVVFSDPPRILLLAFLVYAASGPVQYLLHLRQRKTLP

SEQ ID NO: 957525 - protein, 103 aa, Homo sapiens
TILRIMATLWAAPVHNGLLLSFSMLLKKCRVLSHGEDGRMIAGQVSDINLAAAPKVNRGKAGVNRSAAEMYGSSFDLGTMTFNGDYYDRDVQLPRHVYLLSPP

SEQ ID NO: 957526 - protein, 53 aa, Homo sapiens
SVYWEMVIFTCKICWNPLLVSFSEYQLTHMTCEALSNLEMAETMKCCIFLCTV

SEQ ID NO: 957527 - protein, 118 aa, Homo sapiens
MSQVKYNRARSKSEVGDIGTNPDPQSEEQKQRREDQGSECIGHHGGGPLLRLAEQVLNFLFWSETVLGQDSRGSFLLRELDDHISHIPEDRVLPSGISNDEVESVGAEAESIQSYFRG

SEQ ID NO: 957528 - protein, 156 aa, Homo sapiens
VTKAVWWTWPKCQMTADVYFLRTSEATEIYMSPEVILCRGHSTKADIYSLGATRHPPCMTGNPTLGLKRYHSLISIPPYLYINPQCKHLPLEGHCSMTAVHVDETSLIEASLERNPNQRPRAADLQKHEALNPPREAQTTADTESGLCPLGAQEDC

SEQ ID NO: 957529 - protein, 65 aa, Homo sapiens
MLLFLQQTLLKKKMKLFPSMEIISEVASHLGTQNSVISNCGTTSGNLWMMGPVGFMEYTVFTAIT

SEQ ID NO: 957530 - protein, 56 aa, Homo sapiens
RGAGVGLPVQCVGLPVQVWAYPVQVWNYPVQVWDLPVPVGELPVQVWAYPVAGVEP

SEQ ID NO: 957531 - protein, 79 aa, Homo sapiens
MHGRAGIDIRAITWRVKGGPGVVSPSSAADCFPGAGSHTCTGTETGWAGRWRHSPPRLSGPDSLPRSRSAGAGPNTDRT

SEQ ID NO: 957532 - protein, 37 aa, Homo sapiens
VHTCTGSPHLHGSTTPAPESHTVHLVLHLDLPSKWIL

SEQ ID NO: 957533 - protein, 52 aa, Homo sapiens
LEDPSHTVTDTGFHKVDGLHEAWWAASTLAESQRVLWEYLAPSAVYGVGCRV

SEQ ID NO: 957534 - protein, 47 aa, Homo sapiens
TPPVCSPHTVRPSLVAQLKGGPPHLSFDLVEGTAHPLEIAGRWCETT

SEQ ID NO: 957535 - protein, 64 aa, Homo sapiens
VEVEHRELQVSGGGAQDYRSMEVEHRDYTSVEVESQGLQVNGGGAQGLQVNGDGAQELQAGAGV

SEQ ID NO: 957536 - protein, 39 aa, Homo sapiens
VVPHLHLVVPHLHLGVPHLVPHLHLAQPLEPILIPEVTD

SEQ ID NO: 957537 - protein, 69 aa, Homo sapiens
RLTGAVHPSLGNWWSLRSRGEQLMPNLVRTPDRRSALQPRTPGLKRSSHLSLPSSWDYRLPKEREKLGV

SEQ ID NO: 957538 - protein, 34 aa, Homo sapiens
QSRYLGPDGTGPNILTDITNGLQIPQARINGQLC

SEQ ID NO: 957539 - protein, 93 aa, Homo sapiens
CPSGKLWRDGRGTRPEHHPVPLLALPWTVGRVISEAERGSSLGMAIRVSPLANVVQLVHLIWPSSENLRIYDDIKKVVKQASEGPHKGILGYT

SEQ ID NO: 957540 - protein, 53 aa, Homo sapiens
LWFLKPLAEERDALNLKFGKNPPKKAASELAAFFVPPESERPIGMDPVGGQPR

SEQ ID NO: 957541 - protein, 39 aa, Homo sapiens
MFENRLIIVSAPRTSNHSLSGGIKLLGGGASSSDDSTSL

SEQ ID NO: 957542 - protein, 35 aa, Homo sapiens
PCQPYLDAPEIRNDYYLNLVDWSSGNVLALWYWTT

SEQ ID NO: 957543 - protein, 84 aa, Homo sapiens
CDTEHGYGIIVYHDCNSRQSSCGEIELVVVLDSMIKGVHISHTNPLSVARLRKPAYNPQRPRDVLWSQLVTHSRPWPFPEHAAR

SEQ ID NO: 957544 - protein, 54 aa, Homo sapiens
TSSQGLPAAPHPAAGTPSSQPTIPIVGLVAGLAVLAVLAVLGAMVAVGVTAARH

SEQ ID NO: 957545 - protein, 39 aa, Homo sapiens
CDKYDFRKQHTFILLLVILLQQYSLRENEDITTYYEGAC

SEQ ID NO: 957546 - protein, 83 aa, Homo sapiens
TYYLRTTTTVRRFFRDYVVHWTNVAVGLPLTGDGVTDVTVRYVLTDGGVRYAGLGRTTRLGDNVYTLRLDCMTYELHTHTTYD

SEQ ID NO: 957547 - protein, 49 aa, Homo sapiens
MARPQFISPFYWTRVDGQSFPLVGVILYLAATDHSCAMSLGKHLSAGEN

SEQ ID NO: 957548 - protein, 43 aa, Homo sapiens
RHSILLQAGIGSARHSWHASCFALQSITLLGLGVPQLAIRQSM

SEQ ID NO: 957549 - protein, 41 aa, Homo sapiens
DVYNKGYGFGMVKIDLNTKSLVEWNFLLLVMLYTDTGKAVR

SEQ ID NO: 957550 - protein, 38 aa, Homo sapiens
EGGEMDSEKQCGLALVSFIDPVLEHSSCNTTSSYRVET

SEQ ID NO: 957551 - protein, 94 aa, Homo sapiens
  misc_feature (72)..(72): Xaa can be any naturally occurring amino acid
RIPEGAEQKEATVGNEIRGLGKRCKRREDLEIRFILIQNRAGKTRLDQSGTCMFDDDEQTDSWIEESAMPVXSPSDDANTHHTLCEFRILYDSF

SEQ ID NO: 957552 - protein, 93 aa, Homo sapiens
VLCRLAHLYRSWYEVHTSALPLGREKGGKLTPEEEEISTSTHMTSKIIHKKYDHRKHIARFSSLLKQQFHQGRAPCVHRLQGRDSVAEHIGIC

SEQ ID NO: 957553 - protein, 82 aa, Homo sapiens
RPHTGPELYPVQALLTSAPFEQDVNTLTRFVTGRRAREGPRHGRVDPSAQLALHSMSKPSLLAVRKVGIAPLYCIAGSTSVT

SEQ ID NO: 957554 - protein, 78 aa, Homo sapiens
FCILHWDCHLAAVRLARRPGRVGECRPVQLPSTKLQRAPSGLGTSCSLNQLLATCVARHNTYLQECTGQREPIVSRSI

SEQ ID NO: 957555 - protein, 59 aa, Homo sapiens
MRICLDYEKSYRIKDGVFLYFEDAAGVIREQLKAIMKGSAITGPVAKDCADFWPRIASN

SEQ ID NO: 957556 - protein, 81 aa, Homo sapiens
TILTRGAVSCSQPNMTIKKDIEKDSPKCEREDMVHPYSHLPSGLGSFNWLGPDTRFDHIAMVENEGLEAQKLLPYPPTYPR

SEQ ID NO: 957557 - protein, 43 aa, Homo sapiens
AGQLISLGRTGLLAKSVLLKYHTMLPHSLTYLVIPVSRTFILS

SEQ ID NO: 957558 - protein, 46 aa, Homo sapiens
YTSRGKNVKKKALTDFKKLRAYFVEEDGAFPAGKLTRRRSSSEVLA

SEQ ID NO: 957559 - protein, 72 aa, Homo sapiens
SVYLSLLSVWWGVELIHSTDLFRALQDPHPSLAVELVYPGAPFISRKSPPRSLPPPAVLSPYPTIEPPYRSA

SEQ ID NO: 957560 - protein, 53 aa, Homo sapiens
MRIFLYPQLPSSRLILSGAKSPVSGTVFPIPLPAIRPLVHRPPCPCARGDPAT

SEQ ID NO: 957561 - protein, 59 aa, Homo sapiens
CVVAGRFLFTFTCFWLRRLALARAEPATSYVRTTIHMIARATLSSLRHIIRSTKYRTDL

SEQ ID NO: 957562 - protein, 48 aa, Homo sapiens
MVCKHLCYQHGHNAVRSGECDEAVACQTARQPGSSPAAIRRAVIHAYM

SEQ ID NO: 957563 - protein, 82 aa, Homo sapiens
SRTFSSIYTPTSLLPPGSAVQAALLMWAHVRERAGPAAAGRGSPFRWGLATAGWRDDCPDQCATPPSPPSSTHILGYPNASK

SEQ ID NO: 957564 - protein, 141 aa, Homo sapiens
MRSSSPDERLLPRQRAALLLRVEYADLTLQLGDDGACARAVPQHEIRQITIEVVPEVEHAGATPFLKRKKSNRFPCREILPFSKRVIRSHCSEPFSSSFLKGLRRSVKKLGLSAWTMTTSKSCANRDHHVPIPCYEAKDVV

SEQ ID NO: 957565 - protein, 57 aa, Homo sapiens
NPGTSFISNSFMGAFRQSFTSVCNVDLEQSVTTQYSGLNEHQSPIVPIYVNLCTTLT

SEQ ID NO: 957566 - protein, 59 aa, Homo sapiens
MLLCAAAAGTLPCSLHTYYYRAHDHSRTLKTLQLTSDLVYGASPPARPTHATPEKTSFN

SEQ ID NO: 957567 - protein, 37 aa, Homo sapiens
VYSASVTSDNLSRHDMRAPGSMRSLQLNLTKIEQLCS

SEQ ID NO: 957568 - protein, 32 aa, Homo sapiens
DCMASLDIESSEAVFASAFSIVFPEWSSSTSL

SEQ ID NO: 957569 - protein, 46 aa, Homo sapiens
RYVAMTQCGSLGPPLFKGSTLQLCGGEIPCGGGLSVAGTPQTVQGL

SEQ ID NO: 957570 - protein, 51 aa, Homo sapiens
TDLRHTGKKSQGSAEQDVDIEKIKPSWGLENQSGSHARVSHVVCFIGPSGT

SEQ ID NO: 957571 - protein, 75 aa, Homo sapiens
MAMEYYTLSKFLELITAQFCPTPTSSGWNYVKGELPTLNREQPDQLTQPQISWKEETSVAGKGIVSYYLAIHSTI

SEQ ID NO: 957572 - protein, 36 aa, Homo sapiens
LPCPSAGPCHPQHSSDSSFFASTYLLLELAQQAREG

SEQ ID NO: 957573 - protein, 70 aa, Homo sapiens
ELSGRSHECDFVSFPPAAICLGSISAVFSSGAPLDQQCEVLGAAEDRDCGQGGLTSVGAIGIEGDRTERQ

SEQ ID NO: 957574 - protein, 57 aa, Homo sapiens
MAHGQEPTRRAFPPPEACTRGADTKGISIEGNIAVGQSTYVKLLRKINPDWHVATEP

SEQ ID NO: 957575 - protein, 41 aa, Homo sapiens
VGVCFCLSAVQVWALYQLFTGLLKGQWCPRMLGFHLMVDNL

SEQ ID NO: 957576 - protein, 73 aa, Homo sapiens
RFVCLQPGVGQGRGPATQVGQRDAWAGRWVMADHFFPFLSARIGHSRSSESVPKVYLRAERERPCRYPKGTEL

SEQ ID NO: 957577 - protein, 59 aa, Homo sapiens
MPSDAMERWLHLSKISLSQRISCTVFNQYPGEKLLLLQSFDKLTYICPNQVSLAKRVPS

SEQ ID NO: 957578 - protein, 38 aa, Homo sapiens
MHLQMAHETVVCSTDLQSIDRSIPPDRVDGESGLGLRR

SEQ ID NO: 957579 - protein, 42 aa, Homo sapiens
MYRALYAGAGTDAMSSRISTSMMYNQSVSLDDRPSRPSSATW

SEQ ID NO: 957580 - protein, 44 aa, Homo sapiens
YSLYYTYNLSKRTNLYALGSYATNYRFIDGVKSTVGMVGVRHRF

SEQ ID NO: 957581 - protein, 82 aa, Homo sapiens
VLGVEGQALLLGVVAERLRTLEAGDGLGLAQQQLLDLMVSRSTAMISARRTSRFWVMPFLVLERSAKAHPGPPVGNDVGIAQ

SEQ ID NO: 957582 - protein, 47 aa, Homo sapiens
VVVCELSLIQIPVIYLESVHTKLHHREGMRMSWQDEFRQWFPITRDK

SEQ ID NO: 957583 - protein, 66 aa, Homo sapiens
TRITLLMTSTDGRKNRFPAQFPGNAEQIPPPPDSTVPPTSGKLTRSLPRGALCVSLISRSAAANSP

SEQ ID NO: 957584 - protein, 54 aa, Homo sapiens
AIFDFLDYIVNEPPPKLPNGVFTTDFQEFVNNMPHQCTHADASDLEDAHKTTLF

SEQ ID NO: 957585 - protein, 37 aa, Homo sapiens
HVMMLLSVARRILVDGWSAHMAVAGFLLDGISCLMTQ

SEQ ID NO: 957586 - protein, 74 aa, Homo sapiens
MDNRRCSTRYPVAYRNFMNRCSGLKLAFPNPMTSIPQPRKSPRQQGSKQTVDTILQATDRVRAEHGYRGNKHQP

SEQ ID NO: 957587 - protein, 76 aa, Homo sapiens
KGVTGVEKGIANTVNINVGFLCLLLLVRVFVPGRLLNLLNGMLQNLGDYLTSLVSRSFDMYLYGKARQWQGAWTLF

SEQ ID NO: 957588 - protein, 51 aa, Homo sapiens
MRQIGESRSTPEGQDCGGQMEDVVLNAHVRIQLSKTDKTLVGSFEVSDGIG

SEQ ID NO: 957589 - protein, 34 aa, Homo sapiens
MTSTLTVVKNRFPAQFPCNAEQIPATTGFNRPAH

SEQ ID NO: 957590 - protein, 64 aa, Homo sapiens
WTYHTQTFALTLLRRGDQDVGTNWTIGYDPGQNPPYGEALKAAYKFINVGNYQLNVSCGALTQE

SEQ ID NO: 957591 - protein, 30 aa, Homo sapiens
MQSHNSFRGGESSSSSGLGSILTIPITTQH

SEQ ID NO: 957592 - protein, 38 aa, Homo sapiens
HRSYGSAYRIAYGFRYVPDDGVLDQPILFARAARNVVQ

SEQ ID NO: 957593 - protein, 98 aa, Homo sapiens
GASKSKSRLGSTGAFAIQINGQLVFSKLANGGFPYEKDLIEAIRIASNVEDPRGYRQQLCSLRHSCSREDSGFLLCSGVQTLVSLWSCWELPLPLSPT

SEQ ID NO: 957594 - protein, 55 aa, Homo sapiens
VRGAAGKPGSDRDWRRLREQTVNSRRFYLLPPFPGTEAVPTVCSPLYPPPCPPRM

SEQ ID NO: 957595 - protein, 36 aa, Homo sapiens
GAVADVTEVDDCGGRLPKGLSLKKNRFIENSGRPPN

SEQ ID NO: 957596 - protein, 41 aa, Homo sapiens
SPGAHEQAGERLRWRWPYDICHGRLAGGDRLRAHRDLARGS

SEQ ID NO: 957597 - protein, 41 aa, Homo sapiens
MARGLLLVSLYFIYRQMLAYDSVDFAVDTCVIPSGSLPLLH

SEQ ID NO: 957598 - protein, 42 aa, Homo sapiens
VALRRQAFQVRLVLVRLCSGRYSRMRTALPPLELLRCSAGPC

SEQ ID NO: 957599 - protein, 34 aa, Homo sapiens
DLEDPHAAGEIHDHEGGFPSARLIHCTPNATPDG

SEQ ID NO: 957600 - protein, 112 aa, Homo sapiens
PYTYILLQAPLMLTAARCIRSASSSFMTTRGRGFEPRACARPSTLTTSRDILEAMARGEGPSNAVVIVVCCGWGAGQLGKRAVRRNSWLTVRADAELVFQLPLEQALAGCRL

SEQ ID NO: 957601 - protein, 39 aa, Homo sapiens
SARYLLGGIQGGEVLVSIETSSEYSSMQSHNLYQHPPPY

SEQ ID NO: 957602 - protein, 49 aa, Homo sapiens
IPVAHHILGIPACMRTSAKTRPVILYQQAIFDRHQCVVLDERELYSVSH

SEQ ID NO: 957603 - protein, 74 aa, Homo sapiens
MKDEDIRIHTCILSIVIFTLPSGCVTDGKDTSEPNKHRSIHTRGKVGRPLKGLLRASTSSQMASPYDAQDDARK

SEQ ID NO: 957604 - protein, 77 aa, Homo sapiens
MKLSKLPTRPYDYFDLSGMCLRLTEVRDETTFYRPHDRSGLLVAYPEEKNLTAIINLLRFVKTTQRRQSAMNESSTD

SEQ ID NO: 957605 - protein, 46 aa, Homo sapiens
LVVGGGCDGNSNNYLTKEELLKKFATVTENATGVTVCHQQECSGFL

SEQ ID NO: 957606 - protein, 39 aa, Homo sapiens
MRIDVCLLRLWTYFWWALCRKLERGNHVSCMQLRKAWPV

SEQ ID NO: 957607 - protein, 71 aa, Homo sapiens
GRYIAYNSGLARYGAISERYHSGMELGRDRRLTRQRAILYKRLKVPPAINQFTQNGSPNDPQHVPPNASPN

SEQ ID NO: 957608 - protein, 46 aa, Homo sapiens
QTGCRTYFMMGTVRKLDDLKSVTLHALERNGLYPHLRARSIDHSPV

SEQ ID NO: 957609 - protein, 42 aa, Homo sapiens
SDILLVGTEQKLEDEISELLHLERLGLISSLECKVHRPKPCS

SEQ ID NO: 957610 - protein, 65 aa, Homo sapiens
CRHILLVGTDAENLRIEISELHALERHGLSTSLECKVHQTKRPCSRSHTHCTDQGVSYYEIAPST

SEQ ID NO: 957611 - protein, 48 aa, Homo sapiens
VSRMLITILGTVKPNANRIALDFQRGNDVAFHFNPRFNENNRRAKGGT

SEQ ID NO: 957612 - protein, 53 aa, Homo sapiens
VSPKIQNNNTPERHECRPAMILGYWDIRGLAHAIRLLLEYTDSSYEEKKYTMG

SEQ ID NO: 957613 - protein, 46 aa, Homo sapiens
WRRRVSRLLKSGLSGRSCCCTRRMPTPTGTCNNFVHSDLYGHSACA

SEQ ID NO: 957614 - protein, 58 aa, Homo sapiens
MDEVTTFVHSDFSDSRRMVTRRVQFGVFGVCMHTPRLHTTLNAPDLVWMLGSRCGRSC

SEQ ID NO: 957615 - protein, 78 aa, Homo sapiens
RHSDLIQEVYDVGVCSNNFVQSDLICGSVWTVGVCSNNFVHCDLECGPSACVHTRNDQTFLRSSGVDEVVANPKGRSC

SEQ ID NO: 957616 - protein, 34 aa, Homo sapiens
RWMIIVAQQLRPQDLIERSVWSFGVCMYGCSACA

SEQ ID NO: 957617 - protein, 55 aa, Homo sapiens
MDLGVHAHADGPIQLMMDEIVAAHAEEPHPLVHKSRWTKLCNNFVHWTCMDIRRV

SEQ ID NO: 957618 - protein, 130 aa, Homo sapiens
DRNLVGNAAHNSLFDVICTNKKKSRFQTADPPRLSKRSQRRQNISVPTNMPLMKKHHPRNRCVDSLAIVLTCLSLGQFPTVRGILSAHTAVPSTAVRPCFGIRKGVETSRMSLSYVDSGIILRTPAGMGS

SEQ ID NO: 957619 - protein, 31 aa, Homo sapiens
MYVSGLSRITHVVCGPSVCARRSTESDTHCA

SEQ ID NO: 957620 - protein, 81 aa, Homo sapiens
WLYMSIAVCLLTHSLQDILLVGTVRKLEDEISETACTYDRHGLSPHLKCTGPIDQSPVSDHYSLYRPGENLYEYELAQAIS

SEQ ID NO: 957621 - protein, 72 aa, Homo sapiens
CAHLLRARITMRVGHTDRNVQLLQITVDEVVAARTSSIQTCGGLDLRRVQTTSSTLICGGLLARRVQHADRP

SEQ ID NO: 957622 - protein, 124 aa, Homo sapiens
YQPIPKKELVEIASRKDIPVRIFTYSPIPLSYGCLVEIGSTDALPDDVPVSATRGQAHPLLQHDVLELSSTYRTLGQETEATQEGAIHLNHRPSPHTNILLIHHSNFRIPFSMNEMIVKPNDEV

SEQ ID NO: 957623 - protein, 43 aa, Homo sapiens
SEVAGGVVFRRVQGQVSMDEVVGAHAVCADQRRCGEVAVDEVV

SEQ ID NO: 957624 - protein, 31 aa, Homo sapiens
MKAKGCYFKKGTEIVQLHATPTPFLGSDVAL

SEQ ID NO: 957625 - protein, 47 aa, Homo sapiens
QNRLWSMALPQVRRQALAFQCMPLTDFILTFRTVHQKYVRQAWQTAD

SEQ ID NO: 957626 - protein, 47 aa, Homo sapiens
MVTRGVTPKKPILTRRDPVLHQGSEWTKLLCTRRGSILEEIVVDEVV

SEQ ID NO: 957627 - protein, 68 aa, Homo sapiens
RQYFVGLRRATIIVHSDLDRRCLESRRCAATSSSTLTSRSVWTLGVCSKNFVHCDLSTNSQCVVPRSV

SEQ ID NO: 957628 - protein, 63 aa, Homo sapiens
MGIRRVHAHAETPNKSRWTKLLQISVDEVVAAHAEGPDRRRSEWTKLLRNNFVHPDLRRYGPS

SEQ ID NO: 957629 - protein, 107 aa, Homo sapiens
ALEDSTTSSIAICSVWILGVCSNNFVHRDLISRSVWRLGVCMHTPKTQTAHAECPDYPQLGDPIVPRCLEDLILSRCFRYWISVVSGKSARSLESLVAAFPAASELT

SEQ ID NO: 957630 - protein, 54 aa, Homo sapiens
MDEVVAATTSSIETATTSSIVDLDQIRGEQVWALGVCSNNFVHTDLMYLVIRRV

SEQ ID NO: 957631 - protein, 76 aa, Homo sapiens
QSDWTKLLHTPSVIRRKSQWTKLLRNNFVHPDLIGRSVWFFGVCCTRRISTHHTPNLHTAHAESPDPLVHQVLMDE

SEQ ID NO: 957632 - protein, 75 aa, Homo sapiens
LYRILCTREYCIRRCTREHQTVCHQEVRMDEVVADRCGRSQQLRPYLICVVIRRVQHAEAPYVRESQHVIVDEVV

SEQ ID NO: 957633 - protein, 53 aa, Homo sapiens
LEDLRNNFVHTHLCQQGVWALGVCSNNFVHHDLQQLRPFRFDFKKCLVPRRVQ

SEQ ID NO: 957634 - protein, 53 aa, Homo sapiens
AGPCTRRAPYTSSIPVDEVCNNFVHNDLYGFSACAVTTSSTGTSRTRLDVRRV

SEQ ID NO: 957635 - protein, 62 aa, Homo sapiens
MAKLLLHTPRLQTPRVREITVDEVVGNNFVHSDLGLGPRRVQQQLRPQDLILRSVWRLGVCR

SEQ ID NO: 957636 - protein, 37 aa, Homo sapiens
MATSRHIIHHYALFSLVLRRVQSTVTFAPRYGLSACA

SEQ ID NO: 957637 - protein, 85 aa, Homo sapiens
LTRRANIHFLRSGHKWTKLLQIRVDDEWLLHTPKNQTSGDPPTSASRSAGITGVSHHTRSLFLFNRNNFVHQDLISRSVWTFGVC

SEQ ID NO: 957638 - protein, 121 aa, Homo sapiens
LGAFEVPWEPELHLKAKAGVASDFGKETAFFEARGLTKITFSPLPHAFRCLQAFLLQTGDGKHQDLKYISPETMAALLTGKFSNIEDKIVIVDCRYPYEYEGGHIKTAANLPLERNSKAQA

SEQ ID NO: 957639 - protein, 36 aa, Homo sapiens
LEDPGKLRPLRFLVWSFGVCSNNFSIAICMDLRRVQ

SEQ ID NO: 957640 - protein, 60 aa, Homo sapiens
VSLEDPSHAEPPDVREIRMDEVVAQQLRPFCFAAVWVFGVCSNNFVHPDLKKYGDSACAG

SEQ ID NO: 957641 - protein, 36 aa, Homo sapiens
AQIGKVDPVEHVLELHLNWYASKTVSMSHPSPRMVC

SEQ ID NO: 957642 - protein, 44 aa, Homo sapiens
FEATRDGQQLRPPRFAQVWSLGVAHAEYTTLYFSRTQIRVDEVV

SEQ ID NO: 957643 - protein, 33 aa, Homo sapiens
SGLQNGDAHELDEARFPLILPTTQHDALYAPQH

SEQ ID NO: 957644 - protein, 59 aa, Homo sapiens
DLAHAESPYPHVRRSKSQWSAVVAQQLSSIRICVDSRRVHAHAKHPYTSVKSSHMDEVV

SEQ ID NO: 957645 - protein, 55 aa, Homo sapiens
NNFVHPELVHPDLNKCMVPRRVHAHAEGPNYITVEVCVDEVVAGHYGVWIFGVCR

SEQ ID NO: 957646 - protein, 55 aa, Homo sapiens
MCGALEVPTPRHQTGPERTRTGDLTSSFSIPWVVGNNFVHSDLSDSRRYGDSACA

SEQ ID NO: 957647 - protein, 42 aa, Homo sapiens
LRIPFVHSDLSTHNAASLVPRRVQQQLRPEVICGVGTFGVCR

SEQ ID NO: 957648 - protein, 38 aa, Homo sapiens
RVAYCTREATLHTPRAQTKIADLHVHTPSAHTIIADLH

SEQ ID NO: 957649 - protein, 40 aa, Homo sapiens
VFAVPGGSMVATLKLSGFDARAPPGVYPADEFDLARSPSP

SEQ ID NO: 957650 - protein, 81 aa, Homo sapiens
LNNDTAYAEVTTLHTPRGQTAARRASIAKSPIFTCTRRKTTLHTPKVHTAHAEGPYCTRRDPTRTGHRPKSPIFTDLHESN

SEQ ID NO: 957651 - protein, 97 aa, Homo sapiens
DRDIGVGVSACAVKIGDFGLVKIGDFGLDVKIGDNALTSRSVWILGVCSMDFRRVHVKIGDFGFVKIGDYGLVTRRVQHAEDPYRSRSATLVWALGV

SEQ ID NO: 957652 - protein, 36 aa, Homo sapiens
LDRDDRRLWFGIRRVHVKIGDYGLDTRRVQYGLRRV

SEQ ID NO: 957653 - protein, 106 aa, Homo sapiens
MGGHRFGRSACAVWALGVCSVVFGVCSLDIRPRRTSTHFLKSNHNRRSSRGRNRRSSRVKIGDIGMDTRRVQFGCSACAVGGFGVCSMDTRRVQCVAFGVCNFGYS

SEQ ID NO: 957654 - protein, 37 aa, Homo sapiens
MLGLHRESHTAHAECPWDIADLHVHTPNTQTIIAEGI

SEQ ID NO: 957655 - protein, 111 aa, Homo sapiens
WSWTLVRVHVKIGDYGLLSVGIRRVHVKIGDFGMLSVDPRRVQFGHSALHTPNVHTEGVHNRRSSRHAEGPHCTRREPIVADLHVHTPNVQCVVADLHAKRPYGVLEQPII

SEQ ID NO: 957656 - protein, 48 aa, Homo sapiens
KDGDIALLSMVIRAHAEDQTDRSKRSRRIFTLKIGDFGLVLRRVQSGG

SEQ ID NO: 957657 - protein, 30 aa, Homo sapiens
MADLHEIGDLLWTLGVCMHTPKIHTDVADL

SEQ ID NO: 957658 - protein, 74 aa, Homo sapiens
LERYQAMKRRSSMRYSCEKMSKHTLIRRFPNGGKPAERSSYTEYNRDTEAERSELKHLSSCRNRTQTRGAPLEV

SEQ ID NO: 957659 - protein, 43 aa, Homo sapiens
TDYQHRHAHKERLKQKKELGKSYPDLYTKNITSSITQYYEAPL

SEQ ID NO: 957660 - protein, 55 aa, Homo sapiens
GKGYPLNPEVVDQEERGYLRGKEALKGTRCRLSAKGMPSVLGPVSTTGRNSERSE

SEQ ID NO: 957661 - protein, 97 aa, Homo sapiens
LLRTTALALVTHCAKRSPSGCHIVSAHPECRCTLGSTGPARSTAAGTQGASQGTWLELPTNHYYDRTRIPQTHISRRQYKLREQSDYKGHNVIPPNM

SEQ ID NO: 957662 - protein, 71 aa, Homo sapiens
SIPGGFVRSWPGKFDPPDLTLCCRSPYSPISFRLLSRDEISRKGLRVVTLNFSDNTQTPGPLGMLGSAYPV

SEQ ID NO: 957663 - protein, 44 aa, Homo sapiens
MVSLVLAPALASCGCNVPNDQRTVVWGTQRVHLVISWMSIPVIQ

SEQ ID NO: 957664 - protein, 50 aa, Homo sapiens
MAAQCGDSGAVKIGDYGLVKIGDYGMVFGVCSEDRRSSRVKIGGRTFGVC

SEQ ID NO: 957665 - protein, 45 aa, Homo sapiens
MGYAGLKKCMDSRRVQCGDSACAVWTFGVGDNVSDLSLSMGTRRV

SEQ ID NO: 957666 - protein, 64 aa, Homo sapiens
TPKVTLHTRASTLHTPNTHTAHAECPYTSEKAKSPIFTDRRFGLLSVGFRRVHVKIGDFGLVAR

SEQ ID NO: 957667 - protein, 60 aa, Homo sapiens
GRRFGLAQVWAFGVCSMDSRRVHTPSPQTIVADLHESEIAIFTIGDFGLVPRRVHVDIRR

SEQ ID NO: 957668 - protein, 33 aa, Homo sapiens
AHARAPTPHAEGPQLHTRKTKTPRNRYRRSSRG

SEQ ID NO: 957669 - protein, 62 aa, Homo sapiens
VKDGDFALQNYALVRSATTLCSVWILGVCNAEAPYRNRRSSRVKIGDYGLDLRRVQCGLSAC

SEQ ID NO: 957670 - protein, 49 aa, Homo sapiens
IWLDLGVCSVDIRRVHVKIGDFGLGSRRVQHAEAPYCTRRVTKPLSPIF

SEQ ID NO: 957671 - protein, 38 aa, Homo sapiens
TKLNGQERIIADLHACSSALSACSVWFFGVCSVGTRRV

SEQ ID NO: 957672 - protein, 54 aa, Homo sapiens
MAHLSSRICYHPPTNISLNIQTSRVASEAGVMIHGIVVDYGLTYFCIVSSVLSE

SEQ ID NO: 957673 - protein, 133 aa, Homo sapiens
FRNHHVICLIHARNEDHLSYFTFIGRVAASGRHFIRSSIDGFFIRPYYTMMLGKQITLNDMESVDREYYNSLKWILENDPTELDLMFCIDEENFGQTYQVDLKPNGSEIMVTNENKREYIDLVIQWRFVNRVQ

SEQ ID NO: 957674 - protein, 59 aa, Homo sapiens
ISVVMLLIMRYTLDWVIYNRTVGRVTVPHGWAGLAEATIIAEGEAYTFFFTWQADQVVV

SEQ ID NO: 957675 - protein, 70 aa, Homo sapiens
MPIGIGATGGHVDAPYRYGRGTVMTQPGTGSEKPDNLGDSSSRGESSPAQDGGTNLPSGAELQPEDSQHD

SEQ ID NO: 957676 - protein, 44 aa, Homo sapiens
IRGSPISAYSAQMFPTANTPMPLRKQSKRRSNLFTYSEQGATLV

SEQ ID NO: 957677 - protein, 40 aa, Homo sapiens
TFVYWGYRQFCSMDIRKDRQLLIVGITLALESSGACLSPE

SEQ ID NO: 957678 - protein, 35 aa, Homo sapiens
DFGFRQCDVKIGDIGLAQYGLSAVCNLHEPIIADL

SEQ ID NO: 957679 - protein, 51 aa, Homo sapiens
YPVLSCVERLSGYSDNEASRSLIIETLSGSYSSSTLQDTGGVLGDWPVRFY

SEQ ID NO: 957680 - protein, 36 aa, Homo sapiens
NADPQTAHAEAPGRIADLHVHTPKNQSVSPIFTGDP

SEQ ID NO: 957681 - protein, 64 aa, Homo sapiens
MRFGRHEVRIEAGVQSVQITPSRRVTGVKTRPDVENELQVDTTYRSTQEWHCNTIVNLSTNELT

SEQ ID NO: 957682 - protein, 49 aa, Homo sapiens
CFVKIGDIGLDARRVQYGSSACACTRRVSILHTPKIHTRTGQSVIADLH

SEQ ID NO: 957683 - protein, 63 aa, Homo sapiens
MSLTCLEPVHPGVEVTTAWGPGPCTGDLEMLSLMEGSTARDGVQLLMQHDMDGNRAKKDKVAL

SEQ ID NO: 957684 - protein, 33 aa, Homo sapiens
VYLLKSATEVNSPGCVAFEFDHLIEHSQATCFV

SEQ ID NO: 957685 - protein, 36 aa, Homo sapiens
MIESSSVPQRHLSVKYVYSLENNDNDQATEELSWSS

SEQ ID NO: 957686 - protein, 46 aa, Homo sapiens
RGGTRSRTEQDYHGDNSIISEVKSNLSHDGLLTAHVPVLVGEQSNA

SEQ ID NO: 957687 - protein, 55 aa, Homo sapiens
SVDTLGVYELVYGIAGYAVRIHKNRKVRSRVLVTKYVVYEFSVESASYVVPIVDC

SEQ ID NO: 957688 - protein, 58 aa, Homo sapiens
VIGSFPDKSLHQLQNAPVHQAPSLYKSGRILYDIRPVCNSACPRARRSLQALLTCGNM

SEQ ID NO: 957689 - protein, 157 aa, Homo sapiens
PQRVLIFDSVCHINARLQRSSHVHHTIFIYRWCGHPGKFRLQITFLKRERHFAIFNTLSHIQQDLTSLRPFVAVFNCTFEMPSITKRKPPSGTGSDGFSIEYFKRTHRITIDIAETETVVLQEVIGCDVARLFFQNTANFELATNIRKSRIVSIVNG

SEQ ID NO: 957690 - protein, 54 aa, Homo sapiens
MGPTCLPAHWSTGWPHRLGVLSGAGYCCLASDDEGFVEVSMAIAAAALQTLTVA

SEQ ID NO: 957691 - protein, 32 aa, Homo sapiens
NIRVSEIEEEAALRNASNQLINHIETVFGHQC

SEQ ID NO: 957692 - protein, 39 aa, Homo sapiens
WVVLNPTLTVGERLGYGPDAPSADPFSRTRLIRHSELLS

SEQ ID NO: 957693 - protein, 47 aa, Homo sapiens
KAEHEVVRLIGVHRITEQAPLQGYEGTRSDALAPVCKRGSSNISTMS

SEQ ID NO: 957694 - protein, 38 aa, Homo sapiens
TARIEQRAINRVEVLSDGPSTWVMFPVIDEPEVYRGIL

SEQ ID NO: 957695 - protein, 33 aa, Homo sapiens
ARMLGLRGGPGYEEEDEDEEEYDEDAQVVEDEE

SEQ ID NO: 957696 - protein, 119 aa, Homo sapiens
REHYKHLYANKPENLEEMDKFLDTNTLPKLNQEEVESLNRSITSSKIKSLIKNTPTRKEKKKKGPGPVVFTVDSYQMYKRKLDPFLLNPFKKIRGRGFLLNSFYETGFILIPKFGKDTP

SEQ ID NO: 957697 - protein, 63 aa, Homo sapiens
IHNDSQIEADFRLNDSHKHKGEHKDREHRHKEHMKEKGRYKSKHSNSEHKDSEKKHKEKEKTK

SEQ ID NO: 957698 - protein, 136 aa, Homo sapiens
MHYELVLVNLHLDSVEDELVNEIVSAQPRSVNSGRASIKVYDSQPFYKRKNTGSPDRKPSKKSKTDSSSLSSPLNPKLWCHVHLKKSLSGSPLKVKNSKNSKSPEEHLEEMMKMMSPNKLHTNFHIPKKGPPAKKP

SEQ ID NO: 957699 - protein, 114 aa, Homo sapiens
RSAPLCEPRHPLRQGRPRWTSVRRARPGVTVGTGDGGIPDLDKLPAPFRTVVESAYGHGVGDVFLFAAPAALIAFLITIFIKEVALKTNAANDAPAEAEVPAAVLAEVPSGAAA

SEQ ID NO: 957700 - protein, 182 aa, Homo sapiens
MENNNVWLGWGYARGGGDIGMYRHALPPGLVSTKNKKKEEKEDEISLEDLMERERPALGPIVPKLTLESFLAGKKREKTRKDGVTLTMIWKRGKADFKSGESTSESGVVKCVEFRAERVKDDDEEADDTGYTQGTGGDEVDDSVSVNDIDVSGYIPGDVDETGIRVASVERSAIIFREDEEI

SEQ ID NO: 957701 - protein, 80 aa, Homo sapiens
AGRVSQQALSEALWPHQRGQYTLRDSILLCASNYAQTTDSCSQRSPCLSLLSSYDCRHMPPDLTDDYGAMRRDQSTAVTT

SEQ ID NO: 957702 - protein, 45 aa, Homo sapiens
PYNLPYPQAYLLSPRGVPQIVVTFDIDANEYPQMSLLCDNEYAEK

SEQ ID NO: 957703 - protein, 33 aa, Homo sapiens
LQRILYGHGTGVVKHDVTSAGVCLVSNWVMRRR

SEQ ID NO: 957704 - protein, 39 aa, Homo sapiens
EWYVAVRTSLLTQLVTVTRVRFRRGSLIKRLPHLNGGYL

SEQ ID NO: 957705 - protein, 54 aa, Homo sapiens
MERARNGVILEDLVRCNRGPLRVVETVLFVIEVERVDRLAHPLVKLVFQRAIGQ

SEQ ID NO: 957706 - protein, 75 aa, Homo sapiens
HIESLLTLHANGLLMLLLWTTVRETRTKLLSLNDKGLLGARNTLNVWSRKLRMYNAEDQKQQGHGVIQEIHRQFL

SEQ ID NO: 957707 - protein, 45 aa, Homo sapiens
MRRPRGSRDAACWIAACTLQSADTPRASDHAVGARRLRFEAIVFG

SEQ ID NO: 957708 - protein, 70 aa, Homo sapiens
TVDLMPNGILNVAAVDDSYGTREQNYYHEGQGRWSKEYIERLAQEAEMNKAEDHKHRDTGVIHEIHLQFL

SEQ ID NO: 957709 - protein, 64 aa, Homo sapiens
SLLPLCATGLDTGCCRGRQYGDTENKITITNDKGRWNKEYIERMVQEAEMNKAEDDKQRDTGVI

SEQ ID NO: 957710 - protein, 99 aa, Homo sapiens
MIAIRNFQSEVNFSEIAFSSNFCTRFGNDPGDFIFSPKIRKSSTLCMIGIENDKPSILTIKNSILSRHQRSTPPSKDGDSFHPAKAALCDGEPPKELTS

SEQ ID NO: 957711 - protein, 157 aa, Homo sapiens
NSYEREMFDKARLKLGLDKAVLQSMSGRENATNGVQQLSKKEIEDLLRKGAYGALMDEEDEGSKFCEEDIDQILLRRTHTITIESEGKGSTFAKASFVASGNRTDISLDDPNFWQKWAKKAELDIDALNGRNNLVIVTPRVRKQTRLYSAVKEDELM

SEQ ID NO: 957712 - protein, 67 aa, Homo sapiens
SSARLTSESLSSGNLFVTIASPPPSVNRITTTGVLCPVNGIAVCASNTTRYPLTCVSSNNNVKGFIS

SEQ ID NO: 957713 - protein, 166 aa, Homo sapiens
AGSESGKINNVNIKSKFMNFAQKMAPQRKAQVYCNHLKAMVPQVKGVKICDYSQDSKSPGKRNGASPAYSDYSYRVHKESDAENQVPCNTNNIGNLGEEEPKFHAHEENRGHSEVNFDSSTVVKEPGLKDNMNAERKSKVGNTYILKASLEPENIKSTPGVANNGS

SEQ ID NO: 957714 - protein, 61 aa, Homo sapiens
MLAGQRFDTQEAQDVLRIGRAVHNHFTLVHHLTVMHQHLLVFGNQELVFFTVHIGDFQTLL

SEQ ID NO: 957715 - protein, 90 aa, Homo sapiens
YALNPAEQRGEFHGRFSLPSIMASNAPFTPSIEMMVMSLPGLSPASSMAWMAPIAMSSLCAYSTLIFLPSAFRKASITSLPLARVKSPVC

SEQ ID NO: 957716 - protein, 42 aa, Homo sapiens
RSYRACSGIEHEVCTHGVAHAPADDAASEYVDDEATYSQPCQ

SEQ ID NO: 957717 - protein, 50 aa, Homo sapiens
MRRCCRYRRYTLPGIGERQPSSFASEQVFADTLFQLTNLGRDRRLRGMQL

SEQ ID NO: 957718 - protein, 155 aa, Homo sapiens
  misc_feature (132)..(132): Xaa can be any naturally occurring amino acid
TVCEDNNQLSSTANYTYAVQGVSDDLNFLKDTHMVSSQEISWHWAIPCAEGCFGQVVIAYSLVIDDRPAHVGGYLAVKILKDDATEKDLSDLVSQMEIMKMIGKHKNIINLLGACTQDGPLYVIVEYASKSXLREYLRARRPPEMEYSYDINRVP

SEQ ID NO: 957719 - protein, 50 aa, Homo sapiens
MLNWIKNSCSDFGRKTKRECLELSDYQSRSCKARCRPRNCMEAQYHGFSH

SEQ ID NO: 957720 - protein, 111 aa, Homo sapiens
IPSEEVEQLELELHRNGYYFLTQYDVELYPAHRTLNWEETTRSIQTQDDEVMMLTERVAEAHRLARMDVQGRMEKRRNARERMLEIMMTQTGAIGVRNKVAGGKMKKWTGR

SEQ ID NO: 957721 - protein, 91 aa, Homo sapiens
FPQWHHIARVVSRRKKFLIERKGNRTTVVNKIADILPPKLHLASKRFSSFAIQITSQTHHEFIKLTISSQRLRPSTSALRLKIIRSFRHRN

SEQ ID NO: 957722 - protein, 108 aa, Homo sapiens
MTRDLAVKVPYCALMCRRVEVRVCSVQLSVVCQKESQAQELVYTVSSRAGDLSRYIEIALKRPGCVDDEKYSRKEDVLVNASSCEIKYFTYSPFVWPGKLYGDADYLE

SEQ ID NO: 957723 - protein, 45 aa, Homo sapiens
SQVGLVHQGPVVHDVEGDFRVVAGAQLLPDQFLDVLVAGVLGKAQ

SEQ ID NO: 957724 - protein, 97 aa, Homo sapiens
NTRLNWYLARSKCVVIMYHWRATQNKYLMSKPVTSTERRVEVFDVRCFFRPGHGLEGTSAEENQVSEHLVIALHCTGYNRRNLALGFGIRGLPLKST

SEQ ID NO: 957725 - protein, 162 aa, Homo sapiens
ARYRRCALNPTGKCAVVCCYSCVIRQKVDPAVVKSAAIRQAVTGVIDNRLPFCSTRIDDSDGTARYSARLSKRVLRTPFTSTIIQRGFSRRRLRIKIVAGGVKLRVIRVSRADDFCHDPRYRAQDNSNGKQNTITNLHRIPHEIPGLIIPHAKPGDGRCSHH

SEQ ID NO: 957726 - protein, 54 aa, Homo sapiens
MNYYSINYYSINYYSINYYSINYYSINYYSINYYSINYSPEQSQLQYIHQQTMF

SEQ ID NO: 957727 - protein, 56 aa, Homo sapiens
MANILFLTGCSGAHLSSQKLWETEAVESLEVMSLETTLINMVTSMSLLKNAKLARH

SEQ ID NO: 957728 - protein, 71 aa, Homo sapiens
EEKYDPGYEASYCGAYGEHPCYSEPCGFSSNGSNCTSVELKMENQLFSGIPNGQWMTQSFTDQIPSFTNHC

SEQ ID NO: 957729 - protein, 41 aa, Homo sapiens
MVCDRNCALIAGAVIGAVLAVEARMLMPVGDLLIQKTIKKQ

SEQ ID NO: 957730 - protein, 62 aa, Homo sapiens
SKKRPGMSHSMIGVTSKFSTVQLVSTSTSDVKAVVGLLDLNAQLSQFVLESGKAVCFVAANM

SEQ ID NO: 957731 - protein, 150 aa, Homo sapiens
  misc_feature (108)..(108): Xaa can be any naturally occurring amino acid
MQFLNHQGYGIGDDEYSCAYYVSPECDLGTMPEVSLNTPMLDRRRYSRILLDLNEKQMIFFLNGNQLPPEKQVISSTVSGFFAAASFMSYQQCEFNFGARPFKYPPSXKFSTFNDYAFLTAEEKNHFAKAQASCSVEASQYPRKLLFPLL

SEQ ID NO: 957732 - protein, 165 aa, Homo sapiens
MCPSSAIMVSVAGSHLIGRTCNSEAGGILSLRLIHVTLGCPHGCFLGCLLHIWLLPCPCVLFLLNIAETPPTSPVKFMNHAEGEKEKTAITVNMTVGISITTAEPMFVPKKVMVAIQPQTPQPGMPTAVDDADDQLSHEGKEECHETEGAVSPAAEEVAPVTWAE

SEQ ID NO: 957733 - protein, 49 aa, Homo sapiens
MPPKSAEVVYEVEACLLALFENLFQLEGNEKHLEPGECSEGLAGDIPSL

SEQ ID NO: 957734 - protein, 44 aa, Homo sapiens
SAFLYGCPRRTQTITCDSNLIHYRQLHIHGAMARPPSTTNVPCS

SEQ ID NO: 957735 - protein, 44 aa, Homo sapiens
PDHYWVTVLTAFNLGGPAKLLGYQGLIVFIVRHSTPVENCFPKT

SEQ ID NO: 957736 - protein, 53 aa, Homo sapiens
MVAIVATRYPKVQKRFAVDFSVATRYHDFHPGDSRASRKTFDQAACGLYGYGG

SEQ ID NO: 957737 - protein, 40 aa, Homo sapiens
MQWCQEVVEGKLGMFHRLVSTVSIIMLVVTLCVENVELIV

SEQ ID NO: 957738 - protein, 83 aa, Homo sapiens
AYPLVNVHNMFAQSLRYVSMLIAHISSLIQFVYLNLHSAHITPLLPLLNLHNTQITPLLPLLNFHSAHYRKTFISCISICWFW

SEQ ID NO: 957739 - protein, 38 aa, Homo sapiens
MIRIEPGTRRVLSFAIHIIKLDKVILAQKYCQTHHHSV

SEQ ID NO: 957740 - protein, 42 aa, Homo sapiens
MRSVSSSSELKECSSTFAKGGPECPWKSKGSESLPGKLPECL

SEQ ID NO: 957741 - protein, 81 aa, Homo sapiens
LNKSQDRPSASRRARSPMLDSVPGPSHASSVVRAAVRACFCPWPKAREPSWQITGVSLKVQKLKNLESDVQGQEASSTGER

SEQ ID NO: 957742 - protein, 124 aa, Homo sapiens
SSSSESECGGILDQLTELDLYVVSHEERFAPGVEQCIIQPPPLKSHAHERHSGNFPGRDSVPFDFQGAFGASFCELQRSILSTMELETDRMVTIDEGRDLDMISGGEIDQSSDFQSIDSSQPDF

SEQ ID NO: 957743 - protein, 131 aa, Homo sapiens
MHGTSAQLTKAQVFSLIDTEPPDLPLLTETAITLSPTLVDINWIVEDSGSSDIAACICILKCSYQHSLWRPVRNKEGIKTGYASETRCKSLKIFRRPRKLFMQTVSSDDSESHMSEEKKEEDLLNNLCNQC

SEQ ID NO: 957744 - protein, 33 aa, Homo sapiens
MLKEAEKELHEKFDRLKKLHQDEKKKLEDKKKS

SEQ ID NO: 957745 - protein, 36 aa, Homo sapiens
SVTKTPIVAVNCCCIVSSSQITELWVVCRVSHWPDC

SEQ ID NO: 957746 - protein, 108 aa, Homo sapiens
YLPCFRIVIANRHRWTIVCDIWLYYTHTDLSIEAFKCLLCIMHLNLEGLGGLEGREAFVLCPGDGSHLLCRRTDSSFSFHGFLLYLHGSVGHQDPPGRGRPRLGRLLL

SEQ ID NO: 957747 - protein, 158 aa, Homo sapiens
RSTSLHSKRIKYLGIQFTREVKDLFKENYKPLLNEIKEDTNKWKNIPCSWVGRINIMKMAILPKVIYRFNAIPIKILRTFFTELEKTTLKFIWNQNRARIAKSILSQKNKAGGITLPDFKQYYKATVTKTAWYWYQNRDIDQWNRTEPSEYRKVGTGR

SEQ ID NO: 957748 - protein, 85 aa, Homo sapiens
LRLARWLILLHNDRNEPEHRTIIKRLPYYTLCPPRSLVIPFCNFSVPHMLKTQKVRRIVRPRFHGLYSYLKIKIKRAFALLLHGR

SEQ ID NO: 957749 - protein, 84 aa, Homo sapiens
RYTSLLVTCSSKHCSLNFSLTSRIGVISLCPNGRLFHQINSDGRVHVLHTSSVDNSPIASLGPITYRTSRILSDDQSTALRIES

SEQ ID NO: 957750 - protein, 41 aa, Homo sapiens
IQRDKHQDLMPKQSLRCRMQACDAVSKACDAGVTTSRCSTL

SEQ ID NO: 957751 - protein, 65 aa, Homo sapiens
MTDTNRARTSVCSLFSFYETGPLTRAGLHCRWREVLGFESPPASASKRLGLQGRARAWPILTSYF

SEQ ID NO: 957752 - protein, 51 aa, Homo sapiens
MYSSFNEKVLFHYTHTGVPVHYICSLQEAIHYHTVRGLAPSLTDTSVDIPC

SEQ ID NO: 957753 - protein, 43 aa, Homo sapiens
MSFPRSDLFVNYYYCPQILVFSSYSRPYHLRSRCHYTAMVPDY

SEQ ID NO: 957754 - protein, 45 aa, Homo sapiens
MAYPQLTIVDALLVLDLRGIKETRLLVFDELPSFLIELVVVAEER

SEQ ID NO: 957755 - protein, 45 aa, Homo sapiens
  misc_feature (1)..(1): Xaa can be any naturally occurring amino acid
XFRLDLVRLYSVSMKTYIVVGEVGVGALLLVEDDLLHLVVGLEHQ

SEQ ID NO: 957756 - protein, 43 aa, Homo sapiens
MLNATGWGTVLSTSSDICPYDKNICPRENIRGFTWSCEVRAST

SEQ ID NO: 957757 - protein, 67 aa, Homo sapiens
LGLAGPKGFPGSRSRSRSCARSLIFVDPLEVDFLVLNQGMNYEWKVSYTHPVTRINLSLSTYFLDAH

SEQ ID NO: 957758 - protein, 39 aa, Homo sapiens
MILTRVSTYKYMTTLLNSALSLRQINNTEMTINSPISTI

SEQ ID NO: 957759 - protein, 52 aa, Homo sapiens
RGRYLEATQHHYHTLKDLPQLLLGQRGVVWARCLLRRGFACHVPACARGKWT

SEQ ID NO: 957760 - protein, 106 aa, Homo sapiens
KQNGHHGISSNGVIIIWNRVEALNGLKRNHRRMELNGNIKGTRMESSSNGIKWNHRMDTNQIIVEWNRMESSNGLEGNHYRMELNEIIIEWIRMESSSKGVEWKHH

SEQ ID NO: 957761 - protein, 135 aa, Homo sapiens
MITIESRYQLSESPLEVYSRGEPGTREENGRNIEPVRMSLLSVCHSVFLLMYHAPLENSLAEVILNGDLSEMYAKTEQDIQRSSAKPSIRCFIKPTETLERSLEMNKHKGKRRVQKRPNYKNVGEEEDEEKGPTE

SEQ ID NO: 957762 - protein, 37 aa, Homo sapiens
MIRIEPVTTVIAGLVVIFMMLGGTFLYWRGRRIHEDE

SEQ ID NO: 957763 - protein, 132 aa, Homo sapiens
  misc_feature (12)..(12): Xaa can be any naturally occurring amino acid
YELSSVPSHLLXSRGRCDIIIISGRKEECEAARVDLWDGSWFRVITLNVEVTFDLHTLVIGQKGSGIRKMMDEFEVNIHVPAPELQSDIIAITGLAANLDRAKAGLLERVKEPQAEQEDRALRSFKLSVTVD

SEQ ID NO: 957764 - protein, 125 aa, Homo sapiens
MIRLEFGTVSSSDSIPLSPFHSIPFHLSPFHSSPLHSSPFCYSLLHTSPFHSIISIPFHSIPFHSIPFKAIPFDSIPIESLPFDSIPLVSIAFHSTPIHSTPFHSSPLHSIPFYYTPLHYPSQHS

SEQ ID NO: 957765 - protein, 41 aa, Homo sapiens
ILRCADDHQVHTLIIFSYLCFQHLGNYSSTQSVVVCPDIIQ

SEQ ID NO: 957766 - protein, 64 aa, Homo sapiens
CELRPRIGVAPFSRTLENFPPALASLQVAPSLLSCPLQHIVTISLVNLPFFTYYYLGKWLYHLQ

SEQ ID NO: 957767 - protein, 109 aa, Homo sapiens
DSMVTDGSRNVSSATLAVLFSKPEEMYNVYQTDFSKAFARNGIWSCKMNEGRGPRWLLKRVKPNGLPILTCIKSHLGPPNPGRSLVAGPPLALRDLGLLKVLVPGKEDR

SEQ ID NO: 957768 - protein, 99 aa, Homo sapiens
VVRKRISSFNGFQLWLMTSPLTEKGRLVGNWVLLGRPLGSPPGRKALGNEHLKNSDWGPWLSRTAQKEFTHSESEESIPPDVMEEIVWGGDNWACSCCP

SEQ ID NO: 957769 - protein, 94 aa, Homo sapiens
SLIDALFHAVWPARYPTAARSLMKVRVTLYVTTIKVIWGMLDSLTECFFISVYDLDSSRYPIGMNPRPLWLVAKKLDMIFSGTSCVNFSMNLKL

SEQ ID NO: 957770 - protein, 33 aa, Homo sapiens
LSGLFISMHLGVVSAGSCIHGKNECVGWILYHV

SEQ ID NO: 957771 - protein, 91 aa, Homo sapiens
GKCAREILAVWDMKHRGNGVHRAHDLCTASTCNLYSLLIVVYTTDIWLLKYLLGQWCVIVPRSILATALQEFLKTIQCPLTVVINDRSVCT

SEQ ID NO: 957772 - protein, 118 aa, Homo sapiens
HIYLSSVPQACELVARMTMWLEPSVAMAPALYTWLGCCWFTPHWCTCSWGWRNTESEADSWRPGLPPYGWRFWARLLHIWILPCPLCNFFSQIAETPPTSPVKFMNHAEGDEGKDGHH

SEQ ID NO: 957773 - protein, 39 aa, Homo sapiens
ARVCISRVSLVPLCEIVLRKYIISDIFFEITLIPTLVLI

SEQ ID NO: 957774 - protein, 93 aa, Homo sapiens
AQLYPFLLAQYVPFGLAYICDRVVRMSPYMCHIITTRGALGMNYSIFCANEVSSFEETFSTLFYKACFFPWTKFLSPGADAGGRDNGMLLCDT

SEQ ID NO: 957775 - protein, 108 aa, Homo sapiens
SLPYLSMQIARDYLIASSAVQTGLFNVNVDLFAGKSVVSDTLQCSIICFNIQTIFKGYVQSDFWLVEESVKLLEFFSCFDLIKLGLEDRLLVLLESYLPFHFFLLLEE

SEQ ID NO: 957776 - protein, 42 aa, Homo sapiens
  misc_feature (9)..(9): Xaa can be any naturally occurring amino acid
  misc_feature (11)..(11): Xaa can be any naturally occurring amino acid
IELNCQTLXPXANDLTHSLSSYLKEICPKWVKLRKNHSEKEI

SEQ ID NO: 957777 - protein, 42 aa, Homo sapiens
HQRRITAFSREFAILCPCPRCPVWCPDYSISFAVTSLHDTRV

SEQ ID NO: 957778 - protein, 34 aa, Homo sapiens
MQRVTDYHLPPSPRPCKPVPPHQDPANQYRCKPG

SEQ ID NO: 957779 - protein, 34 aa, Homo sapiens
YWFRGSPCYWLQRYWFAAVLVCSGTGLQRPHKTL

SEQ ID NO: 957780 - protein, 39 aa, Homo sapiens
FCRLLLLPASCFCLLLLLLPASAFSLTRSALPSSTYVRV

SEQ ID NO: 957781 - protein, 32 aa, Homo sapiens
MRGVGRSRKQQKQEAAEGFLLLLLPASAHTTL

SEQ ID NO: 957782 - protein, 167 aa, Homo sapiens
  misc_feature (127)..(127): Xaa can be any naturally occurring amino acid
MRFIFCILSGLGSVFPFQPDMVLIAADFKSAQTGVFGYCIRVVQFRYSIHPLVALRRKHCLTLVYREIKDICQQQLIVGGLLYCVFQIVKMLLAGHAQVEKAGTLPQRPVQADAQRQVADTAKAARXNALHMHWRQITERHAASGEPLQNHGSPRMLQAIFRNPAFS

SEQ ID NO: 957783 - protein, 97 aa, Homo sapiens
VRPPQPVPELLITLLPALLILLRRFRPDLTAVHRRTELPALFIITMQSICTIFVTDKIPVTGLTVIHPADGALASHQRQQQQERHQTTGALKQLPGS

SEQ ID NO: 957784 - protein, 155 aa, Homo sapiens
QESSKREIQKLETSEDLRGDRDEEKCQLKTDLQALSSEGELKKTPSAKGLWLCDNAEEAASEIELKQAMQQRSEDNARHKQSLEEAAKTIQDKNKEIERLKAEFQEEAKRRWEYEKELSKVRNNYDEENNYLKNQVETEINITKTTIHQLTMQKE

SEQ ID NO: 957785 - protein, 44 aa, Homo sapiens
MPVVLFEKQNCNDRHDSKNRADQTQYSSYRQQRGVSYCKNGNAS

SEQ ID NO: 957786 - protein, 39 aa, Homo sapiens
ATIEPARRTSVQLVCCLTTSVNVALLCRRGVSTVSPSDG

SEQ ID NO: 957787 - protein, 72 aa, Homo sapiens
LWTGKQCCAYWGTSAHKNRWALTSHAPRVPVYATHEWRQASDYDIQQQTEITEHKTGVSERCRLTGNGSNSS

SEQ ID NO: 957788 - protein, 35 aa, Homo sapiens
TGVLIPPVCSYPICVLIPHRVRIPTCVATYPTSSS

SEQ ID NO: 957789 - protein, 56 aa, Homo sapiens
SDDDGDCEPFTYDGGQSLLCNMHKIPVMMVSMRAVTYDVGPHCFLCMMLKIPVSTQ

SEQ ID NO: 957790 - protein, 68 aa, Homo sapiens
SVIIATARPLVASTDLSNIPGLFAIDQVLPEDSQKAESQNTFEATDLEFKKCFPSDETCETPVDETSE

SEQ ID NO: 957791 - protein, 135 aa, Homo sapiens
YLEDPRTLAWAPATPHPHRAIEPVPTQQLPGKSLQCQLKASQPLPLQWNCSCHPQTNEGAKALLHTSNKLQLTQGEKASYFPWVPHTPHGSPPDRFLLAWAHSTNPPSWADCTEVTADLHISEVEPPESSKLGYR

SEQ ID NO: 957792 - protein, 40 aa, Homo sapiens
LVVYGPARDLHRLVAWLFGRLSVCLPYEPRDEPPKEPHHE

SEQ ID NO: 957793 - protein, 46 aa, Homo sapiens
PHRLYKEVHLLYFPNIVIKGSELQSVWLETIHEKSIFMIHSPPMYK

SEQ ID NO: 957794 - protein, 54 aa, Homo sapiens
RGSPPDKSLHQLRTAMLTSYSTPKRHTMSPSNLITAMHHAPRASLMSHPKCHPK

SEQ ID NO: 957795 - protein, 67 aa, Homo sapiens
GRTDGRTGPPEVPPNEPRYEPHEAPRREPHNEPRNGPHEEPHRVAHGVAHRVARRVALRVALGVALR

SEQ ID NO: 957796 - protein, 67 aa, Homo sapiens
LIAWLFVWLVVGLLVWHVAWLMVWLLVWLFGGLLVGLIAWPFVVLFVWLVGWRIGWLLVGGALGGSR

SEQ ID NO: 957797 - protein, 47 aa, Homo sapiens
EGVNLAPGRTHIRPHEPARRVARGGGAWRLVERFVWLIPITQRATRR

SEQ ID NO: 957798 - protein, 80 aa, Homo sapiens
AHGAVRKVTTGITGSWRTHRGKRRASLGVFCFTAIERADIEGSKSDVAMNAWPPRASYPCGNFSDTSMRHPKCHAMCHPK

SEQ ID NO: 957799 - protein, 61 aa, Homo sapiens
LWVALCEGQGALEWVRPKSPTMSHAMSHPKRPPKSHPKSQPYSPKRHTKSRAKGHAMSHTM

SEQ ID NO: 957800 - protein, 64 aa, Homo sapiens
PFVWLMGWLFVWRVVGSACAYPTPAAADNLVEPHSRWPSGIAIIPHEPTTRHTKSHPMSHTKGR

SEQ ID NO: 957801 - protein, 59 aa, Homo sapiens
LVVGLIVARGVHGRSLLVERFVWLIPFVIGINQTNRSTKRHPKSHPTSHPMRHTMSLTT

SEQ ID NO: 957802 - protein, 61 aa, Homo sapiens
RFGGLLGWLFVWLVVWHLGWRLVERFVCLIPRRIVRLVAGRFGWLVGPPTYSTPLMSLHQE

SEQ ID NO: 957803 - protein, 70 aa, Homo sapiens
TLMKHKEPYQKPDINITSCFNNQTEIRSRGTRNVSNCKKQEVLKKYKWAYQNPDTKSNTTSKKKKKNQLN

SEQ ID NO: 957804 - protein, 69 aa, Homo sapiens
RLEDERYVEDRQPQKYHPKSHATSHAKSLTRSHARSHSTGHTKSRMVAKLKLKGIDRKDTTGHATSHPK

SEQ ID NO: 957805 - protein, 71 aa, Homo sapiens
PLEDPRLIAGRLVWPMAGRVVRRFGWLIARLMGWLVGGLFGWLIGWLFAWLIAWPFVSIPLSFSFGPLRNE

SEQ ID NO: 957806 - protein, 37 aa, Homo sapiens
TKSPRSNGTSIKHATMQLKTLSLATPPPSVLVHLHLC

SEQ ID NO: 957807 - protein, 37 aa, Homo sapiens
MVRLVFRSGQLALSQTRRTPALLCASPPPCPVHLLCA

SEQ ID NO: 957808 - protein, 55 aa, Homo sapiens
DSTEEVDSTGQHRGGGQLDLHKEERERGITIDISLWKFETTSVPPLCCTEEAAQR

SEQ ID NO: 957809 - protein, 40 aa, Homo sapiens
KLLHLCAVHLLCASHSTEEDRSSVTGIRVAAPPCDVHLLC

SEQ ID NO: 957810 - protein, 69 aa, Homo sapiens
QHPLYHPHHSIQPPDTCFYSEDSGLISRLHDASNNHSRLCSPHITLSCPTPLYSIMMLSILLMMLYTIL

SEQ ID NO: 957811 - protein, 33 aa, Homo sapiens
RQRRTKEKHIHTAHMTQLRSVPVRQSSETLLCA

SEQ ID NO: 957812 - protein, 32 aa, Homo sapiens
KKHPGGLMMKGQQSPERPPGTPPSVLSTSSCA

SEQ ID NO: 957813 - protein, 38 aa, Homo sapiens
QAVAVFTFGEIAGSAHRSAWISLALGKPPSDCLDLQGG

SEQ ID NO: 957814 - protein, 37 aa, Homo sapiens
WRVPGRVLEPYLNLTLLSDSSSPSSVLSNSSVLSMLS

SEQ ID NO: 957815 - protein, 36 aa, Homo sapiens
IHRNRTRGSSTGQVNSSSKSPSGSIMGKRIFIHQAL

SEQ ID NO: 957816 - protein, 60 aa, Homo sapiens
RGVQKCLFYIYLLKTSNPHGSCIRETLRSDSKKTKKKKKKHRKSSSARDDEEKKHEKLNA

SEQ ID NO: 957817 - protein, 35 aa, Homo sapiens
QDRKGPHSVHVKSTSVLSPSSVLSISSVLLLCAVQ

SEQ ID NO: 957818 - protein, 38 aa, Homo sapiens
PRYSSTIFRVLKSALRDLLLCAVHVLYTSSASSVLGAV

SEQ ID NO: 957819 - protein, 39 aa, Homo sapiens
TAGDSAYSSVLSTSSVRSTSSVLSNAVHLLCAVHLLCAV

SEQ ID NO: 957820 - protein, 55 aa, Homo sapiens
GSSLHGSGLSKPAAVDSPGLSASSSVLSTSSVLSTSSVLSNAVHLLCAVHLLCAV

SEQ ID NO: 957821 - protein, 54 aa, Homo sapiens
LGITYGELTGSCGTTRLTRDGYHAYVAQDWSAVALHRRDPTTDQHGSIDLIRYP

SEQ ID NO: 957822 - protein, 39 aa, Homo sapiens
YGRTTDLHCQDLYWTSSVLPAPLCSSSVCPASVLSSSVL

SEQ ID NO: 957823 - protein, 43 aa, Homo sapiens
MTVLSVAASVLSHSVCPPLCVSHSSVRVPAPLCLLCAVPSSVL

SEQ ID NO: 957824 - protein, 111 aa, Homo sapiens
  misc_feature (54)..(54): Xaa can be any naturally occurring amino acid
MTMASRPGAGQRDGWCRWCQRNLGFRCFGNELLLVLKRKEHSLPLENRGLSAPXLQTVPTVGTLVCARGSEAPVHLITSAFCEFRCSVLILLLPQEHVTLWGVDIEECTFW

SEQ ID NO: 957825 - protein, 74 aa, Homo sapiens
  misc_feature (67)..(67): Xaa can be any naturally occurring amino acid
GIYGLSDLYIYMTVMVVELFESTPSTYHVPRALQRCVLTGPHRKRGCSCHIIDVEPKGPEIVCYSPXNIELVDI

SEQ ID NO: 957826 - protein, 42 aa, Homo sapiens
KNKCEKIKRKNGTEEKAEEITKRLEEPEELKCYTRRTISRYT

SEQ ID NO: 957827 - protein, 55 aa, Homo sapiens
QQSKKISSAQIKENERHTEDKAREINKRLEEPEETKVLTPRRTLQQINCDCLDYK

SEQ ID NO: 957828 - protein, 61 aa, Homo sapiens
  misc_feature (25)..(25): Xaa can be any naturally occurring amino acid
  misc_feature (27)..(27): Xaa can be any naturally occurring amino acid
MEFTPGELAYGRGAKHSYALYDLVXCXAGGAQKLTPWGSIASNFVYGRYRRVPFGYELESK

SEQ ID NO: 957829 - protein, 51 aa, Homo sapiens
MGRDEQKSTVCIVVATMKLLALQVALQQTEIHNLIQKIGNFSIVRLLGLQG

SEQ ID NO: 957830 - protein, 40 aa, Homo sapiens
MPLNSSMGHKEDLSQKQTNQNNDDDGDDDDCLDYKEGTEL

SEQ ID NO: 957831 - protein, 34 aa, Homo sapiens
  misc_feature (16)..(16): Xaa can be any naturally occurring amino acid
PEVMVVAHGGVYSAEXSRVTKAAAHAPVRAERGY

SEQ ID NO: 957832 - protein, 64 aa, Homo sapiens
RPVEMGGDVCSSLFAVIYAESRRIVAIFPLINIYVDNQTAKLLLCAWIVAFFPILSNTTAWITR

SEQ ID NO: 957833 - protein, 33 aa, Homo sapiens
FNHLWCNKWTISDHHTLTTYSSNYRECNTSSER

SEQ ID NO: 957834 - protein, 44 aa, Homo sapiens
TVSWSVTCIFAGKLRICGDMQSRVMRTRRFSTCPVYFIWWRINT

SEQ ID NO: 957835 - protein, 75 aa, Homo sapiens
RIQQSYVIQKIGDLLVQQFSGENGERLKEKYGVFCSGHNETGSHYKVVVQQNKKFQNLIKKIGNFSIVRLLGLQG

SEQ ID NO: 957836 - protein, 82 aa, Homo sapiens
VDPSWDQHLHHSENDLLISQLKESLKVRRIRVRKKDLVSFFSFIFKTCPWFPQEGSIDSRVRGRVSDCLNEYYRVFGPSGPV

SEQ ID NO: 957837 - protein, 68 aa, Homo sapiens
EAISKRSISKRSTGQKSQHNIPPAGVTAPFTDAYCPLTVIKPYSDVAFVTPSMSALPIICEAEFTKRW

SEQ ID NO: 957838 - protein, 39 aa, Homo sapiens
MVCCVGRRGGEEVAYDRISVTDAILTLTDARLLMLRVLK

SEQ ID NO: 957839 - protein, 46 aa, Homo sapiens
  misc_feature (42)..(42): Xaa can be any naturally occurring amino acid
MADEEEDPTSEEENEEMEEVQKVDRYQERDFFLKELRCIDVXGFGD

SEQ ID NO: 957840 - protein, 60 aa, Homo sapiens
  misc_feature (26)..(26): Xaa can be any naturally occurring amino acid
RGFQISHCASRVAVLYRYNRSTHTLXSLYTASSARPDEGYKVKRKYHVKTLGQGAAAMRD

SEQ ID NO: 957841 - protein, 72 aa, Homo sapiens
VPSKTTGPKLAKLALTFAVGCDLGAEPNLRAVHANDFTYVTANYYTQLIQNLINGTCYPRDNSAMRDLGTEL

SEQ ID NO: 957842 - protein, 39 aa, Homo sapiens
PALVWLVGGPSGALCEAHRGLLGKLRGNQLLEVRLVFRD

SEQ ID NO: 957843 - protein, 43 aa, Homo sapiens
LLAWLFVRLIGWPEERLFVRLFVRLIRVARGEVEHERTCEDPK

SEQ ID NO: 957844 - protein, 47 aa, Homo sapiens
SIGLLHCLVPVSSSCTPGLCGRQHMFPCSFILNHAVLLIGCISIGPR

SEQ ID NO: 957845 - protein, 75 aa, Homo sapiens
TPGLVYLHPYLNAVTASAITNAQSCSSHCTMPARNWLENVLVTDCGTVHSCITVLKLPDCAQMPYADAGPHRGNG

SEQ ID NO: 957846 - protein, 50 aa, Homo sapiens
VVIRSSLLQSAIALDTAGHAGAGLTINLDRWIVRAKTLSFVTDKLVYAMR

SEQ ID NO: 957847 - protein, 48 aa, Homo sapiens
MDARHGILHPDPIRWVTGTALLVRVDTLSSQCSGVSRTSRAYRLLLSS

SEQ ID NO: 957848 - protein, 73 aa, Homo sapiens
MTVTHNTLLTSGRTTFDTSYDDDGLTDSRPCDDAYRYVMTVCYGQNYVHLTDCNVPLGRLTDDTTPVARVTRW

SEQ ID NO: 957849 - protein, 45 aa, Homo sapiens
MAYTELLKLLHNTSQDLYTNLVYEAWLAASSMHTAVNPIITLSMQ

SEQ ID NO: 957850 - protein, 101 aa, Homo sapiens
MAYSTVVTWWCVNRRWPCRQRGQGGDLFGPGTYKLTTQTLPLLTNLKNWDKLFASPFKSDVYFFSTRQQLDLRWGTSQPITLRDKDFGAVRLRAFGNYADA

SEQ ID NO: 957851 - protein, 42 aa, Homo sapiens
MVELDVGAAVAEVGQVEVAAVRFDAGSERDTRESLTQNEACG

SEQ ID NO: 957852 - protein, 68 aa, Homo sapiens
RNAERKHESSSYYEYFLNNEYREVNEYEEHRYEKAFEDKEKNMINTEKLELKPPEKKKSDEETNLKLH

SEQ ID NO: 957853 - protein, 98 aa, Homo sapiens
YSSPSTLQQPRAAWSSAPGRTANWLSGGLLFSKARLVPSKAHSYIAAAQTIITTQFFLSSITRLIWKSHTHPLFPEPNSQRHQAWGPKGHQFSSFPRH

SEQ ID NO: 957854 - protein, 128 aa, Homo sapiens
VWVIRGFQTQRGSSYTFPVNRSSTLLRHLEFLAHVQLSDAPRAPIQQSFGEEFRQHDGMVTILMFNRRRASPKHRYNMTEVNIVEGGPHMAKEQSLKINLCVYGVPPTPVYKGVEEGRVGPLYVLSAF

SEQ ID NO: 957855 - protein, 111 aa, Homo sapiens
TQRGSDQVTTELHRSTRTRSTPEWYGNPVLKIILLDNGEPSSYEEAMAGPDSNKWLEAMQSEIGSMYENKVWTLTDFPDDLQAIGNKWIFKKKTDADGNVTIYKSRLVAKG

SEQ ID NO: 957856 - protein, 98 aa, Homo sapiens
KRREDGRQRLTHTERAHAVAIEAVLQTEPGVMDVNRAAEAQLEAECADAARIEALLQAEADVLDLNRAAEAQLDAERADCHSHGGPPARQELDVLSAV

SEQ ID NO: 957857 - protein, 35 aa, Homo sapiens
CWSKTTNTNISDAQEIETSELILPAIILVSSPSHP

SEQ ID NO: 957858 - protein, 70 aa, Homo sapiens
FNFYTMWSTIDSTSEPFEAVIIGIRNLYIIYSRPASNTSESKSIDLFIRQKSVTRIFYSYVFENPAIICV

SEQ ID NO: 957859 - protein, 53 aa, Homo sapiens
SPRVLASVVLLTVCVGRVGVLCVDGRVGVLCVSDVFGVRVGVLLCVRTCWVLC

SEQ ID NO: 957860 - protein, 38 aa, Homo sapiens
YTPYTTLYHTLNSLPTFTILQYKKSTTSMRIHVWGGIS

SEQ ID NO: 957861 - protein, 37 aa, Homo sapiens
FDLYRIFRLSTRGMRESFRSLSFKVWYHEWYGWYRGT

SEQ ID NO: 957862 - protein, 45 aa, Homo sapiens
MLYTLYPLYHHTTISTLYHHTTLPTFTILQYKKSTTSMRIRGWYS

SEQ ID NO: 957863 - protein, 34 aa, Homo sapiens
TESKTIINGWRQLQPSNARKPGFTLRRKRYLSSS

SEQ ID NO: 957864 - protein, 66 aa, Homo sapiens
LSYYGNHMSLSPDYTLCSFKNSQYITSCDSPLKFNFYRELKVTSKQLQRNNQQPCSAQVVISGSPQ

SEQ ID NO: 957865 - protein, 74 aa, Homo sapiens
MSFRRGCAYVSCKKGDLVVPEFNPFLVRFADTTLRDRHLGYFSTILYNPPDAPDYSASLLPDWLTCTFIKSGHH

SEQ ID NO: 957866 - protein, 37 aa, Homo sapiens
RGIVSYTTESFPDYSSDRYCRDWLTCALHQKVVDHVA

SEQ ID NO: 957867 - protein, 100 aa, Homo sapiens
TTMINCGIDHNPSLIILSCSTASSFAAILPAINPPTCTAALHNDLHHYDDVPPFTYPVLLRTARGRTLTSCLLIFNHQSLLVQVRSHQMRINRLYRNRTH

SEQ ID NO: 957868 - protein, 41 aa, Homo sapiens
MQSNVATHKLTVLSANPILFAIFWFGKKDCATRAPDYSASL

SEQ ID NO: 957869 - protein, 52 aa, Homo sapiens
TSSCNRRGQSLPAYVIYVALGRRPQLEGTTPPEPPISTRIVICLTGYLYRCI

SEQ ID NO: 957870 - protein, 54 aa, Homo sapiens
LSFLKCLECWDIRYTNYISTLPKLTWWCDDAAQEVGYRPDVLRLLAHRYVPDWL

SEQ ID NO: 957871 - protein, 102 aa, Homo sapiens
MRCAARTGAKLRLARTLARDAWHLKQRYQYTALVRHDCLTNENTFTDLKNTYTRLRQGIFKIRVPTHVNKINRMPAFGNRVRLKINHERAEHELNVMARHGR

SEQ ID NO: 957872 - protein, 70 aa, Homo sapiens
LEESPLIAEENRKNQGTVNWSVDDIVRGINSSNVEDQLQSYSSCQETTFHEKNSPPLDSYSKCRRRQNRR

SEQ ID NO: 957873 - protein, 33 aa, Homo sapiens
VKQNSTTVGLSPLNEGNVASVHVGVSTWRHVAS

SEQ ID NO: 957874 - protein, 74 aa, Homo sapiens
  misc_feature (44)..(44): Xaa can be any naturally occurring amino acid
MLGGPCISCCWVEQWCCVQLEDESVSEVYTTSASLQLRTPASAXVLVGTQDAISAANPRVIDDSRARKLSTDLK

SEQ ID NO: 957875 - protein, 81 aa, Homo sapiens
TDRLAELAVWALLRNKWIVRGDSVRLPSERGLFTSILKTFPAGTFVLSISKQAKGISSCCCFRIFFFRICSSERTHCSLLK

SEQ ID NO: 957876 - protein, 35 aa, Homo sapiens
ASSEGWVHPSGSGSSSTQKRSGCNSHVSRNACGAA

SEQ ID NO: 957877 - protein, 77 aa, Homo sapiens
GRPLEDSPVCGRVVVWVVGCGASFVVGSTARVRTRKLVTYAWAGRSQRKLWCTVRNGPDVQIGRPTWVVGAERIIEP

SEQ ID NO: 957878 - protein, 38 aa, Homo sapiens
MGWVGRAGALVTEFVTEASLGWRSLRKRSLRRRVRRRS

SEQ ID NO: 957879 - protein, 44 aa, Homo sapiens
YQRSIKSARNERSNTLRYRASVTSAYRALLTALRNERVVEVRSG

SEQ ID NO: 957880 - protein, 35 aa, Homo sapiens
PPRRPIPGKNFVRLYIRSNPDLYGPWGICATLALI

SEQ ID NO: 957881 - protein, 33 aa, Homo sapiens
IHPDEPTNQDSAPSVSILIMWDSQLYQAPLALI

SEQ ID NO: 957882 - protein, 46 aa, Homo sapiens
NRAIGHSQLAPVGLHSSPQAQQAAHSATHHFVIMPHAPGIGSTGSS

SEQ ID NO: 957883 - protein, 52 aa, Homo sapiens
YHIHSLHACVVALCNPCSSTQQELQVQHIWCHVACVEAANVGCKLTILCGIH

SEQ ID NO: 957884 - protein, 81 aa, Homo sapiens
IIMAATAASITDLNPLRLLPANQAQPVISQVFIFQLGLHPGHASITIMVKHSSSLIQAGAMWQSGPQVMQVNRHFYRPIQH

SEQ ID NO: 957885 - protein, 35 aa, Homo sapiens
QEYYYNSMMSISYIGEGVIYNTLYAGFILGPYPEG

SEQ ID NO: 957886 - protein, 54 aa, Homo sapiens
HSIFTTKHQAFTMCPKQAKHPTQQTKERTTLNAAHCMVSHPATVAQRPLHQTIN

SEQ ID NO: 957887 - protein, 73 aa, Homo sapiens
MYQSHITSVTHESTGRLMQTGPPLVLCCLEVHSTRYALNHHPRVQSFADLEGKVALQPCSLLQKNKTYLWPLS

SEQ ID NO: 957888 - protein, 47 aa, Homo sapiens
ELREGFLCAGHLHRHLSHLQPIGKYNHLRFTDEELEVYQSLSNLGLI

SEQ ID NO: 957889 - protein, 55 aa, Homo sapiens
AWFWFYYTMHNHLRVSLSVNLTKAYDSPSTCVINLNKVDLVCSTKGLHQLDIHRL

SEQ ID NO: 957890 - protein, 54 aa, Homo sapiens
GVMRARIFSSRQSTAGDGAMASLGAWGCPVVQPLPLLSRGLLEPQISLSYYTIS

SEQ ID NO: 957891 - protein, 46 aa, Homo sapiens
PFLPSSCWNSETFMPLAKKFPPLGAQVEPSGAFSKTRLALAWTPKN

SEQ ID NO: 957892 - protein, 102 aa, Homo sapiens
FLALSGTMDFKQKKALNTDMEELGLETDTAGCSRCGVFLSQMWPTMTYSSVRNHSSHSKPTSGRLETSHHRFSTKRQPQILYIPMTERKGSTVRTCKPGTCK

SEQ ID NO: 957893 - protein, 73 aa, Homo sapiens
YYSEDTLYRTPLMTPKAHVESPIAGSIVVAAVLLKSRRLWYKYAYTLYSHIPLNQTLHSLTHFLVTGLPSLEF

SEQ ID NO: 957894 - protein, 59 aa, Homo sapiens
MTSPLWVKSLILDNSWTIPFRYWHLSKHIKQSSKLGPIIFILGGINGPSRKKFTSSFLK

SEQ ID NO: 957895 - protein, 54 aa, Homo sapiens
PLGKIPGSSSIIHIGSTSSSPSFILTRSSVSSLILPPYCLGTFLYRYPVRLGQY

SEQ ID NO: 957896 - protein, 67 aa, Homo sapiens
FPLSDFDSTDTLEAHRCFQSAPAPTVLRCESGNVLLIMLRKVETPFCGEAAGPLTLQETKCAVKQES

SEQ ID NO: 957897 - protein, 45 aa, Homo sapiens
  misc_feature (24)..(24): Xaa can be any naturally occurring amino acid
GYTLSRTDCDTGERLNAMECALHXEKNVKSVHYWNCTNLALTKID

SEQ ID NO: 957898 - protein, 104 aa, Homo sapiens
EYLRRPGLGEVLNVGNVVLNPRSRSLIKVIRFLPISKDGELYHGHVREGGRSDTEFCQDADGARRLLNLNLSLLQVTILLFLHLLLDAAGAQSIRTHLSKPLDV

SEQ ID NO: 957899 - protein, 65 aa, Homo sapiens
MASQPEFYPTCNDDLTAILLKLFQTIEKEGLLPNSFYEARVILIPKPGRDTTKKENFRPISLMNI

SEQ ID NO: 957900 - protein, 48 aa, Homo sapiens
IPTEKYVFIGYAKVTVGYTFYHRSKARIIFGAVVREAYAKVIYQVPIT

SEQ ID NO: 957901 - protein, 70 aa, Homo sapiens
  misc_feature (3)..(3): Xaa can be any naturally occurring amino acid
KIXDRYRPVWSCYSRTVDLVIIMRVTIMTSLVLRSHSTPRYRASLNFHLTSEHWQKSHRSHRAGSRCLFN

SEQ ID NO: 957902 - protein, 80 aa, Homo sapiens
QASRVELHGGGYLEKWFYAQVIAAFILLLHTVHEQKDEEDGTEDAHDATHNQSCQDLRSLTDAAALTQCWTLDILLIRLR

SEQ ID NO: 957903 - protein, 33 aa, Homo sapiens
EELKSEVRRRSDTVVVPTISPRNPKTLVSRKLK

SEQ ID NO: 957904 - protein, 36 aa, Homo sapiens
MDVPRRRFSTSRTLRRLQILCDRAATSGATSVKRFA

SEQ ID NO: 957905 - protein, 64 aa, Homo sapiens
CRIAYTAVRRTVRLCAQYCTASCAGGHGCQKYCTQRRFEAGFLIGLVSTPAGLFPGWCRSRRMI

SEQ ID NO: 957906 - protein, 88 aa, Homo sapiens
MAQGATDEVSINSAVRLRLFNRVGLDRLAIGAGNLSLSLAVGFFLNEAEVVVELLGALCAALCKGSGRGQGHQAGQHQGREFHSGIPI

SEQ ID NO: 957907 - protein, 51 aa, Homo sapiens
PVSLFIYGRLFLCHGGEIGIRTLGTGEEYNGFRIRPIRPTLCISSNARAII

SEQ ID NO: 957908 - protein, 67 aa, Homo sapiens
RGSDRLMALYRDEIMKLSQSQFDIEMTRGNSYNTLKQALICLWIRYWSYKIKTETYDVLSTSNKVVS

SEQ ID NO: 957909 - protein, 36 aa, Homo sapiens
MSCEPNDEFLNWLSVGLLVVGWPFISSVTRHIAVDE

SEQ ID NO: 957910 - protein, 64 aa, Homo sapiens
SSAVIMVPRYDRAHIGCMTAKHVRFRDRIDGWAHALIVSPTSDLQGSALRTIRRRACADERDLI

SEQ ID NO: 957911 - protein, 42 aa, Homo sapiens
YPLLTERPLSSVGSQHVGSVLHGTVTTIFRYYARTSSRMTVT

SEQ ID NO: 957912 - protein, 48 aa, Homo sapiens
HDTIQLVPAISGGVPTGGRRNPRVGFANQHPAIQQPLATRLWRSVKRP

SEQ ID NO: 957913 - protein, 41 aa, Homo sapiens
MSLNNWTARAIAPTSSPRLSDGTETSRSPPARPFITSVMAA

SEQ ID NO: 957914 - protein, 35 aa, Homo sapiens
HTLVLSTSPAKDDRFHVELPVCPASAEPCGFFQMS

SEQ ID NO: 957915 - protein, 65 aa, Homo sapiens
YYQCTVPPEPYTFAYDNIVQDACPTRLDCVAKNNSNGIASAILLGLRNWKPDLIWKAQGRIRICD

SEQ ID NO: 957916 - protein, 38 aa, Homo sapiens
DNLRAAALLIGVQQGLPRRVGSERLALIQCEIFTGGVA

SEQ ID NO: 957917 - protein, 64 aa, Homo sapiens
LVAYLEPRHAIVVHPQFTEPEAALRAAGISVGRHILNVPDGFALDPDLVPDDADLVVVGNPTNP

SEQ ID NO: 957918 - protein, 43 aa, Homo sapiens
FVSAAKPEMRRARHRLETRRNKTHTVVPPSVALRPTTFRSRPV

SEQ ID NO: 957919 - protein, 67 aa, Homo sapiens
LKVTRKDTYNKLKTKDEPSGNAKRHPLMRGTAVVMAGARRNKFISRHLPQRRTYSKTFTVKSVHDAI

SEQ ID NO: 957920 - protein, 123 aa, Homo sapiens
MMPAGIINLTRILLPTISRWERPSPRRTGFVHIVSKLLSPVKILLIFCTAFSSRLRQNSPLSDKDDMLPTELFLQFAYQPDLDFLERFQLRNGNKDYDSFPTTTNFNFLSCRNIQLPELSLEV

SEQ ID NO: 957921 - protein, 46 aa, Homo sapiens
QQTIGSYELPPVMLASLHSQVPRTNATLLGPAKSMVRDARVGDKPR

SEQ ID NO: 957922 - protein, 33 aa, Homo sapiens
DPHGQYSYIRKSIVLLQQIMMFHVVLAENPVTY

SEQ ID NO: 957923 - protein, 123 aa, Homo sapiens
MAALREALVKVRKVVAGERSSVLVSLATNQQPLAVLFLPNLKVVDIGWCVHTAVHRQGMEVVAHQGGIAVEGDGLVLHLQGFECAGMGFQVGNELRLVLHLAAGVAVGELVGRQCMKLLEVQM

SEQ ID NO: 957924 - protein, 79 aa, Homo sapiens
PLGLWVSAWISSVGDRRGYSIHPFMRAQRNSMIEASELTFYESHYFFPVFKPRFIEFLHFDIQSTGQKSHRVNTRRGPS

SEQ ID NO: 957925 - protein, 50 aa, Homo sapiens
PPPPPPPPPPPPPPPPPPDMQAVHAVTFLQADLKQDSPPAYCRLAATDAL

SEQ ID NO: 957926 - protein, 54 aa, Homo sapiens
RLCQRVANTSNTDKWVHVLQLQPVELRLLSAPFGQYQYCCREFSNASVNIFNAP

SEQ ID NO: 957927 - protein, 56 aa, Homo sapiens
MEFLHAYERQILGYIQLRKGPNVVGPYGLLQPFADSSKGLSQILLSIALLVPPKTS

SEQ ID NO: 957928 - protein, 96 aa, Homo sapiens
MGHIEYLGFSCEVPATEGPEQSQDRMNVSSVGIQPVQWFHVPLGGAKAGVKIIPKNYTDNELEEITKEFTMKLAQEGFIGPGIHVPAPDIRSGQRE

SEQ ID NO: 957929 - protein, 83 aa, Homo sapiens
MLPQFSVHMAIPSPFIWRSEREKEISDDKAREQRKVIQKRKLKMLTNSPRSKMCVQVRWMTAVRMMMKHPLKLNEQYFDQAAP

SEQ ID NO: 957930 - protein, 35 aa, Homo sapiens
DITETYLITIRYTSTKNEKQKRQEAPKIDYLYTNR

SEQ ID NO: 957931 - protein, 99 aa, Homo sapiens
RLLCRTGGSGPVFTIEVRRYDTRDEVIEALKQGGVDFLGSANGYEAADPQLLLSRSYANDQPTLVTRSGDSQVLNDDLAGKRVAMLYHYMQPDAVRAFY

SEQ ID NO: 957932 - protein, 48 aa, Homo sapiens
MFPLFKTAKSVRFDRRSNTVVVPTINDANLEIRQCYSHDSAGPASGET

SEQ ID NO: 957933 - protein, 63 aa, Homo sapiens
TSGVPCMARSRLDYRTLRILEYGPRLLFLSVFGTEALLQRAGRGRFSIAPLEVNILDRRKTDQ

SEQ ID NO: 957934 - protein, 37 aa, Homo sapiens
SSRYRSPRCDGISSISGPPTQRTAGKFSEEVSDLLHH

SEQ ID NO: 957935 - protein, 83 aa, Homo sapiens
ETQADCYLLLSPEKTSSLLKVITLKSNNPQTRIETDTHMQAHFYPQSRQYLPLFTSCVMILIIQCLYLVSVWSNDTIVAEYKG

SEQ ID NO: 957936 - protein, 32 aa, Homo sapiens
MQTSVGPNQGSAAIRRDVRDIPINMITACADM

SEQ ID NO: 957937 - protein, 86 aa, Homo sapiens
KPERLIITTGHMLYSSLWSRLISNRGILYNHTSRRSSLALSSTFNIVLELGKPLAAVLPKLECSGAVLGHRSLHLLGSVRPPSSPS

SEQ ID NO: 957938 - protein, 89 aa, Homo sapiens
MIPDYDVCMVLCWEEGCRIRNRGKFGNTKGEEEEEASVLGRLHQFLVKMMWLLRVAILHVKKPESQKEQTPELGKKKRGRGKAQVKATN

SEQ ID NO: 957939 - protein, 157 aa, Homo sapiens
RIRTFAHSSSRCEKPLPESRTSGLSESVRKTRRYFRFLTNGLEHERKSKPVNFDSSQDLVQQGLDIYTLRNSILYCSPTCYPENAMSSKNSKPATTNSKKVSSIKPKFLDTPRIPGMSPAFKGYDGGIAQWLLFGGLTVAVDKNWAAKPKDKIQVLV

SEQ ID NO: 957940 - protein, 57 aa, Homo sapiens
GPGGARGPLILEVVELLDSRRRHLLAALSSTFMLCLAVGSGAVPGPPVSVALGGVRR

SEQ ID NO: 957941 - protein, 53 aa, Homo sapiens
LTKPLHNNGPPREDPALGGTSAVENEYTSPGAVMVKGSSTRYVDLFLFFSVRS

SEQ ID NO: 957942 - protein, 94 aa, Homo sapiens
NGPDSCLRGKECRIKRFQQVERRWGYSGSSDRIRFSVHKRIFVVGFRGSYGSIHGPTDYQVNIQIIHTDSNTYLGQNDTGFSIDGSASNFRVRS

SEQ ID NO: 957943 - protein, 48 aa, Homo sapiens
YILQRMSLPQPTQQAPSVTGTSTSFEHEYLRISTASGSMGVRQRPGAS

SEQ ID NO: 957944 - protein, 60 aa, Homo sapiens
ANRYTVSRTDLTQGRPMAGRLRQRRWHIGLPLDNSTGVAVLLEDHAWCVNTTLSCSELAV

SEQ ID NO: 957945 - protein, 121 aa, Homo sapiens
TAIAVTTVSLASIFHQQTSLHYQSDSLSEPFLILLEHTVAGFAFLFPPKVAEASIYSLLKKEDSIFVNEECCFYLNQSALVYDNIKKLKDRAQNFTNQANNNVESTWTLIGHPGYYQLLGL

SEQ ID NO: 957946 - protein, 48 aa, Homo sapiens
VLRISNYHIFDFPYAGEVNMSELITPTVLFKSLADATRTKITLLIARE

SEQ ID NO: 957947 - protein, 37 aa, Homo sapiens
MPRWALRLLWSLERTLRPTEAIATVQPGDLALTLIEL

SEQ ID NO: 957948 - protein, 37 aa, Homo sapiens
RPDEYLHSSPEAVPTFKVKNEEYFIRCTNRAKGLIEL

SEQ ID NO: 957949 - protein, 143 aa, Homo sapiens
LDHTCTVTLLRRHLSRRIAINTRLSIPSTSSSTIKVARPSQAVGSANHSIYKFSVFKVFRTPGTAKCGHATGTRLVDGIRGASAGTATAVVLGKDDWEAPEGVHASPEMTKGLESYIRNTNFPQRKTITKPVNPPSEAQQLLW

SEQ ID NO: 957950 - protein, 77 aa, Homo sapiens
MALVVGDEAMKIFLDEYSEHEHAHLTVALCGVECARSPAKLCCPLMLVDGHLKRLHVSLFGGNWNLDLSLAGFQGEI

SEQ ID NO: 957951 - protein, 85 aa, Homo sapiens
MHDIKIQTEAVSQLMRMTACPAKIPDEEAQKPEGGLDDEPEYCTCIQRQRNLRLRLKAMDGEWEAPQHCEPIDVSQVFYVDVRQR

SEQ ID NO: 957952 - protein, 63 aa, Homo sapiens
  misc_feature (3)..(3): Xaa can be any naturally occurring amino acid
MAXPKWLYLNCCACEASGGLDENGCHYEGYVADEKKIPLSAIRARVVRKANGACNNNCFKGIV

SEQ ID NO: 957953 - protein, 104 aa, Homo sapiens
MHTNPKTTRYLDISSSGDQIGMHIEEVVPLNHRGMRRKRSGHLLHQSSRRPPSTLRIFKQDGKRPQKLKQEEDAAKDTMALIHKSRNIGQGGKSKMRETDRKLN

SEQ ID NO: 957954 - protein, 38 aa, Homo sapiens
KRSQGMGRAHAGTQACKAGQASDSSTGFVSFPADVLQH

SEQ ID NO: 957955 - protein, 56 aa, Homo sapiens
GVDVDGTDWTGEDDALTPATKTSLRHRRHADTLNVVERDVGTNLSDHDNSRTTDKR

SEQ ID NO: 957956 - protein, 35 aa, Homo sapiens
MGSGLTIGTDSYLVTRGLVLTYWRVDLRTYVTWVD

SEQ ID NO: 957957 - protein, 39 aa, Homo sapiens
MFPLCLSCHRGSSCSQRRGPFRHQAAATVYVGTGTVQHF

SEQ ID NO: 957958 - protein, 52 aa, Homo sapiens
PQITWPPMVLKLRVHRLRRTHSSTPTYFPHYTSEPGELRLLDVDNRVVLPIE

SEQ ID NO: 957959 - protein, 34 aa, Homo sapiens
MASLAFQTSRYKLHYYETPTGIQVVMTTDLGVGD

SEQ ID NO: 957960 - protein, 53 aa, Homo sapiens
AALPASPSLNSDPRLALILGINTQTCTSDHPSHCGNIFKTHKLQAPKGNCSSQ

SEQ ID NO: 957961 - protein, 70 aa, Homo sapiens
SCRDEVAKKYEEVICPSQRVEVLCPKSSDPTPPHWRPSSLAKSLLFGISPQPLSLDLIHTFSETLIFSVF

SEQ ID NO: 957962 - protein, 77 aa, Homo sapiens
AQGSMDYTRIHGQVAQAQQHKQHKVFNMPELHIAHARSSTIPSAYGCIQIMLHISPYTGCNDSHLSPLAQHIAQHAP

SEQ ID NO: 957963 - protein, 94 aa, Homo sapiens
LRYTFSFFQTSGWDAILSHIFPCPQACIPAGNQGHRHSMSATVQPHGFHVAQRGHGILSQAQPGSGSMAHSSSAQGVAQYDSSSSHTAAAAAYF

SEQ ID NO: 957964 - protein, 61 aa, Homo sapiens
MGGQEARGGSWGEHQAGYQASAGKCGTRGLSAELLCCSCSWMSYGDGAGDSRAIKVPYSYE

SEQ ID NO: 957965 - protein, 95 aa, Homo sapiens
MSNLPKSIDLQERVVEYRYSMSSVLKAEISQDIDHILETLSALGVDLGGTNLRVAIVSMKGEIVKKYTQFNPKTYEERINLILQMCVGSCSRSCK

SEQ ID NO: 957966 - protein, 109 aa, Homo sapiens
TRRKRCKLNQPIVDILSTGSTGLISMVYNMYCNLLEEMVVLLFNDPHELPSSMRRVQSKNKLTLSERIYATYLYTLRSSGVRATYSLSISPSIRFLITTGLGKNRAFNC

SEQ ID NO: 957967 - protein, 118 aa, Homo sapiens
SRGEDEEEEEEDEEEENQSAPPRTTKPQTDARKRKRPQGLKTKRARKRRRSNSSVTTETIAETTEVLNEPFDNAEEERPMPQPEPTCETEAEEDGRKPVPRKAFQQQPVKKRQTEEEQ

SEQ ID NO: 957968 - protein, 47 aa, Homo sapiens
MRHEEDNDKVRAATEDLGLEILRDRLDVDLDGGEDERLPSGELVPEK

SEQ ID NO: 957969 - protein, 30 aa, Homo sapiens
MLSPRSRRVIFDQENGATSTESSPSRLIAA

SEQ ID NO: 957970 - protein, 38 aa, Homo sapiens
MTFSVTRHEKVAQQPIGNLLMSGHRGLICPQHLSAQPI

SEQ ID NO: 957971 - protein, 59 aa, Homo sapiens
MTVDEVFHDTLIKDMLQPDENLHCLHNLEDTIVNGREETHRSVRHPEHTPGRYATPTSR

SEQ ID NO: 957972 - protein, 137 aa, Homo sapiens
MSARTDNAIKNHCNSTLCRKVEQEGYLQKSSKASQPAVATSLQKNSHLMEFAQAPPTAQLPATSQPTGNNDYSYYHISEAQNDCSHVPYTAALHVNIDNVPQSAAAAIQRHYNDEDPETDKRTQAFELLLMSNENEL

SEQ ID NO: 957973 - protein, 81 aa, Homo sapiens
SSVPESTPILGAYRASASETVIIIGRVAQGHGYVADTIYPVRGIIPTERSLGNVYVNPSRHITFNAPTISPLSVRNNTQHL

SEQ ID NO: 957974 - protein, 71 aa, Homo sapiens
MVRLVHLSGARTERLKRAKAARKRKNLEIFCGPTSKVDLRRVEDILKNDDQISTLINNAGYGVSSSELTSD

SEQ ID NO: 957975 - protein, 125 aa, Homo sapiens
EKAHPHTPDHVMVQMTTLESSNRGLLGSANAPKPKIHTRSLTDLTLMNTTPWHERSPTSTWAARVVSANGKYLLTLDKPFLEDLISQTDVGGKYLKLLDDKLSPTATSDEARVLPDAWKNHLKAR

SEQ ID NO: 957976 - protein, 53 aa, Homo sapiens
MLTELTVLDVSDRAEDRGIEINQRITMGETVREVRVRQRAFTQRDDICAIFDD

SEQ ID NO: 957977 - protein, 35 aa, Homo sapiens
MAVGSLFGVVDTLESLCQDIHAPHCGLDCRMVHHE

SEQ ID NO: 957978 - protein, 118 aa, Homo sapiens
TARCLWAMGFQGLCGWSFRLLQQLLNHLFLRLVATFSEVGETHLPFGVDQVVRGPVLVIEVAPDRVVVIDGYRVSDAELFHLIPDIADDAFKTVFRGVDADYHQVILLYFCAQSLTYG

SEQ ID NO: 957979 - protein, 97 aa, Homo sapiens
LFSENTCDNLSYLERYHAMALNGAKDALDGRIREAFVNSSDPELAIDWLMHSLQGTFFSVSVYSSLDALVLAHPDVVVVLDTHNQLLTQRNDRVEAR

SEQ ID NO: 957980 - protein, 70 aa, Homo sapiens
SSSVGIMIQFAKEACFIITVRNRTMTFGARPNKHLAFASLYGIVDTYLRASARTFMRTIVAEIAGWCNTK

SEQ ID NO: 957981 - protein, 72 aa, Homo sapiens
HKGYSPKKVHYVLIPPNNFALGILLARCLAIKSPRLIAVRHIVTASLLFRAQRPLLSVKDFQHDRRDRTHGP

SEQ ID NO: 957982 - protein, 101 aa, Homo sapiens
  misc_feature (96)..(96): Xaa can be any naturally occurring amino acid
MSNSYTDYSHDHMFLGKSHEEDAKRTLWVVALTVVMMVAEITAGYLTGSMALLADGFHMATHAGALGIAAAAYGYAKRHASNARYSFGTGKVGDLXVLSQG

SEQ ID NO: 957983 - protein, 77 aa, Homo sapiens
GSSRGYLSCCTASFYHKLEVLLQGPPVLASCPEGGSLRRQMENEPPVPGGHHMQAFRNSPFLPGPEIQPFLNTNLLL

SEQ ID NO: 957984 - protein, 155 aa, Homo sapiens
SAFRRAAICATPLTKSLNAAFHWCSCKASAERLNKVYAAPYHQRVGEFAGHELHRRRYVLAEQTRCVIPQGLGAFFELAAQHLEQHQCVFTEQVMQHIARHCRSGQADIGRAMLVVFQQVAVSGLMRIFQVHKHPVLQGAWPLYLIQEARFIRVF

SEQ ID NO: 957985 - protein, 80 aa, Homo sapiens
GRTTVAALLHFAFVEQGTDHHLTGLLDVRCKYVHRLLLGVDAGLEKLAIRDCMSICVTLSSAAVWHRYCAARNAKSKSEW

SEQ ID NO: 957986 - protein, 43 aa, Homo sapiens
MHQLNHRQQYIPPNSTSLTSLSGSEPLHQCHLTQSQHLVAPFS

SEQ ID NO: 957987 - protein, 127 aa, Homo sapiens
ILRISGLSHSCMTYSLPMRSEIAGVDRLCRQIVLALRVHEHSSSRQPRVGTAITPTGRRRYRTSFNSGLADEGLRRRYIRFQQQCLEPVLERNPGEDRDTQLFEVQRKALEHLQWQTGKYGICDFEQ

SEQ ID NO: 957988 - protein, 104 aa, Homo sapiens
LLELASQLPHSVLDACTGQRLLGIKMSIEGSVSQTRCLNDLRDACTGDTLAAEQSDASCRIFSWRSAVLLAGYLTKESPIVEHDALHDDRQYLRDSMTTIMLDD

SEQ ID NO: 957989 - protein, 120 aa, Homo sapiens
LIVCTATITYEKTGGCTKLIKNIEYPVDFELSKELAFSQRVYNKNFNATEPIGSLQWVYHHGDSATGGPYTTDVFQIGLNGWLRIDEQTGQGDQPGTRVGGNHLLNAQTNSCINRRVDLL

SEQ ID NO: 957990 - protein, 49 aa, Homo sapiens
MGLARTFLIAAPLGFISMYIRLKLEDSPEFLALQRAGQTSRAPLREVWQ

SEQ ID NO: 957991 - protein, 82 aa, Homo sapiens
LAPALIWEAGARPEPFAGTVTIETATTENDHDAPASQPAVINKSSPEGWEPLPQAADSIAVFAPPAAARAEPDVMEDMLDES

SEQ ID NO: 957992 - protein, 77 aa, Homo sapiens
SEAQCFGMPDPSMSFARRAAFGCILNSAVKRPGYLAQIQMTAYDTRHVFRERVHEEVIGGKWFGCSNAAGGLPVGQY

SEQ ID NO: 957993 - protein, 128 aa, Homo sapiens
LIHALRPVIEWSDNLFEFFLSQISVVHEYQGGLMKRNDLFTIEYQLHGEPKSFIVRAPRMDNAEAWHWASCDADVPVIPKFGQHTFKRVSKPMAEKYGITQVAGVARHRLNGRRASEDEQSDSCLHNY

SEQ ID NO: 957994 - protein, 96 aa, Homo sapiens
LKPAYFLDLRHKKRRPWTSLDDEVVEPGGFEPPSASTPLSVTTCLAVSIKLTLSDPKGRVLWASCVSFSRFVHNVLHGDSVLYDNHFGFTDIRLVI

SEQ ID NO: 957995 - protein, 109 aa, Homo sapiens
ESTPQLARRQAPLPRPANLLGQWTSGSAASTNGLPNNTHTALNSGLRNSIIAKTPKVPAAKCAARHALTARVGRAFSFGAAGAACVSWPACMDAGRKPMDRSSHIFSGG

SEQ ID NO: 957996 - protein, 109 aa, Homo sapiens
RLGKTTDAQYSRRRDDGQGGFQYLHYKPPIALVVSELYPQRTLMRRYRPVLVFFGAKQHEVFAEFQLLSHERQSLIVLPPWESSDIELHIARRVPESWPSGCNCASMAK

SEQ ID NO: 957997 - protein, 194 aa, Homo sapiens
  misc_feature (166)..(166): Xaa can be any naturally occurring amino acid
TLWIPCLLSLGQLSWLARLMASVSQDSNHGAVTENSLAEGISETLRTLSEMRHYQRLPDYVEPICALNIRGKELCAAVLGQHQYRALSESMLTTREFLKEISYELITGKVSFLASHFKTTSLGDDLDKLLEKMQQRRGDSVVTPFDGDLNECVSPQEAAAMIPTQXPGLDNETFHIYQPQLTVARKLLSQVCAI

SEQ ID NO: 957998 - protein, 137 aa, Homo sapiens
MSFPKPRRSTSTLPGSGPSAELHASYSQSNGHTAAATNTPMRQMGERISSSSADRGLYIKKDLNRIAIEHLRLAHIRTKQAARQTALPRLGPARVIDRRIHIRIKPILIRCNTLPGRFRLLTDQTDTHDGLHTLEAI

SEQ ID NO: 957999 - protein, 134 aa, Homo sapiens
HAWRVDSEESLVKAHLHPAIPRQSARHQRCNAAAAYTWAPVCGDRVTRPTFTGHSGPNCHTRSSWNGVSPGQVGVAVLKGGLISHHVFIGFIARLSLVTEVNDTREGCEFSCEFWRDTGNLSQLLRGNIGLMHR

SEQ ID NO: 958000 - protein, 116 aa, Homo sapiens
EFAAAAMAEALSNTSSGFKWEDFQRIANKPGVHYALAGFSADSTGDNGVGVVQAVIEALNNPQSTTSPCNECHGAGFCMSIVQEEMRCPCNAPIQLSKENAMNNLCSGYLSRETLT

SEQ ID NO: 958001 - protein, 81 aa, Homo sapiens
TPEDEVGSTILQSWYFDVNSTTMTPISKRKNKRYDKKYAEIGRARWRMPVILPLWEAERGGSPEVQEFETSLANMVEPHLY

SEQ ID NO: 958002 - protein, 67 aa, Homo sapiens
MRSAWAGRMQASSMHGGPGISSSTGCVIFRADVLQHRSVIQIQSLLCAVLQAHTGPSPGTSGTASIT

SEQ ID NO: 958003 - protein, 102 aa, Homo sapiens
CESTLGVITQKVREQFYELTRKALAQFLNDQINDRLKSAMSGVIQPSLASIPVTNSAKADAQERDEAEDKILTTLEELEGYHIVRAVVRSVVDAKRIVQRGC

SEQ ID NO: 958004 - protein, 53 aa, Homo sapiens
MSSFTRTLLIASAPSVPTTSHFQPHRDESQKENALTHIGVCVCMCVCVCVCVC

SEQ ID NO: 958005 - protein, 159 aa, Homo sapiens
  misc_feature (156)..(157): Xaa can be any naturally occurring amino acid
RYPVKAHPHSMNSPADRRPQRIIFATASAISETGPPSEPASPAAVSRPCRRIANSMRYSSSSPSNNNAAVLAHQLGHVGERPHAILNGAEVTLWFTRNFQSSPPDLFGAVRNRHSLGTDSANGLAVADDRKNLLIQLNCPLRPGQCHVQQVQLLTXXQG

SEQ ID NO: 958006 - protein, 97 aa, Homo sapiens
MPRVCGRLELGNLGVHLNGPLSEDNTWSVGLTLPRRIYRHDNNSTKTDTIIAQTNNKERRILRPRHSGSMPCKFPCTLGRLIVGRTALSHQEFKDHA

SEQ ID NO: 958007 - protein, 104 aa, Homo sapiens
LVLNAFSHGSSNAGGTFLSHYAVHHTSSFRGDAERHRVHSHAELGTINDEHHLNRPHKKAAFIKGGFGFRYGYACGRMCGNRITSRIDGELGNNITKTVNADTF

SEQ ID NO: 958008 - protein, 115 aa, Homo sapiens
AEPPESTPTLQPLIERLRDSAKLGLRIKPFPVNVREHGRSGIGFVRTRAERYTLSLPILGCEFVIAARGADEKSVLAILQRSVQRLVMRTPSNMARHLETISLAGQPESCLQQSK

SEQ ID NO: 958009 - protein, 70 aa, Homo sapiens
ARYPVKHTLGGACVIFADRRALCAFLNYLPSSLSIGLSSAFFRDGRDCLQLFEIVCINGVSVQARSGCAS

SEQ ID NO: 958010 - protein, 35 aa, Homo sapiens
ALEILRVSNIIIPTIRYAINTAILTSTGLVTNEPF

SEQ ID NO: 958011 - protein, 32 aa, Homo sapiens
MLTYNHTSESLPFELCEHSYLHTDEGIRSAHW

SEQ ID NO: 958012 - protein, 124 aa, Homo sapiens
  misc_feature (34)..(34): Xaa can be any naturally occurring amino acid
RLGKSACGYAPPSPIKLTGHFSCPSSADVIEKHXLKLFQSNLVPADPEVKAACRVTQTLREQNGQPELGKPELTSKAASGQVVGGDPSQEEPINLLCRNEGLCCASRRASWRRQPLEGSHLLPK

SEQ ID NO: 958013 - protein, 59 aa, Homo sapiens
RYPRESTPISTVFGSSIGIVTCSTDSLTGTTLHPYKTYLERFGCIRTHPFFGDRFFKQA

SEQ ID NO: 958014 - protein, 112 aa, Homo sapiens
MVINVISATVGQVVCCDRSLASLTVELDCALSHADDMQDFSRRRIAVYLQTRQIHDLGHMLNRLCLPHSYLASTLPSAMVEIPIVIRRPRLAQHLGDLVQLITVVPCHPRVA

SEQ ID NO: 958015 - protein, 33 aa, Homo sapiens
MDNTCTGRTHRLQELPSKYMMKFLEITRFTYSL

SEQ ID NO: 958016 - protein, 57 aa, Homo sapiens
TKSCTEAEKGKQRRRRNPSSFVGFDVQNLLPFSLCAYEPVTTTATDILPCRCYTESQ

SEQ ID NO: 958017 - protein, 38 aa, Homo sapiens
MHAQPTTATSRRRNPRSFVASCQPSCLRLCALSQSHHA

SEQ ID NO: 958018 - protein, 48 aa, Homo sapiens
MALPYTTTHAQPDVLALCLLNGNYSPPLCGGMSVMAESSPSVPDSFSI

SEQ ID NO: 958019 - protein, 45 aa, Homo sapiens
NLPSAYHNYNHSLLVTIHVAQNHYTIILTMPLTSLLCGSDHIKCL

SEQ ID NO: 958020 - protein, 101 aa, Homo sapiens
GPFTEAHSLIEKTKQIIQALLYHTLLLGSLYNPTYKPQRYFESILHHFRRHLQLNILSSHRLPRNFTVIIELKLILTTLHSESTRRNPSRRQTLHGNAKPL

SEQ ID NO: 958021 - protein, 64 aa, Homo sapiens
GAFYGNRGTRNQAAEAEKGNEKKEEPKSFVASDVQHLIALRPVCLVASPTHAQRFLPVDAHRVP

SEQ ID NO: 958022 - protein, 71 aa, Homo sapiens
AATVLRKQIVRKVEHHDVQSVDSLWLQKMLSLEMPSEMVKGDSKVLLRLVERVTYETQIKFNKQCLNYLVT

SEQ ID NO: 958023 - protein, 35 aa, Homo sapiens
AATEKGKREERGTQVAMWLRVNHSCPIACVPWSQS

SEQ ID NO: 958024 - protein, 48 aa, Homo sapiens
HVSVFRTTELGQKGTGGLPPNLIPSEQRRPQMYLDTLGSEKRGRLLLD

SEQ ID NO: 958025 - protein, 70 aa, Homo sapiens
LILNVCPSYQKELSLSCTLRATCTKESDGVILHTLQKTAALASIEARLSLHAGTQGYCLELQAGTGSRGP

SEQ ID NO: 958026 - protein, 107 aa, Homo sapiens
  misc_feature (106)..(106): Xaa can be any naturally occurring amino acid
MAILDKPAPIVLAFQGLELGQHPFRCLLTHQLLTHLALVVDDEGHRQGLTARNLEDPVRVLGQYRELDPQLVAGGLQFLTLHIVEVDAEHPDILAFQLFCQGIELXD

SEQ ID NO: 958027 - protein, 65 aa, Homo sapiens
VRGDLVQRWFFSHDDDRLKLTVYFPRIAVDNKFANIKFRHYGFPFKVTALMKPDPRGANFHGGVL

SEQ ID NO: 958028 - protein, 84 aa, Homo sapiens
SSLTWTSVMKCLHGYPRLISASVGTRGNARNLPADVQCIQYLFNLIIPKMGFALLENGKCDGQLVQCISQYQFRHLKYAHGCAF

SEQ ID NO: 958029 - protein, 75 aa, Homo sapiens
MYPVGLVHLYRTYCCNVSCRDGSPRENILKYCILQQSAPLQNILEYCIQLVCLACIAHSAALEQWIMRFCNTPID

SEQ ID NO: 958030 - protein, 111 aa, Homo sapiens
KHTLGLCLSVSRTPLCLSLSVSVCLLVEHLSVFLCRSLSVSRTPLCLSLSVSVCLLEEHLSVFLSRSLSVSRTPLCLSLSVSVWLLVEHLSVFLCRSLSVSRTPLCLSLSV

SEQ ID NO: 958031 - protein, 134 aa, Homo sapiens
GPDVAVGQSLPVRVVAKLRARLQESYDNSASDFVKENVAAFVNMTPETFSGVYANAIKETHWLSYTNFGALVSGSNFSTDALANGDTDVFINIDLKTLETHAGLARVVIGSFLNAIYNRNGAMKSRTLFLLDEA

SEQ ID NO: 958032 - protein, 67 aa, Homo sapiens
LYLFSRQVIGWAMKSRMCSDLAIDAMLMAVWRRKPQQQVMIHSDQGSQFSSSDWQSFLKANNVIGSM

SEQ ID NO: 958033 - protein, 56 aa, Homo sapiens
NTSPEPLLMPSFIHNIERSLIDTWRWGIHYENLTSLLYAVTLSIPITSFDSCRRSW

SEQ ID NO: 958034 - protein, 135 aa, Homo sapiens
HTSPEPHLMPSPINNIERLLIDTWCFLIHHENRTSPSTQLHHQSPLQPLTAAAVAGSLGVWVQDTTFSTLSHLFTLHFQFCLAQGLLSLCGSSTYMCLPAKWTGTCTLVFLTPKIQFANETKQLPVLLMTRTLHY

SEQ ID NO: 958035 - protein, 37 aa, Homo sapiens
PIAGEAVWFFGGKKTLQLFELPEFLRCFFLSCVAFEV

SEQ ID NO: 958036 - protein, 74 aa, Homo sapiens
MRSSIQQAVRTPWMSPQHCFRMAQKLVNSYTLVFKLTCWPDLRPLDFCRSAFRLPVLFLQLTPKHSRHPTCYRS

SEQ ID NO: 958037 - protein, 91 aa, Homo sapiens
RHRLAQQEHGGGHNHCSASPERRRSVMRFMFSKSKADASHCVCSMSLTVVAELSHQCVVGIDRQQRTATPRLSTSDHTMALITRSLISHKT

SEQ ID NO: 958038 - protein, 118 aa, Homo sapiens
QSDISSKNRELRTKTHLTSIENAYIYRRKCKPVHNSKPVTDHGVLAKAISSDRKLGSYGLEFPTLTDPQDKTTGSCQTLEKSQNTQLCHVNTKGNSILKYKVKISNKFYNPVLTSDTS

SEQ ID NO: 958039 - protein, 56 aa, Homo sapiens
MQSCSYMCQITQSGIKERNFRAKTIELIEDKRAHLHEPGFGEGHKVNQNINQNTYL

SEQ ID NO: 958040 - protein, 79 aa, Homo sapiens
GTRRIMQQKQKKANEKEGGTQVAFVASMIQPIICHSPVMPGASPTTLAYPPVVHTGPSTDGIPFALSQQAGSHLVLPDE

SEQ ID NO: 958041 - protein, 69 aa, Homo sapiens
MIYLHSSREQREPPSTLADGESELVSGFKTEYAAGPFALFFIAEFTRLIDISTRLHEYVLPRNNLFRYA

SEQ ID NO: 958042 - protein, 105 aa, Homo sapiens
GRPSRIPVHCEYYLFRMHTNRHDDKLSSQTCTKKHVIFKSVLFLHNANLQYSIIIIWYLSQRRHLDSSSLKHLVPSLSSQAEERNSKSTYCFFCQFLCSKIHIRT

SEQ ID NO: 958043 - protein, 72 aa, Homo sapiens
MILCIKSYSQEYHTINGHNAELRTALSTPEMQDVPEFQDWNEERNFGFGQIHAVAVEISDQDQEVTLEEDLM

SEQ ID NO: 958044 - protein, 59 aa, Homo sapiens
IYAYISIKAIESAGKFPSSLGLSVLFLSSPSKFTVSFLRFFSDGICSLFGLVFQVLDHT

SEQ ID NO: 958045 - protein, 36 aa, Homo sapiens
DSSRIPTYFYVVLVKSGALYEGIGCNLRCKQSFSEE

SEQ ID NO: 958046 - protein, 70 aa, Homo sapiens
DITCQQGAASDGVLQRPRKQLGNPCNCRRNGRRTVPRSRCPVTDEEESSVWTDNSCVGELERSRQEDIPH

SEQ ID NO: 958047 - protein, 132 aa, Homo sapiens
ALICGRLRIPAYRATAHGRRNTDLLTKLTRDLRSLQRIGPKRPSYRGLGELHGPFSQVEDLERVEGITGKQMESFLKANILGLAAGQLLWRLLTVVSSLRLFKFLYKPVLCTYSFCSGSLRMSVLRIRSTEL

SEQ ID NO: 958048 - protein, 121 aa, Homo sapiens
SQSDRISDPLIRNTLIRTLKSPLSESSRVQNPLQLGQNFECTKTRNTLYRYKIYTYKNMLTSLRKTDWPMLPIQYRSKQNAVYTPFHTHTIATSSCGNYGTKATMQRQKCQIPSYTNTNTH

SEQ ID NO: 958049 - protein, 48 aa, Homo sapiens
TLARIPHDVSHSPAGFFDDVQSEENSHRDCTHQRSHAGLWDHVTVLRD

SEQ ID NO: 958050 - protein, 57 aa, Homo sapiens
SGSCSWIGLVLERTLASSSLELSTRINFEGCTPSSGEQADIILNVFAAAPLSSARRC

SEQ ID NO: 958051 - protein, 51 aa, Homo sapiens
MVVLIFHDYKRTSQIHAKSTVQELITFLNAFYATYVYTYDPQVFVPFRVPS

SEQ ID NO: 958052 - protein, 47 aa, Homo sapiens
MQAMAEKRPEIQMIASDVVIYDAMMPALKNAKKEGTHHAVVVLPKRV

SEQ ID NO: 958053 - protein, 112 aa, Homo sapiens
DTPACAAQASAPFTGADYSGRYECTGPGKHIGSYKGVVDMALDAKQSTGKYAAYTFTFTLYLEDKSRYDGMATGTSDALGVYFAHTDPVLKDFGVGVAQMTSTPEGKVSFVK

SEQ ID NO: 958054 - protein, 35 aa, Homo sapiens
RIPEEAQEDELRKKVYRRDEEGEGDDGYEQIFQLM

SEQ ID NO: 958055 - protein, 74 aa, Homo sapiens
GHDEPFTSQTYHLMAARDRKDMILQTHDATQDFQNNCRMKESLIGSPDPMLPSYKHGYGIVFVHEAASVHKFDE

SEQ ID NO: 958056 - protein, 120 aa, Homo sapiens
MTVYSRVNEGYMLLMWWVSEPHCVVGNGTTRLDKKRDLQMRDARRYYTLFDYYTTRSRGARNEQRQLVVHYADKAASVCIVISKQKKRDRRCLEQKFRKSFIGKTQNIDYEAQRNCKDQD

SEQ ID NO: 958057 - protein, 72 aa, Homo sapiens
PGRTTQACKMNNDKSEAGAEQQLRERTMSTNVTDGALSGGARMTPAERAARPYLALALHCTTLNDTGARLNP

SEQ ID NO: 958058 - protein, 89 aa, Homo sapiens
MERTNKQKWNEHGIQVIHDLFVYGRSGDKTIRIWDVRDYNIIATSEHYRERTYNNQLRVLTGQTICCKQQGMMWLTLYLTANDTPLPYS

SEQ ID NO: 958059 - protein, 57 aa, Homo sapiens
AVTGWCVDQLVTRVSVLGPASQQGSLCSEQSVNRVRRFSDQSVSRVSVLGPVSSAKG

SEQ ID NO: 958060 - protein, 35 aa, Homo sapiens
MRFVPHALYYSQQSMRNKSAYFAETSGSFEDALPR

SEQ ID NO: 958061 - protein, 128 aa, Homo sapiens
LQQLLSNKVTTRQLQAGLELLTSGDLPALASQSTGLTGVSTCSWPQPSLSTYTCVDGINMHCPIIIAQHMQIFHHHFRISSNHQAAATCGFHPSGHSTQPAISKSTFRAHCTSQYSIKTSVFRSIINQ

SEQ ID NO: 958062 - protein, 93 aa, Homo sapiens
CTRVHSVSLYDDSSLTPLQIPDARVEQLGESRTYEKVINSIRHGVIETRYALYPQHSGAVVIPAQTFSATLVESRPPQENTLQGTKPGKMIHV

SEQ ID NO: 958063 - protein, 69 aa, Homo sapiens
EGEGNEEKVRTSTVTLRSTVPEVLNAQRRERPVKWAYHERVYSHAQTQLGITAHTHPIFKVCVIKAPLA

SEQ ID NO: 958064 - protein, 63 aa, Homo sapiens
TRASGSAKDEDVFDLLLEPHPHISGNRPPGFGDGLTDSINLGHVTTTLYTDTDVYTSKSLLAE

SEQ ID NO: 958065 - protein, 34 aa, Homo sapiens
KPAMTRKQLLPGNSFDQETAIDQETAKSGIRFDQ

SEQ ID NO: 958066 - protein, 64 aa, Homo sapiens
RVSEHCVEVVTLKIQLECSGHVCLRHSLHWNGQPVFCFDVSTQCAVLHAFSRFLFQNQSLTEID

SEQ ID NO: 958067 - protein, 71 aa, Homo sapiens
CSISSRIPVYVWYATKSLEINPHILCPSDSLQTDAEGYQNMPLPNVLLWHRDYSELKATEKKQMYEKLRIP

SEQ ID NO: 958068 - protein, 38 aa, Homo sapiens
YRSMGHTCHGLSQSSGTRNVLQAMLLQMLEIVVIWRPA

SEQ ID NO: 958069 - protein, 71 aa, Homo sapiens
APPILFPFIPLDMTTRVYGKRKLKGKLNTDRDINKSGPLSLTAPERYAPFTIFTDRYIAACLFFHLLPFID

SEQ ID NO: 958070 - protein, 105 aa, Homo sapiens
MKGSHDQQTFLLVIGHVAQFLARLSSNASFTPAARAPVRKSPPEASAANPPIKACEPNLGNATFCKPVLGNIPDQVESISRKCVSQTTLQRVAKTGFAPERPIYQ

SEQ ID NO: 958071 - protein, 32 aa, Homo sapiens
QAVEQLAMVHRFRGAVHEIPEDVIALDVTITS

SEQ ID NO: 958072 - protein, 61 aa, Homo sapiens
YLADQTSRCSLLGLLLVTWLVLGTWYWWTTNLHWLDALRHVALNVTSVVTTTGFALGQRIV

SEQ ID NO: 958073 - protein, 105 aa, Homo sapiens
HGTALRRCFSFSHWRKPPPSRRQRRPLASPKENEKRPPFPSVAGNGKGRFGVRRKQREKIDDGRIDGQYRCSLGREGRTLAFSWRTARWKARFRRLFRMSRPSRR

SEQ ID NO: 958074 - protein, 97 aa, Homo sapiens
QQQGGSDMLVQLDNGSSITIKQGETMGTVTVPAPTDDVFIDKSTQTVKITGTTGGNFEGVTITPAGATTTINDTIDDVTVVLKATGSVSEGGQIVYT

SEQ ID NO: 958075 - protein, 122 aa, Homo sapiens
LQQDKGMTAMAPRVKANEVMQWAWKRLIDRQSTSMPARTKSCLERSCSGELYRNLLHRIPGFAQFIRILVQPVDGIEQALAQHFIAEFFHGAHQVEGRGFVIFRDGIQGLAQVSGKARLSKI

SEQ ID NO: 958076 - protein, 62 aa, Homo sapiens
MADVRGDQVDVLVPSCGFFSQHVPLLGGGHRDFHGGAHAVELHDQAFGGDFFPEHRFVAHHY

SEQ ID NO: 958077 - protein, 51 aa, Homo sapiens
DLTHLADTALTSILNPSRAQLRLQGYQKTSLTAPSLSVGRHQQARWWVRAR

SEQ ID NO: 958078 - protein, 51 aa, Homo sapiens
TRTLHTHLVMYIGTSYVCTMLMSRLRSLVSNVKKSLRAAYVKPCVLRDSGV

SEQ ID NO: 958079 - protein, 110 aa, Homo sapiens
MADSSSEMMIGTHEDMTHLDSPALMIRRRYFRLELRKEWSPCSSFSDPESEKRNTCVLREPIVAQYPELTRESEKIIANFKKKMKVKNWGTLFELHRTTFGKVTKNSSSD

SEQ ID NO: 958080 - protein, 51 aa, Homo sapiens
MRVLVCTLLQTALRMNERVLGAERRSSDPERCVDKTADGGMKSDLKEDELV

SEQ ID NO: 958081 - protein, 62 aa, Homo sapiens
DLEDPKLQQEYYNLPMQQMINTDLSRILKGPEIKEPLSTRKKIIQSPKEEPLKILENLCWEL

SEQ ID NO: 958082 - protein, 69 aa, Homo sapiens
LTLRISSSNKIAAARQRELCTYQVPGPAPGPNSPALPLWICTLTLDSAAQWEEQNLLLHATKFNKTVLL

SEQ ID NO: 958083 - protein, 42 aa, Homo sapiens
MASILPTLRVKNTADSTTPVNTPFCKVMGAEQFHFRPEQFHL

SEQ ID NO: 958084 - protein, 62 aa, Homo sapiens
VELTKVIIIMTMVLLSKTADCFWQEQRSATPAEALKDHSTHHLTPMTAAASRVGAQPSLAAN

SEQ ID NO: 958085 - protein, 57 aa, Homo sapiens
PDSSGCVRRREIQRRHLLNHRQTREYEPNQSSADIYGAICASRPGSAGSAANTRYTC

SEQ ID NO: 958086 - protein, 66 aa, Homo sapiens
GPKLQQEQILVSTYVVEIDAKTGLDAKREDLGLNLAKEVRKGLKVSDKWAGEQQGRLAVENPGCAI

SEQ ID NO: 958087 - protein, 53 aa, Homo sapiens
TQQDTRALHDNDPRLRRHSSSTLMKVSAEISSCSIGFFQGHADFERDHIRQAV

SEQ ID NO: 958088 - protein, 45 aa, Homo sapiens
MKHGARTIKNDDRTYNISRRYAMDMLRYIIDEHVTGLNASAGDPL

SEQ ID NO: 958089 - protein, 101 aa, Homo sapiens
DLEDPPTRAAYFIAGKLGRNRTTEGLAGTPSPGMTAKSQGLSGGSGRISILPPLVHPVCCGDQAHATQGQGRKQSFLFSSGLQAECPMLCSDSMQTFLLGA

SEQ ID NO: 958090 - protein, 89 aa, Homo sapiens
SSNKTSSCTPGPPTVVPHSIVSPPEEGQSKTAPKFSGLRYSDGMLLKLQEAATTLSLQIEKPSWDPNLQATLEGYGNHCNPRTAERWAS

SEQ ID NO: 958091 - protein, 46 aa, Homo sapiens
HNSSELRELYDNRAGFTIGNNTSYSRVTLTCTHDESNPRLKYPISE

SEQ ID NO: 958092 - protein, 52 aa, Homo sapiens
AHLRCIQQLNDLITERSSEMSSEDEATPWPPDTASADRMVLHHVPDDPKFIE

SEQ ID NO: 958093 - protein, 59 aa, Homo sapiens
CASGMARCSEKLDYTHGVFTVEQHIRGKWVCEDCETLIQAPVPAQVIDKGTPGGSSSRR

SEQ ID NO: 958094 - protein, 44 aa, Homo sapiens
RTRPNEVPGGEARAFCLLLRFSKVSRRQGGTLSGRYLNNGYVRG

SEQ ID NO: 958095 - protein, 69 aa, Homo sapiens
SSSKIPVLIAYTASGAFSAFGQSCMSRASHCKGEVTNESRAEEHMTTRSDIAVQDARREEEIREEARGG

SEQ ID NO: 958096 - protein, 52 aa, Homo sapiens
SVQRTVRNCDDQIGRLNLDLTGYRPSRFDPGIHAVHKNSRVEIFVIDGQGGE

SEQ ID NO: 958097 - protein, 75 aa, Homo sapiens
MMLDGANKSINRITIDGDTSHQTTADMLHRHRTRPILPSNHFHRQVHCSRALKHGSVCQCAWHVAQAIVRDGEGA

SEQ ID NO: 958098 - protein, 64 aa, Homo sapiens
KIQQTPMHETRIDETYKRLDRRIPLRRDYTLRDFGYGPGVASGTFRYGYSDNLTLESHAEASSE

SEQ ID NO: 958099 - protein, 78 aa, Homo sapiens
MSSSGVNILEKPPRAIDQLHCARREKMSALIGDLPRMYELKPCDPTAYRQQTRRSTLIVAALFLALAMLLSSLAVMLF

SEQ ID NO: 958100 - protein, 82 aa, Homo sapiens
APLERRHRIEHHRAARRAWGRRAALRTTRLDTDRHAPWKYMSEHKASGSQAYVVMRVIKRACAPTDMGTLTKAIIETHADEL

SEQ ID NO: 958101 - protein, 38 aa, Homo sapiens
ARTLVVIVQQPEELDRLILKPTLHTMFVLFSPVSLTES

SEQ ID NO: 958102 - protein, 48 aa, Homo sapiens
TLEDPKLQQRGDYSVWPLRKTEKKWRVPATQQALLRLLAEDFNKFGRS

SEQ ID NO: 958103 - protein, 134 aa, Homo sapiens
RGPRSVMVCGGDAVDICRHISSIVSQSPSVIQSLRPVLMSSIIPLNISLGSECDKLPASIRLSTVARFSVKTRSFLSAACPFLSDCLGGPPGKCLLDSLTFYSEDLYHNCFWEDYDQIIVFIFLFEGFNICNVF

SEQ ID NO: 958104 - protein, 50 aa, Homo sapiens
PQTYARATATRDPSHVCDLHHSSWQRRILNPLSKARELNPQPHGSQSDSL

SEQ ID NO: 958105 - protein, 85 aa, Homo sapiens
MLNPLVIVAGVSDVEDPTEAAVVVELEAIKLCTLPTWIGAGCKFKVVIEGERMFETRYCSDSALMIRFEPAQGDLEVSKTLNELE

SEQ ID NO: 958106 - protein, 94 aa, Homo sapiens
  misc_feature (32)..(32): Xaa can be any naturally occurring amino acid
KRTRSDVLVRDPSVASQLLRGTVRHATEIEHXQVCACLRCPGLHARYTDWLQRVPTLRRQARVTRGTPFVMGIGDCNYSPMNEEFPVSAGHKLA

SEQ ID NO: 958107 - protein, 110 aa, Homo sapiens
VSIRFTAIIQSTSRVLKEFATFDGAGTTSLEWGGYPILRFDELPQVDIQLLDYPDEPPMGAGESASVPSAAAVGNALFDALGVRMREVPFTPERVLKALESAAQVKEDKA

SEQ ID NO: 958108 - protein, 59 aa, Homo sapiens
  misc_feature (36)..(36): Xaa can be any naturally occurring amino acid
  misc_feature (55)..(55): Xaa can be any naturally occurring amino acid
ELEMEDLILPSGSCFGVGVGKTGNPLSSAQISYLSXSLVGVSKDGSSNQKAGLCXLKLN

SEQ ID NO: 958109 - protein, 53 aa, Homo sapiens
  misc_feature (1)..(1): Xaa can be any naturally occurring amino acid
XENSKYYVTIIDARTRDFIKTLLQDISADVLSDCCCWYYGEFEAGISKNGQTR

SEQ ID NO: 958110 - protein, 68 aa, Homo sapiens
VAGASESHLTDLTLLSSFILASRLTLSDERINTLESLHSINHFTLYKSKSLGYLFFSLMHNTILTTTG

SEQ ID NO: 958111 - protein, 66 aa, Homo sapiens
DLSELSGSRHLGNVSRLNAVYSMQHGAMDAEWMQWIAYNVAQWYLIECRGSHAACLNAVDSMQSGA

SEQ ID NO: 958112 - protein, 34 aa, Homo sapiens
YYGYQSVLLSIFAGDTEALKPLIVPNWIIFLNHL

SEQ ID NO: 958113 - protein, 65 aa, Homo sapiens
NQLGTVLRETDERRAGGRIPGSRGGSVKVSTDYPEASYAPTVLRLWGQKKFLSALSAFHESHGVS

SEQ ID NO: 958114 - protein, 118 aa, Homo sapiens
MSTAGLKFNTNWRNRQINRHPDLLQRGTESSVLCHQKTYNHKTKEAMDIQLAAFINCENESSGNSPGKCKAKLAYCGQLIKKLERQEAEERANSRLKVRRGRVQTHKGLTKRPRVSKD

SEQ ID NO: 958115 - protein, 124 aa, Homo sapiens
GRRTVGHTQEALNNAADEVQKLLPAADTGSIKDRRPAHRDMAPVRITRICQLGITVLQWFETITIRDNHRLEICIPDTYSRRTINPCWTSHRCHQPESGHKTEKRIEERKRTRLRSGKLATLEG

SEQ ID NO: 958116 - protein, 87 aa, Homo sapiens
  misc_feature (74)..(74): Xaa can be any naturally occurring amino acid
ILCVCLVAPLIRESCTVNWAGQDWAPSDDEVVSQSPSPHTSDFSDWSSFNAKQYPLDQEEGKTCCPLAGPAFYXQAPGPSFPGRPSS

SEQ ID NO: 958117 - protein, 36 aa, Homo sapiens
HQPLSRSGLPLSEIVRSFGQNSIIAYDKTGAGCVGL

SEQ ID NO: 958118 - protein, 67 aa, Homo sapiens
LLERISLPTDTLPLILYRAFLLKMDRVHIKKIRVALDRRSSNEYLAAVSSLLNSTAHYEDGGGSQLP

SEQ ID NO: 958119 - protein, 60 aa, Homo sapiens
AVSKWISHGLQCTPCSVVTWFLIDCSESPCSVAQWISIECTVFHAACMNAVYSMQREEME

SEQ ID NO: 958120 - protein, 42 aa, Homo sapiens
MRLVLSDDLIPVPCHMVCTGYIEVIGRVEWSSRTGACDRPFE

SEQ ID NO: 958121 - protein, 87 aa, Homo sapiens
LCETLYTVLPSSRDRCCSWVHQSAYDVERTQEVKGLVAAAPKEAKGNLLEKKLGKVKGLWRQPPEKAFQGQSVTMLAAPSAEKSLKD

SEQ ID NO: 958122 - protein, 34 aa, Homo sapiens
LSDELIRTCHMYTRLHRSDRQTSNGRRARGVDRP

SEQ ID NO: 958123 - protein, 33 aa, Homo sapiens
TDTVYLELYIDGLTPAGGSFFIRSNHPSALSAR

SEQ ID NO: 958124 - protein, 85 aa, Homo sapiens
SPLNGSRPNGSRRRAHFGQKPPVEQKGGSFLDLDFQLRIQTVKAGPHDPSDLLGFKQEVSEKLPQGYLACGGQAFIATSLFDPSM

SEQ ID NO: 958125 - protein, 117 aa, Homo sapiens
MSLDTMTEFMLGAIEPPQSMILKVIESSTRRPRRLALHADDERRHPRKSLQVPDDCSRHTTRNLPRAFYPPPDSEADDAHGCHSSALKKRDEAAQLPGEPRVYRTRQSVHPVRRLTL

SEQ ID NO: 958126 - protein, 36 aa, Homo sapiens
SGALLVEVVYSWPGIGRLMYDALAQRDYGVLMGGFL

SEQ ID NO: 958127 - protein, 114 aa, Homo sapiens
SLPLSVRCLSVSELLRRSALNRKIMTRTDIKLMNELLRLGGLQKHLHNQMKDGMTTELSKQFSEVLVALKKAVIQLIYKLCQSGSDDQVNVIIPPKRRDGATSFMKLVAYISVR

SEQ ID NO: 958128 - protein, 96 aa, Homo sapiens
MSCLAFVPVQRDHSNELLLDYLHRCMTDGCSEFKMMAGRTQFVISPNTRVIAIDLNNIMGDDSNAGHLKTGIMFLFAGEVAGGHFVLPQYKDYLMK

SEQ ID NO: 958129 - protein, 43 aa, Homo sapiens
SHRFVRLTCKKELEKSCHSSGGFGLGIWDPKEKVDEPSCQVPV

SEQ ID NO: 958130 - protein, 53 aa, Homo sapiens
MPVLLLTWWGQEIVWMTGLGERILLYAFLRVSWSAAYPLLSNGISLNLYLIQL

SEQ ID NO: 958131 - protein, 110 aa, Homo sapiens
RGTPKGASTRSAYLTHAPTGRALAWKTLLAKPAPRRSWFDKAGIETEALLADQPVMALGKVQLTSRFHEWPVTADGISTKGCLASNVSANFCWFGEAEALDSHTGFGTSS

SEQ ID NO: 958132 - protein, 142 aa, Homo sapiens
MTYPGVSWDIDMEIILPVRVGTHKLAASKGSDFLQRVAMICFDELMALITITSEKRTMFEPKTYQEKLNLLNRQLVDNLLMQLPDQIRLNLKEVTDQLVRSEAIIRMEQVNNVVGPIEIPEDERADNRFMLDLLASNLGRTA

SEQ ID NO: 958133 - protein, 87 aa, Homo sapiens
VNSDIGRDDLRCDPVTAAKRHPTAEPSENRHDQATATREPDRVQATPFPDDKVTMPLRPQQHPTEQSPHQATANTNRQNRGHEIEAD

SEQ ID NO: 958134 - protein, 73 aa, Homo sapiens
RSLQDPPSLFANGFSAVPRVGVARLLRLEACIAACSMLVPFRLVVIYACELTGTGMLAFVILLIANRKARTKP

SEQ ID NO: 958135 - protein, 54 aa, Homo sapiens
RSALRELIASWLISKSMERLTSQLVRVLDHMGRKKFFIKSSGNAEDTYLDAIGQ

SEQ ID NO: 958136 - protein, 146 aa, Homo sapiens
TRIEFVVQELDRLARAQVLEVHITARQLDALDTQWERLGVGIGRGRFAGGDLEQPQQIEFAFLVKQDLGLGFIQFDIRQMQRAGPQAVQLQVQIEAFEAYLLFTWRTDIQPPERELQAVRIEFDTLDMGRGGGVVGELLIGHPQGN

SEQ ID NO: 958137 - protein, 60 aa, Homo sapiens
MSSRIPTCAYFVAYITVLLNDVGLQAEQDAVVTVDPRDLSTYRTGSSRVGMKHRLRSLMC

SEQ ID NO: 958138 - protein, 42 aa, Homo sapiens
YTCRLLHIGSLSFTLTPAVPCDGNTRRCLEIPNLSGLPRTPC

SEQ ID NO: 958139 - protein, 35 aa, Homo sapiens
YTLGSIVKQNSPSYTGGCRDWWRYTCQYGIRTIPR

SEQ ID NO: 958140 - protein, 120 aa, Homo sapiens
LLRTCETMVSVVTIVLNASTAWRFVTSVQIHECSVELSCDRLDRSSLAALRESFHQRHKALFSFSEPNSPVELVNLECSVIARLQRPPMPELATPLKATAAIPAGHRPMLFNAPDDWQDT

SEQ ID NO: 958141 - protein, 72 aa, Homo sapiens
TLTAGLIMGVLVTHSLTDTGKCHYFAVLTDHFLDKRKMVNLMTIADKCMRTLSARHNALTSWEPPLFNAESH

SEQ ID NO: 958142 - protein, 119 aa, Homo sapiens
VKARKTPYAPGTHEEPQDRCRFSSKLAVKTVLCQRITRTAVLAQHIEGDETGLFTQYLTGVVCRGSDFCIRNGCKTPRFASNAYSFASSCIVTSPPPSTSDETIMVLAGHIRHASLTEK

SEQ ID NO: 958143 - protein, 93 aa, Homo sapiens
MVFNVIARNQDDHTKNISFLLDTDGTWYLSPAYDMTWSYMPGNFWVDSHQMSINGKRDNFVLEDLLSIANQIKGLKAREIIREVHEAVVQWPG

SEQ ID NO: 958144 - protein, 76 aa, Homo sapiens
ILQLAGIQLHRDLLDLSCVSDDLLHHLQGLSMCHSGACWSLHPDALSLDYSASLLTFSNPVIVTRVLVLALADVCA

SEQ ID NO: 958145 - protein, 44 aa, Homo sapiens
MADIQTERAYHIAADHLSTQEERSCWEKLATEKLPRLLQVTSPL

SEQ ID NO: 958146 - protein, 63 aa, Homo sapiens
LSGPVWMLSDSLKLNTQSKALSTKELPLPRVQEGLAKAPPHSPLLHRGDTQHTVYWTHFLTLT

SEQ ID NO: 958147 - protein, 44 aa, Homo sapiens
GCSADVSADDNGPLHLHLGHHAQQRIRPRMDHLPVKGHFLSMFV

SEQ ID NO: 958148 - protein, 47 aa, Homo sapiens
NYALNNPQQRVVVDISTFGQGSDQNAYYDIDNLAGSDGDSAFMPALY

SEQ ID NO: 958149 - protein, 33 aa, Homo sapiens
MVLCIFILVTTPRGDPPSNGHLTSEGAFLVNVR

SEQ ID NO: 958150 - protein, 83 aa, Homo sapiens
MLVGAQRKCSLLVAWSLLFFEHHRQLLGKWRTFKYLYLALVPVPVKNHRSSSKPRLAEESQVVRKVLANVFGDCRRLQLTLRH

SEQ ID NO: 958151 - protein, 81 aa, Homo sapiens
AVILVVDLYAGSPQSMLARNSSPVNNLETSSYNQILPTYQAFRPEYSPSQHLDHSILRDTEPKAPSATHTRVQTYRNYEAI

SEQ ID NO: 958152 - protein, 99 aa, Homo sapiens
VGLSFCSSFRLSFSKRLQHHAATALTDAGVALAQLGAGGAQPAFVQQLVLQVGFDARELLGLFGLDVQAGFVLRVAFGDLDDVVQALDLQAHEAWARAV

SEQ ID NO: 958153 - protein, 82 aa, Homo sapiens
FVNSASQIADQTLGTNGGGFFGVTRRTLFEDPTAWANLFELSAIILIPVALVSPSVIYVKDLRQSRAILGCMLALFLIGGAT

SEQ ID NO: 958154 - protein, 115 aa, Homo sapiens
QSKVTRQCTPLDNVQQKEGPRGSCWQVQQVTDVMTMLDDKHPCNQPVEDKRSREQVRQNGTLSLADHPEVAFARHFVAHRRRVHRSVGLQVFVMLADQAEELLQTDKLLQKRVGV

SEQ ID NO: 958155 - protein, 97 aa, Homo sapiens
MPNAINSGACKLEKPAHPLRHVDQHVRRVTGNLVLRQRGLHHFETLVDQVQQCRRPNVIDDERAGRGLWRTLFFRRSRRLLGLGFGRLQPRVDFGSL

SEQ ID NO: 958156 - protein, 87 aa, Homo sapiens
  misc_feature (4)..(4): Xaa can be any naturally occurring amino acid
SGGXHRSAVLQVFAKGRDVAHRAFERNYGFAQFQQLVQLGYLAGDGVGAEVIDVFEFKLHIQVGVLIVAENRRNRHVQSNFGFSQYF

SEQ ID NO: 958157 - protein, 97 aa, Homo sapiens
MPYVRIELVESAEHALSIPLSKIEQSDRLWLDDFGQGIANFSSFTTWHYEYIKIARDLFILLRQSEEGSRLFFTLVTLMNRYSKGVIIEGVETAQEW

SEQ ID NO: 958158 - protein, 53 aa, Homo sapiens
RSCLHSLEICDEVEDSSYDNHLEGDDPNEWRWATHFYILCCTHYDRFHLVTRA

SEQ ID NO: 958159 - protein, 116 aa, Homo sapiens
YRRSELDGNVGGFGTTLPRVWDNVKKELELSGEVAVEDWLAMVLSWAIDLMRPVSSGLCCVIGGVAAKMQIRHNPSWAARNAAARADQTNSGIPAILLAPHPAGFQAAFGGKGTVG

SEQ ID NO: 958160 - protein, 64 aa, Homo sapiens
DLTTEVEESSYDESSRGLMTPMREVGHDFYFLCTIRQFHSYTAATIVFFHRSSRDCISMHLVGS

SEQ ID NO: 958161 - protein, 74 aa, Homo sapiens
SRGSLCVVAGHFRAVHSQASRTRNRPQPRYCGQVRMPTASACRVVMVVLDLNVGAGFCGSGLARSHTKPGSHRG

SEQ ID NO: 958162 - protein, 75 aa, Homo sapiens
RRRADRCTAAARTLLLAHAIKRLHVTAIAKQRGGFKRQVIALILAKAVLSRRLDIARLVRQLGAVSPCPLAKAMR

SEQ ID NO: 958163 - protein, 107 aa, Homo sapiens
MQDAFILSFPIVMASSLIILINFAILSTDGLISKHFTFGNNIPNLADAQQIFTPVMNGSVNIMAILITFLVARNIAISFQQDDLLCGLTAIGAFFVVYTPYTIIDGQ

SEQ ID NO: 958164 - protein, 33 aa, Homo sapiens
MILSDMLNAKYEVMVEQNRKDAESLVTSRTEEL

SEQ ID NO: 958165 - protein, 40 aa, Homo sapiens
LSGTARISRSEVTDLRRTLQVLEIELQSQLSMKAALEDTL

SEQ ID NO: 958166 - protein, 138 aa, Homo sapiens
RFVNWAEPLDRLPQLDRTFISNNTGKRVCLTMLGKLDLVAGMTLTPKDATAFAKRLKPWIAELYRGEDPEVGRCLPLDDFLAVGGKPIFARPRFVLKPDAIAELNMHEIADSRLQIIDWAYLYCGKQRVKGSTNTGLR

SEQ ID NO: 958167 - protein, 57 aa, Homo sapiens
RETGGITIVLSRSPVVAQWLTNPTRNHEVVGLVPGLAPVGEGSGIAMSCGVVRRRGS

SEQ ID NO: 958168 - protein, 80 aa, Homo sapiens
QLGTSSATRPPPLGSASVSDPKAIRQRPHTHRRKPRHAFQHAAHLADLAAGDGVAELEQLRKTAGRTQFGSALDQVWERA

SEQ ID NO: 958169 - protein, 81 aa, Homo sapiens
RLCRIFERSSPFRLASVFSEGQVGRVGPGLEGAPGILFLVVIEFLTLLASEVIGNLGLIVLVPVLPFFYKMSKTCSFNFTM

SEQ ID NO: 958170 - protein, 76 aa, Homo sapiens
MYNDLKFPRSDRAPRLLAVPVAGDRVRGIARELEQEGFRYLFCRVSTLKAGWCASIPSRSAVHPDCRRRRRGLYPF

SEQ ID NO: 958171 - protein, 78 aa, Homo sapiens
KLGYRFRETHICISQSPSHVFFLFFMAAPTAPRTYESQTQLRSNDAAAEATLDPLTHCSGGESSQHLRETHILITIAL

SEQ ID NO: 958172 - protein, 50 aa, Homo sapiens
MLRLLPGFTLAAVTLVANYRSLPEREVPILLSPTQKAVYQSMMPTEVLAH

SEQ ID NO: 958173 - protein, 38 aa, Homo sapiens
MQCRELVTQVTEEPISQTEDGEEQESTTTPRLKGQKKE

SEQ ID NO: 958174 - protein, 67 aa, Homo sapiens
SSSHRFVRSMFLYSVFCCFFSDQSCCPPHVKVLGKGLQSTVPRDPRQRVDDAVAVVKGVESGVSLLA

SEQ ID NO: 958175 - protein, 67 aa, Homo sapiens
SRTRILLRCGSAVTKPDRIHEDTGSISGLTAVGQGSGIAMSCGAGRRLSLDQVLLRLWHRLATVAPI

SEQ ID NO: 958176 - protein, 56 aa, Homo sapiens
TTSQQQQQQQQQQQCMRYQKGLEQSGRITQVTVKQYFSTEPKLTKDFSSEVNLEEI

SEQ ID NO: 958177 - protein, 52 aa, Homo sapiens
MSEPFSLIQHVPGTARDCSRQVVFMHRRNLLKASMAIAAYTGLSASGLLAAQ

SEQ ID NO: 958178 - protein, 115 aa, Homo sapiens
MAIDPHSGWNTVLPVLGRTLVHGLDRDRLNLRSTPALRSWSVRFWLSLNLRKPEQIRQFFARLNVRTAVDVAALDRSGRRPYRQWQNPAQVPLLKFTLSEPARLSVRVGFGSLTE

SEQ ID NO: 958179 - protein, 59 aa, Homo sapiens
GTALVNCQSSRAWDETSVPSGVQSPLLLGFPLGCSGLGIQRQRLRWLQRGGFDSGPRAV

SEQ ID NO: 958180 - protein, 64 aa, Homo sapiens
RSRETHHLEEDRTRAPFEHGEGSLVVCPATGDKRRATDLIIVGLTGYVHVQDADESEGKKQGLA

SEQ ID NO: 958181 - protein, 94 aa, Homo sapiens
SCETPHRLIFVTYQIFIRIIAAQLLPLSAEPSGLNALMYKDLKFPVLIVHRDIKADTVAGAVFKALAGLLKAQQLLLVEGLGVAQAAHNVGTES

SEQ ID NO: 958182 - protein, 70 aa, Homo sapiens
ARTALVNFRETRTPCSWQWQILNQLRKARDQIRILMDTSQVLNLLNHNKNSLVSVFVIRELNPLTFKVIP

SEQ ID NO: 958183 - protein, 73 aa, Homo sapiens
SVRLVQLLSLAFKFLLTVSVLPSISPSSLGCLEQFLGTPPICPVLDAPGGWHGSLPTISKALSPWGQTNPTLW

SEQ ID NO: 958184 - protein, 92 aa, Homo sapiens
MPGIFAQAFLFMSVTAQPASPAPDHHAQFIELLSASLAQNAFIKLVLAKYVGEEAELQRLIIKQVVVKEQACLSFVYRYKTRDITKNFPSLT

SEQ ID NO: 958185 - protein, 72 aa, Homo sapiens
GSSRFVNSLEKQTRTTPPYRELSRSARLMFHRFYTRAIRNDKVVITNTLVSTSPKLYEHFCRFWYRPITRKP

SEQ ID NO: 958186 - protein, 114 aa, Homo sapiens
VDGVRRRLPAGGAAMNKVQNNKAWWLVLPVFLLVAFSAVIPMMTVVNYSVQDIFDQSSRYFVGADWYKQVLLDPRLHDSLLRQFIYSACVLLIEIPPGIAIALTMPTKGRWSSL

SEQ ID NO: 958187 - protein, 93 aa, Homo sapiens
ARYRSRGDDDSDDHLITTNRRLWTHLVERDLTTYEFDRMFNQVSENVSWADVSLMAREFGVTAADVSQWILERHGELVPDGAGAQDDEGSRFG

SEQ ID NO: 958188 - protein, 63 aa, Homo sapiens
MNSLSELTSQKGLLLIRVLLEVEKTAGLEESNRHVVSWLRLKVLREAYRLKPAKGQGLHRLSN

SEQ ID NO: 958189 - protein, 63 aa, Homo sapiens
QLDLFDHEGYHNLPEEWIEELRFVFEEPHRTIVMHNVPFDIQVTFGEGFDFNANSFCTQILAH

SEQ ID NO: 958190 - protein, 51 aa, Homo sapiens
MGKNIIALPDEKIVVLPGYKKQRCKTESYARPRWQLAHGPQKYIEQNERVN

SEQ ID NO: 958191 - protein, 59 aa, Homo sapiens
DTAMSITHDAYLKLYQLSKPDLSERFNAILLDEGQDVNPVIADIVKIQRVRKVAVGDPH

SEQ ID NO: 958192 - protein, 33 aa, Homo sapiens
VSPILIVHGCQDSLTDGGGFVVQLEVVQHQGTE

SEQ ID NO: 958193 - protein, 35 aa, Homo sapiens
SPLEYPLFHEKRSELQEQQMQLALAMSREVAEQEE

SEQ ID NO: 958194 - protein, 37 aa, Homo sapiens
  misc_feature (2)..(2): Xaa can be any naturally occurring amino acid
TXEDPPQIPFTTITIETADHARLQLQLAYNWHFEGVP

SEQ ID NO: 958195 - protein, 38 aa, Homo sapiens
DPGWYMAQPVSSELVTVICLAHVSLAARDDDGYLLAEM

SEQ ID NO: 958196 - protein, 49 aa, Homo sapiens
HWSFCVNRHHSTQLRTAVGLSRPSQPSTVEGISFWPPNPGSRHHHQHPP

SEQ ID NO: 958197 - protein, 88 aa, Homo sapiens
  misc_feature (1)..(1): Xaa can be any naturally occurring amino acid
  misc_feature (17)..(17): Xaa can be any naturally occurring amino acid
XSLSSMRKKEEEELVAXMSALSGAGQRESSNNPFKTEKERERQAKLAEEKMRKEEEEAKKRAEDDAKKKKVLSNMGAHFGGYLVKAEQ

SEQ ID NO: 958198 - protein, 53 aa, Homo sapiens
EELQNLIMGSTKPARRQPAAEWQPSKRIFQPSRRGTTTPLASGASVNTPFINL

SEQ ID NO: 958199 - protein, 33 aa, Homo sapiens
QTIPYRLVLPGKRLGPDAEMGVGDELGSLVLSV

SEQ ID NO: 958200 - protein, 57 aa, Homo sapiens
EDPSRLVPDGLWVYVDCCPACRAPAGECPDILPKCLSEHECWGRRDHSGHTVTDGQM

SEQ ID NO: 958201 - protein, 42 aa, Homo sapiens
EFFTPETHEALLSACRFKWTRISVSILGSMFQLVKSKEARRA

SEQ ID NO: 958202 - protein, 54 aa, Homo sapiens
VQTDLAATLSGISDKGTDSFYKGATADAIIKASQDKGGILAKQDFEQYKVRELE

SEQ ID NO: 958203 - protein, 72 aa, Homo sapiens
LYAIADLRHIPQAQGGSILVADQKRFVVLGLFQLVVGLDLPVALTVFQRALGPAHVGIGDGVTHIVQGHAVL

SEQ ID NO: 958204 - protein, 44 aa, Homo sapiens
IPPNIGLDLYFNIADDDLRRQATMCTGTRRSDTPGGCEMDFDSR

SEQ ID NO: 958205 - protein, 95 aa, Homo sapiens
TVRRDIVDEGGISNFTGSAGFDLTRTPFAVSRKCQNYLIRSQSKGSSAQKLPVTVTDVEGSKVTIKSTLRILALELYGTLSRTLIELGLGDKIGG

SEQ ID NO: 958206 - protein, 67 aa, Homo sapiens
CFFALYRTEIDCVLYSPREGGQRTLSPSCATTPLILFNFEISCQEAKALKCDFVPVTLREGKPVLDC

SEQ ID NO: 958207 - protein, 67 aa, Homo sapiens
  misc_feature (16)..(16): Xaa can be any naturally occurring amino acid
HLRLEDPTNTAPSMVXAPYILILHQSRQCPRPSIFAMPLCRPRKLNINNKNSNNDQQGPQFLHLLVV

SEQ ID NO: 958208 - protein, 83 aa, Homo sapiens
EDPTYHPPLSYISILEKRKGRKVETETPSFEDTQGGKSLRMWPSLVGWSGHRDPFVPPHHETGSLMPEAKKLWPRKKTCICNT

SEQ ID NO: 958209 - protein, 53 aa, Homo sapiens
RVAILEYPTNTLLFPTSAILEQEVEEGSVARRAQFEDPSGGNDAVTDVVASFS

SEQ ID NO: 958210 - protein, 43 aa, Homo sapiens
VGADRGPSRSKQKSPTRNKELNGMYLNAILVLSHTLPWCSFTI

SEQ ID NO: 958211 - protein, 96 aa, Homo sapiens
RMTVLEYPVIQNVLLVYQVDAGILVMLLCCSVTLNTLVFYCINGYVIFFTIKYLGVNEHKKMIANQKHINSESGMMVMPNNQIVHMGGWESGTFAF

SEQ ID NO: 958212 - protein, 83 aa, Homo sapiens
CVHTGVQTYQDMLLLSIAARQTQDGSIECVLTVRELFIVKTTSISGVSLPAPKRGRASAQGAAKRKRGQNPTLKQADTEKNGS

SEQ ID NO: 958213 - protein, 37 aa, Homo sapiens
MTGVDHLHQQIVALSLLGGVAFGGDQAIDQVDTQLLA

SEQ ID NO: 958214 - protein, 48 aa, Homo sapiens
MGLHSEPLFSGAFHYLGKLELHIDLIARLLTQQQAQIRTCATDLATSI

SEQ ID NO: 958215 - protein, 30 aa, Homo sapiens
MATGNGRKVCRCLPGQMRIPEPVLRILPPV

SEQ ID NO: 958216 - protein, 101 aa, Homo sapiens
MSEANIQLIVAGRSCCQSLLSTNHAAREQATTPAKAALEKTRALILKARASFITKEGMAQIDQLETPLKNYENLLLQVLTLHQLSSLLQDTSDVTELAYPT

SEQ ID NO: 958217 - protein, 45 aa, Homo sapiens
VGHKLDSKALTSYSSYLVPLLGAVASWRQQRLMHELSLLRECKIE

SEQ ID NO: 958218 - protein, 78 aa, Homo sapiens
AVVDKQNLYFVQNPPTPPVAVYLARPSGTFPMTGDFPRMSPGHKDSQEDVVGGDRSKGWNVLTPKRKPQKGLSHTSQE

SEQ ID NO: 958219 - protein, 52 aa, Homo sapiens
PWSRSADQRIRTVRGLDALFNSNSLSGENVDFCLVSDSAIIDACHRYLSLSD

SEQ ID NO: 958220 - protein, 41 aa, Homo sapiens
MGPMTFAFVPGFKVAVERQTFPIYGTEICPEAVTAKVFIIG

SEQ ID NO: 958221 - protein, 61 aa, Homo sapiens
RRIAHVDLGKGSDRSEPLRAPMELQIRFDLGGFRNRLFARTWQRRVRHFDVIVNGHDHSFE

SEQ ID NO: 958222 - protein, 65 aa, Homo sapiens
VVGKPAASQPSCLRPRYISLALIDATPYSPFCTSRYPVLTLDTLRLISCPLPYSDKMTPTYDARE

SEQ ID NO: 958223 - protein, 77 aa, Homo sapiens
VVGSLEYVALGVISTQPLPDRFYGVLIPSNKSNLKKGARRLLFTLHASETPGSGSPFLMILPNCGDVNVIDRFTVHP

SEQ ID NO: 958224 - protein, 126 aa, Homo sapiens
SSVLGWFMERAESEDPELQRMVRMILDVSSPSNSFECRWQASRLLLAAYLLAQLFALGALLSLDLPYSSLGMLVCMAHAAWVLPRHLLLTHRSSIRGLRRDEDGWQLYSDERGWHSVQLRPDSVAL

SEQ ID NO: 958225 - protein, 62 aa, Homo sapiens
CLSDKPHPETDGLHIASGARRQTERRHVRPENSDNLAGRLLYCKRPVTEKADTRLHEPVNHH

SEQ ID NO: 958226 - protein, 36 aa, Homo sapiens
LADYLVEIEEPVCSSMSPLEQIDRYVPNPTEVVHTV

SEQ ID NO: 958227 - protein, 37 aa, Homo sapiens
MAELKLGSTSTGRVVLVRADRPNAPGVEALDTAPELR

SEQ ID NO: 958228 - protein, 88 aa, Homo sapiens
GELRDLMDAAHLLGASTWHSRARWLFCPTCANGGMIAVLLSFSFLIGDFVFANLLARGRYETLEVYWFNMRNGSGPLHQRIGYLLYRW

SEQ ID NO: 958229 - protein, 73 aa, Homo sapiens
SNPGYPRIPARDVIKGSLEHPKIGGLGVLPTDVTVWNVLGALSSVVHAVIKMTELLSELLNNCTTLDLKPFPT

SEQ ID NO: 958230 - protein, 62 aa, Homo sapiens
DRRKLHELVPLVVIPSFTTVAHQLDVDRRIANRLHAADGLYIELIAAKGLGATRQFQGRAAR

SEQ ID NO: 958231 - protein, 40 aa, Homo sapiens
MGSIGDRVYHVDLLTEVPLRSSTTCGLAAPRYRLGLSTLL

SEQ ID NO: 958232 - protein, 103 aa, Homo sapiens
AAAFSQTSNEQHSTLYLHENHVFTLAHMHENMQWYVFLGLWLTFIYHQCTPLSIHLATNDRLSLLWSWLTNIPLPYIYHIFFIPFICCMDTLLLVKPDIALNL

SEQ ID NO: 958233 - protein, 76 aa, Homo sapiens
LSDERVNLKPNLSWSHDVSGYGPTAFSRRRQAISVGVDADYRNTYTASLSYTTFFGGDYNTLTDRDFIALSFGVNF

SEQ ID NO: 958234 - protein, 50 aa, Homo sapiens
  misc_feature (19)..(19): Xaa can be any naturally occurring amino acid
ELTLEYVLVNDDTTSVPSXDDGVRTVVYVTLRTLPWEGGRGTLPAPEDAV

SEQ ID NO: 958235 - protein, 95 aa, Homo sapiens
MGYDDAVAAESSRSRFKIMLICAGWNGWAQIYRRREPDSIRRRYRRYNARSQTVNLYREALRLTNMMVDVEVVPSLLVSLHGGNVPGRNPNQRKE

SEQ ID NO: 958236 - protein, 68 aa, Homo sapiens
LVVDSPHLLQPTSVPCSAPWSWMRCSAQRDGINEKLLRTVTKPPHRGGIKITRIEIKDISPPADLMAA

SEQ ID NO: 958237 - protein, 140 aa, Homo sapiens
DRKPPVTTFWNKAIDVDADCSGQLTPDTVLSFSSSFGRSQPIVELMGSYPVVMIHQVLANVSLSLLSGQEPVTGIHSVFKLRNTRSIGALSQQLPRRLMLWRMRERHNRVVWSEGMFIGTQHFQQHDRYLENLIDARSRP

SEQ ID NO: 958238 - protein, 62 aa, Homo sapiens
MAKALQCDPDADLVVRRSPQPPDIPLSYALTNRWLQPPRLLRYASSASKPGDAGRRARDYRS

SEQ ID NO: 958239 - protein, 102 aa, Homo sapiens
QTPFRSYRRRASSILNLSSVHTSVILSKPISLITECYFISYKTLWYLCFPFPDYRISGILRKNTQAETGHETPVLTESRVIIPAGLLIPWVLVSLSLTFSSE

SEQ ID NO: 958240 - protein, 104 aa, Homo sapiens
MPQPPNVAEYRLVAPRLVILYFSRDRFLHVGQAGLELQISGDPLASGSQSAGIIGMSHHAQPACIVFLSWTLGDGLCPLLLTVNVQWDRSCDHQNLRLPRSSNS

SEQ ID NO: 958241 - protein, 51 aa, Homo sapiens
LIVTLEYPQVSSGLRELYTGALRPVPSVSSNEGLSTDPNIHLDYGIPKLEL

SEQ ID NO: 958242 - protein, 74 aa, Homo sapiens
SESRMDSVLKKAKTGCCGRASPPAVMTQANNRMAKGYLYEVTADMSVKYKLGVNWSVTGGPEGAKDPTEVQRFF

SEQ ID NO: 958243 - protein, 133 aa, Homo sapiens
HSRGSITEARHVMDYKPTGLFITSHGSKEKGKAPRTTLVIVAIEVNRAPPLTHNRNASGEKATHSVLDMSSFELSGIQEGGDLEDEMEGWAADANLEMSAMAMSGLNQEGQNEMEEDLQLSLEEFYPQLCKEE

SEQ ID NO: 958244 - protein, 81 aa, Homo sapiens
LDVYLYTRLSQFMRVEQRWSPSFSTTGGLFLVMHSPVPRSLRHSFISSSKRWQFRETVVWTLVCPEPVLAAWRCTQSSSSQ

SEQ ID NO: 958245 - protein, 121 aa, Homo sapiens
DSGSKTNVLPVPTTSHLNWEMQSPSAGLSFYLGHPSEFPPFHPPPFPPVVKFCPQDFSQDKHASSTCFHPQFQLFICLMSEYSCLHAMRMQALLCNFIKSSCIYDSVHSPGLAGSRDTQRI

SEQ ID NO: 958246 - protein, 77 aa, Homo sapiens
LEDPKSTEIAHTASLMSDPQWIAVLQEETRIVTTQAAKWPTQSLPFLGSYGAGSGFGILLLSLSEMCLCFISGGSGL

SEQ ID NO: 958247 - protein, 119 aa, Homo sapiens
HCSCLQTTGGCEPPCCCWDLNSGPSEEQISVLIPWAISPAGAHTFIRDTLLKLKAYNTPYTIIVGNFNAPLSAMDRSWKQKLDSDTLKLTEIMNQMDLKIFIEHFILKQKNIPSSELIM

SEQ ID NO: 958248 - protein, 60 aa, Homo sapiens
EKRRCGSDCTKQFNNPTSFPRNTLHFVAPIFTGGNLSREEMLRCNSLTFTLHCGLDRQSR

SEQ ID NO: 958249 - protein, 64 aa, Homo sapiens
YVPFHILKFLKWLYLASHLVTYIEVCRSITRKSISIILVIVINLNGKGGYHVQENVSEANVGGY

SEQ ID NO: 958250 - protein, 68 aa, Homo sapiens
SVCKQSSRRTRMSGECHSQGKAGSGVWMAFSSGSSIRLFHTETLEHLQEINIATRTTFLLPGEAAHLV

SEQ ID NO: 958251 - protein, 56 aa, Homo sapiens
MSLIRRVYHPEGIGETTQTMVRRPDPDPSTSEGNGSATALFQANDQKHTRVAKEVE

SEQ ID NO: 958252 - protein, 40 aa, Homo sapiens
VNLGGLERVCRVGARREGVGDRHRFFLGIGCPREFWSSER

SEQ ID NO: 958253 - protein, 35 aa, Homo sapiens
TWYTVSLIQLTGIYKSVQVFVERLYHALNSVQRYP

SEQ ID NO: 958254 - protein, 124 aa, Homo sapiens
LTGTMLMGSETGCRPDGVSLGIGAIDQQTSRGYRYSIGYATCPNHEERVKVVKILDTTRIRGTNCQRSSSFILASPPTPSSYITRRATISMPRETHTATADRFFAAILWDFDGTLVDTESREVE

SEQ ID NO: 958255 - protein, 50 aa, Homo sapiens
RPPFLVSSGFEDAMDGLPSLRPVIELCIPSSWVPTQAPPGCHVVSLFTQY

SEQ ID NO: 958256 - protein, 46 aa, Homo sapiens
PFPSGCLPVAIGKAPGATELGRRVFVKPIEAWARFCFWCRTPAVLC

SEQ ID NO: 958257 - protein, 70 aa, Homo sapiens
MEYGTYGRNPRQWPRRCLPLAVLLVMSMSRLAGAKITYNDDAGETGRVTIVREMSVLGARVDVSIYRRTR

SEQ ID NO: 958258 - protein, 74 aa, Homo sapiens
MWPLTSSAISGEQLIHALLLLVSEVDDLRRWEGFADSGKQVVPAVPGAVQLDLDPAPTQVERVTCEADDVDAVH

SEQ ID NO: 958259 - protein, 38 aa, Homo sapiens
GHTTLCYKKGFCLGFGRAIPHACVGPLQQRGRGRWSSR

SEQ ID NO: 958260 - protein, 58 aa, Homo sapiens
MVEEVVMVVEECGMVVEEVVIVGEEEVMVEEEEVVMVVKELVIVGEKVVMVEEEEVVM

SEQ ID NO: 958261 - protein, 110 aa, Homo sapiens
  misc_feature (54)..(54): Xaa can be any naturally occurring amino acid
  misc_feature (57)..(57): Xaa can be any naturally occurring amino acid
DGVSLLLLRLECNGRISAHCNLHLLDSSDSPASASRVAGITGVHQYAWLIFVFXVGXGFHHLGQAGQKILTSVDPPALASQSAGIAGMSHHTRPTYRIFLPLLSSSPPRI

SEQ ID NO: 958262 - protein, 153 aa, Homo sapiens
LQRAVRAAQQIPVRPYPANAGDRFARHGDRKIGRIAIRRCRGPGIATPVDSPPFDQIARPYNRASNPHRTKYRWNCSCITRRLQFQFLQARPSTARATSNYSAIELLAKHGPNSTADGPANRRAQRGQNQCTHFNLPLHASDRECASRETQAH

SEQ ID NO: 958263 - protein, 50 aa, Homo sapiens
YRSDVARYFRSLRFRRLTDIVPPMDGDIVLVSPAPSQLHLIIRAMVRLCC

SEQ ID NO: 958264 - protein, 100 aa, Homo sapiens
LSELTLPDIIRSPRFRRLTDIVPPMDGDIVLVSPAPSHLHLDDRSNGRLCACPYRVTPRSAWPCISRLANSRSLGVVVRGWSGDTGFDRVGHRRIGEPVG

SEQ ID NO: 958265 - protein, 118 aa, Homo sapiens
MDGGIVQVFACSIAIAPDDRSDGRLLCMPMRGYAASCMALHFPTGKFSIAGVVVGGWSGDTGFDRVGTAIGGPVGGAVGAMLGQQLDRAIVGNGAPPRRAALAGTGTANVELWHLHSS

SEQ ID NO: 958266 - protein, 168 aa, Homo sapiens
YRADVARYFRSPRFRRLTDIVPPMDGDNCSWFRLLHRNCPLWSQRLAALCMPMQGYAAVVHGPAFPDWADSRSLGVEWEVEVATLVMTGLGTAIGGPVGGCVGAMLGQQLDRAIVGNGPRRDGPRLLELELQTSSYGTAIPAIFGTMRVACTIIWASDLIERRTVTGV

SEQ ID NO: 958267 - protein, 144 aa, Homo sapiens
DYRADVARYIRSPGIRRLTEIVPPIDGDIVLVSPAPSQLHLMIAGMGGFVHAHAGLRRVVPGPAFPDWPMLDRWRVVGGWSGDTGFDRVGHGDWLGPSGGCCWGHAWPAARSRYSLDWPPPRRPAPAGTGTANVELWHCISSDI

SEQ ID NO: 958268 - protein, 122 aa, Homo sapiens
MRVSKAGGSHLMVPAPHRRRADEVSYRCHPGTVWSTHWRCSRRSRSPHRFCHDHHDLCRLFGSHARQGDRNEPVELPNPAQKVLLAQAGKCCSVVISTCVGTVGHQCLRTRRCRHSARLLRC

SEQ ID NO: 958269 - protein, 127 aa, Homo sapiens
ASTFNAPSEAGRKYPSSPYPANARDRFARHGDRKIGRITIRRCRGPGFATPVDSPPFDQIARPYNRASNPHRTKYRWNCSAIPRRQQFQYLQARAVAQGPISNYSAIELLAKHCPNSTADVPANRRA

SEQ ID NO: 958270 - protein, 124 aa, Homo sapiens
LDLQCAVRAGKKIPVRPYPANARDRYARHGDRKIGRIAIRRCREPGFGTPVDSPPFDQIARPYNRAGKHHRTKYRWNCSAITRRLQFQFLQARARRDGGHFQLSAIELLAKHGPNSTADGPANR

SEQ ID NO: 958271 - protein, 65 aa, Homo sapiens
REAKLTLILFRMPGDASNRMTDTRLFAVRRRIDGERWLRKYRLAAFHFADQLPGIFGKIKAIIRG

SEQ ID NO: 958272 - protein, 96 aa, Homo sapiens
QPQFGLDFDSDLTTTPQPNAWQRRWSEFFAEQRIGWQLQLAAEKGMTFGDIDDIVDRVYLRLQHHQPQPSLLHGNLWPGNCAMTANGPILFDPASY

SEQ ID NO: 958273 - protein, 106 aa, Homo sapiens
SEFFLPAAFTEPVYQDGGIAIKFNSHRASYTGDQGFIITLMNLPKNSGIGVFRDNLVGRGPVSKSADWSGWRLNHRESKLSSCARVGPRQGPRNQMSQFINLGSAS

SEQ ID NO: 958274 - protein, 123 aa, Homo sapiens
MPSYLDELARQECPEVPMDEDFKLGTLKRLGLPHSTQADVGKAWQAMLARVRDWHDLDPRFNTEMEKLIDFVTRDHVDELDNGEMDMSIDVDTVSDLIRDVSARVIDPRFRTLHDHQIHQKKP

SEQ ID NO: 958275 - protein, 73 aa, Homo sapiens
LIFSLKNSTVEAKAKSISTCASALTTAACCKVIAVNQPKDAVAPTKPTASDGFHAFAMRRSSSLCRQTIHKNI

SEQ ID NO: 958276 - protein, 35 aa, Homo sapiens
MGKAWAYLKNLRIEQGSMEHDEAVADLQNWWAGDA

SEQ ID NO: 958277 - protein, 100 aa, Homo sapiens
LAYPIPHSEQAPYEEVKCNFNVAEALRELRFNVKVDPRQGSVLGVKRSSRNFEHGFRMHRKELSPDPGQQGAHTVSVGKCSRVLLTSGGKGIEFLQPGES

SEQ ID NO: 958278 - protein, 42 aa, Homo sapiens
IPANKELRCGLNTAHLIILKKTYHDSLLCSDLADLQNTAPET

SEQ ID NO: 958279 - protein, 57 aa, Homo sapiens
RRVPSTLDLLGGCAEALATQADFTPFPGQQAPQQHPVRAREDASCLFQLLLAPIASL

SEQ ID NO: 958280 - protein, 38 aa, Homo sapiens
AVVPLTFSIGHFGVSSFSFHLNRIWLQAGVASGGVKNQ

SEQ ID NO: 958281 - protein, 42 aa, Homo sapiens
ARWYPPREASCSPVWPRSHDWKLLRPPQKQKPPWFLYSLEQD

SEQ ID NO: 958282 - protein, 67 aa, Homo sapiens
FLYQSNAYILLSNMNSSLWHRKDIQHPMLSSQRDPAMSQLCPCCSEIKPGDVLMPWEKGIHKNGSHS

SEQ ID NO: 958283 - protein, 51 aa, Homo sapiens
GFSLGKEETLERDSFKSRSQKCLLGSLYITRRVQDLRVTIEISLHHFQRYL

SEQ ID NO: 958284 - protein, 36 aa, Homo sapiens
  misc_feature (12)..(12): Xaa can be any naturally occurring amino acid
GDATLTGKLSAXVGSRCILSRAGNKLYSSGTGFWLV

SEQ ID NO: 958285 - protein, 43 aa, Homo sapiens
GVPVGDRRLNTEDSPGSGAELGFRLAVVEEVSSGEVQVVESWG

SEQ ID NO: 958286 - protein, 43 aa, Homo sapiens
MIRNEVEVKHQFATLVAFIDATFVSDVQCVILECEFLGPPAIF

SEQ ID NO: 958287 - protein, 78 aa, Homo sapiens
GTVLWPQRMLTAVSPARAIPAGEDVILHQASEIPQVSLNISQQVHAVNMEKYKFLGISIGGQSNERGDGGIYSWLHHE

SEQ ID NO: 958288 - protein, 61 aa, Homo sapiens
MSPSESFRTGTENVSSVGIQMWSAEEAGDSVTTGANAPMTVAGLLAWANELLWPCRRRYLV

SEQ ID NO: 958289 - protein, 62 aa, Homo sapiens
SRVIPSKSGYRSCPVSRSSSSSSSPRRTRRRSAEPAMVVVDAADMGYEGGGQMSPYIEALRT

SEQ ID NO: 958290 - protein, 109 aa, Homo sapiens
RREGARQNGGTSWEILFATGVQVVASVADETASATHRSRVRHRGGTRGHRPCAKYAASTHNTKAAPQATPCRDSCQRLFLAELLEGPRRWKMSVCRRFSLRLDGDFRNA

SEQ ID NO: 958291 - protein, 69 aa, Homo sapiens
TGREAVIRVDIEREQMRAKLEPEENRLKTLKEDLESITKIVKDLEASHQHSSPNEQLEETSNGVQRHRN

SEQ ID NO: 958292 - protein, 33 aa, Homo sapiens
SFSSYPTVWTDFPMLISSSFPRTPQSVPDASNN

SEQ ID NO: 958293 - protein, 52 aa, Homo sapiens
LGDDLHPGYRFTGRRFTPGKRFSPGFRFHWRWFNTGKTLSPGFPFPGASGFP

SEQ ID NO: 958294 - protein, 47 aa, Homo sapiens
LGNRLHPESGFTGRPFSTGKRFQLENDFPGRTLLGGKAFNLYKGATF

SEQ ID NO: 958295 - protein, 42 aa, Homo sapiens
MSSADICCRMSCPVVLEGVDGLRQPRVTLRDDNSDCVPELEL

SEQ ID NO: 958296 - protein, 46 aa, Homo sapiens
RETAFTLNTDSLAGGLQGETPFTPYTDFGAGLLKGETPFTPLTAFA

SEQ ID NO: 958297 - protein, 233 aa, Homo sapiens
MPLKTAKTGMPSLTTPIQHSVGNSGQAIRQEKEIKGIQLRKKEVKLSLFADDMIVYLENPIVSAQNLLKLISNFSKVSRYKINVQKSQAFLYTNNRQTESQIMSELPFTIASKRIKYLRIQLTRDVKDLFKENYKPLLKEIKEDTNKWKNIPCSWVGRINIVKMAILPKVIYRFNAIPIKLTKDFLHRIGKNYLKVHMEPKKSLHRQVNPKPKEQAGGSHYLIQLYTGSVPNS

SEQ ID NO: 958298 - protein, 43 aa, Homo sapiens
GGNRFYREYGFPGRRFTGRNPFYRGSGFPGRPLSTGSPPFRGA

SEQ ID NO: 958299 - protein, 32 aa, Homo sapiens
MLDRVQMFYDFGFLYDFEFHISWGGLTIMVED

SEQ ID NO: 958300 - protein, 137 aa, Homo sapiens
VIWLGCVTYAIDRIGQLMRPGIYPPLQRRPFGAMRQQKIHKRPHPMGHIAAVGIQQGKRPGAPAVRLQHLHQAAVGQLLLYDELVGLEEPRAVLGQGYATQHVVRAAVACFPSKLPLLAVFLALSPHVTVDVRISRG

SEQ ID NO: 958301 - protein, 45 aa, Homo sapiens
RDVSAIIAELDKQFPGVPELGEDIEQFMEVARAQHWINLPDLPPK

SEQ ID NO: 958302 - protein, 33 aa, Homo sapiens
PRARECAVCCLDFEAILVQPGSPPDKTQVPMVV

SEQ ID NO: 958303 - protein, 33 aa, Homo sapiens
RQLRADLSVSPMHLLRTQPGGFVSDDNIADLGQ

SEQ ID NO: 958304 - protein, 66 aa, Homo sapiens
  misc_feature (11)..(11): Xaa can be any naturally occurring amino acid
MVDGTGWGVIXGAQPVNYSGLSYSSWVQQQKGPKAVSVVLQLETPVQAAREDHAKDLHTGKCRSHR

SEQ ID NO: 958305 - protein, 101 aa, Homo sapiens
TLQVFVSGLPKLLERQSTMLTEVDTRPDGLYETGRGSVCTLAESGLPVLPRRPSTAFEGSYVLEAGTTQGSCAATKKVPPGGRPPGENDRVGPLEGKLRET

SEQ ID NO: 958306 - protein, 34 aa, Homo sapiens
AASVDMHHVCHDVLLEAHGLHIVASSTQSTGQSL

SEQ ID NO: 958307 - protein, 44 aa, Homo sapiens
TVFLIEGDCQMDNRQNCRYSRDEEGNALVIAGVQVRYSEATIGD

SEQ ID NO: 958308 - protein, 87 aa, Homo sapiens
VIAGRELTELPGVMSSRVMLAWTSATSTHPVAVAVVGLPSETGRAAGSDVDLEMACILDSAETTNLFQFNEMKKYIAYPESDNLDMS

SEQ ID NO: 958309 - protein, 42 aa, Homo sapiens
RLGIEQTYSLRLQMLLLTQCNSTCLNVKRPAAVRPAAGFDDF

SEQ ID NO: 958310 - protein, 52 aa, Homo sapiens
VYMSAGMESTIKIPEQFGEESLEQLMELLQKLKGIKPNIQKNWLKPVPFFHV

SEQ ID NO: 958311 - protein, 39 aa, Homo sapiens
MLAPANGAVRRIRQLIGIQISTVPVPLPTSKSALSRSKS

SEQ ID NO: 958312 - protein, 43 aa, Homo sapiens
MSSTVTLYIDAGFVQPCAKITLEPLERGFGHTLGNALRLILLS

SEQ ID NO: 958313 - protein, 31 aa, Homo sapiens
MRISNRPRNTVSGCWCERGYDELCPVDAHWV

SEQ ID NO: 958314 - protein, 49 aa, Homo sapiens
TSRRWESVLVYQRKAHVIVAILTKTNPRRYTHLRLKQQLLGKFQRPHRG

SEQ ID NO: 958315 - protein, 38 aa, Homo sapiens
ITVAAARADNAVVAGQGLVADQVQLADYHHQLDLIRNQ

SEQ ID NO: 958316 - protein, 92 aa, Homo sapiens
TFRYNARAMATVRQFPARRVILARDGVDADAIDTAIGQLMQTWDLSCRYSAAHSARCASRKSTNARTRWGTERPWGYSKVTGLRECHARRIA

SEQ ID NO: 958317 - protein, 76 aa, Homo sapiens
IRVRDLENGITNAVKLHADSARDDEVQKLSGIGSKQWIHGSAGDTRAIVGYCHLPVMCAERSSPYDYIRQATSRTA

SEQ ID NO: 958318 - protein, 88 aa, Homo sapiens
GTASTPGDTFLDKSSKSYRAVEFFTGKVTPRFGGQIEAVYQKDIRPGSQDQTWMSLGVRPAYAISEQFKLVTELGHDQVEATGGTRKL

SEQ ID NO: 958319 - protein, 173 aa, Homo sapiens
DQFDLEVDFDISNVDQAKIQELHERLEHVMLRRLKRDVAKELPTKTEQILRVEMSAMQQRMYKAILTRNYSRAKWHPFDAVLAAQHCYRVEKGVEPSVPLRWCRNAQGVAEETLHGLIMHGGKMVLLDKLLARLRADGHRVLIFSQMVHMLTIISDYLSLRGYVHQRLDGTVS

SEQ ID NO: 958320 - protein, 46 aa, Homo sapiens
GVHVAGHLLLHLLTPVITCGRQPGCGAGTFAAFSVTSVDAQRKLDP

SEQ ID NO: 958321 - protein, 42 aa, Homo sapiens
ARTVNFERYSADFVGKGTGSVEIWIRSTPTSPDRTIGRSEHV

SEQ ID NO: 958322 - protein, 38 aa, Homo sapiens
VVQQSVLERDHTTALTPGHTKTVKTKKKEKGYVPHKSK

SEQ ID NO: 958323 - protein, 37 aa, Homo sapiens
PVQESSGLTKEQFAQDDTWELPRLYFSEGLLRGAYNG

SEQ ID NO: 958324 - protein, 43 aa, Homo sapiens
IALATRRDLSFLLLIDILDGHEKEKAQVTTEEKNFRAFASCCM

SEQ ID NO: 958325 - protein, 33 aa, Homo sapiens
MPEPGRQGQSEEEASIYLNAISSPTLSLPQRYL

SEQ ID NO: 958326 - protein, 49 aa, Homo sapiens
MFPRFMGQRIKLDRAFGKFGAVERNAPAQNYRPGLRLVLSICLKMALAS

SEQ ID NO: 958327 - protein, 40 aa, Homo sapiens
RLLYEDSRCCVWGTGRVSGSNTQSSEVVGLTGLDMGAIWK

SEQ ID NO: 958328 - protein, 145 aa, Homo sapiens
LQVSDRRVHNTSLILLLAKSGWQRFYQPGVPRECHEHGKTGCTQSLGRGICGRYKSSKGSRVETQKSNLKYCTHDDNGCSTIDELPPDSLITLVQAELPTLSRLWLAGIPKIMHSGIYQPNILVQLPPDGGAIYNPETIDTDRLH

SEQ ID NO: 958329 - protein, 53 aa, Homo sapiens
MSVAWLTDADRLRGRRGTKMRSCCGHLCCCVVRGCEQVEAIEYYTKLEQGYRA

SEQ ID NO: 958330 - protein, 112 aa, Homo sapiens
SELILEDPSQVQQSMLKEIKEDTNKWKNIPCSWIGRINIMKMAILPKVIYRFNAIPIKLPMTFFTELEKTTLTFIWTQKRACIVKSILSQKNKAGGIMLPDFKLYYKATVTK

SEQ ID NO: 958331 - protein, 67 aa, Homo sapiens
TCRGWMNGVISAHCSLKLLGSSDTPASASQVPRKLGPQVACHHTQLTFIFCRDGVSPVDQAGLKFLD

SEQ ID NO: 958332 - protein, 59 aa, Homo sapiens
SKDVSEMSRDGWVPGFPRVYRHNLWLLPSHSDPRCHPRIHSLFPRRWARERVSSQVPPS

SEQ ID NO: 958333 - protein, 55 aa, Homo sapiens
RTPEHVEANISQLLKRFLVIRQSLGNCPTVADETRLLREEDVWRLFEECILIEHQ

SEQ ID NO: 958334 - protein, 116 aa, Homo sapiens
MSMAIPVYVVLSLVDWTLSIISSVWAIMNETIMSIHTWQARSHYHRPPKQLFQYRLSGSIKYEEEKKKRISVPLYKGRAMSSKAHQELLPRISPGRKSMHGNNEGFMKRKRMLVIK

SEQ ID NO: 958335 - protein, 36 aa, Homo sapiens
MVGADHMERGRGRCHVARVRSKDGRSGAATCQRPGS

SEQ ID NO: 958336 - protein, 121 aa, Homo sapiens
CNPERVGVWIGVVQCVDRPWCGVWIDRGCSVWIGRGYSVWIDRGYSAWIGRGYSVWIGRGYSVWIDRGYSVWIGRGYSVWIGRGNKLCGIGRDNSVWIARGNSVWIGRVYSTCRMGRGYSV

SEQ ID NO: 958337 - protein, 53 aa, Homo sapiens
MSSLQKTVGDSLNKVKQELAYDPAIPAPRYVTQKELKAGIQSKYLYSEYCVSK

SEQ ID NO: 958338 - protein, 45 aa, Homo sapiens
  misc_feature (14)..(14): Xaa can be any naturally occurring amino acid
LYEDFSTARYHTHXTKNHQTHSYTDIQTHTPDMHTHTYTQYVGVC

SEQ ID NO: 958339 - protein, 71 aa, Homo sapiens
DNSVKKQSNDLVKKKGAKDLNRYFSKGDLQMANRYKKRCSISPIIRENQIKTTMRYHLTTVYMTMYVKDRQ

SEQ ID NO: 958340 - protein, 119 aa, Homo sapiens
DRVSLCRPGWSATARSPLTAASSSWAQVILPPQHPQVAGIMGACHHAGLIFVFLVELGFHPVGQAGLELLTSADAPASASQSAGTIGVSHCARPELAFFLSSFAVFSSISFFFPFCRLL

SEQ ID NO: 958341 - protein, 38 aa, Homo sapiens
LHLVLVKERKSQGVGSGQDEADVDPQSPPRPEVKITSP

SEQ ID NO: 958342 - protein, 125 aa, Homo sapiens
MKPETPSLSLPDDNVGSRAVKRSKPGYQLRRSRIAWLLVAPSLLLLAAVAGWPLFRTLFYSFTDAMLDSPDDYRFVGFTNYIDLADGAHYYGVLADPLWWKAVGNTLRFSVMSVSLELVFGMLLA

SEQ ID NO: 958343 - protein, 83 aa, Homo sapiens
DGEDHFQDTELVGTISAGDRTFQKWAAVVVPSGEEQRYTCHVQHEGLPKPLTLRWEPSSQSTVPIEGIVAGLAVLAVAVIGAV

SEQ ID NO: 958344 - protein, 49 aa, Homo sapiens
PVNQRFNAYALAWEESLADGRSLEDYPAVISRLQGLWETLARALEVLQA

SEQ ID NO: 958345 - protein, 48 aa, Homo sapiens
  misc_feature (5)..(5): Xaa can be any naturally occurring amino acid
RTNLXPELVETRQQEKNFQKWAAVVVPSGEEQRYTCHVQHEGLPNALT

SEQ ID NO: 958346 - protein, 45 aa, Homo sapiens
HVIVMVVEFSQGVLWRERPTEPAKALRLVIGHTAQDNQMAAKADI

SEQ ID NO: 958347 - protein, 77 aa, Homo sapiens
MAITLSLSPAGTLNGGTTISHWGEDGHDGQVPKSSGEYTVDGPGALTPLSLWLYIPEAEASGIPALIPKDIPFQTIR

SEQ ID NO: 958348 - protein, 46 aa, Homo sapiens
MVTGEMTVNEAAGLGGEWLKTVVDAGRWSRGLFGGLGVLTGISTIF

SEQ ID NO: 958349 - protein, 74 aa, Homo sapiens
PINARHTHTVIRIAHIEPRPSRTQPPSTGLNLERHRRIGNHLNLPLHQLNPPLTPTDPRPGIELQPNPLTQLHP

SEQ ID NO: 958350 - protein, 36 aa, Homo sapiens
MSPEGALTLVGTSDLPAVRSQSTEIRVGATICAGHR

SEQ ID NO: 958351 - protein, 87 aa, Homo sapiens
ELFLMYHCNLGQGLIYTVNTVGLKKSSCLSLLSTLGPQGNANTPGYILNFLYEAGSPYVSQAGLELLGSSYPPTLSSTKCWLSISRH

SEQ ID NO: 958352 - protein, 100 aa, Homo sapiens
RTCRVGTNALEYSYNSSSLEADMGGLFEAQEFETSLGNRVRLQLKKKKMGAMECISHGSFTLSPSDGRKGGLQALASTDGTRGNHLELRSVGMCMSVSIR

SEQ ID NO: 958353 - protein, 112 aa, Homo sapiens
LILEYPRKWSIQTKQLENQDKEDFETLIFWTAVSRVDPEMRILYTLPQPKDIPDEVLQLIHERDNICKQIHLTAQSGSSRVSEAMLERSQACLEQGASLSFPCFLNDQTVSL

SEQ ID NO: 958354 - protein, 40 aa, Homo sapiens
MSRSTYNPRQLWKCEAGGSRGQEFETRLTNIGEHLSLLKI

SEQ ID NO: 958355 - protein, 66 aa, Homo sapiens
NGPNRTLLKAGHGDQTLPGDDGGQGTCSDITVIRYHITRGMMEDEELNQIIKGDQYQWCRILDKLT

SEQ ID NO: 958356 - protein, 51 aa, Homo sapiens
HRILHLRKDTSIGNHMICSWDDLPLVFFGSSEKAIYHEVKNLSIPQRSSYY

SEQ ID NO: 958357 - protein, 43 aa, Homo sapiens
SGLLPCSRGDGWGHFHRVKWQRLCKGSLATRGWGMRSLEPLCL

SEQ ID NO: 958358 - protein, 46 aa, Homo sapiens
  misc_feature (23)..(23): Xaa can be any naturally occurring amino acid
LPGCWSSLDGSTIGTKRMRGPRXSCNSLLGHSCPCARCQHNNPEPE

SEQ ID NO: 958359 - protein, 36 aa, Homo sapiens
RDHRSRVEVSGHSRASALEADGTWSALRSRMQKPLP

SEQ ID NO: 958360 - protein, 49 aa, Homo sapiens
LFCGFIMLLICFILIFFSTLWTQMLVFLRVIGGSPALAAVFQIISLVTY

SEQ ID NO: 958361 - protein, 35 aa, Homo sapiens
MMATAFLFVCLFEMESHSVTRLECNGAISAHRNRR

SEQ ID NO: 958362 - protein, 126 aa, Homo sapiens
MVILFFFFSFLFFFLEMESRSVIQAGIAVTPQLTAASVPRVLKQFSCLSHPSSWDYRHAAPCLASLVFLVKTEFVHLGHAGLKLPSSDDPPTVAPDIVGITGLTHRAWANKGVSMLGRPCAFIWVS

SEQ ID NO: 958363 - protein, 37 aa, Homo sapiens
WGRDGVWLCGPDGSQTLGLKKSFHLGLPKHGDYRYEP

SEQ ID NO: 958364 - protein, 163 aa, Homo sapiens
LTWKVLSSHLQYQAFCSGFRGTVDMIISSPGVSRYLSTDSGVLAAVVGSLTGSRARGTWVVLSKLWDVALTHTDMQYFFCVKVVPVAATSAVKEWGHFPSVTSKYQREIIARHGPVSACSEHTSQNHLFHRLCGGGGGGGNAGGSLCGFFVGFLSLFLYLITI

SEQ ID NO: 958365 - protein, 38 aa, Homo sapiens
VSRQHCASNAGMALDIHVVTESKQPLLEIVTANSLVWE

SEQ ID NO: 958366 - protein, 81 aa, Homo sapiens
MGHSEYIIQLKEVDPCLAVLDLRYFQIWVQLLEFGVTGHLLALINIHFLKSFLSSHVDSSWGFPLEPDSWDITGQGFRILQ

SEQ ID NO: 958367 - protein, 60 aa, Homo sapiens
MQNFTTSAVGYVVLQSKHISFCEYLQGPINTHPQCPGQENMTARSDPQALSLNFGLEQVP

SEQ ID NO: 958368 - protein, 47 aa, Homo sapiens
LIRETSEQQPTCLYMNLQPVLRHILEAVKANEEKKQYLGILHSVTTV

SEQ ID NO: 958369 - protein, 91 aa, Homo sapiens
MTEISTFSGERSVKGESNRFSELPFSALGDCVWCYDIQAAAAGTQCGLVKADDCLEQLRTLSPELLDPKWQEIMEEGTARSYQVMCSVFPQ

SEQ ID NO: 958370 - protein, 37 aa, Homo sapiens
NTAKASMNGYAGIFHFHAVATLGMWVDVGRRMTLLPT

SEQ ID NO: 958371 - protein, 97 aa, Homo sapiens
  misc_feature (84)..(84): Xaa can be any naturally occurring amino acid
  misc_feature (96)..(97): Xaa can be any naturally occurring amino acid
AHPAIAESQVCVCVSGEHAPNMSRDGVPSYPRGHAKPKEKALASINMNNVYSYYISTCVYMLASCFLARKYGAHHTPPAKTIHXEGSFVPPAQFFXX

SEQ ID NO: 958372 - protein, 113 aa, Homo sapiens
HICNSLILLCGEVLSYSRAFLPPTDKSLSTSIHFEHFFFFFGLETESGLCGPGGGAETQSCVIATLTSGADRILPSTASRVAGPTGYVPPMLAHMCIKSRVSTYVAWGSSNPL

SEQ ID NO: 958373 - protein, 135 aa, Homo sapiens
MRTPHILHWTGCPFDKIQQPFMLKTLNKLGIDGTYFKIIRAIYDKPTANIILNGQKLKAFPLKTGTRQGCPLSLLLFNIVLEVLARAIRQEKEIKGIQLGKEEVKLSLFADDMIVYLENPIVSAQNLLKLISNFS

SEQ ID NO: 958374 - protein, 37 aa, Homo sapiens
MASNRAITLTAWPKVPFLGIREAKNPRSENKKLAAIL

SEQ ID NO: 958375 - protein, 48 aa, Homo sapiens
VIMPGPSSVGQTEMLGEEMMDLFDMLPILEEGDLRFWPCDVNMHTAHV

SEQ ID NO: 958376 - protein, 85 aa, Homo sapiens
EDQLEPDTALRTLLFKVHMAERASPRLHSVFASAATFNLPVTQCPYTQQMLALSPQMSLLGWATGTFAHGMRCSSADFLSSIAWR

SEQ ID NO: 958377 - protein, 88 aa, Homo sapiens [sequence omitted]

SEQ ID NO: 958378 - protein, 81 aa, Homo sapiens
AWLIGLVWGDDAGRLCLQHPAARRAQHVCYAHSFPLSHIRLWALQLLFVSTPALLVAMRVASRRPEKKRQFIQGEVQSEFK

SEQ ID NO: 958379 - protein, 51 aa, Homo sapiens
MIAGLAIRQGRTEESSMVSAYCEINHIMAKGHDGRSYSEVWCGFNPSMVQT

SEQ ID NO: 958380 - protein, 35 aa, Homo sapiens
TETRRENPNKLNEEMKQEILPLTPVEIPKILPGYY

SEQ ID NO: 958381 - protein, 67 aa, Homo sapiens
RGYVDESSTVQREETVKSPNQNLKGARRLDKSLLESGRDHRLLEATRSHLRNICLEMSSTDALSHHS

SEQ ID NO: 958382 - protein, 50 aa, Homo sapiens
VTRSLEIVSVSSIDVNMCCIHTHTHTHKYTLEINRCGIGPGLQGLDSGHP

SEQ ID NO: 958383 - protein, 43 aa, Homo sapiens
MEPTSIHEHWELGALMILRSHSATQYMIYILIETQLFTMKRET

SEQ ID NO: 958384 - protein, 65 aa, Homo sapiens
GIAGGVVARRTSDNSPGSAGHLVDLTGPRTLNVSGPGELVDITGHSDTGLSRPGELVETVHLMPL

SEQ ID NO: 958385 - protein, 41 aa, Homo sapiens
LEDPTRTAVARGGAPNENFMASVNLFVQYLPLINQSFLDVL

SEQ ID NO: 958386 - protein, 130 aa, Homo sapiens
PVRLAALVKEPDNSVFEMALNHTLELGFQFCSFTMSSQLPDNHTKPVYINDYPSEWNTVYKQGRFFEIDPVVAHCKRSVLPIVWEKKAFGAAPNLWELAQAHGVHLGWTQSVHDFQGVFSMLTRSLNAAS

SEQ ID NO: 958387 - protein, 84 aa, Homo sapiens
PHADMIKMPNARRSYRLPQAVELDKVNALHAAGKTRFGSEVQNVRGTLCRKCLRNATCLLVTQGEYGLLSCADLSVIEELVPRT

SEQ ID NO: 958388 - protein, 49 aa, Homo sapiens
LYDVSLMLQPSCNEVDQLTEKRQVWKFQGPVHCWVTPVVPDTYGKADVG

SEQ ID NO: 958389 - protein, 70 aa, Homo sapiens
  misc_feature (52)..(53): Xaa can be any naturally occurring amino acid
VRYTESLKSSRAPTNDEALMRIKTEEVIAQIRNMDQTEPAKARTVWTVLTAXXGVSKIKDQENNREEKGS

SEQ ID NO: 958390 - protein, 38 aa, Homo sapiens
MLILEKMWGNRGSSSAGKNEKKIKPLRAGTVAHAYNPS

SEQ ID NO: 958391 - protein, 41 aa, Homo sapiens
MNGDVAYKYSLSLLESLADVQARASRSGLIISIEFNIDGVT

SEQ ID NO: 958392 - protein, 117 aa, Homo sapiens
RHYCLLIIGHPMGVKWYLIVVLIGVSLMANGVEHVFVCIWPCLCAFGHLSVTENYLYISFAQLLIGSYVFLWLSCKSSLYILNISCLTDTGVASIFSHLVAYLFIFLRSVSVTQAGV

SEQ ID NO: 958393 - protein, 36 aa, Homo sapiens
LAALHMRLTGCPRIIYPPAICACQRVIPAAPVPVAV

SEQ ID NO: 958394 - protein, 80 aa, Homo sapiens
ERVDEKKAVIDTSYEPCDQLAETRTVIVVRYFLLLLKTWPGAVAHDCNPSILGGRGGRITGGQELKTSLTHVVKPHLYLK

SEQ ID NO: 958395 - protein, 71 aa, Homo sapiens
MWRFVVLDALAKRLRKVWFASEVIVKSSEKMCMCCSFVLNQSLHMQQYQVQTGSLPVYSSVLTKSPLRLQG

SEQ ID NO: 958396 - protein, 79 aa, Homo sapiens
MPKLTRRSRVLIGVALAVVVLLLVGGRLVDAYVDWLWFGELGYRSVFTTVLVTRLVVFLIAGALIGAIVFAGMALAYST

SEQ ID NO: 958397 - protein, 87 aa, Homo sapiens
VVYEDPGVPLSGYEYNEYTHAYVSIENDLYACGVVYPGNRTAGSNDISGSRSLRNATLVYPQVVELTYVPSNSVKAFRMSPQACQLL

SEQ ID NO: 958398 - protein, 35 aa, Homo sapiens
SQNLKSREASSAAFSLWSTVQESKAEELELLFRAK

SEQ ID NO: 958399 - protein, 87 aa, Homo sapiens
HLGSESVVSSYLVSRVHVELMCHQRIVQSWVVQSYIPRSQRINKSGDIHKGEEEGEESNFRSGKGSPKIQHLIQELKGTNHTTVPDR

SEQ ID NO: 958400 - protein, 104 aa, Homo sapiens
MKTARLSVPGNATLPPSGSLHSSFECERPVPVGGTWAVGDGQGNKGVGLGKLLGTFALGIQLNKEKLVQGSAQKDLLIPVLSPTQGTMPLEVVVELQIRAVRDR

SEQ ID NO: 958401 - protein, 34 aa, Homo sapiens
LGGQRQRAGEVSKETWGVAPSTLEGLEVRGTPAQ

SEQ ID NO: 958402 - protein, 62 aa, Homo sapiens
RLVQVYKSQCMGSSVQSSLCGQRSKVPKLKNLESLFEGSKAPQHRIKDVGWNTKTSLDFSMI

SEQ ID NO: 958403 - protein, 212 aa, Homo sapiens
TVKAAVHAAVMTDSCASTNASCSRGIAATLAPSDDDAWEIDGAAVNGFGADKNIYIMHLHFVDQLINEQRVTKRLCCFRPMPYGIGRFQEKSSPGSTAELCASVDANASMSAKITFMIIPNEVDLSRIVDHHFMHCVVYADRSLDCVTGRASPSRSGPSGLVNLAHYSFAEHVTFKVRAQQTSQADLSGHFPIIGLGPIHTAEHMTDIQATK

SEQ ID NO: 958404 - protein, 120 aa, Homo sapiens
RGFKVLYADQVGAVIYTLAPDDTDRYLTIWLQGSDCNFDRFPLIMGGRLPIAKELLCQIIGHPIPTKPHRQSHLFIQIIRKTWQPIRHTQGKNGHLLEKTLIGSLGGAARCKTPWVYPLS

SEQ ID NO: 958405 - protein, 33 aa, Homo sapiens
SVTRHRRIHTGKKPYECSDCWKAFNDPSALRSH

SEQ ID NO: 958406 - protein, 57 aa, Homo sapiens
AHDRRVPEILVCQSLYSFIRTPFSSSIVRDGLDLDGLGVCAPTKCGLHRRSVLIFGF

SEQ ID NO: 958407 - protein, 64 aa, Homo sapiens
LSHVVLILHPRHRALPQALDIELMKRLSKVVNIVPVIDKGETHFNPGRQRVHLQTGGSPQNLVV

SEQ ID NO: 958408 - protein, 36 aa, Homo sapiens
MIRYLLTHLHARDTYNNKQGTSKCDTAKPLFLKPYS

SEQ ID NO: 958409 - protein, 47 aa, Homo sapiens
MSSNRKMSTWMAEMVTPLLSDGSMYTHFFHIFNYCIKLRSDWTRHRA

SEQ ID NO: 958410 - protein, 49 aa, Homo sapiens
MSAAGATEAAPSCCWGLWLTPPEYAWVKAGACITEEKALVDFGYVGIDS

SEQ ID NO: 958411 - protein, 38 aa, Homo sapiens
MLEDFAFLVSEINGRGVYELQLSEERDLLKGTGTGASI

SEQ ID NO: 958412 - protein, 32 aa, Homo sapiens
MSKEREPTGVYEYGQYCASVHGYWLDCLTTGD

SEQ ID NO: 958413 - protein, 66 aa, Homo sapiens
LGNNARIMTAAFVVVVIGGLGSFWGVVLAALLVGVVRGITVQFYAPAGEASMYLLMLLVLIFRPRV

SEQ ID NO: 958414 - protein, 38 aa, Homo sapiens
RSLEAAVQGKKYQHRRKTKGGRLSKLAHPTFFHLLYTS

SEQ ID NO: 958415 - protein, 33 aa, Homo sapiens
LSDESVWSLRRTPSECWYHKTVSGLRTEDEAAY

SEQ ID NO: 958416 - protein, 32 aa, Homo sapiens
MARLPRCDLYNAEVSLKAAHIRVNLFTDFDKY

SEQ ID NO: 958417 - protein, 59 aa, Homo sapiens
MIDRDLDNKLMETFRRLGEHGADNDPSGIALSSVHVTSPDYGIASDSCQRLRDASQMHR

SEQ ID NO: 958418 - protein, 34 aa, Homo sapiens
PYTLSVVQRILAFPCNQFGKQEPGVTEEIKEFAA

SEQ ID NO: 958419 - protein, 63 aa, Homo sapiens
MISTALVVDKGSGMCQARLRGRRCPPGLSSPSIVGAPHGTSGVIGGQWVRKDSSSGATEAHEQ

SEQ ID NO: 958420 - protein, 59 aa, Homo sapiens
HHRTYDRLMLSLSDTKHNYAARWETPFLPVSVLEMGVSNQQQQCGKREFSQSSVVSQRH

SEQ ID NO: 958421 - protein, 150 aa, Homo sapiens
WPRVVYVVCRELQNPVSADTCKSSTWAPFNGTSTASFSRDRRTSSSCFLLNVSSSLFLVKLQQSEVYPSKILYPEKTHIFMEGASEMKAKTRLEMSRNGRIPQNPVPVMEGWHRARLGEDEGLAHPCAAHGLQNLELPGSALELHYSSSA

SEQ ID NO: 958422 - protein, 32 aa, Homo sapiens
MRLSVVVFVLIATLLRHGVLRNRLHLNRGCAV

SEQ ID NO: 958423 - protein, 38 aa, Homo sapiens
MSSLELILHIAAIMPLNNVNQQNIYSALVVAGILQAEK

SEQ ID NO: 958424 - protein, 139 aa, Homo sapiens
QYDVQKKKMSTEPLMAMRKLPTPGDRGLESRTKALTCLLGQSPQPDGSSRQLSMEGTVAVPGPCGADTGGQGKGRMGSSQEVPGCRGGRMTNGRVHVLVVHSAYGRIHKGGRPICHDSITPSWMWPKDNVTAAGRAIVR

SEQ ID NO: 958425 - protein, 38 aa, Homo sapiens
MRDDRLLLKISEKEEVTTREGEWHQRRVYEIGGWPTAR

SEQ ID NO: 958426 - protein, 83 aa, Homo sapiens
LEDPGVPFVFLQLLSHSLPLPLFFHESRGPGKTLYWAPFLTVILDFSAVLRRQTSPVFIPLRIRIVFEKSKGVGYSGYVCNPS

SEQ ID NO: 958427 - protein, 42 aa, Homo sapiens
ADADVSHPPRRKSPENPWLMNGHWHQLEEEAPPGPNNLSGPL

SEQ ID NO: 958428 - protein, 38 aa, Homo sapiens
MVCRTLDLGHCQAPTVGNPNLSIRCLISLCRCWPERCD

SEQ ID NO: 958429 - protein, 47 aa, Homo sapiens
ANTPSLSRLHMNSMNRGIRQYTRLRRRSIKVNVGADGQLQKDDADAD

SEQ ID NO: 958430 - protein, 37 aa, Homo sapiens
AVVWCGRLGRDRGLLTHLQADPFAPNHCPPPTVTGDF

SEQ ID NO: 958431 - protein, 33 aa, Homo sapiens
MLRLNTFEFCYILNDEASCPPFPLFCPPTVTGD

SEQ ID NO: 958432 - protein, 48 aa, Homo sapiens
DAAICIQRAHQVAQGRQAVHGPGVGRRVAQGHDGDVPIALDLQTGMEA

SEQ ID NO: 958433 - protein, 47 aa, Homo sapiens
YVVCAHILKEGNLKQKEKPNHFEFALNSGLNLCSPIYSEESHTVTGD

SEQ ID NO: 958434 - protein, 75 aa, Homo sapiens
SIGASRFTKVLIKWERPEERWTDGLEDIANQSSGPVKLFLREPIKRWKKALLLLRDDRGSRNGEEAPVVTRLQVY

SEQ ID NO: 958435 - protein, 114 aa, Homo sapiens
CLAEHEAKMSSPSQSMRKVQDSKAERGAHDRKGQEEIVTLHAEIKAQKKELDTIQECIKGKHAPTVSFEERERKHKAAEKELKDQLAEQTQKLYVSREEEGKKNKEKLSTSAWQ

SEQ ID NO: 958436 - protein, 37 aa, Homo sapiens
MFVGEAPGRDEDLEGRPFVGGSGKLLDLMMGAIGLDR

SEQ ID NO: 958437 - protein, 35 aa, Homo sapiens
MPWRPPGNRTPTPQETQICLPFIERQVELVDPDIL

SEQ ID NO: 958438 - protein, 40 aa, Homo sapiens
ITHRPTPTGTLPHRPLWVPMRFQIPPKRTKSSQHPDRRVR

SEQ ID NO: 958439 - protein, 87 aa, Homo sapiens
AIITPVICMYIIHDDLKQVKNHKKKQNRQFLPELLSFHPCDLFLLQPNCTTVRVSYISWPESQELTTKHVVTPVPVHMRKIPFNCHL

SEQ ID NO: 958440 - protein, 123 aa, Homo sapiens
KSEQQQDFMVKTDRTKLPQCGRGTRKWLLRNMALLVRVLRNQTSISGVSSFQWVRGLADFKNEAADLHSKCYQLLKVVRTQRVSSSKIYGEDRKNKASTVWKGDLSGLPLLARVASIYSLICP

SEQ ID NO: 958441 - protein, 46 aa, Homo sapiens
PTPQLTATLDLNPLSKARIEPKTSWFLVGFVNQSHDGNSVHLMPLA

SEQ ID NO: 958442 - protein, 70 aa, Homo sapiens
AWSASGISERIKTDDRPMEQNKNPEINPDTYGQLIFDKGGKNKNGKRKAYSASIAGRSLNAASAVHLMPL

SEQ ID NO: 958443 - protein, 82 aa, Homo sapiens
NRARYVLAALSERPFAHKATLAFFSPSRQSPEGKEGLGCLGLPGPCSFARGFLSLKPTPNGFSFVEKQELAGKCLRSLNAAS

SEQ ID NO: 958444 - protein, 56 aa, Homo sapiens
SVRSRDFDSGRFLDDSEPTKKPNSDIYPKPKPPYYPQPENPDSGGNIYPRPKPRPQ

SEQ ID NO: 958445 - protein, 50 aa, Homo sapiens
VFPLSFFPLFTRLRERLAAHQDRVEQIAAIAQELNELDYYDSHNVNTRQR

SEQ ID NO: 958446 - protein, 71 aa, Homo sapiens
LAALSERLPTYTTAIATRDLSCDLHHNTTAHGNARSLTHWGRAGIPSASSWTLIVFLTVELQQALLVLYFT

SEQ ID NO: 958447 - protein, 70 aa, Homo sapiens
MSRYRASGISERSMYESKPGSNLSHYSDTRSLTHCTTRESMIVLNGILNGEFFQEVLQFTFPDVHLMPLA

SEQ ID NO: 958448 - protein, 76 aa, Homo sapiens
IRSYVNGTSHVLGQPTHKKVREIIPPIQSGEIFLLIKIISGTTNNEGKGEDIGLLSSVNTLDEYKNRLFRSSVMAY

SEQ ID NO: 958449 - protein, 73 aa, Homo sapiens
RASGIVNASSDDVDDVLRARRVKVVESHPSATREPEYLLFRLGIGGLVLLRLGIGGLVLLRLGIGGRSLNAAS

SEQ ID NO: 958450 - protein, 95 aa, Homo sapiens
RCYHHRIDVSMIIHCEYRSSSCHLDLAKSGASGVYLDKKPISGRVWWLTPVIPALWEAKAGRSRGQEIQTILATMVKSASLLKIQKLAGRGGTRL

SEQ ID NO: 958451 - protein, 134 aa, Homo sapiens
GVCMDTNELSAPGRVWAHGTRTQCIIRQENGTSAYWRLRITIYTKPMAVARCSGSCLSSYVLGRLRHENRLNPGGGSCSEPRLCHCTPAWAIGKIDTEASLCCPGKSQTPGLTRSSYLGLPKCWDYRQKPTRLA

SEQ ID NO: 958452 - protein, 66 aa, Homo sapiens
TAAKYIIACNFVSTHFTAHAAFRSSKANLISICAWHLRSIRQHHNSHTHASQHFTMSSTQHHPTGS

SEQ ID NO: 958453 - protein, 57 aa, Homo sapiens
VLQGPRGRSLCFTLSSCTCTGLRRGQGGRREQAVSPERTCESSLELSWHLPCEFAIV

SEQ ID NO: 958454 - protein, 162 aa, Homo sapiens
RAAECKWHRTDCLGAQARCCSRIRTALSPSHPREDPQEPWRSKSLEDPVVALSGHRCHPALAPYSPEPEIQPGTAQPHTGRLTDTKQLVHSFSEGRDQGMLPMPTGRSLYPDLHGTKAMQSLRLQRVACGWTRAALAGREHPGFTGSCCGQAAGVPTLLETS

SEQ ID NO: 958455 - protein, 78 aa, Homo sapiens
KQAHPAQTSEEVYSPLPCIRRYIKATDNAEDGRNHPVDTSNKKDTKSNDARHDSSTVVDSKSKPLLTENYQGMYFLTL

SEQ ID NO: 958456 - protein, 74 aa, Homo sapiens
IPLRGVCVCYCEDTATAGSKHLKPQSWPGTVAHACNPSYSRLRQENHLTWEAEGAVSQDCTNALQPGRQRETPS

SEQ ID NO: 958457 - protein, 49 aa, Homo sapiens
DPFDGSYYIAQAYLERSSDPPASASQSAGITGNPSAQPQCLKEDWPLVG

SEQ ID NO: 958458 - protein, 134 aa, Homo sapiens
KFLGQAWWLSCIPAFGRPRWADNLRSGVGDKTGQHDETPPPLKIEKLAWRGGACLWSQLLGRLKQENHLYPGGGRCSELRPRHCTPARATSEIPSQKKKGFLIFRPGLLPNFFGDLPLGRGDGGRQLLSGIKGG

SEQ ID NO: 958459 - protein, 82 aa, Homo sapiens
KQQDLNRVRRITQVRVPRAMVKIPRGHPSSDPPIKDHCHPVESGLGGCTQVWPGQHSGRVLVVRVRVRLHYREGGKWQLRQI

SEQ ID NO: 958460 - protein, 41 aa, Homo sapiens
HVNFLRQWDMSKHDTSRDLILPPPQLKGLILQHGPPLETLC

SEQ ID NO: 958461 - protein, 52 aa, Homo sapiens
MGLISRQDSSVVALRFSFLVVALGKVLRYSLSCNRAKTHPYRQPSKPPTNVM

SEQ ID NO: 958462 - protein, 39 aa, Homo sapiens
MARNVPASPSPSGVIVSFLRPPQPWFLYSLEDCESVLTA

SEQ ID NO: 958463 - protein, 159 aa, Homo sapiens
VNYTSHDCSATAEDPTEGAIVEVALEGYYKVKLFDHGGSSGSEIGEGEKLDLPYGLERAIQRMEKGEHSIVYLKPSYAVGSVGKEKFQIPPNAEVKYELHLKSFEKAKESWEMNSEEKLEQSTIVKERGTVYFKGGKYQRAFTQYKKIVSWREYKSVLT

SEQ ID NO: 958464 - protein, 36 aa, Homo sapiens
EDLQLFRTGLEYTPWLYAGSSAEGSMGLLISTLPGY

SEQ ID NO: 958465 - protein, 76 aa, Homo sapiens
RVSRSSVMTQDAYIVGFIYAIFNVTVLPNHPALTKIPCAKYKRNNIFSLITFIHNYSFAMSGPGKDAQQQAKQRNQ

SEQ ID NO: 958466 - protein, 76 aa, Homo sapiens
WCVSSFITCDSLVFWRAESGGSQGQEFETRLINYGEPVSLLEIRNERELVVTRLQSQPLGRLSQENQLNPGGGELR

SEQ ID NO: 958467 - protein, 37 aa, Homo sapiens
PSGLLSLGLDTGQQQDAQEFSKLFMSLLEDTLSKQKN

SEQ ID NO: 958468 - protein, 50 aa, Homo sapiens
LEDPLAGTYCLSVLWVIFAFSALFSYRIKWLAVVIMGVVLQGANLYGYIT

SEQ ID NO: 958469 - protein, 65 aa, Homo sapiens
IPVLSWIILKSQATITRCSQPSVGVSGKRRREDESMIKLGYGLIDLKDATLFNSSSGIFAGTTKI

SEQ ID NO: 958470 - protein, 120 aa, Homo sapiens
MVTIWWSSARLIHCSFLNASETIASEECAQQIDDMHCKLQRLQAALINRKAQFFFMTAPDHMSHNSCFKSLNKLGYEVSPHLPYSPDLSPTDYYLFEHLDNSLQGKCFQDQQDAENATKV

SEQ ID NO: 958471 - protein, 124 aa, Homo sapiens
MASNRAITLTARPKIPFLGIREAKNPRSENTRLATILEVATTILEVAYHHLGSGSPPSEELCEQGPPGESIYGEEKSSWYHTLPKSQKQVHITPVFISDIRDFFPFTFHYRMMQQEGPHQIPVL

SEQ ID NO: 958472 - protein, 70 aa, Homo sapiens
  misc_feature (55)..(55): Xaa can be any naturally occurring amino acid
LGASGRWQFGSQCLSGPGSGISTHSHILQVVGQQFKHSNVSIKWLWQAFTHSHHXHPVSEVGSQSTIIHH

SEQ ID NO: 958473 - protein, 66 aa, Homo sapiens
HRYRECRRCASTLLYASCFMIRLIDDAVIWYSLLRYCNSLKFPILSSHTSPGPATTLRESGRMKFR

SEQ ID NO: 958474 - protein, 31 aa, Homo sapiens
HELVRRFPCEQQSTQYMRHCASAPGGLPVLS

SEQ ID NO: 958475 - protein, 176 aa, Homo sapiens
GPASINWTSKGHEVRLRQRRFVQTEAPPTNVCIHHEVTPTFGGTVVTPHSRRVSGKMGWHHSNLGHNLGTGVARFYVQSRSMPLKSLWWWNSHIVAEKRPLGTPWETPVRGRTPLAVESCSARSLDPAATFSRITGAPDKLTSGNLNPQQDSDLFSNRARYPVSNLVPYSDIIAGS

SEQ ID NO: 958476 - protein, 51 aa, Homo sapiens
SNGPSASPPALNPGDRRSHSHQGFMSGQQVNAHLREQPGHPVGTHRRNLMA

SEQ ID NO: 958477 - protein, 110 aa, Homo sapiens
VLSGFIGRPGSPVSNGFLIDGYPRDVQYGEYFELTGPETMTQRLLKRGETSGRLDNNEETIKKRLKTYYNGPQNRVIAFYEKGGIVRKVTAEGSVNSVFSQVCTQLEALK

SEQ ID NO: 958478 - protein, 51 aa, Homo sapiens
GLDRFSNASCSTLNKLGIEGTYLKIIRPIYDKPTANMWVGLNGKMLDQRIE

SEQ ID NO: 958479 - protein, 42 aa, Homo sapiens
MVKLLNKLGIEGTYLKIIRPIYDKPTANMWVWLNGKMLDQRI

SEQ ID NO: 958480 - protein, 37 aa, Homo sapiens
SPAVVSSLMPQQSTSGGGGTPHWGALQLQGWCSSSIR

SEQ ID NO: 958481 - protein, 53 aa, Homo sapiens
  misc_feature (28)..(28): Xaa can be any naturally occurring amino acid
MDSFFYGLDQQAACSPELGFYFRGTAQXYVTRRVAMTASGKPAFCNCLCTYAK

SEQ ID NO: 958482 - protein, 76 aa, Homo sapiens
IVIIAHAWLSPFYVCAMTAGTCHLHSVTRAPGYGDTEDQPLRGGPSEGVTTTWSQDSASSSTDQPPCCLQNGLSNV

SEQ ID NO: 958483 - protein, 41 aa, Homo sapiens
WQVEIGGASRLSGADSAQAVRGASCQAVPQPAAVRFWSVGP

SEQ ID NO: 958484 - protein, 143 aa, Homo sapiens
SILSLNQMAGKTVEQVLNNMILAEEARSHHSVYPKHGYSRKDAKVRLEEMCSNGCNDARYFLGSSTRVPFNEVLSDLVRCYTISCALRGPGFDRYPRTRSNVISTDTVTIGVVWRSVKSVAQYESCEIESLGNSIGCVLKVVA

SEQ ID NO: 958485 - protein, 60 aa, Homo sapiens
TIQAIKVHWSQAKSPVYLSSHFSWAAHCKWHIILVLYVTNVRTSIISHCSANITGMLKPL

SEQ ID NO: 958486 - protein, 35 aa, Homo sapiens
DLLRRRSWSTNNLVRRRSIGCLSLRQPPAWPVALE

SEQ ID NO: 958487 - protein, 43 aa, Homo sapiens
QEQCGNRIVKHYICLSQKPVQSRSQRLWKIIPILQCHQPTSVD

SEQ ID NO: 958488 - protein, 55 aa, Homo sapiens
RLHSKTYYCQHVDSDPLIFVRRDQCGCQNELWRAPSVFIYPPSDEQLKSGTASVV

SEQ ID NO: 958489 - protein, 118 aa, Homo sapiens
TLQYPVLTQGANHGTLFGHQGRGRGPHEPKRMKQNVDGLLLDTLVRHLNHVDNDQEPPYSMITLHEMAETDEGWLDVVQSLIRVIPLEDPLGPAVIILLLDECPLPTKDALQKLTEIL

SEQ ID NO: 958490 - protein, 36 aa, Homo sapiens
AHTISRRASLHCSSQGWPGAFSSAHGQVHTSGGLFA

SEQ ID NO: 958491 - protein, 131 aa, Homo sapiens
MRSQVVLCLQMHRRINVHEPPPRFQKMYENAWKSRQKFAVHGSGGPSWITSARAVSQGNMGLEPPHRVPTGVLPSRAVTKGPPSSRPRNGRSTDSLHCVPGKAADTQCSQKGGPYPAKPQAAGLPKTLRTY

SEQ ID NO: 958492 - protein, 39 aa, Homo sapiens
ELGTGQTLNYVITDLIHTIASNTNVNNIHTMPYHIVQRL

SEQ ID NO: 958493 - protein, 44 aa, Homo sapiens
LELLEAMSGPAWDGLSALLLLQGALEHTIFTITITIIHTTHPPP

SEQ ID NO: 958494 - protein, 107 aa, Homo sapiens
DGPFQKRGQLMVVSFWEKSRDTRAMFSTRGCREPLSLTWKPSSQPTIPIVGIVAGLSCKAVLAVLGAMVAVVMCRRKSSGGKGGSCSQAASSNSAQGSDESLIACKA

SEQ ID NO: 958495 - protein, 98 aa, Homo sapiens
RYRHVSGIQQLAQWSFVSGHELPRASADWDAGQARCSHCASVVKHVCTQHCGTSAHSSTHPGGMQQLPSSNSCPRELADTTSPSTPSLHGLGRSLLGS

SEQ ID NO: 958496 - protein, 49 aa, Homo sapiens
MTTNDDDETVTGLLTGGYWTVYELTLLGGLLITYRILGHDWTLTRPDTD

SEQ ID NO: 958497 - protein, 88 aa, Homo sapiens
  misc_feature (63)..(63): Xaa can be any naturally occurring amino acid
  misc_feature (77)..(77): Xaa can be any naturally occurring amino acid
  misc_feature (81)..(81): Xaa can be any naturally occurring amino acid
DIVDHLVTGDIWVYYEEDYTNAWAVMITLEMWSLPRRLPGWPSSARIRRLRCCAYGLHAQCAXIDRYYVFQMSYVVXYENXIAVSRAG

SEQ ID NO: 958498 - protein, 48 aa, Homo sapiens
SRGIPFQALLRQFPTLGEIAECQHIPGCNCDKSRPGKTTFVSCNRRLE

SEQ ID NO: 958499 - protein, 41 aa, Homo sapiens
MSITSGNEFETSPANVAKSRLYHEYQTEPGMVVLGCNLAWN

SEQ ID NO: 958500 - protein, 70 aa, Homo sapiens
IARTFRLDCRPASGSVDCCLAGGLRSWKPTPNVFSFAEKADVDLKKPCVHWPLHPTPSHLGRAPPAIKPG

SEQ ID NO: 958501 - protein, 57 aa, Homo sapiens
SYCTAKKEVDKNSNEYLGAGASATTSAVRKSLDKAKQRNVETQQPVLELDQLTHDLP

SEQ ID NO: 958502 - protein, 56 aa, Homo sapiens
MDVRNATAGSGPPNWSLVIGAGPSLLAGISRSELEYPALVHYLVVVPNTWPGHHAK

SEQ ID NO: 958503 - protein, 64 aa, Homo sapiens
HAFHSSIQWLARCRVCTALPAPQSLGRPARGQSRLMSSSSSFLSFVSPSFCSGLALPSCTGHRS

SEQ ID NO: 958504 - protein, 40 aa, Homo sapiens
DGDYVWFRTTDYYHYLTYVLVGCDLLLTYRTTLYVDDLRT

SEQ ID NO: 958505 - protein, 48 aa, Homo sapiens
TGIIQSQPQSHHPCCLSILLVHQHTFQCSTSSTPSIMPSTGTHSGQHT

SEQ ID NO: 958506 - protein, 45 aa, Homo sapiens
KSAASITRGSNIPSIPSPGAGVSALFVFLILFTFSTHHAKHQFSK

SEQ ID NO: 958507 - protein, 88 aa, Homo sapiens
AKAHAATSWGLQQHHSVTLRSGIVHAPTHQPISANHLGSLQQSAFSVASFTSLPSFPPSYFQAAAHFIFVHTQLIVIIITTTTTTTTT

SEQ ID NO: 958508 - protein, 75 aa, Homo sapiens
MATLPPCGGCLRWVWAVLLMHLGGRTFFAFRGTHSARCCLFGLGHAPAWGRRSGTRGPNPLPRLAHRHTFQGFRI

SEQ ID NO: 958509 - protein, 58 aa, Homo sapiens
DLMVRRHTGAQQVLDNSADLAKRFRKLGAPVVMVRVGWSDTFAEALKQEVDRPSPANL

SEQ ID NO: 958510 - protein, 53 aa, Homo sapiens
LKVAGSNVFTVASKRIKYLGVNLPKETKDLYSENYKELMKATRDDTNRCLRTY

SEQ ID NO: 958511 - protein, 57 aa, Homo sapiens
SYGKAQASFGTSKPCMHIHPKQAVMAAILTTADLHSMHWASTTCAFAHHATGYLQTR

SEQ ID NO: 958512 - protein, 62 aa, Homo sapiens
GCLLRGLIFVAVYNTIITAQNHTPSGSLKVHDTSDYCSFIKVSSSQDMSCAPMMATDASYFV

SEQ ID NO: 958513 - protein, 47 aa, Homo sapiens
LEDPWFTRGFLHFAQHFSFLPAMEEHVCFPFCHDYKLPEASPALRTY

SEQ ID NO: 958514 - protein, 94 aa, Homo sapiens
MTLNEHAAFKHLFNKAHLAPPLIHSTLSGHSTRFREHRVGGKVTDQQDPKAEEFFLVQNKMKSLPCLPPSTQTGQPSDFSIFSPPFLRTYEGTE

SEQ ID NO: 958515 - protein, 78 aa, Homo sapiens
MVAGTCVFAKQSLWAFSLRLFPSEERPFSLKLRGHFAEFLNESSPAAFVFSTRPPPVGFRIRDTFGLARGTRARNSVI

SEQ ID NO: 958516 - protein, 69 aa, Homo sapiens
PAESTSRVIPLHRTACDGRSTSCFSASSKGVRPTDAEPSPAGAPMFVKPRFAKLWPNLSKNPAAAHVCP

SEQ ID NO: 958517 - protein, 66 aa, Homo sapiens
RVVQQDIGLYVWSELTISSLTTYPAQVPGTGETRRSSSSYQSRYWSQSVRLKENSEATTVFQTQQP

SEQ ID NO: 958518 - protein, 72 aa, Homo sapiens
MLDLMRISVIRQGQCSWGKAAWCTISSVAGSRVKIITYEIRKATIRVVPLYLALVHSARRTDARTSLIFDHS

SEQ ID NO: 958519 - protein, 33 aa, Homo sapiens
MCTDIYVLVVNDYPRHEINISYLIVPLFGPSHM

SEQ ID NO: 958520 - protein, 60 aa, Homo sapiens
GNLCSRPGTDEGYYQVKMRNIRRFLYDGYKCKVTPGLPGREITHQELCLAFPYAMATVAR

SEQ ID NO: 958521 - protein, 47 aa, Homo sapiens
MQGQVGAPYCCLSYSSSRDSSIITIQDILHPCLVPYISPCPCHMQGN

SEQ ID NO: 958522 - protein, 36 aa, Homo sapiens
MQGQMSCVGSGACAVISSRVEIKKATYWSALSLAHM

SEQ ID NO: 958523 - protein, 40 aa, Homo sapiens
EQTDEEVPSPGIVDSPIPGEGKTDTNQTDEEVSISWDGAI

SEQ ID NO: 958524 - protein, 103 aa, Homo sapiens
SNGCHAAGSDVAASRDLIAVYTAGSNCSSSQDLMAVYEAGSDVAASRDLIAIYIAGSNPAPSWDWDLMAVYTAGSTPAPSWDWDLMAVYTAGSNPAPSWDWAI

SEQ ID NO: 958525 - protein, 59 aa, Homo sapiens
RRRYLCHHHINIISITISTVIITITTINIITVIITIIRVITINIKSRTITIITIIAGHE

SEQ ID NO: 958526 - protein, 87 aa, Homo sapiens
SIVAFTICTMSAALLNSLCVTVPTMPICIVASAKDTTRDSHTAATLGRGLTKVFICKNLAVYANTGENTVDGDVCKWKRSGAQRYED

SEQ ID NO: 958527 - protein, 36 aa, Homo sapiens
LHCKAKHPLELERRGRLNHVTKCALAPCHSARRIRA

SEQ ID NO: 958528 - protein, 48 aa, Homo sapiens
  misc_feature (15)..(15): Xaa can be any naturally occurring amino acid
AQCSCILQADLEYPXSYASPKQVVYRPRTCAGIDETRRNSALCALPIC

SEQ ID NO: 958529 - protein, 36 aa, Homo sapiens
RYLLMQGKELCEGERTIEKATYGAAPLRRYLALPYA

SEQ ID NO: 958530 - protein, 40 aa, Homo sapiens
LHMEGKELCKAADTVGHPLELKRREDEPRDEIGALALPYA

SEQ ID NO: 958531 - protein, 70 aa, Homo sapiens
LLIPVIRGVSPRTVDVHGNHLERICKHTCQAPSIVAEQSHLQPDSGLGLHLLGHLPPRPGIQRDLALPYA

SEQ ID NO: 958532 - protein, 208 aa, Homo sapiens
GSAVKCCASDSRNTVDHGQFIFPDDETSASAAMRSGASSRYSATKVSAVPASVASNATITTDHSGRPSSSLCDANQAINNSNGRWMPRKVTASSLALKERGNTRESPAYKRIQHSGKRALSVAESVWSQRDGSLRPRWLYPCAAPVRLNKRSRARGGRAPAHAKRADTSRLKTPCLDLVAGVDRHDAAGDVLEGGTRKPGLAIMSLSD

SEQ ID NO: 958533 - protein, 215 aa, Homo sapiens
GSDRAYTHRYADGSDGRQRRRQRVDRLGDDENGYVTRYGYDVMGRIASIAYPDGDSRAWNATTQSFQQVAGTEYGLGAGHWRQTVATGNARKETYFDAFWQPIVTREYDLAAVGATQRFQRFAYDHAGRQVFASYAGANDALSTGVWTGYDALGRTTSVSQDSELGLLTTLTDYLAGNRTRVTGPRGQQTLTSYQAFDQPVYDAPVAIQHPEGAF

SEQ ID NO: 958534 - protein, 145 aa, Homo sapiens
FRGMIQLVTCLEQCAAVQASSRTRAGDLEVLDQYRNAGKAAGDEAVVIGQQRLEAGEQPYLAEDLALFAGEDVRGQVVAGVHSRSHWRASSGILVVNDPRRVTEYAGTGRHVLDHDRTGTDHCSVADMDAGQDGGVWVHDRMLTD

SEQ ID NO: 958535 - protein, 211 aa, Homo sapiens
MLALLALIYGDVVQRHRAYARCQLLGLASPAGGAAGALSCACAPNAVASTQAMVVYRMAGTGCAAQAPTGRVAAMVNRHRLIPSQDKVTEYGGAGGAGMRMERGWLLSARVWPVGAVLRDQCEVGPVCVTPKARCVALTSPCLACVRFRVEAQAIPFQGSIVRELSRLGMLRCSTSRFACTLESDGVYGKRCGIGAVLCYVADGMAKDVAH

SEQ ID NO: 958536 - protein, 33 aa, Homo sapiens
YDGEVRIVALQLHLFRGAYATALDSSIGAERKG

SEQ ID NO: 958537 - protein, 69 aa, Homo sapiens
LWDKLIGGSFSGRVGGSDRCEGEKLDVRDRSWNASCFFSYLISVSVALSDGICCLLVALAVKDSSFLWK

SEQ ID NO: 958538 - protein, 36 aa, Homo sapiens
MRLHHTTRLGIIPREGAFKLNLVKQKEVGMMKDGYR

SEQ ID NO: 958539 - protein, 41 aa, Homo sapiens
STFWRRYVLLPHSPHLVPTTLLHVDTSSTRHFYNTTVTHTL

SEQ ID NO: 958540 - protein, 79 aa, Homo sapiens
QRNFCSVKGQSDVLLSTTSIEMISSEDVSYFAWMALERPGNLNKVVEQRPDVGTIESFSPGDFRTNMNVVHQNKQLESC

SEQ ID NO: 958541 - protein, 47 aa, Homo sapiens
LFRIAVSPARPSPLSSPPFGRPRPAAPLRSRHFAHSLANMVQTSLIT

SEQ ID NO: 958542 - protein, 42 aa, Homo sapiens
DSRGSPTELYPVQTLDVKSGLWYLEDKEYQVIDVLLVLSDFK

SEQ ID NO: 958543 - protein, 108 aa, Homo sapiens
MPMNRIVRHINGYKEAAHHNLLVEVQHTEEPTMKTSKKRKQKKIWTSSTRGGGTQTNDKVDTTEQKHKETDLLILFKDDSFAKKTCSKEHKLQVEAKLRAKQEPEAKH

SEQ ID NO: 958544 - protein, 82 aa, Homo sapiens
VHRDGQKFKSDHHVDVGVREYFCLPTSKLRATRGTRARIRCPRHSFILAGVQQMDKFRNLTKHVDVGEENTLLPLASKLRAN

SEQ ID NO: 958545 - protein, 58 aa, Homo sapiens
PRAYGLCFAPGGSSWVNGGQSGVSGGLTRCDVRRSYRKPPTKLVTEVVQRSACKQWLT

SEQ ID NO: 958546 - protein, 54 aa, Homo sapiens
SEALVVKFVGRGTLLPSQIRSLTNSYLGSIKLVGREHLCLGPKLPAPSYVTRGN

SEQ ID NO: 958547 - protein, 69 aa, Homo sapiens
EVSQQPHNAGSLSGDFQTQELEKVSLLFKPPEWCFCYVQLEQTETGGSHRNTHCKATTVYFPVASGRIL

SEQ ID NO: 958548 - protein, 66 aa, Homo sapiens
MGPLPNRENEGIMPPCLNLADKETLRRHLHTCWFPGTWRQGDLQERKLRVFGEHNKGKQGKLPANR

SEQ ID NO: 958549 - protein, 85 aa, Homo sapiens
AVSGTKIHANGRHLRTGEKAVVRLRYLKHPEYLKVGATLQFREGVSKGIGHVTDVQAITAGEASGENGLLNPSGCGQFYRCPYNI

SEQ ID NO: 958550 - protein, 176 aa, Homo sapiens
RALMKGAGEVWSVARAFDVCANVSDASYSESVAWPASRMHPGLARRRSAGYGLDGRGLPREGWRDAVPDVLKSSSVVQVVRVEVITKYHAGEMAWRVGIDQQDPMPLLGKHPAKVVDGRSFVLTPPLWLNKTNRFAITELPEIIISIVSIGDGEPYLAPNGRHLRDSTGLKLPANR

SEQ ID NO: 958551 - protein, 89 aa, Homo sapiens
LQSQASNSQLSVYLSLAAMQCNGNRVAAHARSGSTSISAANVQPLQQCSSHHTHVQLVRWFAQAGNSNPSRYPTFTTLFTQHNQPVTQP

SEQ ID NO: 958552 - protein, 51 aa, Homo sapiens
GSFDWRELMQRLPILTSFECQTIEEYNSLTKMLMLDKRILCSPASKLPANR

SEQ ID NO: 958553 - protein, 42 aa, Homo sapiens
MHAYSLQPSFAVPEIEEFKSDQDVDVGEENSLLPTSKLPANR

SEQ ID NO: 958554 - protein, 55 aa, Homo sapiens
MSLRIPSIGGHLCTLTILTKLCSAKQYCKSSNLTKMLMLESRILCSPPSKLPANR

SEQ ID NO: 958555 - protein, 38 aa, Homo sapiens
FDWRAPYGFMTSEKRGGGSDDLPMALRPVKSAKLPANR

SEQ ID NO: 958556 - protein, 103 aa, Homo sapiens
PADGTLSPHVILLIVIKNLTDNRLFYFFSFETESRSVAQAGVRGRDLSLLQPLPPRFKRFLYLYLPRSWNYRHAPLCLINFCIVSRDGVSPCWPGWSPARGLK

SEQ ID NO: 958557 - protein, 39 aa, Homo sapiens
AVTLEVPERRVCNVGSLMVFSVRQNVDHNKPLTHCNTVS

SEQ ID NO: 958558 - protein, 49 aa, Homo sapiens
MHTQCHATLPARAIGTHAAAHTYTHTHALPTVHMLTHTFTHCNTVSQWY

SEQ ID NO: 958559 - protein, 57 aa, Homo sapiens
KSLGHHLLKWIINSTYPRPPQSVVCTQSSIANHGSPAHTCSQLVVDTMPLPQALTPA

SEQ ID NO: 958560 - protein, 39 aa, Homo sapiens
SLQVHCYISNLNSLRDEVSEITCCQEFETSLDNIATRSL

SEQ ID NO: 958561 - protein, 38 aa, Homo sapiens
GETCCNVCREARSGDHVARAVLRGVLRFNGPQALLLCV

SEQ ID NO: 958562 - protein, 141 aa, Homo sapiens
MSLLWTRVRGKYNKITITNDEGRMIKEDIEVWSMEAEMYSAEDEKQSGQGVIQAIHLSPDAFNMKATVEDEKLQGKINDEDKQKILDKCNEIINWLDKNQTAEKEEFEHQQKELEKVCNPIITKLYQSAGGMPGGMPGGRR

SEQ ID NO: 958563 - protein, 98 aa, Homo sapiens
ILPDEVSSHGSHYDIYANGILNVSACGQEYGKREQDYIITNDKGRVSKEDIDRLVQEAAKYTAEDDQQRAWCHPAIHCSSYALQRLKATVENKKLHES

SEQ ID NO: 958564 - protein, 87 aa, Homo sapiens
LSIDVTYDIHAIGYTQCLCMCDNEYGKRDTMITITNDKGQFEQGEDIRTYGPVKLTKYNSCKDEKQRERRCHFNELHLESILSYQHL

SEQ ID NO: 958565 - protein, 108 aa, Homo sapiens
MVHSLSLLWTRLRENETMTYITNDTGRLSKEYIERMVQEADMRYSAEDNKQRDKAARSTNSLESSAFNMKATVEDESLQQAKMNDEEQQKILDDCTELIRWLAKTQTW

SEQ ID NO: 958566 - protein, 98 aa, Homo sapiens
MTIDANGTLNVSAVNKITENENMITITNDKGRLSKEDIERMVQEAEKYKVDKYEKHRAKESSRTSSLESYAFNMKPTVEDDNLQRQSIHDEDKTEDLY

SEQ ID NO: 958567 - protein, 81 aa, Homo sapiens
DIYSQVSILNVSAVVQEYGKTENKITITTDQGRPTKEDIERIVQEAAKSHSLEDDQPRDNGAPPRPSFESYSFNMLCNCRR

SEQ ID NO: 958568 - protein, 84 aa, Homo sapiens
DRQSHPQTYSYSFHCVLPFMIAALDSITTSYSVQQRRGSNNPPRKSPPTSDKVTFHPNYTIKDAPQHIYLFLLSLMTIATRSLR

SEQ ID NO: 958569 - protein, 75 aa, Homo sapiens
MRSQEVTQNLTDVASICRTGGDGASIDLPAWYWLVLLQGGFLLQCTLSPVLLAPFRSSEVAPALKEIVVHPELLQ

SEQ ID NO: 958570 - protein, 79 aa, Homo sapiens
YRRVSVYQKWEFTGPSICNRKTGVTAACHCSLIGQVERHDILIPLKKHSFKSRSNFHLSSSKLSHNIYFVLFTNAKEGQ

SEQ ID NO: 958571 - protein, 84 aa, Homo sapiens
DERKPTGVFDLCRTWVDTVTLLGHWDGDFLRGLFDSRFRCNDIGRWTCLLRAVNYTDTVHGLTVTRYNDTRVTGWDLVVLTLRL

SEQ ID NO: 958572 - protein, 34 aa, Homo sapiens
IAFHYQCGDLLPRVWRNCSEATLREHPCCGSMQM

SEQ ID NO: 958573 - protein, 89 aa, Homo sapiens
VIRGFWQVEIRTILASTMKPRLYQNTKNQPGYVGTRCRRLRQGDYLNPGGGGCSEPRSRHYTSAWRQSKTQSQKQKKTNKNLFFNFIFL

SEQ ID NO: 958574 - protein, 105 aa, Homo sapiens
MARADELPLVLQVVDEIDEERLARSSTIGELVDVLHHHRPSRLRDVQLAGDHHVLVAVLGGQEEDAVGVGLVVQHGDAGLCTSLVWSSISVNLSGVYSRQVDRRG

SEQ ID NO: 958575 - protein, 113 aa, Homo sapiens
ACGQTESHSVTRLEYSGVISAHCNLRLPGSSDSPASASQVAEITDVCHHALLIFVCLFCFLSCFVSFFVFFFLRRKLCSVAQAELQGPRSRLSPRVPPRGCMPSPASPPDCWT

SEQ ID NO: 958576 - protein, 34 aa, Homo sapiens
VSRGSRDTLHYRLIYSGGLRQEDSWGPEFNAAVS

SEQ ID NO: 958577 - protein, 156 aa, Homo sapiens
  misc_feature (128)..(128): Xaa can be any naturally occurring amino acid
  misc_feature (130)..(130): Xaa can be any naturally occurring amino acid
  misc_feature (138)..(138): Xaa can be any naturally occurring amino acid
  misc_feature (148)..(148): Xaa can be any naturally occurring amino acid
VDRQYWLSWSADGTISTHCKLQLPGLYFSHASASQEAGTTGMCPKRPVKFSFSFFLFSWLRRIFARHPHWSAMARSRPTVTSDSRVQAILPTQPPEQPGLEAPVTTPATFGIPSREEFHHAGQADLKXPXSSDSPALXSQSAGITVPXYLCHIGLH

SEQ ID NO: 958578 - protein, 100 aa, Homo sapiens
FLAETDFRSVTHTECNGAISAHCNLRLPGPSDSPASASRAAGTRGTRHHARYLWAFLVETEFHHAGQADLKPPASSDSPALASQSAGITGPAYLCNMGLH

SEQ ID NO: 958579 - protein, 102 aa, Homo sapiens
RPELGLRQCIEYNKHQDLSDLPIIDCGPLWSLVPQTMIIGFDVVPVCLLYNSLHSNLAPSHPNNLSPLPGNRPVTLGTVHVQISTSHHFMNLYPYAETRGTE

SEQ ID NO: 958580 - protein, 50 aa, Homo sapiens
VFLPSSGAENRASWWRLGQKDSYVRDEAQSKRGTPDPRSTPFKHWHSSPS

SEQ ID NO: 958581 - protein, 34 aa, Homo sapiens
RPYAIQHPSQWCTRGNVPRVRSSQFVNPWSISCF

SEQ ID NO: 958582 - protein, 42 aa, Homo sapiens
DHKVVTRGNVTLLIWRSRGHFHESAPLYESVCPYDLALTRGN

SEQ ID NO: 958583 - protein, 45 aa, Homo sapiens
LTRGSRGHFHESPLYESCMPYAWHMAYRFIKWEKSSKRSVWVEQS

SEQ ID NO: 958584 - protein, 43 aa, Homo sapiens
MSGPAYGIQIHKVVTRGNVHSGHFHDSGPAYGIQIHKVVTRGN

SEQ ID NO: 958585 - protein, 55 aa, Homo sapiens
MLYALFLLRVGSYLGFVGFSSKPSPIYGGFSIALFSSVVRMDTPRVQRQLGYRSS

SEQ ID NO: 958586 - protein, 67 aa, Homo sapiens
ITDISHRRYYPGTYKRTERIIRPVTPISKLLELTIAATLSGSVFYITVGDEVLMTVCSIQKRTAISL

SEQ ID NO: 958587 - protein, 92 aa, Homo sapiens
VVLYYRPFAGNLGFAMKKHLIYPASLILMASLKETDQKTKGESLIRGLASGRGRDQKIRLSSGLQTLDLHIHQPPAPPDRERICVLAFQTPI

SEQ ID NO: 958588 - protein, 116 aa, Homo sapiens
MVVGHPKPDNQGKEKRSSEEPDKGGTHLRGRVGLDPDQGLDGLQGVAEGKRGGRCDVAETTLQQGPQTVVSRADCFCGPIWFGPVPGSLKLGTECLNMENSLFPSPKRSPSPYSIL

SEQ ID NO: 958589 - protein, 46 aa, Homo sapiens
KRVLSRQGLAGWFQLLNNNNNNKKEPEKRKQTIKICLARQKERVYN

SEQ ID NO: 958590 - protein, 74 aa, Homo sapiens
GFIEFIFACSQTVRLGRGAPHIPDDGRPGRYAPHFLDRMAAGKRRSSLPRLGGQAEGLLTSQTMGGQAETLLTS

SEQ ID NO: 958591 - protein, 52 aa, Homo sapiens
SDRELSAVSGFAVILPRSARFQFVQSLCALAAWARYERLNWQTRKYRHQTRL

SEQ ID NO: 958592 - protein, 46 aa, Homo sapiens
  misc_feature (19)..(19): Xaa can be any naturally occurring amino acid
  misc_feature (44)..(44): Xaa can be any naturally occurring amino acid
PGVVVKKLDCKIKCMLSSXKPIPQIVTPIDSKERDEEKSTKQTXPD

SEQ ID NO: 958593 - protein, 52 aa, Homo sapiens
  misc_feature (34)..(34): Xaa can be any naturally occurring amino acid
  misc_feature (36)..(36): Xaa can be any naturally occurring amino acid
  misc_feature (47)..(47): Xaa can be any naturally occurring amino acid
ARYQHNAIIAKNANNHLSKAQQVIIFLMVEGLAXMXMVADYITGWYXLEATE

SEQ ID NO: 958594 - protein, 45 aa, Homo sapiens
GFVAPRSQVGSARIFFSICPFRCRFPVIILCPHPQAVSTSRTCVC

SEQ ID NO: 958595 - protein, 36 aa, Homo sapiens
FIVCSWPVAAGQVHACRSRRRRSPAGRLIHGRVIFG

SEQ ID NO: 958596 - protein, 42 aa, Homo sapiens
MPSPHHHVSTQEEGPCQPPELQANPFLFMLKSSILGVLLRQH

SEQ ID NO: 958597 - protein, 61 aa, Homo sapiens
DEVLQAVGVPGAHCHVQGGAPDLVPGIDPGSLVKQQFEDDQMSSAAGPEHRCPVQQVSRVH

SEQ ID NO: 958598 - protein, 33 aa, Homo sapiens
ADQRDASSTQELASREFLVSETDLVLLPFMKTF

SEQ ID NO: 958599 - protein, 49 aa, Homo sapiens
MARVHRYWSTESSSMKGCRIYGRPYLRSYGDNNVVFAHRVLFSVIRLCR

SEQ ID NO: 958600 - protein, 116 aa, Homo sapiens
MGVPIKHKARPAGSRAGFEQQSNTRELVGGKRLPLNSGLGTTFSTAPWPASGLHQRRNNMQRRSHSPANPEATRRRLPPSSSTPARRTVKASGHLAPLALYQPLAAPGDNTPGPAP

SEQ ID NO: 958601 - protein, 54 aa, Homo sapiens
LIWQGREAYRRSTVGALLDGMASAWAPSLLWAQLCEPGTSSSPLQSACDQSVRM

SEQ ID NO: 958602 - protein, 31 aa, Homo sapiens
MPPAVGHDGGFDSGLGWFNAMRVLLRGGAAR

SEQ ID NO: 958603 - protein, 34 aa, Homo sapiens
SLTNMQNGLIFFAGTLARSSSSSSSSSSSSLSSS

SEQ ID NO: 958604 - protein, 32 aa, Homo sapiens
MSCEPGGNRITFGSSKLRTTIGTTPIDQSVRM

SEQ ID NO: 958605 - protein, 56 aa, Homo sapiens
MMSVWKAAVQTSNGYNYVLQALINEHTLVSMSACNYGTVGANPPDGCAGVTELRIR

SEQ ID NO: 958606 - protein, 72 aa, Homo sapiens
TIKEDNASSTQQMQLKTLSLAIIARSWETAVISLYNKRKFIEAILTPGLVNFVPATEVTRLTQVNRSRRKEC

SEQ ID NO: 958607 - protein, 58 aa, Homo sapiens
GSAPLGLPARSDYYEDYPFTKQLEMLVPRGQAHRNVLDADSDVLSREDVTVFYLCVLQ

SEQ ID NO: 958608 - protein, 60 aa, Homo sapiens
MSRLPVVCRTCYSAPLAPYGHNGVCSVAPGADLADYGQVPAAVLRAPPSAWVLGHCCFLA

SEQ ID NO: 958609 - protein, 61 aa, Homo sapiens
RLQESPECAMASSRLAKSLVVAEEKKMFGTGLWPWPGKHAWPMSPKPQWTCDWVPDARNSV

SEQ ID NO: 958610 - protein, 86 aa, Homo sapiens
MLCSSGRPVGSGSVAVASMMSEVIIVFAGGVVVTSESLEDFLDGARLARYVNDPASATVEEDIFAQRIREVLDDAGRKDIGWFVTV

SEQ ID NO: 958611 - protein, 35 aa, Homo sapiens
FPKLEICYINKVELVAILPWQAERSRSSDRGTRVS

SEQ ID NO: 958612 - protein, 40 aa, Homo sapiens
MLGRMKMRLVAECGPDHSKDIPEWLDTDYKDIDQNKQDQS

SEQ ID NO: 958613 - protein, 77 aa, Homo sapiens
LAHRLTRTLTITTQDQIYGHISLASEGLGCEKPLVQGPADREQHDWHSEGHREQHGQAHTEDERVLLAVHVQHLRFG

SEQ ID NO: 958614 - protein, 38 aa, Homo sapiens
LLPNEMLLVLLSVVLLALSSAQSTDYDVNYEDFTFTIP

SEQ ID NO: 958615 - protein, 36 aa, Homo sapiens
KDPLQDAGEVAGRGGSECRLWDPSPGPLTGSRCRPP

SEQ ID NO: 958616 - protein, 70 aa, Homo sapiens
IWRRRTTSSDRFHRQAFGLQLQRFGHGGVALAPGQQRVHAGLGQLADGFQADATGGTGDQGDLGSSGIHA

SEQ ID NO: 958617 - protein, 36 aa, Homo sapiens
MVMMVMVVVVMVMVVMTVVMVMVALGDGVMLVVVMI

SEQ ID NO: 958618 - protein, 35 aa, Homo sapiens
DCVLSLREAKIWPGGMVTIVVVMVMCDDGGDGGGG

SEQ ID NO: 958619 - protein, 73 aa, Homo sapiens
PRSLRYLPPLSSVRTSSLCCQRMESHSQEAPPTIRLPDCSPGAPILSPSRQLHAVGPARTATRRVLTRLLSIA

SEQ ID NO: 958620 - protein, 93 aa, Homo sapiens
EHRGGDLKDSAFNGLKRKAGVEQVLTIDGLSTQKLELLRKADPMVKLSREGAHGGQLSCVMKFMAINIRRKGKTRPSLAEPLVKKCVVKDQSW

SEQ ID NO: 958621 - protein, 49 aa, Homo sapiens
AKAVVPNMCAALNCPVQHAHQRVYNKCLTHRDGKLASVALSRPVPPNTL

SEQ ID NO: 958622 - protein, 40 aa, Homo sapiens
RIPPKRSTSSVWDRARWLMPVIPGLWETEVGGSLGYYALA

SEQ ID NO: 958623 - protein, 42 aa, Homo sapiens
MSPVNSLQQAAVAADRVPDVPCASACDEVHTYRRTTQRQPMK

SEQ ID NO: 958624 - protein, 66 aa, Homo sapiens
LSGQHYVLNKGGGRQYLATQDGGNRWMLVKENSGMPVEVFIGHMQEFALDPEHPCGATGIGYLCFG

SEQ ID NO: 958625 - protein, 78 aa, Homo sapiens
CAASAAHITPNMRRYAAPESATIAYRVAEMPSSQWLQRERCPHATVLDLAAARIQVPSSIRKPRRELLQAGVIGVQQG

SEQ ID NO: 958626 - protein, 39 aa, Homo sapiens
CTQIVLSYTQSSSYNMIIDILPFLLSWFICHGKTTSPTP

SEQ ID NO: 958627 - protein, 31 aa, Homo sapiens
  misc_feature (7)..(7): Xaa can be any naturally occurring amino acid
MRTGLIXHWCLSVACTTHCTLVAFAWHVIAE

SEQ ID NO: 958628 - protein, 74 aa, Homo sapiens
MRTELIEAAAFLPIDPSPERYELLQTCLVQTSDFAFTRPLVGFESFAEGELIARDGPHEIRALCDDCTGSVRSH

SEQ ID NO: 958629 - protein, 68 aa, Homo sapiens
CDGLILLFYNPQNVSENGSPIPSIDDTKAYGIHFVSLPLSHNPHQAHQQITLALPSKHNQNLVISPFA

SEQ ID NO: 958630 - protein, 41 aa, Homo sapiens
MRTELIGKEKRKGNERKGKGKKKERGAKFSLKRCWDQSVRM

SEQ ID NO: 958631 - protein, 36 aa, Homo sapiens
MRTDDHANGLIHANGLIPTPFQWTPLIHHSYRSVRS

SEQ ID NO: 958632 - protein, 37 aa, Homo sapiens
RQCNDGRVLTAVYTTASVNDGSVNDGSVHQTASVNDG

SEQ ID NO: 958633 - protein, 165 aa, Homo sapiens
MGLILLSVNNPLYLALALLMTRRYCTYISANDPENLQFHPHVVENEWTLPEYSVWEGLRFYASCHQEVGESQAIDSHRKIYTRPRKLKEKYIWVPHSKYADSVKNEKSTALFIPYSSQVTKIVVQAVKLGTNIATIRMQVAVHESADVQEYNLVARSAELGYEKH

SEQ ID NO: 958634 - protein, 37 aa, Homo sapiens
SLHRIGTRNWVTGPGHIFQRDEQHHPMASYRDGEPLK

SEQ ID NO: 958635 - protein, 37 aa, Homo sapiens
WVCDILQLVHYSEVTIDLVSVESILLLTTCDLFSSVV

SEQ ID NO: 958636 - protein, 96 aa, Homo sapiens
MATGKAHPTEEAAKAVQHNSSAAKSMHDHRANDQTWRPTMMEARNILTAGRDGYCACSTKDFIKSKPYGKLKSDHALRSLCMARITLQTYDLGSQN

SEQ ID NO: 958637 - protein, 67 aa, Homo sapiens
ADSTLVMHTAAHADKIPAGLCATAIDILTTVVRYTKPPLFPDFSYCQGFPVLLAQVYPFTQYYNAVI

SEQ ID NO: 958638 - protein, 35 aa, Homo sapiens
TCNWRHVSPARQSLRVCLCTKPASDIPTALFIAPC

SEQ ID NO: 958639 - protein, 38 aa, Homo sapiens
QPERLMLHRRIFSYHPRAYILITILPSNSHYDCLIRAC

SEQ ID NO: 958640 - protein, 36 aa, Homo sapiens
MNHANRIGSPRSSNTKSGVSSGECRLLLVRRGYIVP

SEQ ID NO: 958641 - protein, 35 aa, Homo sapiens
LLYEDSQSRRLYRLKRSIVIDYLPFLITLLFTDLG

SEQ ID NO: 958642 - protein, 71 aa, Homo sapiens
SCDVNYYTNGGFNREYYSIVNGNESHDDGHETAVCFTDSQALTVLSPRWGNAYAACLKHSGYALAGKGYPV

SEQ ID NO: 958643 - protein, 49 aa, Homo sapiens
SCDDNYYTNGGFNREYYSIVNVKESQDDGHETVVCSTNFRALTVVYPRS

SEQ ID NO: 958644 - protein, 64 aa, Homo sapiens
  misc_feature (39)..(39): Xaa can be any naturally occurring amino acid
MIGCYSGNTSCLWQWACLVCWGETVNAAERGKGSRTQQXFETAFHSLPYFQAFSYDDLTEIMLG

SEQ ID NO: 958645 - protein, 35 aa, Homo sapiens
MADTTYLTDVDVQWDDLLTTLTSRPCNTLSRARYG

SEQ ID NO: 958646 - protein, 40 aa, Homo sapiens
RAQLGTSHMATEQAAGMQTKRRSNTRKPPKLDDMLKQMAR

SEQ ID NO: 958647 - protein, 70 aa, Homo sapiens
MEWNAMEWNQPEYRGMEWNGMQWDGIIRNGMERNGMEWKGMEWNQLDCNRKEWNGINPNRMEWNGMEWNG

SEQ ID NO: 958648 - protein, 34 aa, Homo sapiens
  misc_feature (1)..(1): Xaa can be any naturally occurring amino acid
XYDGPPTLTRTTDGVLPSGLLLPLTHVGPCGPLL

SEQ ID NO: 958649 - protein, 38 aa, Homo sapiens
MALFAQAGVSAHSNLGPLDSSNSPGPDSRVAGITGLHK

SEQ ID NO: 958650 - protein, 71 aa, Homo sapiens
GDGTIILMKLQSPLVATPSLSPRSPLCSDWPSVFKSALSTLPGSPMTSSGSPDLQLAWGPSLLPHPPSVGL

SEQ ID NO: 958651 - protein, 69 aa, Homo sapiens
  misc_feature (37)..(37): Xaa can be any naturally occurring amino acid
RWRFRMCLRPGAMGQSPKERREAKARGYLDLGPRDPXVRLLGRILTVILPGLLYDHAAHFLGIPGKRLC

SEQ ID NO: 958652 - protein, 118 aa, Homo sapiens
KVNGMDWNGLEWNGMEWNGIDFYRVNGMEWNEPTRVEWNGIEINGMEWNGIDPEGMERNAMEWNGMQWNGMERNGINPSGMEENGMESNQPEWNGMEWNGMEWNALEWNGIECIEPDS

SEQ ID NO: 958653 - protein, 43 aa, Homo sapiens
AGTFPAGPCQLRGRVPVRARVPRRPVSPARPVYTAGTCTPRGP

SEQ ID NO: 958654 - protein, 101 aa, Homo sapiens
MIWTSNECTEWNGMEPTRVQWNGIEINGMEWNGIDPREWNGMQWNGMECNGMEWNGMESTRVEWNRMEWKAINPSGMEWSGMEWNGMHWNGMESNALNRIA

SEQ ID NO: 958655 - protein, 82 aa, Homo sapiens
DALDSRNSRAHSSDSYNHASSFLTPGASYPMDLTGALVSLVSVSAPHQCSHVMSLVIWHTDKQQQRLAGSTQSEDHTMETNY

SEQ ID NO: 958656 - protein, 37 aa, Homo sapiens
VIHRIATAKRRKLIQGDRQKQSICIAHVANKSQAQFT

SEQ ID NO: 958657 - protein, 40 aa, Homo sapiens
GWVLVVPFSSCTVEVGIQPTAREHCRKSSDCHPGTLCTCF

SEQ ID NO: 958658 - protein, 44 aa, Homo sapiens
YRFMLAYILMQELQPLGYTGQFVVHFHTTGPTAHKVGDIQFDSA

SEQ ID NO: 958659 - protein, 68 aa, Homo sapiens
EDPGSYRFIRQKLTGYRGMNSALDKAELIDIYRTLQPKLTEYTFFFKDKIKLIKIDHIVGSKALLRKF

SEQ ID NO: 958660 - protein, 68 aa, Homo sapiens
  misc_feature (50)..(50): Xaa can be any naturally occurring amino acid
  misc_feature (55)..(55): Xaa can be any naturally occurring amino acid
  misc_feature (61)..(61): Xaa can be any naturally occurring amino acid
  misc_feature (67)..(67): Xaa can be any naturally occurring amino acid
QELSSYRFNAYVLLQSRFMIMPLSLHSPNYFHVISSAVPSQASVRCQFSXWDGLXTMLCRXVQDIDXR

SEQ ID NO: 958661 - protein, 107 aa, Homo sapiens
MSYSFTYFSISVPVKVGEYFIHLHVIHAIDLPESVDMLSLSSKPFDSKFTFEILFIFFSEQNVPTLLFQNITFALHIKFTDPDWYERAEELHLDTWYKCGRQASNIT

SEQ ID NO: 958662 - protein, 179 aa, Homo sapiens
SRGCGSYPVQCKSTGSMKKQGNIKPPKKYNNPPTSDSNQKEFKNFQKKISKDDTKGKLSKIQENPEKYYYEIRKRIQDMNEKFTKERNIEKNQREIQKLKNSFYEIQNTVKSISNELDQAEETISELEEGTFKTSQSDKNKEKRYDANKLENLEEMGKFFDTYTLPRLNQEEVESLNRP

SEQ ID NO: 958663 - protein, 34 aa, Homo sapiens
QVYECTTLQCDPKHVHNWCAHGLQIGYSYSRTRT

SEQ ID NO: 958664 - protein, 36 aa, Homo sapiens
SIMAGIGSSQGQQGPTQGSLLSNAWQPFPSTSIFSQ

SEQ ID NO: 958665 - protein, 55 aa, Homo sapiens
MEWNGTQWNGMEWNGMEWNQLEWNAMEWNGMEWNGIDCKEELNRSNPNGMELNRI

SEQ ID NO: 958666 - protein, 107 aa, Homo sapiens
TARYPVNDTLHEMKLVCESYKVQEERARLFEPWSQEHTYLDKLKISSASRTPKDQSLEHKLEHDVSVLKQWSSAFQYRATFRSLEIPYGIRYSEPNSLPGTMLEIAI

SEQ ID NO: 958667 - protein, 128 aa, Homo sapiens
  misc_feature (18)..(18): Xaa can be any naturally occurring amino acid
RTAIRFNPRGMERNGMVXNGMEWNGMEWNLMETPESNGIEWNGMEWNQPQWNGMEWNGINQSGIELNGMEWNEINPSGMEWNGMEWNGMEWNGMEWNQPEWNGIEWNGMEWNQPEWNGMEPDSLPRTE

SEQ ID NO: 958668 - protein, 76 aa, Homo sapiens
  misc_feature (11)..(11): Xaa can be any naturally occurring amino acid
MLRDSKLHYEXNSNPYSIVLVRKTDTYDPWNRIIEPRNNTAHLQTILIFNKADKNQATGEQRDFSLPLINDAGKLA

SEQ ID NO: 958669 - protein, 57 aa, Homo sapiens
MLAGLVLNSWPCDPPASASQNAGIAGVSHLDQTKNVLKNPEKSATGHFDRLIEPDSL

SEQ ID NO: 958670 - protein, 89 aa, Homo sapiens
KPSLPGHLPRECLRGSPTGTSVMQVTATDEDDAIYPYHGVVAYSIHSQEPKGPTRPHVHNFTRSTGTIRVISRWPGPGKKSPEYTLTHP

SEQ ID NO: 958671 - protein, 57 aa, Homo sapiens
DTRHAIRFNVYNVVVIEMIYDCGLNQKMAIVLEKMDGFKRYVKAGISKTSLIEPDSL

SEQ ID NO: 958672 - protein, 45 aa, Homo sapiens
  misc_feature (2)..(2): Xaa can be any naturally occurring amino acid
AXLSQKDKARGITLPDFKIYCKAVVAELAWYSIKPGSRPIEPDSL

SEQ ID NO: 958673 - protein, 101 aa, Homo sapiens
  misc_feature (14)..(14): Xaa can be any naturally occurring amino acid
THTNTHIYSFFSLXVETGGRYFGQAGLNLLTSGDLPTSACQSAEITGVSHCAQPIRHSSWLRGTDTNKLPGLRSTLEVNTRASDSEHGISQSDCMTWACVA

SEQ ID NO: 958674 - protein, 131 aa, Homo sapiens
KVSPNTGGICSCDSESVEQNFSSTESIFPNGGTPPKISKTVLLSTKSMKKSHEHGSKKSHSKTKPAILKKDIAVKEKIPSHHFMPGSPTKTVYKKPQEKKVCKCKRATQNPSVHTCRGQRCPCYSNRKACL

SEQ ID NO: 958675 - protein, 150 aa, Homo sapiens
MLAFFPSEILHPDVVLLTSDNVLRIYSLREPQTPTNVIILSEADEQSLVLNKGSAYTASLVETAVAFDFGPLAAVPKTLFGQNGKDEVVAYPLYILYETGETILTYISLLHSPGNTGKLLNPLPMHPAAEDNYGYDASARLCLPCVPNIL

SEQ ID NO: 958676 - protein, 79 aa, Homo sapiens
SRSKLSVITELLTSDTGATCLKLSPFLRTRTPVPGRDTGSVLGRLLPEEILSFVEEVVLPAPGVPWSLHEGQVNPLLEL

SEQ ID NO: 958677 - protein, 90 aa, Homo sapiens
SYRLLGPHMLHDRVLTTARIEYSDWSSYLSGTWGQRCGGTSLHAVGTESLQDVHFGGVHVELVSRLYAASCGGEPVMDLLTMLLNLDKLA

SEQ ID NO: 958678 - protein, 77 aa, Homo sapiens
RILQLSVHESPLITRSKGQHQHAAMQLKTLSLAHTPRETAVINLQHKRKLLSILTQVGHFVQPPGHTINPSQLNRIA

SEQ ID NO: 958679 - protein, 52 aa, Homo sapiens
PTARFREKHHQLLRSNGTALAPLTPGAGTSGSNQVSLCNPSNGPNASYHDLG

SEQ ID NO: 958680 - protein, 62 aa, Homo sapiens
  misc_feature (46)..(46): Xaa can be any naturally occurring amino acid
SPNTKNKRRLLLTEVLATCPLVQRERRGVTLVRTGSKAVNSLAVAXSHKCAQVRTANRNLGH

SEQ ID NO: 958681 - protein, 109 aa, Homo sapiens
RTTERAAFENAPKPQKRPARTQRSVQKNTLEIGISRICTASSPLHRSEPLYTLFFALGHCQHERYDRAFDHNAPIRQRQIPEEDLQKLGLPDHTHSICSYSSAGVKTNS

SEQ ID NO: 958682 - protein, 75 aa, Homo sapiens
ASPTLFTNKMMFYGQVFWAPSLPVRVPGLFEFRTGTTGPWEACGRHLLWLGIFPLHLVSGRGGAFRVLSRISVGR

SEQ ID NO: 958683 - protein, 40 aa, Homo sapiens
MILPAGGASDLEELEQFAMTFKQRRIKLGFTSGVLGDNMV

SEQ ID NO: 958684 - protein, 44 aa, Homo sapiens
  misc_feature (13)..(13): Xaa can be any naturally occurring amino acid
GSHVIANTLQHKXLIHTRKHPHVHTPIPHSPPIPQPDIITGFSS

SEQ ID NO: 958685 - protein, 33 aa, Homo sapiens
TIAQHIPHPAHEYHESQESEELHTHDMPRNSVL

SEQ ID NO: 958686 - protein, 50 aa, Homo sapiens
LEDCMFANKQYSGQEDYYGDTTVMVDKSSEGMNQQYYPDGHNDYGYQQPS

SEQ ID NO: 958687 - protein, 34 aa, Homo sapiens
MLSQHEPKLLSVTPAELLILQVLPNNTNNRADTG

SEQ ID NO: 958688 - protein, 32 aa, Homo sapiens
SVMYATSAIVCVLCGTLMTGCLRTSVFTDDEE

SEQ ID NO: 958689 - protein, 35 aa, Homo sapiens
MLSANTSVCFFVSQNYATTFTEHFRKKDMSLSRMD

SEQ ID NO: 958690 - protein, 55 aa, Homo sapiens
MKMEEGSQRVIERSCIYSITNGPHGIQEWYCMLEIAMKTRNKQELFVATRSDIES

SEQ ID NO: 958691 - protein, 70 aa, Homo sapiens
DAQHVSASASEQTFGSKRDVESYGKGAPACESGKSSGIASTERARHIVIPVLLTKHILKSLLGFGDGREV

SEQ ID NO: 958692 - protein, 74 aa, Homo sapiens
ISRRRIKISQATLELCVFVTSLGMYSPCEYQILCEVVRVPDDKTLATPTGITILRQDPNYGIMESMDRKAVGGL

SEQ ID NO: 958693 - protein, 34 aa, Homo sapiens
VWEHRRQHPDSSRQHLMSSHGARYTLSVIAVHHE

SEQ ID NO: 958694 - protein, 43 aa, Homo sapiens
MCDPTHRCLFFSVENESLYIPHLRKAAQLGMNAVALTGEWIPR

SEQ ID NO: 958695 - protein, 50 aa, Homo sapiens
MMLTSSEELQNEENIDLIQLEIGCHSSTSVHTFLSNIPMVLSGQTMTIIS

SEQ ID NO: 958696 - protein, 53 aa, Homo sapiens
GRIQTALSSQGAVHTCFRQCGLTRHQITITDNSNQEPTGIMLRAQTEVRIIDV

SEQ ID NO: 958697 - protein, 72 aa, Homo sapiens
  misc_feature (57)..(57): Xaa can be any naturally occurring amino acid
SDSSRIPNFDDAFRIDNNKDVLLKCKNKFKTSGRGQWLKPVIPALWEAEAGRSPEAXEFETSLANMVKPRFH

SEQ ID NO: 958698 - protein, 37 aa, Homo sapiens
MTKSTICQVDSWAEALVLFYVVMLHTTLSQSSLNGPS

SEQ ID NO: 958699 - protein, 36 aa, Homo sapiens
MIASQEACKAKGAKPGLCTMIVSAKRKFLIFVNINA

SEQ ID NO: 958700 - protein, 46 aa, Homo sapiens
  misc_feature (13)..(13): Xaa can be any naturally occurring amino acid
  misc_feature (37)..(37): Xaa can be any naturally occurring amino acid
TNTVCSSQMSYMXGCTSGREINTSITILLVCFKSNVXKKLLLLKQV

SEQ ID NO: 958701 - protein, 72 aa, Homo sapiens
HQWLGYRSSMPLVMAHFDVDNPITPKGNTPTPRMYERGQAEGPKPMYQAQPPPFQKTPYLIPKGPETMVLTD

SEQ ID NO: 958702 - protein, 83 aa, Homo sapiens
MLNFDGRIHYLLEHQDALPEKHDLLSELLWSLGEVQPWNLFLGKEQLTPMTLIKANTLSQLSKTEISLVLDQATYDIEDGEAL

SEQ ID NO: 958703 - protein, 54 aa, Homo sapiens
IPRRTHSVSPPKYDVSCTNSPRIFPTEQVTCLMLAREGTVLQCKLCPLQGWHYK

SEQ ID NO: 958704 - protein, 51 aa, Homo sapiens
LNFTDHSITFQLQCCLRNARNLEQRQQRAYKTKSGNHSFRISANTAWAEVA

SEQ ID NO: 958705 - protein, 46 aa, Homo sapiens
TLEILGRIHRGYHSPHCCQPPEALRFAQQSLETYSTAPFPHLAFQP

SEQ ID NO: 958706 - protein, 91 aa, Homo sapiens
MSLRLGLFPWQRQRCWPTRKHHHMLLSHSLILSFHLNVLFVCFALASRSVLQAGVQWRDFCSLQAPPPGFTPFSCLSLPSKLGLQAPTTTP

SEQ ID NO: 958707 - protein, 60 aa, Homo sapiens
VVVDLLLKGWSNPNLGGGWSRLFPERPGLNPHRGENHQELVIEGGTVPASLEWANFPGRL

SEQ ID NO: 958708 - protein, 45 aa, Homo sapiens
  misc_feature (33)..(33): Xaa can be any naturally occurring amino acid
  misc_feature (39)..(39): Xaa can be any naturally occurring amino acid
MHAGIKVSDSPVDPDQAPTFLGSTSICSHPSCXSKSLGXLLGTNL

SEQ ID NO: 958709 - protein, 109 aa, Homo sapiens
MTHGRLLGVKTLAEELTADVVEIVRELGLEVETEDVTELLHLNSTACCREIFHERKSQQMQQTSLVSHFMKTAIVTPIFSNCHYKSITAINIEARPYASDKITSHWRLR

SEQ ID NO: 958710 - protein, 86 aa, Homo sapiens
LQCTRVCVIQRRKVTEACVFCDLCVACGIRKLWLEYEERRPLASDVAQGMRVIETYVKTYSCGTRRALIAEKIDCSESCNSLPSII

SEQ ID NO: 958711 - protein, 69 aa, Homo sapiens
MYRQHCSLLTHSIQFCSRLLCGFAMYSVILETYSWTRGYWYLAFGFSEDGCAHCAWKVLAQGLRYGKAL

SEQ ID NO: 958712 - protein, 140 aa, Homo sapiens
  misc_feature (118)..(118): Xaa can be any naturally occurring amino acid
FQKKQKKNQKTKPTKQEKHSIEFFTMITFTTKPNTVNLLRFKCNHFLRSGRLQKLSVSILSLKDSQRGISENDPLVVPKKESIFHLVWKKLLPWAPALQKQERKEVLGLLQLQGAPVXAMIWEGIWNEVTISQFGIGRQS

SEQ ID NO: 958713 - protein, 47 aa, Homo sapiens
MHCETILENTKIAGCVPLWTVLGAEMEDHSQGSDICYHVNLSQKTKQ

SEQ ID NO: 958714 - protein, 69 aa, Homo sapiens
RTPKYKNTQQMPLKNNDHHTLEARDTNINPCLTGEAVHSRHFPLSNNTTTSSLLELTHKALAQTQRSRG

SEQ ID NO: 958715 - protein, 44 aa, Homo sapiens
MYPTHRSPHCGDEGPEDLDVQSSLTQSSLMRAEDAFRNAYWELG

SEQ ID NO: 958716 - protein, 61 aa, Homo sapiens
HVIAKHKKTKNFPVLGTGGSTPVNPQPLWAGQGQVASTAGPGSSQHHAWYTHGDTPVIPLN

SEQ ID NO: 958717 - protein, 98 aa, Homo sapiens
VNQPQCNVMYRNGMEWSQNEHEWNGMVWNETEWNGMECNGINPTGLEWNGMQWNGMKWSQTDWNGMEWMEWNGMEWNGLERNGIEWNGMQWNGLNSGP

SEQ ID NO: 958718 - protein, 92 aa, Homo sapiens
SKHICDLHHRSRQSQILNPLSKARDRTRKLMVPNRMCNHCATMGTPTDLILMNEQKTDGVRAVIVGNRLGQFDDDDDCGYKEVEKEYAKEES

SEQ ID NO: 958719 - protein, 89 aa, Homo sapiens
  misc_feature (6)..(6): Xaa can be any naturally occurring amino acid
YRNGMXCSRMNTSGMECYGMKRNGMEWNAMESIRLDWNGMECNGMEEMESNRLEWNGMDGMEWNGVEWTGTKWNRMEWNAMEWIEQRTL

SEQ ID NO: 958720 - protein, 38 aa, Homo sapiens
MVKEPMGHPYHGIRSSHKMEQTFHTGNNLEEPQGNYAE

SEQ ID NO: 958721 - protein, 75 aa, Homo sapiens
VWLSPNTRNYPNVCNGEWLKNLWDIHTMEYDPAIKWNKPFTQATTWKNLKEIMLSEKKKKGRSKNGGYRHSSYLV

SEQ ID NO: 958722 - protein, 63 aa, Homo sapiens
YGYQSESEMTCQNSAHLRSIVIEQVGVASGAGQLRAERPRSSRHAAVVVQESKTSCLSEIAYR

SEQ ID NO: 958723 - protein, 111 aa, Homo sapiens
GSVVPDEHTSQHVSGNTSFVFWGFLVVGLFVFVLRWSLSLSPRLESRGAISAHCNPAPGFKRFSCLSLPSSWDYRRMLPRLANFCIFSRDRVSPCWPGWSRSPELATPTAS

SEQ ID NO: 958724 - protein, 62 aa, Homo sapiens
MEPYGYEKIMENLRAGALEGPSAVNNMELNEVMGPNKKRKALEVLVLITLEPCSFLGILRVP

SEQ ID NO: 958725 - protein, 82 aa, Homo sapiens
  misc_feature (18)..(18): Xaa can be any naturally occurring amino acid
  misc_feature (41)..(41): Xaa can be any naturally occurring amino acid
IPDVSPTPPSSRFFLPQXTKYLVLNYLYWQHSYSDLTPVSXEAVSNKSRGIAWTDGCFEPTGAPFLNCVEKVCSDEAFYYAC

SEQ ID NO: 958726 - protein, 46 aa, Homo sapiens
LSPHRTPNVCMVNVKNYGHHTMNTISHKWTNLYTGTTWKNSRKYAE

SEQ ID NO: 958727 - protein, 120 aa, Homo sapiens
ALEDPIYPNTGLFVTCRKSESNLTAWTHHGMKMVWVYCWFWLVFANRISLCYPGWSRTPGLKGFSHFSLPSSWDNRHEPPHLAGLGFIGWVWGFDYFFGGNVWARTCEDRDKADRGLSGI

SEQ ID NO: 958728 - protein, 30 aa, Homo sapiens
MGADFRAEYSNKLADRAELAQLVICCQSTY

SEQ ID NO: 958729 - protein, 154 aa, Homo sapiens
HTPLSHVDASVMSANGETVRKDKNMLNYWNSSATKAERKGMSEVPTNLAEYCIKTKKVAFPMTTAQICFTTDLYDDDIDDEDEGGGRCRTVMMMMILGNEGVVTCSFSAPVLAFHLRAKGGEQGGDLAIGPSAKKLFHKRDWGLQYGVPEARNI

SEQ ID NO: 958730 - protein, 70 aa, Homo sapiens
SPNSIKIKIIAPRMSASTRCAIGGSILASLYNFQQMWISQQEYDEVWPVHRPPEMLLNGLSRYVESGAVG

SEQ ID NO: 958731 - protein, 133 aa, Homo sapiens
MIIANKRTHCVSIAHVLGDSTSAQTHEHASMHAYSEETVVTQEMLLVNSFSTESAFLALPAACGKWADLHVPGQAWVSIEPLVLTAGSRGHCPACAFCRGLLQLGPACSCASLRGQLPTLLGIRNGVLQIGAL

SEQ ID NO: 958732 - protein, 85 aa, Homo sapiens
VDSEVEPNDYADGEARLYYERWDLTQMDDELRLDLGAERLGQARGDGCHTENKVESKGNSPPELRRGLSRGEGPGCRGYVEGITI

SEQ ID NO: 958733 - protein, 34 aa, Homo sapiens
WATMDGGVMHHTGLTQTKILVLQRRDHGVSLPLV

SEQ ID NO: 958734 - protein, 50 aa, Homo sapiens
DNARGATVATATTSTATSTNSGSNIAGRISAGCSLQVLVLPCTNTYRRSS

SEQ ID NO: 958735 - protein, 51 aa, Homo sapiens
SALGNLTNAENRNPSCEVTREPVTYTSYMTLACKDALSPVVSTSRSSPEAR

SEQ ID NO: 958736 - protein, 33 aa, Homo sapiens
KKTYMELTRLTSDDTALYFCAREQFDFENSFLG

SEQ ID NO: 958737 - protein, 39 aa, Homo sapiens
TAENRNPSCEVHQEPVTYTAIDPGLQDALHQCVTRRCSQ

SEQ ID NO: 958738 - protein, 34 aa, Homo sapiens
RGLLVEAEETVTIVPGPRYQKHLFQHLVVPQYLS

SEQ ID NO: 958739 - protein, 39 aa, Homo sapiens
  misc_feature (24)..(24): Xaa can be any naturally occurring amino acid
MVAQTSLSLTGTRSLDLGSAGGRXQLMAKLAEGAGNPTG

SEQ ID NO: 958740 - protein, 113 aa, Homo sapiens
  misc_feature (2)..(3): Xaa can be any naturally occurring amino acid
  misc_feature (30)..(31): Xaa can be any naturally occurring amino acid
  misc_feature (37)..(37): Xaa can be any naturally occurring amino acid
  misc_feature (41)..(41): Xaa can be any naturally occurring amino acid
  misc_feature (110)..(110): Xaa can be any naturally occurring amino acid
NXXSNRHVLRMNHHQHATVLPESGIMYQKXXTLTPEXYSLXPHWKRLLLGDLERKRPASMAVMEGDLVKKESPPKPKDPVSAAVPAPGRNNSQIASGQNQPQAAAGSHQXLHG

SEQ ID NO: 958741 - protein, 38 aa, Homo sapiens
  misc_feature (5)..(5): Xaa can be any naturally occurring amino acid
QGSSXRHTKHTSTTTIQKLSKLGYEVLAHLAYSHGPSI

SEQ ID NO: 958742 - protein, 50 aa, Homo sapiens
  misc_feature (5)..(5): Xaa can be any naturally occurring amino acid
MKVGXGTKGWALAQKAVHEHGGLNMGIESWIHGHGRLIHGQRRLVTWPLN

SEQ ID NO: 958743 - protein, 96 aa, Homo sapiens
MLRYSKIPWHVSVTWEAEEGDFELAVVGMLSNTVKSVSKTINSMDTETDTKEMMSPSDGAIVCKCREKKQLGKGLEQDGTHLSLRSNQALNTCVSH

SEQ ID NO: 958744 - protein, 80 aa, Homo sapiens
RGSGIDVACMHCCSTELSSPVDYVLMEYCCPVTVGPFVIQSSSVSKTETHEWKAEFLTVMKCFPDQFPRVTTRQCSFPHF

SEQ ID NO: 958745 - protein, 43 aa, Homo sapiens
MCDVDMARDVVAASRCDVMAEFPMSVCDVLHLHDAIAISLRDV

SEQ ID NO: 958746 - protein, 70 aa, Homo sapiens
SYKKEMEKLVRVRLGVHPQAQSLHDLPFFRIKKLISEPFPCCRSAGTFHSFPSVAGGMASHNTGDAQCPQ

SEQ ID NO: 958747 - protein, 112 aa, Homo sapiens
QIVAYGRFKTLKRPHGNKAECGGSRPVIPGTLNMLTRGGSTTSGVRDQPVQHGEIPSLLKIQKLAGHGGMHLVIPAYSWSAHSMVYTHLQLVDTGVCIEPRSRHCTPAWAME

SEQ ID NO: 958748 - protein, 126 aa, Homo sapiens
MFPETLDEGMQIPSTQFDAAHPTNVQRLAEPSQMLKHAVVNLINYQDDAELATRAIPELTKLLNDEDQVVVNKAAVMVHQLSNKEASDTLIMRSPQMVSAIVRTMQNTNDVETARCTAGTLHTFPI

SEQ ID NO: 958749 - protein, 46 aa, Homo sapiens
LRDSKDPPDDNRCLTFTLRDNARWSDGTPVTAEDFVYSWRRLVDPK

SEQ ID NO: 958750 - protein, 114 aa, Homo sapiens
MDPLQKRNPASPSKSSPMTAAETSQEGPAPSQPSYSEQPMMGLSNLSPGPGPSQAVPLPEGLLRQRYREEKTLEERRWERLEFLQRKKAFLQHVRRRPRDHMAPYAVGRKAESP

SEQ ID NO: 958751 - protein, 107 aa, Homo sapiens
GPEKSYNLVILTCYIAVRYLFYVRYVGFFVCPFVVSSEESHSVAQAGVQWRDLGSLQPLPPRFKRFSCFSLPRSWDYTYVPPYLTKFCIFTRDGVLPPLGRASLQLL

SEQ ID NO: 958752 - protein, 48 aa, Homo sapiens
AVNRARYPKVETLQPGSVDKDVASSQVAVHIVHLGQVLHAGSNAPQQA

SEQ ID NO: 958753 - protein, 35 aa, Homo sapiens
KLDDRRYAIVYDADFQVLASGNPDMIDRDLSSLSG

SEQ ID NO: 958754 - protein, 40 aa, Homo sapiens
QVATDVLGVGRRLHRRRFVQRPVVRGLFAQGSAHQAVLDH

SEQ ID NO: 958755 - protein, 46 aa, Homo sapiens
KAVNRARYQPCFTMCSMRVVMRAQPSAVRSGTPRKWLSVLCAQHQG

SEQ ID NO: 958756 - protein, 37 aa, Homo sapiens
GITLDQPRRFVLSNGHACALQYIMLHLMGYDLTMDDL

SEQ ID NO: 958757 - protein, 134 aa, Homo sapiens
SESSSCTVCQRVLAPPPAAGSRPACRRAACSAPGRPPRGGPGPSARRAVPASSPATPGAWTHGRSPSWRHTPPAGSAAPARCRTRTPASLRANAGTPGTGGRPGAHRPAPAGRPWAVRGSRVPDCAGWPVTTVP

SEQ ID NO: 958758 - protein, 46 aa, Homo sapiens
PGGLGGARCRIWSKLSVAVQVMNALLLPIVLGFLFLLARRALRGPH

SEQ ID NO: 958759 - protein, 105 aa, Homo sapiens
AGIMGVSHGARPIDPFQQAQRDEATRPRSSASRGSSGTRTQVSRTPNLDSLLHDTHEAHSSLWDFFNIGEPKETREALKGPAETVTISGSIEVQDSGWFTPDLPA

SEQ ID NO: 958760 - protein, 38 aa, Homo sapiens
LRCTHSYPPWLAVSTSGWGSPASPGVAAWLHANCTWVR

SEQ ID NO: 958761 - protein, 114 aa, Homo sapiens
MSLEYPLLGVLLSDFAQNADSGMINKVQAEVVSDGDEKLVGNWSKGDSCYVLAERLMAFCPCPRDLWNFELEKDVLGYLVEEISKWQSIQEVTWVLLKVFSFIGEAEQKSLENL

SEQ ID NO: 958762 - protein, 41 aa, Homo sapiens
RVLSRRTLHNPIQTPFFVCSVLITASPYLLTIISQFPYGLG

SEQ ID NO: 958763 - protein, 35 aa, Homo sapiens
WPSTKSRSDRWVVLEATVAISWSQLLVDFRFVTAN

SEQ ID NO: 958764 - protein, 68 aa, Homo sapiens
MVELFGEIPMPFRKSQAATYQNRLRKTPAIPSPLARRMGYTLRGALQIRSDLETPSRPSAKVPKLWLS

SEQ ID NO: 958765 - protein, 100 aa, Homo sapiens
TLKAPPSRNGFRFRVPYGTLLCVSDKPLHGEIKLPGMANHFYRERVDQHLRIGIRAVEILRQQRMDRLHSRKLRSFAEVAFQSQSGVTLARRITSPHFLV

SEQ ID NO: 958766 - protein, 39 aa, Homo sapiens
WNESNGMGSNGLERNLNGTEYEYDSNVMDCYVIDSNGME

SEQ ID NO: 958767 - protein, 59 aa, Homo sapiens
MIELGTLLLAVMFKYFYKEMYSHVTYVINYNRKKKTEKAKEINCYSSPFQAPCRLPSNP

SEQ ID NO: 958768 - protein, 45 aa, Homo sapiens
MECEDGRIGTALVYSSQSQRQTLKVSDGNAELTRLLRRSRYRGST

SEQ ID NO: 958769 - protein, 63 aa, Homo sapiens
SVAQDVASAIKLFRGELFYDTEKGIPYWTDGAGQLPPLALVRERLRAAALTVPDVADAVPTIT

SEQ ID NO: 958770 - protein, 51 aa, Homo sapiens
CDSKDLTIVSGSSPSCTALAIPRYVEPQHYIDHKQCQRDKATPGGSRIRIE

SEQ ID NO: 958771 - protein, 34 aa, Homo sapiens
RHLEIVNLDYYLCETCYSLNSVLLNHLLMIGTKQ

SEQ ID NO: 958772 - protein, 137 aa, Homo sapiens
CWYSLSLLDLWFSEWKFSVIIVSNISSVPFSISSTSGILIMCMLYLLQLYHSNWIFYSMFFSIFSLHFSVLEVSIEMPSSSEILSSAMTSLLMSPLNAFFISVSVILISSIAFGSFLEFPSLCLQSLLFLHSVYFIH

SEQ ID NO: 958773 - protein, 132 aa, Homo sapiens
DRARYREEESSSSCRDVNQGDFQSTGQTKQPLGVAWLQNQHTKISSIYDVPTVNNLKNQESNPIYNSCKKYKIPRNQSNQRNKSSVQGNKILMKETEEDTKKVEIYSMLMDWKNNIVKMTILLQTTYRFNAT

SEQ ID NO: 958774 - protein, 140 aa, Homo sapiens
EVILLYSLSLLDLWFSEWKFSVIIVSNISSVPFSISSTSGILIMCMLYLLQLYHSNWIFYFMFFSIFSLHFSVLEVSIEMPSSSEILSSAMTSLLMSPLNAFFISVSVILISSIAFGSFLEFPSLCLQSLLFLHSVYFIH

SEQ ID NO: 958775 - protein, 37 aa, Homo sapiens
NSMISSVPRMRERACTFCMYRSRETLARIEAAMICAV

SEQ ID NO: 958776 - protein, 101 aa, Homo sapiens
MTEDRQILVVSFIFEMERLGFDDELNIGSEVKGGTRDKYYGKIEEPLPSLLLFSYTEKLTQDIGNSLSVVTHACNLSYLEAEVGGSIEAMEFEISLSNQAT

SEQ ID NO: 958777 - protein, 40 aa, Homo sapiens
ESARYPKCICLNVKRETVTSKPQKRYKHLPNVIVRRGSSS

SEQ ID NO: 958778 - protein, 136 aa, Homo sapiens
ELGTRVAWLLERTLYCIRGRGFRIHINMDRCEKLYVEQKKSDTKSVHTIVIQDIGKFNMCGIEIRTLVAYKMVEIDWKGNWMEGTLEGYKNILFLFPFYEMEFRSCCPGWNAVARSRLTATSGSRVQAILPSQLPQ

SEQ ID NO: 958779 - protein, 36 aa, Homo sapiens
LFLFPVPDAASRNLRHDLTHQIEKLTQPRRIVARPG

SEQ ID NO: 958780 - protein, 49 aa, Homo sapiens
ISSVQGVGWEGSSLTLEHHYAPKFHGRLTIGADDDTATNYLELSSLRFE

SEQ ID NO: 958781 - protein, 38 aa, Homo sapiens
MGNREPCRAKRPLSIITTMSGATEELRNVLFPRQPSNP

SEQ ID NO: 958782 - protein, 88 aa, Homo sapiens
RLASNAVESVENTFTPTALTQVPTDTLERGCTTVTVQNQTRSPLRGISMPNHGILITSRTTLTHLPSPCWTMDTLRPNTADSRCTLAE

SEQ ID NO: 958783 - protein, 33 aa, Homo sapiens
SVYPSVLSLPNISPGSGGSNPCGASSQQSHCQA

SEQ ID NO: 958784 - protein, 107 aa, Homo sapiens
MGSFIKKRGLGGLTVPPGFGRPPILGGGQTRSEGMVYIGDRHKMCVRGTWPFVRSSDLVRFIHYLEISLGKTHPNDSFTSHGFLPTTQGVLGSYIPRLRFGVGPQPN

SEQ ID NO: 958785 - protein, 48 aa, Homo sapiens
LLVFTPLLCACASSACPCRWRPLQVGACVFECGCVAAPPTGAPLQRRP

SEQ ID NO: 958786 - protein, 48 aa, Homo sapiens
SDAAVTLRIPSLVSLMVVIPGKLASDADVWSFQCKLPSRALSPSTTKQ

SEQ ID NO: 958787 - protein, 39 aa, Homo sapiens
AGVQWRKSAHCSLHLMGLGNPPAPASQVAGTTSVRHHSR

SEQ ID NO: 958788 - protein, 38 aa, Homo sapiens
MHHISLYKPEANDPEMVAAGQLSFFHLNRDVRPAGWSG

SEQ ID NO: 958789 - protein, 49 aa, Homo sapiens
STGLLVLVEAARHGTCLLRPQVQELYFLALVELPEVFFLSLVNNCERSG

SEQ ID NO: 958790 - protein, 110 aa, Homo sapiens
MVKQSLYGSMCHTEQNVNMMRKMGDIKKSSSLQSSGKSNMTNVFLQPVETSRQNVAVTALLTTFSMELGEERRSLQRTECTQGAAEMWLVWGQTAEQDQFRNEGKPGMFL

SEQ ID NO: 958791 - protein, 61 aa, Homo sapiens
MAASCTSTGKPRLTICDVSDASHWSLLPPQWLWVFSALIWNGLYVLPVSHIDLDPQLRPWH

SEQ ID NO: 958792 - protein, 70 aa, Homo sapiens
KDEEEEEQGLRSREQEPDKESGASEDEIVILSQRRQTDKITHYMIPSNEMSRNGKSRDRMQVHSCPGLGE

SEQ ID NO: 958793 - protein, 37 aa, Homo sapiens
MQRTACSLFCLCGAGAGGGVAAATAVARFWRRWAQIA

SEQ ID NO: 958794 - protein, 37 aa, Homo sapiens
PFAKPCWLPGPGGRCWGASGMVDSSASRSASSPGLQR

SEQ ID NO: 958795 - protein, 33 aa, Homo sapiens
SGFSDTSCSLRYPRPSTDYWPQTKKLGKCARGG

SEQ ID NO: 958796 - protein, 105 aa, Homo sapiens
MGLPVYATDWILTLRDLMTLPCLGLPKSWDYTALRHRRPANINVSFGNDLSRAAQIQLFTYGAYVTAPVGQVATYSHPHGPCLGHPPRRFKQKSLWPQHFQRVRA

SEQ ID NO: 958797 - protein, 49 aa, Homo sapiens
LGTDQHAPGETAAHALELSVSPRWMRPVRTAWPRASGMEAAEVRADHPN

SEQ ID NO: 958798 - protein, 42 aa, Homo sapiens
ESHHPVDLTVACKIHISLLYLVYCFISPCVLSSLGYQTNCRS

SEQ ID NO: 958799 - protein, 62 aa, Homo sapiens
TVTNVHSEHLRAPDNLLYIINQDTESSFCHQHISDLHTSKTCYYPFNEEKQNKTPKNKPTKP

SEQ ID NO: 958800 - protein, 50 aa, Homo sapiens
MMLAVRLEPEDLELLMQRQGLVTDQVSLARLVERHLPLAVPSSCSSPSAY

SEQ ID NO: 958801 - protein, 42 aa, Homo sapiens
IIIASSSLRVRQTELNNRALSVSLHVSHMALVVTAILIQNPL

SEQ ID NO: 958802 - protein, 61 aa, Homo sapiens
MGVEAERRIPTQTCEEDHSTRCRQSRPEKKHFRNGELATKYNLRLFFTTYLLQRMLDTVLH

SEQ ID NO: 958803 - protein, 37 aa, Homo sapiens
GSRRSVLICIKKKKSKQLHAPNVQLKFPVKGSNLIRD

SEQ ID NO: 958804 - protein, 87 aa, Homo sapiens
MMLGGWCEELEKYVRGRVPGGDRKVLKPGHYWAGKTELPLYAQGMSSCRYSSGRCRSTSTCSETWSVTRPCRRVSSSRSSGFTVLWP

SEQ ID NO: 958805 - protein, 83 aa, Homo sapiens
RCYMLGVGELENIGGRVPGGTGKFEAGYYWQEDRVALYAQWMSSCRYSRCRCRSTSTCSETWSVTRPCLRISSSRSSGFTVLR

SEQ ID NO: 958806 - protein, 63 aa, Homo sapiens
RCYMQHLYKDRHYEDLLRVCVSLREGTGTVMGAELRHVLATLGEQMKEDEVEALMAGQEDSNG

SEQ ID NO: 958807 - protein, 79 aa, Homo sapiens
VGRRGAMMLVLFDFLGTTTGFHHVGHAGLKLPASSDPSTSAPKVLGLQVWATALGLVFFFFFFFGGDSLKVTGRACKWG

SEQ ID NO: 958808 - protein, 66 aa, Homo sapiens
GRRVPLLLLLTAVGGCVASHLLCFWDDVLSVVRPTPCGTDLRFTALDDGLRLLYRTLYGPYVCVDD

SEQ ID NO: 958809 - protein, 44 aa, Homo sapiens
PTPRLLISGSGPPPFVAEWRRQHLGNGTSCSLACTLLCAELAMM

SEQ ID NO: 958810 - protein, 35 aa, Homo sapiens
YTSTHPSPHCITLPIQPTISPSSVHQPILHPNTPV

SEQ ID NO: 958811 - protein, 35 aa, Homo sapiens
HISTPLSTSITVNTLHTHSHTVHISTHNSTKWRHP

SEQ ID NO: 958812 - protein, 63 aa, Homo sapiens
RFATLELSYDPDEPPRVKLLDIDTRLGRCRWRNCAPPERLGVVPLNVRRPDLLAEELTPGFAD

SEQ ID NO: 958813 - protein, 55 aa, Homo sapiens
DLEDLSRICDTSSSEVRRRYPEGKIILDVDINKDSRVETTLAGSVINTKHVKDPG

SEQ ID NO: 958814 - protein, 35 aa, Homo sapiens
VCETSYRIDLLKDAAITTVLRSTTEYLGLSRALLL

SEQ ID NO: 958815 - protein, 39 aa, Homo sapiens
MDGAIKRYGEITESLQERNGSRIADNIRILDIQDYLTDC

SEQ ID NO: 958816 - protein, 68 aa, Homo sapiens
RICDTSSSKVRRRYAGGHIILDVDSTRTAGGDHACGIANHTKHVKTQVLLENGGTVVIGGIFERVDRD

SEQ ID NO: 958817 - protein, 36 aa, Homo sapiens
PQGFCETHPVELLKMPRSPPCAVRRQYLGLHVLSVD

SEQ ID NO: 958818 - protein, 58 aa, Homo sapiens
RSTARGCAITTVRRSRRGLGLHVLGVDRDAAGVVSPRVSLLMSTSRMLLTSVVICVVT

SEQ ID NO: 958819 - protein, 44 aa, Homo sapiens
LKDCCELKLEGTPQIRRSENHPRRDINKDSRAETTLAGFGINTK

SEQ ID NO: 958820 - protein, 41 aa, Homo sapiens
THRDTCRIWTQLQEREEGRRNRLSKGKIQREEQYKDARSTV

SEQ ID NO: 958821 - protein, 60 aa, Homo sapiens
MLEVRAADHAGGYIILDVEQSTRTAVGETIALRASRPNTKHVKTQVLVENGGPVVIGGIF

SEQ ID NO: 958822 - protein, 82 aa, Homo sapiens
AGCLRNLFLTIFIDYMFHYTSTASSSKSRYQYRASIHGPGFMETLQKASRIYYGSTIRNSSDNYATAETLVADPLNWAQPDT

SEQ ID NO: 958823 - protein, 74 aa, Homo sapiens
RIVCDTQARSHAADHAGRNIILDVDVNKDSRGETTQCGIAINTKHVKTQVLVRERRHGGDRRHLRARVDRNEVV

SEQ ID NO: 958824 - protein, 35 aa, Homo sapiens
SRIVCALTPVDLLEDCADHHRAPFSAEYLCLHVLG

SEQ ID NO: 958825 - protein, 37 aa, Homo sapiens
EVIRSIGWPSFPGDTRRSASRVMSVRAARRHESQYDE

SEQ ID NO: 958826 - protein, 40 aa, Homo sapiens
CDNSSGRTARRLRRSPPCSVREQYLGLHVLSVDRDAGRYG

SEQ ID NO: 958827 - protein, 33 aa, Homo sapiens
ARICETHPVDLLKDCDDHHRAPFVGQYLVFTCL

SEQ ID NO: 958828 - protein, 48 aa, Homo sapiens
SRVAKLKLEGYAAITPEENSSSRWLQQGQPGETRLAGIGIRTKHVKTQ

SEQ ID NO: 958829 - protein, 34 aa, Homo sapiens
QPAKEPVLGAGRGEIRLSEGLIKHFNGEGKQCYN

SEQ ID NO: 958830 - protein, 73 aa, Homo sapiens
HARSYAADHAGRNIILDVNITKDSRARPRLPDSDQHQARKDPGTVRDRRPVVIGGIFSKVDRDKVSQISFQGT

SEQ ID NO: 958831 - protein, 33 aa, Homo sapiens
RIDIWPGLVVAITIPLVLAITFVVMYYWGVGLH

SEQ ID NO: 958832 - protein, 36 aa, Homo sapiens
  misc_feature (7)..(7): Xaa can be any naturally occurring amino acid
MRDHHRXACSTSTWSSRACVDRDAADGLPRLLLLMS

SEQ ID NO: 958833 - protein, 33 aa, Homo sapiens
MLEVTPHIRRTEHHPRGDINKDSRCETTPAAIG

SEQ ID NO: 958834 - protein, 67 aa, Homo sapiens
ARICDTSSSKLRCRSRRRENHPRRDINKDSRGETTLRIRINTKHVKTQVLLENGGTVVIGRHLRAGR

SEQ ID NO: 958835 - protein, 66 aa, Homo sapiens
QNCCDTVKLEVTPQIAPEGTIILDVDINKEQPGETTPAGIGINTKHVKTQVLVENGGTVLIGGIFE

SEQ ID NO: 958836 - protein, 42 aa, Homo sapiens
LRSPRCCNLKLKYAQIRRRHLSSRDFNKDSRGRHACGIRINT

SEQ ID NO: 958837 - protein, 33 aa, Homo sapiens
LRHLIPVELLKMPPITTVPPFIDMYLVFTCFVL

SEQ ID NO: 958838 - protein, 68 aa, Homo sapiens
  misc_feature (24)..(24): Xaa can be any naturally occurring amino acid
QELRHSSSKSRRRYAGRHIILDVXINKDSRGRPRLRDRITTKHVKTQVLFENGGTVVIGGIFEQVDRD

SEQ ID NO: 958839 - protein, 70 aa, Homo sapiens
CCNSSSKFTRRYAGGNIILDVCINKDSRARPRVRIRINTKHVKTQVLFENGGTVLIGGIFEQVDRNKVSQ

SEQ ID NO: 958840 - protein, 62 aa, Homo sapiens
DSASLKLEVTLQITAGGNIILEWASTRTAGGRPGLPASRSTPSHVKTKVLVENGGTVVIGRH

SEQ ID NO: 958841 - protein, 50 aa, Homo sapiens
ILRHSSGRLLEDSRSPACAFVDSTWVFTCLVLTAMPAGMFSRLVVLVDVH

SEQ ID NO: 958842 - protein, 37 aa, Homo sapiens
CRIVCETSSRSTCSKIAADHHRAWRCLDQYLGLHVLS

SEQ ID NO: 958843 - protein, 53 aa, Homo sapiens
VTSSSKSRADHAGGHIILDVDINKDSRGRQACWIGINTKHVKTQVLFENGGRV

SEQ ID NO: 958844 - protein, 62 aa, Homo sapiens
LFATQARSYAQITPEENHPRRGHQQGQPGRHACWIAISTKQVKTQVLFENGGPVLIGGVFEQ

SEQ ID NO: 958845 - protein, 57 aa, Homo sapiens
  misc_feature (47)..(47): Xaa can be any naturally occurring amino acid
SSTFPGHGSPSRPQSPEKRIVCRPKVVVIERPECCRRFADSTRIRTXRAFDRPFPGD

SEQ ID NO: 958846 - protein, 38 aa, Homo sapiens
INGKIKIRKASLPDQQRWDLLLGKQLDNGRTLYYDYNI

SEQ ID NO: 958847 - protein, 32 aa, Homo sapiens
PRDYFYVADLAGAEIDVPSYLADLPGIATTSC

SEQ ID NO: 958848 - protein, 140 aa, Homo sapiens
CIVSGSVDLQNHGEASKRSIPVLGYAAVPKLGEVETPSPVEPDKDNIRQEPYTLTQGFTWNALDLGDRGVLKELYTLLKENYVEDDDNMSRFDYPPEITNVGSHGHPIVSPSGTVGYKVASSREMGWVHKRHPSKHPLSM

SEQ ID NO: 958849 - protein, 43 aa, Homo sapiens
NRAVVCPQVIARTDGHAVTWRARHDGLEFRLHVFLVQVEVDNA

SEQ ID NO: 958850 - protein, 32 aa, Homo sapiens
FCLVTLRIRVVPVGVAVGGVEGAPGIHGGRVG

SEQ ID NO: 958851 - protein, 38 aa, Homo sapiens
MTNTSSAWRLVASREVDVKLRDKGFIISMIITVLLIVA

SEQ ID NO: 958852 - protein, 49 aa, Homo sapiens
MYLHGHVSNARNDEYDQANLVSLAIARSTNELRNLFEEFRFRKTHRERT

SEQ ID NO: 958853 - protein, 38 aa, Homo sapiens
VDLEDPDPRLVFGAMASPRFRRLRHGVRAACAFGVGGL

SEQ ID NO: 958854 - protein, 62 aa, Homo sapiens
DRVLASVPILRIASAGGIPASANNWANLSRVKGVLRYSTTSTSTPGVSSRIASVLRDVPHLG

SEQ ID NO: 958855 - protein, 32 aa, Homo sapiens
PACIRLATPARPLDGPSPVRMHHGDVVGLQLR

SEQ ID NO: 958856 - protein, 173 aa, Homo sapiens
PAGQLSNVPPYLLNIVVIEANWSDWLLWMLLDGLSPRTFWYFWTSCVPLVLLRKKGFVILVMTEDRIERTGEVGAVGPPAFAGEKGPSAEAGTAGPPGTPGPQGLLGAPGILGLPGSRGERVLTRCKTGAVGKPGPLGIAGPPGGPWSLLVLWVVLESTGAPGEAGRDGPPWE

SEQ ID NO: 958857 - protein, 34 aa, Homo sapiens
NNDVFFKLPHSLLKAQLISFSIPQMNAVVPELAI

SEQ ID NO: 958858 - protein, 47 aa, Homo sapiens
LADARPVLFQRHQKLALNQAGDVRVGRQLKLGQGAVVAQAPGLGRIE

SEQ ID NO: 958859 - protein, 91 aa, Homo sapiens
ANIVRSHRGQQWIRALSFGKVCGFDEPGSDAHVVRKSLKSCIPRDGRSRLTVLTGCRDCPGGSYMYTLANGHYRSANAATVTMDEAMSEKE

SEQ ID NO: 958860 - protein, 67 aa, Homo sapiens
LCLGILCVCWAILFFSPGPVIACRAASILAHILFRSQHSSLPSNHKSHCHFIVIVHISIYTAFHSST

SEQ ID NO: 958861 - protein, 33 aa, Homo sapiens
ACCLRSDTSLIKSSHKASVIVECRHYQGIVLFR

SEQ ID NO: 958862 - protein, 66 aa, Homo sapiens
EDPQRNSELSLSFQFCLTKEIIILEMRKWRWMIKPNHVSHSTVTCRTKLTEGNQRCIVAQQKAHQA

SEQ ID NO: 958863 - protein, 40 aa, Homo sapiens
PVRAAGSFEPCSCPGSREGLEVAAVLRIRAESGTKGLFTG

SEQ ID NO: 958864 - protein, 42 aa, Homo sapiens
LISAGIPFCSININSTHTGPGKHFLPCASSGSPQLAHSVTSM

SEQ ID NO: 958865 - protein, 44 aa, Homo sapiens
MAWCKLQASFEPTAALSPEKASHSCVLLAEDRAESGTKGLFTGH

SEQ ID NO: 958866 - protein, 38 aa, Homo sapiens
TLRVIPTGGERRYSDDRGLVLQEGSGALPPCHYSCSPA

SEQ ID NO: 958867 - protein, 36 aa, Homo sapiens
GGEELGRLRLVLLELNFLPTTVTKLSQTAAEFWRVT

SEQ ID NO: 958868 - protein, 108 aa, Homo sapiens
CAGEELKQDSMVPGRTFLAEANLMKQLHISDVIRLYASVTQEPIYIITEYMENGSLVDFLKTPSGINVDHQQTPGHGMPRVAEGLGFHLNDAVIIFIVTFGLPNILGG

SEQ ID NO: 958869 - protein, 65 aa, Homo sapiens
MAGESADSGKIIPAIARPQQPCKACVSGAVQGCAGSTEQVDSYKNGFLNLDLPFYGYSEPLAEHV

SEQ ID NO: 958870 - protein, 42 aa, Homo sapiens
RRLAATECHRPSTIRNLAVVAPEMQVKVLQSLGLKSTLFTWP

SEQ ID NO: 958871 - protein, 45 aa, Homo sapiens
ERSALPPVSPLKAALSEEELEKKSKAIIEEYFHDQLSGIRLRACE

SEQ ID NO: 958872 - protein, 33 aa, Homo sapiens
YLFFHHSYLSTSDLKCWLPPVYSSSKHVLFTGH

SEQ ID NO: 958873 - protein, 34 aa, Homo sapiens
MHVYVAMCHLNCCLVVTKLQIIKSQLIRKFSETR

SEQ ID NO: 958874 - protein, 55 aa, Homo sapiens
MGTMRSRRLAMGMLLRRGIEPLTVKVLQFYSDYLGSAILKQTLFFGRVSGIITKV

SEQ ID NO: 958875 - protein, 62 aa, Homo sapiens
IRLSWHITIMPSKENSDLTISGCAQWLMLMIRAVWEAEAGGSPEIQDFKTSLGNIGRPHHLV

SEQ ID NO: 958876 - protein, 71 aa, Homo sapiens
FTCGDAIAPVSPVRVLRVSVTLSLLRVPTGLYSLLQTCGIGLPWYYHLTFSFGTWTLCFRTSVSACLVLLR

SEQ ID NO: 958877 - protein, 62 aa, Homo sapiens
MKEHLGFQHACGPEGWHSSRNRKSHLPGHLSLVSLDARTAGATLQSGVVIKSLRTYTIYTSS

SEQ ID NO: 958878 - protein, 100 aa, Homo sapiens
EVIPPGADETALLGLTLEVVSHKVQSVIRFSAGDLNQGDSLNGFHHVWIALERFVERGFGFVQASLAKIQFAHLFIAYGLCGIPSINRFKSNSADAGSLW

SEQ ID NO: 958879 - protein, 89 aa, Homo sapiens
LRSTPDQEAGSLSACAMPLPSGFSGFAEERDASFQRALDLGVVRLVTICTRVRKFDGIIGIAERYDSVFASVGTHPNNAHEELDVTAAD

SEQ ID NO: 958880 - protein, 68 aa, Homo sapiens
SEQPTLHYTPSRCSECGKHFRCDSHLASHQSVHAAGNSCTGQEAGESPGARKRQRAVPVPKCHVCTEC

SEQ ID NO: 958881 - protein, 35 aa, Homo sapiens
MSMRVHDAVALGAPSAARAVHADRMHLVDIGHRLV

SEQ ID NO: 958882 - protein, 73 aa, Homo sapiens
RLTVRLISSATWAAGLSSRISRTLASAAPSAAYAECCSAARRAVIDDYLVFTVPGRFRLRPSMRMQVCGLRCV

SEQ ID NO: 958883 - protein, 68 aa, Homo sapiens
KGDRRKIKGKDEKEEGGGGEEEEEDEEGGEEEGRKGMNQIVRAWLKNPGVLPLAYQEFLVWEWNVGHG

SEQ ID NO: 958884 - protein, 46 aa, Homo sapiens
VYGDTRSIHAQAIRLARDRGITVQVGDAVLIQQRGAAFGPAVVAVL

SEQ ID NO: 958885 - protein, 42 aa, Homo sapiens
MWYIMYHMVCCLCGYVCGMFVQCVVVCVVCSVFVLCQCVCGM

SEQ ID NO: 958886 - protein, 53 aa, Homo sapiens
LLPVFPATRKAEAGEWSQPARRSLLAESRDGSTDTPALNDKAETLSQRKETQR

SEQ ID NO: 958887 - protein, 109 aa, Homo sapiens
KLTQFEMERSGMHLNGLEWNGMERNGTDPEWNGTDPEWNGTDLEWNGTEWNGMEWNEVDSNGMEWDGIDSNEMGWTRMEWNGMESTRVEWNGMEWNRMELTQFKRDESE

SEQ ID NO: 958888 - protein, 44 aa, Homo sapiens
TETAYTLEEEAVSVQREEEYEVYEEYDYKEFEEYEPTEEYDQYE

SEQ ID NO: 958889 - protein, 34 aa, Homo sapiens
EYRGSPCAAYDESSVAYSPELVSNLASLLMQLNL

SEQ ID NO: 958890 - protein, 137 aa, Homo sapiens
YQPKTELGQTGYRKTRNGSTTTVCRYWNGYNNAVPKYSLRLLFSSFLMGEIAAATIFKQMHYNSRELVFPEAFRNIGRDEGRHMAICMALMERDYPKLPVEDKALVTKQIRAGYLFLSAVLFEPPMEFQDLPEDFIP

SEQ ID NO: 958891 - protein, 34 aa, Homo sapiens
IYEDPPVLPYDESSGLIARAGEQPGIAADAALIS

SEQ ID NO: 958892 - protein, 205 aa, Homo sapiens
PADSRMFTRLCLRRRAVRRHDFVCGFAEPIAATAANAAAAATRTPLPVVLTTILGCSTLSRLACPTRLARLTGTGPRANTAAWPSPSTSCVTGCRNDGRANKCAHKISSNNCGEVAPRICGNRYVYYVRIMRQRLRAKPPSLFLQHRHAILRGRHQPLIESLGHSLDYQQIPQAVQQVFHETAWLVPSIDDVVDERNNSPFSSSA

SEQ ID NO: 958893 - protein, 81 aa, Homo sapiens
  misc_feature (3)..(3): Xaa can be any naturally occurring amino acid
MVXESEKHDGGQPMDAPEQRKPFGSYASDGTEVFSFLRQFLPGVGVCLHGEACSYDMSPDEDFIIDTLPDCDRLMVISGLS

SEQ ID NO: 958894 - protein, 94 aa, Homo sapiens
MTSPAALRSSPNETKACRHERNRHSHAYRRPRRRTAIACYTLWGLLPLLFMAMAAHGFTAPEILAHRAVWSVFIAAIVLLLAGQSAEARKALSN

SEQ ID NO: 958895 - protein, 90 aa, Homo sapiens
LAHVSPANRMWTPGAGCERFPAQALPNLAIEANATKPLEALSNILGDFPGRVLFTAESAGRREVLLELLERLKLRAKTVESWPDFVASKD

SEQ ID NO: 958896 - protein, 33 aa, Homo sapiens
WLTWSVERLEREAGSSHFMSKGLVLLSEETQSD

SEQ ID NO: 958897 - protein, 40 aa, Homo sapiens
PIFADVVAEVCGLQQRVNPKVWDFYTEETLALRALPYDLG

SEQ ID NO: 958898 - protein, 35 aa, Homo sapiens
NCCSLMYMHAVAGLPLSSGRRSIHATLLRTTPVAT

SEQ ID NO: 958899 - protein, 71 aa, Homo sapiens
VRHTQHVTQSVGKGAWLARSMPLTLGGWQSGVQTDLVQWSSAGYLWEPYPEQWAVSCPLYPPWKQSMQIDQ

SEQ ID NO: 958900 - protein, 45 aa, Homo sapiens
MLQHVVEWWRLCEENAGMSSEKKGEKPFRRMTKVLGLGYSALGKS

SEQ ID NO: 958901 - protein, 72 aa, Homo sapiens
SILSHIWSAGSFFMMALMIHSINLYYSLSASLLLGTQNIPSSPYTLSVPALASAISLCTSDSFSEEYLENKL

SEQ ID NO: 958902 - protein, 86 aa, Homo sapiens
VIAQKVKAGVVNGTGAPGQSPGAGRACESCYTTQSYQWYSWGPRCSGLGGRGDSCYCGLVLASLHLTGLAFSSHHISSNMSNKMRR

SEQ ID NO: 958903 - protein, 63 aa, Homo sapiens
MFGQTCRGLYGAYSVSRRIFYVQRFRRLRRRCRARGTLTSSAGFADTHIDIVALNTASPCGFA

SEQ ID NO: 958904 - protein, 35 aa, Homo sapiens
ISSQLCVPFGVISLVISAEPLASTNGPVGESDTAT

SEQ ID NO: 958905 - protein, 42 aa, Homo sapiens
VWMGFYGPESKRKFPSQCVKAPVPSVTLSNAQLKSIQSMRRS

SEQ ID NO: 958906 - protein, 163 aa, Homo sapiens
HPSIADTRFENLPARRSSASICISFITSTGQGKWVRHNGIVLLAAPMAWKAWAQSTRQGAPKGFLQIINVWTRMPTPAFTKYFEGEPAQKPRTSVTPMKEPGCHTVYGAWSTAKDLIHRAHTVTCDSTILALQNMVPVTECALLPILPVDPNVDAFLQAGKPK

SEQ ID NO: 958907 - protein, 39 aa, Homo sapiens
LLALQQSTYAYNGFKQGKDSIFNKQDTISEGSRGAHSII

SEQ ID NO: 958908 - protein, 36 aa, Homo sapiens
PKEIFNTVNHANTINTISEYLNHLTDASLQRDITLE

SEQ ID NO: 958909 - protein, 115 aa, Homo sapiens
MSRNASNLLVPQNSHSPGLLKHTSIMVNLFNLMSCFTLRLWKKYMLSILITYCTVTSVVLVYNCHLIFHLFMYVLAYLKRHHMSWYFLFFFLEPDLGSFTQGKRAEKKPGNSLKS

SEQ ID NO: 958910 - protein, 189 aa, Homo sapiens
RSLTRGSSWSMQLAEVCGRQACVIVTKASQSITSFCADYIERTWFWSISAQSQRQMHQMQDPGLMSSIRAALGLPLCQQNLWIAADGVSQLSGPGRPFGNPWLLGHNILGTTKKAFHLSFGKEEQLRLWVAHVTIWKPAGSQQTRKSCIHSSPSPFGRKGMAWVGGVYSWVLAQLLIRNSLLFGCWKLG

SEQ ID NO: 958911 - protein, 88 aa, Homo sapiens
  misc_feature (65)..(65): Xaa can be any naturally occurring amino acid
SRGSLAVVGDLICTIESCIPIHATTPVLFSLDMKRITRMYMRDENEEKEVGMVSRQSDIGNKNDXGRTHSIQSVPSMLILDDEEKRRI

SEQ ID NO: 958912 - protein, 37 aa, Homo sapiens
  misc_feature (8)..(8): Xaa can be any naturally occurring amino acid
  misc_feature (24)..(24): Xaa can be any naturally occurring amino acid
  misc_feature (27)..(27): Xaa can be any naturally occurring amino acid
  misc_feature (29)..(29): Xaa can be any naturally occurring amino acid
  misc_feature (34)..(34): Xaa can be any naturally occurring amino acid
MEETLISXEEMRGNLCNESWSWQXQGXMXDPIEXAQI

SEQ ID NO: 958913 - protein, 138 aa, Homo sapiens
RLVDRASLRLKTKQKTRKLPKDPFSYNIIPCGDATLTVRGFWAMTLSGYFLLKRGVEWETAARAPSGVDPRVFGGMAGLSMCGSVYGTIWSLIASRREEIFRVIVLTIRGPNISTTRISKRVLSKGVNQFHKEVQETK

SEQ ID NO: 958914 - protein, 66 aa, Homo sapiens
  misc_feature (15)..(15): Xaa can be any naturally occurring amino acid
  misc_feature (33)..(33): Xaa can be any naturally occurring amino acid
  misc_feature (35)..(35): Xaa can be any naturally occurring amino acid
  misc_feature (62)..(62): Xaa can be any naturally occurring amino acid
YDRCTHQTTDYTAHXNAQILGKHELKKKTNPLXIXSTWAYHKVRNKDFTLSMNTITEKPSNXEGYE

SEQ ID NO: 958915 - protein, 44 aa, Homo sapiens
AVIIQIEEILRNLADHHCWCTDFFIMRVMDTRVLLAFFVKAASS

SEQ ID NO: 958916 - protein, 64 aa, Homo sapiens
MNTVQLVLPTLYPTFGRLVKDIEYTIRSTLNEIYFRKTKGIVYGLRSCAYFCRPVNTRSSEWIA

SEQ ID NO: 958917 - protein, 57 aa, Homo sapiens
KNARKPDLVLKSLCLCRPPRLDIFIRDMATGTVTCVLGASTVTWVYTMAGHTRPSGE

SEQ ID NO: 958918 - protein, 41 aa, Homo sapiens
MLIQEVIVTQDFVSHPSKPRPHRIKVAEEMCLSQDHPVNGA

SEQ ID NO: 958919 - protein, 37 aa, Homo sapiens
LTLEYPSEFATTSLRNCTWIYHVAQVGLEFLSSSDLP

SEQ ID NO: 958920 - protein, 48 aa, Homo sapiens
PDRGLHEDNRKIWKSKEKVKCGHICFVLAARHLGTPTSLINMEKPSNS

SEQ ID NO: 958921 - protein, 122 aa, Homo sapiens
IIVTELLRVVNGMPLAGCYCCEEGPIGFQRQRMTSWSESPRYHSSNIICGNLSRLALMLWIPWCHLRRGQRELIIGDRQIGRTPAAIDTYSVNQITSRLMDPDETEEAVLYLCCYWSKEIHC

SEQ ID NO: 958922 - protein, 37 aa, Homo sapiens
LDICEEFAEYNARQATYGEKKDESVGAHEQLQLDHVH

SEQ ID NO: 958923 - protein, 82 aa, Homo sapiens
DIDGFSLEDSIFLKRGELRIPTNKNLLRGRAQWRTPVIPALREAEGGGWLEYRSSRPAWATWRNPISTKKTQKLAGCGGACL

SEQ ID NO: 958924 - protein, 45 aa, Homo sapiens
EDPRFSFLFSMKSSSISACLTVRWNPSRRKPLFAQGGLQILLNEL

SEQ ID NO: 958925 - protein, 50 aa, Homo sapiens
FWHSCQVSATVSSPGSVPASLGTFQPTHHSTGSGPRGPAARTFVTSMVHQ

SEQ ID NO: 958926 - protein, 40 aa, Homo sapiens
TEYHLSYGGLSLELTSSETNGRKGEMLTQQSEEDFQQLPR

SEQ ID NO: 958927 - protein, 47 aa, Homo sapiens
DDHYSIINNSTVEILSICWLAVVAITPATPSTAVEANAVRITYEDQV

SEQ ID NO: 958928 - protein, 102 aa, Homo sapiens
MRSRSKDPPQDTSTSSWVTFCSIKVVCVISSESFSHAYSQVISLLLEIGYSLLEVLLFQVLISLLLVLSMLACSNPGISPGLCSGREEVSDLCTLLADGSMD

SEQ ID NO: 958929 - protein, 36 aa, Homo sapiens
PSTVLKTTEYAFSSSAYGTYSNIDHTIGQETIFSKF

SEQ ID NO: 958930 - protein, 60 aa, Homo sapiens
MVGTLNQHVPRRPVPVYEPDILQVAHPLSNLDSPVQQVLGTHAYAVFRAMVYEAALGHKL

SEQ ID NO: 958931 - protein, 34 aa, Homo sapiens
SGCDDCWHHLSSCRLTCSSGLTLVKSRHHCQFLQ

SEQ ID NO: 958932 - protein, 150 aa, Homo sapiens
SRGLPPVTLPQTIRGINLHLNPSNTRVSWNPTFNLKENSHTGQAQWLHLIFCIFIETGFHHVAQTGLKLLTLGDLPTLASQSAGITGVSHHAWLLFIIIIFCRQSLALSPRLECNGMISAYCNLCLPGSSDSPASASRVAGITGMQHHMQ

SEQ ID NO: 958933 - protein, 75 aa, Homo sapiens
LTETRSRPPRTPAQSYTGARGRAEVVARRARALNCSNHQSLLSPLGTELQFDEETGEGRIEEEVLLRKTWIKIAM

SEQ ID NO: 958934 - protein, 52 aa, Homo sapiens
DHLDAAWRMLDGVCLPNHFGADVLVLEPSNLYLIYPYVHDAGCVHCLKLNRT

SEQ ID NO: 958935 - protein, 63 aa, Homo sapiens
DSRVSWYPDQLRQIVSLASAGSSDHQQRAGRTEGTEKQHITLALEEQKLEEKRSFDSAVAKAL

SEQ ID NO: 958936 - protein, 102 aa, Homo sapiens
MTSDRRYNRHSLHVRYQASRQFGAANEATKSLGRTKQAAKGNAAAVLCGGATPSYPFYEADSSSKYLRAHLLCIGYFAGAGDRAVTKTLFLFLSETLVELMI

SEQ ID NO: 958937 - protein, 43 aa, Homo sapiens
MLSIKSKGGLFALYCRTNAWSLRNFCARNCPRISKKNGYPSLE

SEQ ID NO: 958938 - protein, 65 aa, Homo sapiens
MKPEVPREKLASRPTRPPEPRHIPANRGEIKAHFDYQFGYRKFDGVEGPRTPKYMNNITYYFDTC

SEQ ID NO: 958939 - protein, 102 aa, Homo sapiens
MGGAGFPTVMGSWQVLQYPTSGTSAASGCRRSLCPLEVPLYPLSLAIRILRLFLRLFAVFTLIRSNMLFPIFGRLSWSSRNVLGSSRTCPLLAKMATTMDSM

SEQ ID NO: 958940 - protein, 45 aa, Homo sapiens
EANADWFTSLSLKILSRYNREGGISSSKVQCALTENMHKEPVSIN

SEQ ID NO: 958941 - protein, 119 aa, Homo sapiens
VVNTYSRFHRGIILENEAALILSAESFKSKTRGVPEREFCLETAASHSHWMSSPRPHGWVSPSSPRFCLLFVLSLDPPCGPRPSSEDLPYFFRAALACWRPGLQSVPGCPGACSVTSQL

SEQ ID NO: 958942 - protein, 35 aa, Homo sapiens
  misc_feature (1)..(1): Xaa can be any naturally occurring amino acid
XDLEDPSIDGSHEYKTMKMWASGHAVLQHFERQRW

SEQ ID NO: 958943 - protein, 58 aa, Homo sapiens
ESTVSRSWAITNKTVMVKAMIEEVEFRVRIRMDQVGTFNANLKLFEKTTKGIDYSWKD

SEQ ID NO: 958944 - protein, 34 aa, Homo sapiens
YLRIPESTVLWSYREQQQAEDRASELCQAGSVSV

SEQ ID NO: 958945 - protein, 57 aa, Homo sapiens
VKITVSVGLASLEGNSPWLVSGIFSMCLHMVFPCVCILISSSYKTTGLTGLGDRVNL

SEQ ID NO: 958946 - protein, 105 aa, Homo sapiens
MQISRKIPPTGGGKINGNKTKNAQPIELRDRNFKTAIINVLHVLKNTSGIQAEGPKERKRHFHLEMKHIIYEKNTVDEISNRLNTKQKKRSVKDIKKLSNMKQKN

SEQ ID NO: 958947 - protein, 32 aa, Homo sapiens
MEMARCLAKTGTDLRGYAYEPAACLNIFSSEH

SEQ ID NO: 958948 - protein, 110 aa, Homo sapiens
MQLDPFCRPPQCLKVLGQDGRGEEDPVSGPEWIVGFLEPRPHSVEEQPPSLLLPSSPGLWLEHCLLHQEYGALTCDEGRDREKNTALFVLSPKKAGLGEGHQHVGPRHSV

SEQ ID NO: 958949 - protein, 150 aa, Homo sapiens
LDSVRGWMPNRSRSGRSNDSADTGTQLSPQPSWLTRCSAVQRSQLGSLCVSLYINLWLKFSKTPRVEFLQSSVQTVQAGDGREVLASKKLTGQAGLLLQDAGEHAPSPQGTGVSFEGVKGHLESVPDTYGIGESATPDYCHLRNSGGCST

SEQ ID NO: 958950 - protein, 63 aa, Homo sapiens
  misc_feature (31)..(31): Xaa can be any naturally occurring amino acid
RADNNSKDRKSQPMGLWSTGGRNGGLDSRTXNFSKAEEDIFMEHLKDIVEYYNAPVTGLTYCR

SEQ ID NO: 958951 - protein, 90 aa, Homo sapiens
NQPYSGTKETSYSRRATITAALTQASNSMCAEPPPDTSTLTDALEQMQIRTETAPTAAKAQQEPQEPWSLISSMEDTAAIAPVIEEGTEL

SEQ ID NO: 958952 - protein, 43 aa, Homo sapiens
DEAVLPELLLIGNWLSSALKPKRPEIGSCWEGFSEAGEWREPG

SEQ ID NO: 958953 - protein, 69 aa, Homo sapiens
STLESGALQAELEENLIHDMHVCGGGCRRGAKGHHFPDTSSSFRGRNETAVTDHTSPPPICSPQRRQIV

SEQ ID NO: 958954 - protein, 44 aa, Homo sapiens
MTYLTDVCNAVTILDFMSVESSSVGYEFFTYRPQDVRSAPDTDH

SEQ ID NO: 958955 - protein, 120 aa, Homo sapiens
FLIREEGPGPFSSSLKEPPQSQDEVQHPLSVLRVHSTNQNSSFNSCKPGHSIIVLFDLYGQLSSGSQNQSKLEDALDMPYRCCFCHPTLVPDFQSVLYQDLPPPSNTEAPPGETRTEARS

SEQ ID NO: 958956 - protein, 54 aa, Homo sapiens
KLDMVISTRAYANLEGFALRTSPVWWICSAQYIHSPSEPLPMILVDEPSIYRSY

SEQ ID NO: 958957 - protein, 34 aa, Homo sapiens
GAVGPCVLLLNTLGLLYGQPLSAAFIQMLNQLQR

SEQ ID NO: 958958 - protein, 41 aa, Homo sapiens
VVHISAGSRKAEATHRVCNRRNRTQALDCLRGQLQRLEMFS

SEQ ID NO: 958959 - protein, 49 aa, Homo sapiens
RGLLTVLPNATTWASTFACPCDDATSDCDLCVRSSSCVCYVPTYVPCVL

SEQ ID NO: 958960 - protein, 121 aa, Homo sapiens
LYWLVNCSLGLLGAAQVGLDILGDARGVIGEALGGKYFGKTGSVGQIQTQVEGNAHRPRLVRKLLSRVSGDQQQVINAVTVGFERWTPPGPCSRRANLHGFAAPGFVGEGLLRPRKKFRGT

SEQ ID NO: 958961 - protein, 53 aa, Homo sapiens
VATLEDPFVLVFESTKEQKEGQSSDEEVKTMTCQVVVLLLLTEEGEQQRLEQP

SEQ ID NO: 958962 - protein, 95 aa, Homo sapiens
  misc_feature (56)..(56): Xaa can be any naturally occurring amino acid
TTWSTPPESTVSFGKRGSESGKKGEFRTPGPQLPIAWGSTPSTFSLVPYPYFQCAXIAINLVLGTCYVGLLWVSSVSWFNAWEDASGGNGGLGYM

SEQ ID NO: 958963 - protein, 61 aa, Homo sapiens
MRIPGQRYSAATFLPCHSSGITGRGGAVVRFISAVTSSGASGAQSRKARRSSPAASAGENT

SEQ ID NO: 958964 - protein, 61 aa, Homo sapiens
ASWKDNVVVRGSAQAGFLLTDDDALVFDGDFVAKLKAGADDIQHAAVEVLKGLDDFSADAI

SEQ ID NO: 958965 - protein, 141 aa, Homo sapiens
IPHVRFNWNGMDTHGTNMDWHGLEWNTMELMEWTLMDWNGLEWNENGIDSKGMECNGMDSNGIRTEYDLRTGMELQLDLDHEWDGLEWNWNGMHWNAIERIGMEWNGTERNGTDTERTRTGPGNGPGSGTERDPEWKRNVM

SEQ ID NO: 958966 - protein, 67 aa, Homo sapiens
EIPSKVQLSTSAFHVHSGLSAPRVISNEAARSRKSSRHSESACALKQKLFRGSRNLAPIYARDHSSR

SEQ ID NO: 958967 - protein, 34 aa, Homo sapiens
APRYLGIEKGCPESRPPGTRCRRCSSRIRRSSPA

SEQ ID NO: 958968 - protein, 43 aa, Homo sapiens
LNQPPLRQYSRTRHSHQLLTAAGRLWWHQDRCSQRLSIPPVDL

SEQ ID NO: 958969 - protein, 36 aa, Homo sapiens
IEIKVRWEEVEVEGDGVGGVEGTGQGTVTSGLDSMV

SEQ ID NO: 958970 - protein, 48 aa, Homo sapiens
GDRVPGPGVVRPILDVGKISSLLMHERPAYLYSLEVQLTAQTSLGPVS

SEQ ID NO: 958971 - protein, 35 aa, Homo sapiens
IDDQGTAYIYSRNRRRHTSIFHLSNFHKSCLLCQQ

SEQ ID NO: 958972 - protein, 43 aa, Homo sapiens
MKVIKLSPIFQLDNLSAEIASRFTHKPQCKPRYFKTESFQSSS

SEQ ID NO: 958973 - protein, 32 aa, Homo sapiens
MRTLSADSTQQRKADRYNKELTKERDALRLEL

SEQ ID NO: 958974 - protein, 41 aa, Homo sapiens
  misc_feature (11)..(11): Xaa can be any naturally occurring amino acid
GAGQLGGRPLXLTELPAVSPSAPGLGALAFTWTNKEMPPEL

SEQ ID NO: 958975 - protein, 55 aa, Homo sapiens
MAIHASQAGKCSTGPHSTGRQLVPIKQFNGCACAGNSGAGTFKILALQAPSIAYG

SEQ ID NO: 958976 - protein, 33 aa, Homo sapiens
MSRRAQTDNACADNIAKASLAQRSTFECAQGPV

SEQ ID NO: 958977 - protein, 35 aa, Homo sapiens
AAGVISRLEEEEQDILAATPRKCLLTLWDKRRDLA

SEQ ID NO: 958978 - protein, 44 aa, Homo sapiens
EYHRAANNMGQLVVQFQSTGQQQGLQGWKPSSFCNLFLEWEPHH

SEQ ID NO: 958979 - protein, 70 aa, Homo sapiens
SSEELRIQLRWAMVSGDFGLDSKSSGSGGSVLGRGGALLAALRSKDSFSCKASRKYSSQGTAILLAVAPA

SEQ ID NO: 958980 - protein, 100 aa, Homo sapiens
QCYGATHFEMIRSHKTHNEYSTKPRGIHPKDPIISQQALPPARGITIQHEIWAGTNIKQYQRWWTAGWRAGGLGYLLFPEVTHLARWTSHFISTCLDFVL

SEQ ID NO: 958981 - protein, 103 aa, Homo sapiens
THWMAAEAEQRGRQALSCSYVRSSFCIRQHADYSAAWRLSGAQVSLYNSPSVPSQLGVVGAVAFLSKQGIFEEDDDDDWDDWDDGMHSGGGATGWWAGHQRAP

SEQ ID NO: 958982 - protein, 35 aa, Homo sapiens
DLRSMKRRLSSILPTVYDKQHPPKIVPIVIMGTAR

SEQ ID NO: 958983 - protein, 33 aa, Homo sapiens
MIAVRLQSELVIEGTVSVGFQQSEDLFTGHRHH

SEQ ID NO: 958984 - protein, 78 aa, Homo sapiens
  misc_feature (67)..(67): Xaa can be any naturally occurring amino acid
TLRSMIAIGLLSAAQSPLAPSMDTCEHSCLCTSGTHLIQLKSENRTDSVTSPDPKAHICIMLISLMXAMIHTGLIAYQ

SEQ ID NO: 958985 - protein, 66 aa, Homo sapiens
  misc_feature (31)..(31): Xaa can be any naturally occurring amino acid
SYLRIHRRRSQERAVRAAVGVLDLQDWAADXVQELSVLSSLLKLVLSVCLLLRLRGSRRSEGSVMR

SEQ ID NO: 958986 - protein, 64 aa, Homo sapiens
  misc_feature (52)..(52): Xaa can be any naturally occurring amino acid
SGQLNTVVCRCSASTAMGLHALQNSAEPHLDSNCSSWRMKLKLGEMMLRLLXHKLKDPHRFIQV

SEQ ID NO: 958987 - protein, 125 aa, Homo sapiens
PEVPLIADTVVCSTVRYKSDLNLPDYSYVLPRVDKWFAVSPTVKPQQTAKQHRLILSMAVAAGGLWMRYTCSMYSVILCKKLRGSLKAIGIVILDSSRPTLFFRMVHTLKSLLLNMGVGSDVLCF

SEQ ID NO: 958988 - protein, 161 aa, Homo sapiens
MTMHSPEQSREKSETVATEEIVECGKASDSEEAGLKLQKDLEFVLKDKLEPQSAEFLAQEERFAAVLKEYELKCRVTCLLCLPFSLMSRLWVSTRRWSTVTQECLLQGEPLFAGMLDHGLATLLDLGFPGSRCHLILKAASVCPGTMQGIVVFLWSCLAFL

SEQ ID NO: 958989 - protein, 57 aa, Homo sapiens
TDLHSHYYSAQQTQTTNALTVRIIILSQGTSNLYSHYIAILIDFYPSPRLTSALPPH

SEQ ID NO: 958990 - protein, 75 aa, Homo sapiens
EDLFSDFVLHRVKARARKVEREIREDTWFYTNPGASCAGGDSEPDEDRIRLRESQPLHEKLPRLAATLSLAGRPR

SEQ ID NO: 958991 - protein, 88 aa, Homo sapiens
MGTTQKARAGDSVLMLGDRRLRAVTAAGFQLTTSWVGDCVCDGYLLISKIREEYPDRIMNTFEVVVPSPKVSDTVVEAYKAGLIRLIK

SEQ ID NO: 958992 - protein, 70 aa, Homo sapiens
ETLKGGDPPPVRGTSGLLTIQELSLPNREELCAKAPPPVFYNKPPQIDITCWDSDPSSITRRRRFHAASC

SEQ ID NO: 958993 - protein, 34 aa, Homo sapiens
TLRIPIGYADRENVRCVGVGVLQRGSLGFRRRPP

SEQ ID NO: 958994 - protein, 167 aa, Homo sapiens
MLILPVLYPQLSIAILVSCLAALDPDEYVLARWCCPPHYMVDSLANGHVYSFCFSPPWNSIAVDLCFCHILHFVSDILLTAVDERARVCARAGPTSIQISVAVLPRAHLRAAEFIEQPENRPEVARILSSPERLGVDASVIQRTLDGCLKISPDGTIRESNRYLLVG

SEQ ID NO: 958995 - protein, 43 aa, Homo sapiens
MGRREGKEVNEKDRKKIESMCLAMMTKPEVIMSAAGEAHKWSL

SEQ ID NO: 958996 - protein, 41 aa, Homo sapiens
  misc_feature (16)..(16): Xaa can be any naturally occurring amino acid
MATTLHSRCLPHASEXTTHADVGQPSPGHRVILYPLIRLYN

SEQ ID NO: 958997 - protein, 35 aa, Homo sapiens
CFVLAWYLVEEMKKREGFELVMEPEFVNVCFWFVP

SEQ ID NO: 958998 - protein, 63 aa, Homo sapiens
  misc_feature (52)..(52): Xaa can be any naturally occurring amino acid
RTTGQRTQCLEVIKGVLFRIFIIRAILVGSAEGAPQDRRAREEPTRRSRNLXPKDIIMNLHVY

SEQ ID NO: 958999 - protein, 107 aa, Homo sapiens
DLEDPIDERIGAHAEDIHCFALLHSDESGYDIDSDGPSPELWIESNYPQGPCENITLWCRSPSWILKHVLLLKDKTQMTWMRPSHKNLPSSIPYRCPHPLILRGTAL

SEQ ID NO: 959000 - protein, 58 aa, Homo sapiens
PDAAGDLEYPLDANLGGYNVIVTAHAFVIIFFIANTHHNRRLWLLTRFPYINTVPPSM

SEQ ID NO: 959001 - protein, 44 aa, Homo sapiens
LIYMTNILVHPPSSPYEAALANGFIAQMGHYRKFTKDNSLTHKL

SEQ ID NO: 959002 - protein, 146 aa, Homo sapiens
MAKLENEKKKREIAEKEKERIEREKEELMERLKQIGEQTIKGLKGPRRTDSKRSKTWIKNENEQKKKANDFEKERRAAEERKSCHSKTSCRPDEESGAGYQQNLLNSLARIALLEEAQKKKEEGTTEWQHKAFGGPGRLGTDPRRV

SEQ ID NO: 959003 - protein, 48 aa, Homo sapiens
MCPALVRDRQLGDQVMVSELRNKKSEKLLRHCERNSCHTAWKRAQACP

SEQ ID NO: 959004 - protein, 67 aa, Homo sapiens
RAIPSLTLCVRLLEVIKKLLVRVEFEVLREDYDATVSASVFEFARPNSSEDVSPWAIIRMTAPVKLQ

SEQ ID NO: 959005 - protein, 31 aa, Homo sapiens
MMEVGGRAKQEDVARGDQGQRRDQERTEDQE

SEQ ID NO: 959006 - protein, 82 aa, Homo sapiens
ALAENNWQTYNIQGADEEGTEYTHGQQASEGRQQNECGVDSTHSAYAPEDREDPRLQVMQKQDKATHKLRTGRNFLATQRAG

SEQ ID NO: 959007 - protein, 77 aa, Homo sapiens
LEVSPARIYPNLRLCAEAVYYNNVCVFGYKNRANAGLRRILMFKPETSSDSPSATSNGVRLVSATVEINHIMAKGHD

SEQ ID NO: 959008 - protein, 81 aa, Homo sapiens
  misc_feature (14)..(14): Xaa can be any naturally occurring amino acid
  misc_feature (22)..(22): Xaa can be any naturally occurring amino acid
DRRGLQQRLRNATXSVAMEARXLRETRPEEFPLALRAKAQQLCQELAWLCGAAGSWGLKRAEILPPKTDKSEAIWERILTP

SEQ ID NO: 959009 - protein, 55 aa, Homo sapiens
MRGQRSTKRGTIGENQITDEKHYTDKNPKKKIKSFLDRKKGFTEVKSPNGEFMTP

SEQ ID NO: 959010 - protein, 52 aa, Homo sapiens
IGYAMMQPLPLPSQPVFAPCFRAPTHADVGQPSPVHRVILLIPSYCFIPIGG

SEQ ID NO: 959011 - protein, 43 aa, Homo sapiens
MAKGPAAYSTVNRLRLVRTPLRQVESGTVWSPASAGDHIIIMA

SEQ ID NO: 959012 - protein, 42 aa, Homo sapiens
RRACSSCRKELCTGSGTDGSRSCETQTTERIESILPPFTFNQ

SEQ ID NO: 959013 - protein, 47 aa, Homo sapiens
AGTYPKSTIVCDEGRFPQGPHCLFSPISPDSSLLTDHSAPAVPELDL

SEQ ID NO: 959014 - protein, 51 aa, Homo sapiens
MILSHSQHLGKGEERQVWPMGKSYLPSHYTLLSLAITLARGYPQARYFAKS

SEQ ID NO: 959015 - protein, 42 aa, Homo sapiens
ECLGTLRIPIGYAVRGSTLLAIFEDMRFCCNILGMRIRVLRL

SEQ ID NO: 959016 - protein, 68 aa, Homo sapiens
VNNAYGVTCTELAPRLTQLPFTHITIPKAVSVPLHFKNLVIMISCGMLEHLQLIHFINPLDVMLWVLS

SEQ ID NO: 959017 - protein, 64 aa, Homo sapiens
SGTLGSHDSDRSSPQDIFRHFERSNSFTSHSGYDIELRALGAFTSGMISKTPIERQVIPFALIV

SEQ ID NO: 959018 - protein, 36 aa, Homo sapiens
SLAPTKDITANSISESEKGKDHMTQIMTAIRVCVCV

SEQ ID NO: 959019 - protein, 53 aa, Homo sapiens
ISFFPVPHPDNTWFIDGSSTRPNRHSPAKGGYAIVSFTSIIEATTLTPSTTSS

SEQ ID NO: 959020 - protein, 44 aa, Homo sapiens
IGSTRGVCGDGVLTRGWLRVLLVWVAYDGLVTNYVLTVLNGRRP

SEQ ID NO: 959021 - protein, 35 aa, Homo sapiens
RQRMCSPNGETADQTPVSDWSRPRGGPLMFHMACG

SEQ ID NO: 959022 - protein, 80 aa, Homo sapiens
RSSSHEHRYSLMLMLSLGTKFDTHDEILEGLNFNSLEIPEAQIHERFHELLRNLKQSESQLHLTNGQWPVPHTMALSYVD

SEQ ID NO: 959023 - protein, 87 aa, Homo sapiens
MDSTVQQIIRLQFVNYRTPRSDCVAVVLRHRWGAIPGQGLLLRLCRHITLATTDTTRVAIILVRVAHQACISFMFSYILLTMCRSLI

SEQ ID NO: 959024 - protein, 66 aa, Homo sapiens
MANSVANRTYHSWLACGAGVYTRVGSGYNCTGSPHKSHYLNTYRITRDQAVSTHLQLTSSLIENNR

SEQ ID NO: 959025 - protein, 142 aa, Homo sapiens
MPHPSHNSIPLKTSLQIRAVFTYSHPSHPYASFHINQHAVQRSLPSPSNPIGPPMVTEPTSTTTHGGLIFNSYILPPLFLDTGDLRLLARCTIGSYSRLKPHSYNNYITRRLALMSCPHIRLKNRCNSPDVYNTTLSPLHAR

SEQ ID NO: 959026 - protein, 107 aa, Homo sapiens
HSTNPQVLNHQTAFNTFRLGRTRQPQPNLRSQYMLKTSTQSKAQLTHHSHCIPITLAPNRQPQFTPTGHHTSANPSYLSRSHHPTNQRYYAPSHSMASSAPSPHRCQ

SEQ ID NO: 959027 - protein, 68 aa, Homo sapiens
RISGSPGQSVARSVVLCKHTDTPEPCVFYDLLHILCCVDFGDRVVGSLSHELWNSEALILEGRIIYQM

SEQ ID NO: 959028 - protein, 112 aa, Homo sapiens
ASASSLPLSSSGRISSSVAERQPGNRLQQSHLPSTGPSSPPGSLRHTQPSSPCHSASVSLSSSGPIQFPSTTIINHNNPCDTPNHPKDPLSSRSVLNSQQSSRLALHIYWGS

SEQ ID NO: 959029 - protein, 71 aa, Homo sapiens
MKSLEGLCVAIRYESFSNPSSVYSEKSAKDGPFYIVGHCSCQGKLCLSSLSNKVLHGCYGDFPGASELHVC

SEQ ID NO: 959030 - protein, 107 aa, Homo sapiens
QAALHLFITQSSFHPFFIATINSSASSLHPFHTNPPNSSHNTQPMAHPPSCSGRQCIHQAFRSHSIPHMPQPHFFTTTGHTSQPLHTPSLSSFIRQPIQSSLHSNPI

SEQ ID NO: 959031 - protein, 82 aa, Homo sapiens
DYIYHTAHYNTDMASAWAKSGPRNVYMYHAPENYSHGNLELLADVQIALGTTPSNQTMRGSNLCEEKSLSVTIMQHITHYIR

SEQ ID NO: 959032 - protein, 70 aa, Homo sapiens
VSNHQTVFTTFQVGAHSEPQPNLRSSHMLKHYTQSNSATHSSLHIAPNHTCTHTATKFTPQGINQTPIPH

SEQ ID NO: 959033 - protein, 118 aa, Homo sapiens
KECLSSTSASWQLSIHSMSNSHLNSSHRIVNLTKPAFTQFRLGAALGSHNRNSAAVTCSSTSPVPQRNSLILQLHPTSTCTHTAHHSSPSGHHTAPILILSSPIIHTIKVYAPRMSGS

SEQ ID NO: 959034 - protein, 41 aa, Homo sapiens
LIVDNEPLIAACTIGDVLQSNIEVVNPIVDIDSTNRIALFI

SEQ ID NO: 959035 - protein, 66 aa, Homo sapiens
SLSLNKRTFNSGCTIGDVLHPTSTVVNPYCQSIGLYSYDCAVILKGNLFRVVNLLDQLSILIRFDW

SEQ ID NO: 959036 - protein, 76 aa, Homo sapiens
SGHSAHELPTIRMPADICPAFVDVVTGKYSPRKSILKSRSTENSVCSDTSESSAAEFDDRRGVLRSISCEEATRSD

SEQ ID NO: 959037 - protein, 98 aa, Homo sapiens
ADLELSPLDSLSFIEIFNDIASSCSKLGFCILLCLKGGISINSSSSSLLPVGPSGSLERLAYLVTGCGQCKDKCVSHKQGLVERHPPSLLFQVRAFTI

SEQ ID NO: 959038 - protein, 101 aa, Homo sapiens
  misc_feature (86)..(86): Xaa can be any naturally occurring amino acid
EYPRQRWDPLGHPYTRRHMRKLLSEVSTYIKNNMATTPHTASICSQLSGLELVTHMLRANVLTCPCVQGDGQCHPLRMAHASRNHXCLSALDCILPPSSSN

SEQ ID NO: 959039 - protein, 59 aa, Homo sapiens
SAWPKRARGNVFMYHAPENYAAMDSLPSAGRMFKVASGASRSIPAYERGSFSLRRINQP

SEQ ID NO: 959040 - protein, 65 aa, Homo sapiens
DFIGLSRIDFFTGAYFFSFLIIKIIIIIIFIIILFIIIVIIFISSKFYLFLWYHCYHPPVELQRS

SEQ ID NO: 959041 - protein, 52 aa, Homo sapiens
MQRLLQVRFVHRLKSYVICVHDRMESRSVSIYFNIPPCYVRTMRNKSYDALI

SEQ ID NO: 959042 - protein, 51 aa, Homo sapiens
YPPQVDSLDIVLHDTYYVVSSLPSMSYQEELYLPSYDASFTDFPYSQAIPY

SEQ ID NO: 959043 - protein, 37 aa, Homo sapiens
IGFEIICKRLRSEDGQPNGAQTQWTGLLAEDFRDMMP

SEQ ID NO: 959044 - protein, 74 aa, Homo sapiens
PNSDFIWDGKSYPVLFTKNITIYPSPVLQAPPAPVTHVYIGRGTSHRPKVSFITCSLIPDLYEWLHEGSAVSYF

SEQ ID NO: 959045 - protein, 81 aa, Homo sapiens
CTIRRCTDPTSTVVNPIVDIDSRIVVALFILYGNLFRLVNLLDQLSILVRFDWSILHMYCCERWVLLRSVVPTVNFLCMFG

SEQ ID NO: 959046 - protein, 57 aa, Homo sapiens
DPPPYRISLVLFLQSPSSSLIIIIIIFIIILFIIIVIIFISSKFYFFLWNLATTSSE

SEQ ID NO: 959047 - protein, 65 aa, Homo sapiens
MTLQWDSERPPETRPFLVQKFQRFSSDSHHLQLVPTQCCHSRLTQVLRPSTSSAARAHLRLDCTI

SEQ ID NO: 959048 - protein, 44 aa, Homo sapiens
PTSYRLFGHTVRMRRSRRSLTFYAHPASEDGVNAHTLDVAKINR

SEQ ID NO: 959049 - protein, 36 aa, Homo sapiens
DTLKDTTLGNICYILLEQEFFIKMFFQVRKDKIKFP

SEQ ID NO: 959050 - protein, 39 aa, Homo sapiens
HHFITTHLSIKPPAITQYQTPLFVKIRPNHSSPTSPISP

SEQ ID NO: 959051 - protein, 47 aa, Homo sapiens
RRRTSLAGVSSILGAINYITTIINIKAPAITQVPKRSVFVCSVTSYE

SEQ ID NO: 959052 - protein, 38 aa, Homo sapiens
ANSDTLDPGCDSLGKNVGLGMFQLKEPVKLYNHHGYTS

SEQ ID NO: 959053 - protein, 61 aa, Homo sapiens
AKLGFHCCPWNILVVIPKAWKKEVFIAAPDQCSEAGTVTSHGAMAPARAAAGTLLAINMSL

SEQ ID NO: 959054 - protein, 52 aa, Homo sapiens
DIYESSLYQYPRDTAQSYLESISTIGFTTSMLDQDIPMVQPLLIGSFVQRFK

SEQ ID NO: 959055 - protein, 114 aa, Homo sapiens
RKPDFTGLGRRNGLSVGRFGGRMQIQSLKSSDEIPLDIAIPYGFTFHLLVYQMSCYLSWLQTMFVYPIPTTENWTHNAYMCSGVVVQIFSNCEVSDIPFTNFLHTLFWTVTVAQ

SEQ ID NO: 959056 - protein, 80 aa, Homo sapiens
VHRLIASLDNYLCATVVCLAVFYAIAGGLILERAYYYAFAAHHTCITDTTRVRIILSRVTSSIISFMFSYLSLIICRNLI

SEQ ID NO: 959057 - protein, 50 aa, Homo sapiens
QRCQRAQTLSNKESVIQRYLVPTGLKVWPGSVKALSKHTAYPARPCRILM

SEQ ID NO: 959058 - protein, 45 aa, Homo sapiens
DGGCGRKRLNRRPLLAGNYSHPGASVDLTDRSPYTLAGVSSILGA

SEQ ID NO: 959059 - protein, 71 aa, Homo sapiens
IPGPKVPEGSHPELAMESRNSKAYLCPQRQSVGQAVSTPCHSTLDTPGAVQYSTDLRSQSRCCARFGLTGF

SEQ ID NO: 959060 - protein, 38 aa, Homo sapiens
RGVEAHSLIRRTQWRDLSSRNFASRAQVIRQPLQPPQP

SEQ ID NO: 959061 - protein, 42 aa, Homo sapiens
HGTSSSSSSSYILLLYLAIYHLRLPELCCHAAGEALQLRTLL

SEQ ID NO: 959062 - protein, 32 aa, Homo sapiens
MKAACIVKDKGSAREWAGHSSGHQLTLPTVLR

SEQ ID NO: 959063 - protein, 68 aa, Homo sapiens
PVHRCPTCLQLRLLYSRTGRWHPRTTDVSRVKSLHETILIHKLIIFTEHVDPQLVQCSYFKIHGEFPA

SEQ ID NO: 959064 - protein, 44 aa, Homo sapiens
MHIDFTPGSELLITKAKNGHLAVAAPRLNSGDKGAHWTLHNLYK

SEQ ID NO: 959065 - protein, 44 aa, Homo sapiens
MTAPLVIKTTTAAGECQVVHRALCLDLEAVSSHTHDLHSRRPPT

SEQ ID NO: 959066 - protein, 49 aa, Homo sapiens
PHKPQSTTSLTSPFPDWHLRDQHLLVATGFQDFTVIIGSTFLTICFIRH

SEQ ID NO: 959067 - protein, 72 aa, Homo sapiens
MLSSYFRSQQNCHKLLLLSLVVAIILNVSADFLNNFLISLLPVMVAHMKSRVILIQSHPASLQKLATGRLSI

SEQ ID NO: 959068 - protein, 33 aa, Homo sapiens
RDVRSPLISSTFLSSSSCSSSSTSAMSSSSTTS

SEQ ID NO: 959069 - protein, 75 aa, Homo sapiens
IHRKSDLFPGGSGSSLKSSGTCHALWFYPQSIFPCPPTTYPKCLQNQPAGPPMAPTPMDHPCAPPLATTWDTDAR

SEQ ID NO: 959070 - protein, 54 aa, Homo sapiens
WGSRHFLRRVSEVRIAFGVTEDIPIPTEASNEGQTVFLNMWEISSLNLLYKRAL

SEQ ID NO: 959071 - protein, 54 aa, Homo sapiens
GVAGITAQSSTINQQVIITLTVNPTHGILISERLKKCKSELVQILPRHNRGYLS

SEQ ID NO: 959072 - protein, 47 aa, Homo sapiens
LTTGLLWSELKYVSLYSLNKRSFNSGCTIWMSCHKRVTETRNCVFMD

SEQ ID NO: 959073 - protein, 56 aa, Homo sapiens
GGTREYVTHYTNTSSSTFTCVKWFIRKSNLVKSMDCATHPVIHPKTMDCSLNSKYQ

SEQ ID NO: 959074 - protein, 42 aa, Homo sapiens
MLRRESSGFLASTVLATEPGRSFPTPVGRPYSQPSVTSSSHT

SEQ ID NO: 959075 - protein, 67 aa, Homo sapiens
MSLQASSRASSMRSAFSGAENAWITSARTTFACSALKAAGWVEADAIGRLKLSGSAEVNGKLTNEEP

SEQ ID NO: 959076 - protein, 45 aa, Homo sapiens
SLELVADVQFALGLPFYPAYDSGMFALEEKSLSLKVMHVLFPLHQ

SEQ ID NO: 959077 - protein, 47 aa, Homo sapiens
DYTGAFSSASHIKIIIIIIFIIILFIIIVIIFISSKFYFFLWNLATT

SEQ ID NO: 959078 - protein, 46 aa, Homo sapiens
QRCAITLRGRADDSTRGRSLHPCPAAPAPGKRNVTTHNARYVTTLN

SEQ ID NO: 959079 - protein, 54 aa, Homo sapiens
MSWYRKVGFTGGGSKGSKKKVKLAADEDDDDDDEEDDDEDDDDDDFDDEEAEEK

SEQ ID NO: 959080 - protein, 35 aa, Homo sapiens
DPLVCVSLTAEFLSSIHHVVSPRPGVCDHKLTTQT

SEQ ID NO: 959081 - protein, 34 aa, Homo sapiens
GTTYAALDNLKDSMAGQPSTLVLVIGEITNRQRM

SEQ ID NO: 959082 - protein, 35 aa, Homo sapiens
LQVTHTGSRRALALTPGSLRFGLSSQSNFYFIHYA

SEQ ID NO: 959083 - protein, 44 aa, Homo sapiens
CCIRMSTLSDPRLIDSGYRVTAVAGTNIEPTLGLVLAELNFRFI

SEQ ID NO: 959084 - protein, 129 aa, Homo sapiens
MIAQRIWLNKNTVNAVELAGSFMMSSIQRLTSHAWLYTPYGGLENFDSPTNVLAALTQRLKIPTDATRLLCFLPLQQQASQVLDNHLVLTPEAMLDDVFGEQEKTLKRYQAVNRQALLAELKQLPSLGA

SEQ ID NO: 959085 - protein, 35 aa, Homo sapiens
DIMVADGESMPCVYVYSPYVTIIIAIHTGVKVFML

SEQ ID NO: 959086 - protein, 38 aa, Homo sapiens
ELDQVWRSGCGEFSEGHSYADQTFLLKRGLLEETLHNP

SEQ ID NO: 959087 - protein, 33 aa, Homo sapiens
MSSVPIVPILTICFIAPTIFHFTSKHHFGFEAA

SEQ ID NO: 959088 - protein, 36 aa, Homo sapiens
ELVPSLAGLRIIFSPSGLTRCDLGHINSQILRSLFD

SEQ ID NO: 959089 - protein, 166 aa, Homo sapiens
VFKSGQHLLVFGMVPKASVGILTSGNPDSGLIAFQKARPLDPHHLQRKAARLGNGVGPHPAGRRGQPHHHIMGSGPRKDALRQMRGQIIADGEPADQNAVAFGMGVTDGVAVALELLHVGLGHHGGDLVDQFGLVFDGHFDFWRVAHRTCHRISFRWTGSLGPALR

SEQ ID NO: 959090 - protein, 43 aa, Homo sapiens
KDKDGYKPDVKIEYVNETGRKLTPKEASRQLSHRFHGKGSRQD

SEQ ID NO: 959091 - protein, 36 aa, Homo sapiens
MALELALPRGKGVGSALAERSTWCISRRVHKADSSA

SEQ ID NO: 959092 - protein, 75 aa, Homo sapiens
MLPVDLTTQLACHPRCPPPNAPRFPLTPSGAQIELQLFGGDSPCGVRQRPQRFCTRFSALSFPFKKEAPGSLYFS

SEQ ID NO: 959093 - protein, 40 aa, Homo sapiens
GPSTNSPGLYAYANITAGHLLMHRYWKRHPSNINQLALSV

SEQ ID NO: 959094 - protein, 42 aa, Homo sapiens
LVSAKNISLLRAQRDYKTEMADATETTLLDNPELQVDAVRSK

SEQ ID NO: 959095 - protein, 78 aa, Homo sapiens
YVQKITSNCFIPHVVSFHGYVSPGLWTGLQPLPSPRWSTPVACMPTHLPTKRLPKGGRARNPPMGRGDLLHDKVIFCT

SEQ ID NO: 959096 - protein, 33 aa, Homo sapiens
MYQNAVSVMILYFVKLRMVMLGLYGRTAIIHPI

SEQ ID NO: 959097 - protein, 63 aa, Homo sapiens
MAELVAQDKCTSQKDPGHPTQLILGWDRGANEDYNSPALAHFSKLIQSTHGWKLERNNEPCSM

SEQ ID NO: 959098 - protein, 44 aa, Homo sapiens
LTPCTFGSWMARQLDENAQKIQRRADFPAKYVDGPMNSPEKLEH

SEQ ID NO: 959099 - protein, 34 aa, Homo sapiens
IVQKHPLLCAEASLICAEDHLIVLKITLSVQKIT

SEQ ID NO: 959100 - protein, 101 aa, Homo sapiens
RLFRVCPCTYHSAKKAIVNTLDLSIAASEIKEPSELILPAIIRVLIALPSSTQSFTVTDEINDPVPYHQESSWPAMCSEPYQYTDYGGLVFNSYIRKRTNA

SEQ ID NO: 959101 - protein, 45 aa, Homo sapiens
LCLPFYPSNNPILESISTSRVYDLDVGSGHPDSAAAMKGSFVPRL

SEQ ID NO: 959102 - protein, 32 aa, Homo sapiens
MTIFGGGDLIAGGNINDHVLRRCRPRDCERQG

SEQ ID NO: 959103 - protein, 58 aa, Homo sapiens
ISSYRYQSEDFNRSTVTLRIIAQSYSRVHIINRVYDLEYLIMTSRWCSRYYRFVCSTI

SEQ ID NO: 959104 - protein, 34 aa, Homo sapiens
VPHLCTVAQLLSTSRILHDSTMPFMTLDTRASAS

SEQ ID NO: 959105 - protein, 42 aa, Homo sapiens
RDFAESRRGFLLQQCLDENPALVPHPGSAAHSQPSVTSSPHT

SEQ ID NO: 959106 - protein, 163 aa, Homo sapiens
MLVFPVQPWRVHYDRPGPWLADCAVENIIMALPPLRFDPAALYTVYSGHQISLEVLERCETFCRKILRKRLGDKCDLLLGTHPANSAVVGDPPVPSAWRNTTRCGSLSPEHRAQEEAMAPGRRPRTSIPIATGEAGLTTKYEFFKLLQAGRCVDPCNERCPLW

SEQ ID NO: 959107 - protein, 41 aa, Homo sapiens
VTQGTPTPLIPILVIIETISLLSATNSPGRTPNRYHYCKPP

SEQ ID NO: 959108 - protein, 50 aa, Homo sapiens
SSADTILTDLITRIVMKSSFLALFGARLKVLELGHLLLIIVQELVVIFCT

SEQ ID NO: 959109 - protein, 33 aa, Homo sapiens
RAEDPPQFNMQISFIFLYADSEVIFFTIGDLLH

SEQ ID NO: 959110 - protein, 35 aa, Homo sapiens
HVQKILIVGIVAGLAVWLSSCLGAVMAVVMCEEEV

SEQ ID NO: 959111 - protein, 85 aa, Homo sapiens
DHLGGMVWYGMVVGGMVVVMVMWMVVMVVVMVMVVGVMVVVMVMVVGDDGSVVVVMIVMMLVMDGDISDAGSDGDDSEEMVVVVV

SEQ ID NO: 959112 - protein, 57 aa, Homo sapiens
GDLEDPIVQKKESDELTSIARFENANQQENSKRYEDLPRYKILSQKIKSNELVLEGG

SEQ ID NO: 959113 - protein, 74 aa, Homo sapiens
TSDCAGIQFMRNSRRLFGLDGSRDTHPESVNAIVLPLVGHFCCHQERCRDLNILNIDILGSSKPTLSPGRASLK

SEQ ID NO: 959114 - protein, 37 aa, Homo sapiens
TKVTETVPGTDFFKPNLTPHGNEVINAGRRMDMVLQI

SEQ ID NO: 959115 - protein, 104 aa, Homo sapiens
MPTDVGVRHKSSTGRVQCLCRSPIYPLDRNKTYATLRVAINTQSLLKKRSCDHLWSITFFPCFKNSTPGTVSKPNRTLGAKAPCRDLAATPGAPANPNAEEVKG

SEQ ID NO: 959116 - protein, 47 aa, Homo sapiens
SLGLTLSKPSSLLSTVDQPPNYKMLQGGARGGCSWREHHNPAPPTST

SEQ ID NO: 959117 - protein, 70 aa, Homo sapiens
MVVTWNDSYFGVDVGQLDDILYKPQRHWNTITIILRMAVESWAQHLNLLIRRRAGPARRPSEVNDHIYNV

SEQ ID NO: 959118 - protein, 53 aa, Homo sapiens
SIHLHRPQIHCKTIPIILRFNCHVLGTALNLLIRPDLGQPGDLLGNDHIYNVI

SEQ ID NO: 959119 - protein, 52 aa, Homo sapiens
IEFSTNHKDIGTLYNIILSALAGVLGTALSLLIRAELGQPGYLLGYDHIYNV

SEQ ID NO: 959120 - protein, 181 aa, Homo sapiens
HRVGTMVLRTVNKVEYALENPKRDNWLDLLTAEECCHYAFSCGENTELAVFHDETEIQNQTDLLSLSGKTLCVTAGSAPSLINSSSTLLCQYINLQLLNAKPQECLMGTVGTLLLENPLGQNGLTHQGLLYEAAKVFGLRSRKLKLFLNETQTQEITEDIPVKTLNMKTVYVSVLPTTADF

SEQ ID NO: 959121 - protein, 46 aa, Homo sapiens
RGVLARKIQKVTTWLDLLKLKRVVTSFFLSLKIQSWLSSIDETDNT

SEQ ID NO: 959122 - protein, 61 aa, Homo sapiens
MVCVPVNEALPWRIFNQRHHRHCVVGVEFVAGNGQVLLRILIGFAAALLLFLLASLFLAQQ

SEQ ID NO: 959123 - protein, 100 aa, Homo sapiens
MRTKGLICLPRRKARTRRQREQNPYIELASSHQRWHGGALLHQVEVGSLSSGARLLGLNPGSALPGRGTEAGSPTPASFLIWNVGMAVVPSVVVVLRMKG

SEQ ID NO: 959124 - protein, 41 aa, Homo sapiens
KLHGQQVFLRTTPIGPRTALNVAAKELAKTIANKTPLSGEP

SEQ ID NO: 959125 - protein, 103 aa, Homo sapiens
HVWNAEALFSKYCALTLKDSFAPFLKFKRENYVISSGHTRRQHLSVSAIMSKEIPTPYMWSYQPQMGLAAGAAQDYSTRINYMSAGPHMISRVNGIRAHRNRI

SEQ ID NO: 959126 - protein, 78 aa, Homo sapiens
TLTFIDKLTVRQDYTNPRLVNSSCPALVVTTINPMSVKTGAKLSGTTVRMMGILYSLPILVAACVLAVFREAIINAKT

SEQ ID NO: 959127 - protein, 34 aa, Homo sapiens
DITEDVVSTEEGDVSITPNLILVRLSICLASFCD

SEQ ID NO: 959128 - protein, 195 aa, Homo sapiens
LVAAGSAAVAPALAQVEVGSASPLRKLVPAETLERSAAQQYQQMLEQARAKRALAPPEHPQLQRLHAIAKRLIPFTAPWNERAGQWRWEVNLIGSQQINAFCMPGGKIAFYTGILDKLKLTDDEAAMIMGHEMAHALREHARERLAKTQATNLGVRLGAQLLGLGDLGNAAASLGAQLLTLKFSRSDETDVDLVG

SEQ ID NO: 959129 - protein, 57 aa, Homo sapiens
IIQRVAILYVKGHLTIGAGLGITKVKAISSFISWNLILQAANIVFVKSGTRGYQLQF

SEQ ID NO: 959130 - protein, 44 aa, Homo sapiens
RDFRDSHDLSLVWTVTKELISCVSPPCIITWSGIPTRQREGSVL

SEQ ID NO: 959131 - protein, 36 aa, Homo sapiens
PGIAETLRDEVFKEWLSLNVMRQRPGLSTTSNLPRW

SEQ ID NO: 959132 - protein, 40 aa, Homo sapiens
SGIFTNRRGIFTNCAASLPNERHLYYMLFYYMNRHLYYMT

SEQ ID NO: 959133 - protein, 55 aa, Homo sapiens
LAVQRTQRPLYYCADSYYWPVSLLMSGSLLMASLLMPGIFTNERIFTMYGIITNE

SEQ ID NO: 959134 - protein, 33 aa, Homo sapiens
MTGIFTTERTVIMSGIFTNERIFTNARHLYYWA

SEQ ID NO: 959135 - protein, 85 aa, Homo sapiens
GIFTNDLASLLMTGIFTNWPASLLNAGIFTYMTASLLLSGIFTNTPGIFTNDPASLQMSGIFTYLGGIFTHDPASLLVEPASLTN

SEQ ID NO: 959136 - protein, 64 aa, Homo sapiens
MLASLLMIGIFTTCGIFTNERHLYYPGIFTNERHLYKMRHLYYMPVPLYYMSGIFSNRAASLLM

SEQ ID NO: 959137 - protein, 36 aa, Homo sapiens
TNARHFSYGRPSCINARPSFTQCSGIFTNALASLTN

SEQ ID NO: 959138 - protein, 42 aa, Homo sapiens
MGMGHHSEVDGTPPLRLSGPHYNYEPFNTHQHYYPLWELDIT

SEQ ID NO: 959139 - protein, 34 aa, Homo sapiens
YSSERILVVIGIFSNERIFTNGRIFTNARIFTNE

SEQ ID NO: 959140 - protein, 36 aa, Homo sapiens
PLMMGGSLLMPGIFTDCAASLLMGGLFTNERHLTNG

SEQ ID NO: 959141 - protein, 57 aa, Homo sapiens
YWMVLSRWNDRRDQAGHMVPGLLLSLLLAAAELKWTTENPPCLYHRLNVSNTPWPCM

SEQ ID NO: 959142 - protein, 104 aa, Homo sapiens
  misc_feature (11)..(11): Xaa can be any naturally occurring amino acid
MIPSLVVLSSXELLSSAIYDNTVNLYRQKDDNWVYSPTLEGHESTVWSWAFDPSGQRLASCNDDRTVRIWRQYLPSNKQRVACNGSYPKWKCIFTFTGFHSKTI

SEQ ID NO: 959143 - protein, 123 aa, Homo sapiens
  misc_feature (30)..(31): Xaa can be any naturally occurring amino acid
LVVLSLYTNLYTNLLNYNIHSHITSRILYXXTNHTYPHLGYHHPMKQPSITPEHKHILPILHPNRLPSPTHPTNLHSQHPMLTKHSTTHSHCPKTIKLLSQQLNITSLHNIRFPSSIHNHSHN

SEQ ID NO: 959144 - protein, 188 aa, Homo sapiens
SSTERNERPTGDGSLLYTADAYGATRAIQIHLPSKSGILKNDSRGEALLAYVSQEAFHGSPLNRTPGILSAMLLVHSLQVPSTWEKAVCVTRWGEIHLMVELLSLVHYFCELLMRHHFQEATRFGRSDVLDTNLSTGEPGAASSDTRNEKKLAAKPEPEEKAPILEPASSWAQWWDRSEAKHPYRDEV

SEQ ID NO: 959145 - protein, 69 aa, Homo sapiens
FWVLCHFGVILSHYPECYCCLVQLLGLLGVRCSFGCELYWSAHSGKHCMVSFGAHGPELIRKKIAMVFH

SEQ ID NO: 959146 - protein, 53 aa, Homo sapiens
WIIRAARCPYCCEDSYQQQGTSFSAIRQVYQTRNVRAIFYPEKSSKPYLYQNI

SEQ ID NO: 959147 - protein, 71 aa, Homo sapiens
LASMRADLHVRRAASTGWGGTTVLWTTSSRTISTAGFIEFVTSPNNPYALICASVLCSSAASHRRPRVFLA

SEQ ID NO: 959148 - protein, 120 aa, Homo sapiens
SSYPMPYDRGGARNGKWRKRRRDCSGNSCKDEESSKQAETSRLQEELAKLSEKLKKKQASYCRLQTEKETLFNDSRNKIEAITTPGRKLNHKAQLARTQKLQQELEAANQSLAELRDQRQ

SEQ ID NO: 959149 - protein, 67 aa, Homo sapiens
SGTTDTRDHAGNSICIINSRDKDFTMISQDGLNILSSLDLSLAWNNTSSSPGSRAFMDSRLNYIILE

SEQ ID NO: 959150 - protein, 43 aa, Homo sapiens
EAKVTTEGLSSTSLKLEHTSSSLVSSSTTHQCKITSAPHRSPS

SEQ ID NO: 959151 - protein, 38 aa, Homo sapiens
PCLPIKSRWCFYSTGQTSKCFRGINPAQHDNLINSFAG

SEQ ID NO: 959152 - protein, 94 aa, Homo sapiens
GSHCDKHVMYDYALILPDGTGVVGVCTEYKILPMHFEYNWITLSLDLMREKLPTSGLNVDGPSNSQRYGISLSRSRSLSIMPAIRSKQQESQLV

SEQ ID NO: 959153 - protein, 32 aa, Homo sapiens
MASSLLCLGDFSPTLSGFITLTPLLLFAFLGF

SEQ ID NO: 959154 - protein, 45 aa, Homo sapiens
SWWGCIESVDQFGEYCCLNNIKSSGWVPWLMLIVPTDRLQIANQI

SEQ ID NO: 959155 - protein, 69 aa, Homo sapiens
VDDTAVENCRQLVLKERNVLLITFFTSIFCFFSLDGVLLCHPGYNVVAQSAHCSLQLLGSAILQPQPPK

SEQ ID NO: 959156 - protein, 90 aa, Homo sapiens
SVVPSDCLPRETSPGYIQPVVTMCKVAHREFKSFPTSADRCVEFQAPLLIRFLCDSCPMGILYSSHLTWLCSLGHWLARSTRLRLSRTRG

SEQ ID NO: 959157 - protein, 43 aa, Homo sapiens
AIFILDIVLHDTYYAVAHFHYVLSNEELYLPSYEASFTDFPYS

SEQ ID NO: 959158 - protein, 42 aa, Homo sapiens
  misc_feature (33)..(33): Xaa can be any naturally occurring amino acid
KRVLTLRKSCWCNQKRRALEKIDLSSLTPPPSXAMAASMNHG

SEQ ID NO: 959159 - protein, 71 aa, Homo sapiens
  misc_feature (3)..(3): Xaa can be any naturally occurring amino acid
CWXGASSFSVCNMKPFCGTVRRESKGGHCTQIPTAENGNARFIITVTVSRGGTKMLAKGMNQKASEARRMP

SEQ ID NO: 959160 - protein, 47 aa, Homo sapiens
CKETALIESIEGTGKPRLKPPFPADVGISGVDERSMTITAAVPRPVC

SEQ ID NO: 959161 - protein, 65 aa, Homo sapiens
EVSAPSDAAGERKKWNLNCQWKHLFKRQGAADVHEAKTLTSCALCYKLSKPDWFRNQKTWFCPSH

SEQ ID NO: 959162 - protein, 55 aa, Homo sapiens
TAAHFWKVHSPVGLVSTTLRVLGSWSSPSRCHGQCDLRRVEAQGPASSGWSLPEV

SEQ ID NO: 959163 - protein, 81 aa, Homo sapiens
MAWRGSDVFQIRCCTRLAGPSAPYRIIVSSTLSLMMTPEVLHRLHLRVNHVVIFQHLTDNLPTECRLEESRQMLLLMSKGQ

SEQ ID NO: 959164 - protein, 41 aa, Homo sapiens
CTQFYRVRSLIKLLRRPLPYYYPVLILASNSHPSIYPTQQE

SEQ ID NO: 959165 - protein, 91 aa, Homo sapiens
MQDVVPQLVICCQDNATEERSILALTCANDLLTGFRQPNMSAPCNGDECTPTSLSSWTSLKRENMSRPGQVCSALNLCESLQKHLADEAGG

SEQ ID NO: 959166 - protein, 156 aa, Homo sapiens
NGCRDNGGRQTHSNQLSGELTALWESKLHIFTFPRFMKDTLSLLKIASVACIALSLGACQSLFQPAYLKPLDTTADASEQIKPGCSSPDCPLVNIDTVHFPSEPQLDQIIEQRLLQMARTSPGQAMPDTLNAYRDKFLRESPDRNSMYLQAKVREQ

SEQ ID NO: 959167 - protein, 68 aa, Homo sapiens
LIHNDSQILAGGVHKYRQEELLATVRMWQYSCGCILLEVANKHAHLGSPRTIRRDAPSGRKVRLIAAR

SEQ ID NO: 959168 - protein, 54 aa, Homo sapiens
ASQHIGKEELLATSTGCGHNPVEHPFGVCATSSTSATPSTIRRDPLVAAKWVSL

SEQ ID NO: 959169 - protein, 88 aa, Homo sapiens
TTFVLHARVESSSMCLGSDNAVRRLSQPGSSKSHENRIPLPTACNNMVADGDSSVEAPGEWREAWDVTFLRPSQVHVIVPGGVDDGLG

SEQ ID NO: 959170 - protein, 47 aa, Homo sapiens
MEQVMLTCLMHMMTEIMMRRLGLVEEHKDALSCSLSVAGLELGNVIF

SEQ ID NO: 959171 - protein, 55 aa, Homo sapiens
LVRMHLGGSEELPLLTHHYQSSLSKAPERPCRTTEGATLECRIGRWPCPTLSSHS

SEQ ID NO: 959172 - protein, 36 aa, Homo sapiens
MRQYVAQISRFLLVRMSSPPFFLINLRARLSLETFS

SEQ ID NO: 959173 - protein, 47 aa, Homo sapiens
DLACGISTERIAFWRQICEDTEEMPLLTHHYQPASEGPETLQDHGGS

SEQ ID NO: 959174 - protein, 36 aa, Homo sapiens
RKPKCMFGMSHVQIIQYGGMQASISAGNQLQPNHAR

SEQ ID NO: 959175 - protein, 53 aa, Homo sapiens
  misc_feature (48)..(48): Xaa can be any naturally occurring amino acid
  misc_feature (51)..(51): Xaa can be any naturally occurring amino acid
GGYTAKYSSGLLCAGELQLILSETTLVLLITQSPVLVAEGLVPCGQSXTIXSG

SEQ ID NO: 959176 - protein, 41 aa, Homo sapiens
MQHRWPRMPEAERYSIAWPRRLVPPGGTGVYRPQMGYSAVN

SEQ ID NO: 959177 - protein, 65 aa, Homo sapiens
VLPLHDDSHSCSVGFLQSLALISQLFVRELVVMRMTAGGSHCSPGIHPEQSDVAAPVAMVNLLAP

SEQ ID NO: 959178 - protein, 38 aa, Homo sapiens
YHRSQCASIYVLSSAMHLLGARRGYKQKQHLLHSIVSP

SEQ ID NO: 959179 - protein, 58 aa, Homo sapiens
MHGILMVRGTVRCRVLYSQRCVSPCLCVRNTSLIWLDVCLVDPSLFTVSNTDDLTCGS

SEQ ID NO: 959180 - protein, 61 aa, Homo sapiens
MAVSSGSLFMSQFILLVSVQDRHKPGYLRVAKYPNHALDVERCWGFDDDQFSTRLSQGSCT

SEQ ID NO: 959181 - protein, 48 aa, Homo sapiens
TLVLTAAPCYLREAPDVRSGTLLVPPCHPDQVTMEAPRKRINTITNCP

SEQ ID NO: 959182 - protein, 56 aa, Homo sapiens
  misc_feature (12)..(12): Xaa can be any naturally occurring amino acid
MSQNDDDAALLXEPPSVVLGTAYLEGCNDFNYLSSNCFEITVKLSFEKFPPSTISA

SEQ ID NO: 959183 - protein, 40 aa, Homo sapiens
CAMDGDGARQAVQGLSVELPGKHKGSLKPHDYPKWEGGVN

SEQ ID NO: 959184 - protein, 56 aa, Homo sapiens
MRTVASAGWHLTDAALTAGAQATIARWCGASLLELPFLAAHGAVLLNLLCVAATLR

SEQ ID NO: 959185 - protein, 68 aa, Homo sapiens
ILSSVGSFIALEQQWNINNHHDTRASRIDSEKSVIVQAPSIEPGVNIWMPPTLPHIRRNRIHKIYTKK

SEQ ID NO: 959186 - protein, 62 aa, Homo sapiens
EVDRKQAPSLLSLNEVQVILRELVEEGDGSGLDGDATFLLVFRVSVKRVSPARAEPIMPALP

SEQ ID NO: 959187 - protein, 53 aa, Homo sapiens
RPDPDRITAFYQALQNSLGGENSRSRIETGVTLYYSLEHSTDYYTSFSRALEA

SEQ ID NO: 959188 - protein, 133 aa, Homo sapiens
SSRGAWTVHLYPGDGGSRCPYAEHTPRLRFCATLACTRYQGRRTEWSGKIQGPELSAYQAPSPPAHSGFHRYQFVCLSSGRISHLSPSQGEHNSRLLENGQISEPFPTMANLKQVTQFMIQNSAGLTNIPGSQ

SEQ ID NO: 959189 - protein, 67 aa, Homo sapiens
SRLVLGIMGEVCRELKLSPPSSVYSSSTVPLVATCFDGREGSLPSSVLSRLRRDGQGACRHSDDRGP

SEQ ID NO: 959190 - protein, 40 aa, Homo sapiens
MDLMFLSKVRQAPVNRDAELPQDLLCNPLGLFQHLVQAAA

SEQ ID NO: 959191 - protein, 53 aa, Homo sapiens
  misc_feature (45)..(45): Xaa can be any naturally occurring amino acid
QTLTTTIFLGTTYDALSPELYTRYFVTKTLLLTSLFLRIRTAYPXFRLIRELS

SEQ ID NO: 959192 - protein, 64 aa, Homo sapiens
NSGTDMTLVRIQRRCHFSLTTYQPASEGPRETLLTTEGATLECRIGRGPCPTLCSTYPGPEALI

SEQ ID NO: 959193 - protein, 51 aa, Homo sapiens
MCDRIDSLLENDLDSQSAHAWMSCRTSFSSRVPGIIDVALPRTGSSPRVAP

SEQ ID NO: 959194 - protein, 106 aa, Homo sapiens
FLTAAPAPGGGHDAGAGRFRTGLGRKGGVGRSYADAPEIDGVVKLLPPEKASKTLKVGEFTKARIVGAEGHDLIAVPVLTVGTAAWPPEGGALPAGAGGMHGNPKG

SEQ ID NO: 959195 - protein, 49 aa, Homo sapiens
SLKHPKPAMYNQLCYKKEGGPDHNYTKEKINDRRWESASCLGMMLSGMT

SEQ ID NO: 959196 - protein, 42 aa, Homo sapiens
GVTNISARGTAGHVYAGVAMNPSGCIRFGRLQTACTLGKPFH

SEQ ID NO: 959197 - protein, 42 aa, Homo sapiens
YAEVLSADTWRAAIAVVAPPRRMLHRIHEHIPYSWTCSSSIA

SEQ ID NO: 959198 - protein, 50 aa, Homo sapiens
SVVLCAPVVCVGGCLPPEPSLCGAHRKAEAVMAAVAGVRAPFSLGCGLFP

SEQ ID NO: 959199 - protein, 37 aa, Homo sapiens
NANPSNMVIEPAGGSNSETSDCRMYTRPCNSKNRAQR

SEQ ID NO: 959200 - protein, 87 aa, Homo sapiens
NNTSDMTSLKERIIDHPTDIVIITRKMNSRHELANARERNHRFLSLSKFLAALVLKYNVRHGRIDVNSLCYIKCLWMRYQHGTLAKH

SEQ ID NO: 959201 - protein, 53 aa, Homo sapiens
TYYYRDSADITHDMKQSRDSLCKLGRYIPPASILGVGSFATPLFTFKRISGYR

SEQ ID NO: 959202 - protein, 36 aa, Homo sapiens
TGTVWTRVLPDLGLPLLATLFFIRWYFVFLDAFLPS

SEQ ID NO: 959203 - protein, 43 aa, Homo sapiens
MEEEEAAKKRKKNLMMKLQQRKKKKKRNQRLRKVENNCLGTGE

SEQ ID NO: 959204 - protein, 102 aa, Homo sapiens
  misc_feature (41)..(41): Xaa can be any naturally occurring amino acid
LLTIIVYAGKRHIGGTDIRGTSQLPKLRFGGYYYEEDYYKXHVPVTDNRCRLCVVTLERLPWLAQLRLELRRLRAVLRTPAHAPNNRYSVPMSWWCVENSQR

SEQ ID NO: 959205 - protein, 54 aa, Homo sapiens
ALACCCRSSRIPIGALWRWLNVPRSTVLAAQPNVCCPPSGASQYAMILRYEPMS

SEQ ID NO: 959206 - protein, 39 aa, Homo sapiens
PHRFQPLAEYSPLSPNSNTILRRYHHSVRSSLRPLHNMT

SEQ ID NO: 959207 - protein, 39 aa, Homo sapiens
VAYSRVIPMIYLHTAETNLNPPSALAEGKSELVSGLQYR

SEQ ID NO: 959208 - protein, 64 aa, Homo sapiens
LIPTWYHHPMRHTAERLNAGHTSDVYTLDSSLTPLIALIYTHNTLGPLNILLLTLTARVTISAL

SEQ ID NO: 959209 - protein, 67 aa, Homo sapiens
MRKLGECIEEAHQITHDGYLKLWQSEQAFLASFDAIFVHEAQDWTPAIMNIVLSQPCGKLFVRDRPR

SEQ ID NO: 959210 - protein, 72 aa, Homo sapiens
EDPVLPAYAELSVVCITSTEKLGTSSARIRRLRAVLRTPAHAPNSRYSVPMSWWFVENSQRSANISNKLVMQ

SEQ ID NO: 959211 - protein, 64 aa, Homo sapiens
SGKSGVSTVSGPAYVGTVVSSGVLLEEEIHEAQMVRVQAVCTLSHGTLGTGRNATPDSATCGLD

SEQ ID NO: 959212 - protein, 72 aa, Homo sapiens
EDSGDVTEDQVGYEQYLLCPLSHQTQVQTNKKEGTRDIKMKPEIWTETRGRRDWKRRGEGTEKKYDRYVNHL

SEQ ID NO: 959213 - protein, 80 aa, Homo sapiens
TRWFYPISRNSLDRNTGISLSQSVEVQTPISSCNGVNRLGDYRVVDAGTTRPTSAMGIRCLRVRLQEPGCESLDCRPRAS

SEQ ID NO: 959214 - protein, 63 aa, Homo sapiens
DGLPCSLTYMYDEYHFTKPAPITSKQHEAKPITFATFDASSCDVDNVNCRLYNVVHVLNRALE

SEQ ID NO: 959215 - protein, 109 aa, Homo sapiens
  misc_feature (8)..(8): Xaa can be any naturally occurring amino acid
  misc_feature (21)..(21): Xaa can be any naturally occurring amino acid
  misc_feature (80)..(80): Xaa can be any naturally occurring amino acid
MEFGLSSXFPPFFFKKVFNVXCSPLNFGEALSNLGGFQQNSLHNSSFTLPNYGMHWVRQSPGKGLEWVAVISFDGKKKYXEHSLKGRFTISRNHSNDTLYLQMNSLRIE

SEQ ID NO: 959216 - protein, 45 aa, Homo sapiens
RWLPGAPYTPSSPGRGMSQKQEEENPAEETGEEKQDTQEKEGILP

SEQ ID NO: 959217 - protein, 93 aa, Homo sapiens
  misc_feature (29)..(29): Xaa can be any naturally occurring amino acid
SYGFGGKYCFNNDLLEGSAAPFDYQGKTXNHESHKDYVRGFGGLCGVQTDKHYKCDLGSDHDDMLEPHHSQKYYMTGVGRQFGVHSERQDSDA

SEQ ID NO: 959218 - protein, 81 aa, Homo sapiens
CVVVYMGSLCWCTQEDRVHERDIVVYTGGLCIRGGGINGAVVPLFTGQSADEGDIVVYTGGLCRPRGGIDGVMVLVYTGGW

SEQ ID NO: 959219 - protein, 50 aa, Homo sapiens
NELPVLMVVSSSAISEYRKHLLLVLQSHVWLRFQIQHEQQQRHLTQFRIK

SEQ ID NO: 959220 - protein, 76 aa, Homo sapiens
HRGGHFLFRQQVLFTALVYTEEVWAPLPLWAKISYLNRYHKLGCIQDLVSLEDRSDVWPINSFTPCLKLVSYVNLK

SEQ ID NO: 959221 - protein, 70 aa, Homo sapiens
LVDYLLASRLAVIINLMSKKVYNSYALTADEQLEEVVSGNYKIRMVFRKIKKIFEELTYMYGSRVHFFTS

SEQ ID NO: 959222 - protein, 106 aa, Homo sapiens
MVPKKTWNSQRKGKCAVLKHLYTTDVLPSCDRGWWMLKSSQPGDLVGVNKYSYLILETLPTEYDSRVKAMEVDKRPPEQYSDIGGEDTQIQELVQAIVLPMNHKEK

SEQ ID NO: 959223 - protein, 33 aa, Homo sapiens
YAVRPLLSLPGLAVSCCKILTDRNSTPPSSTPP

SEQ ID NO: 959224 - protein, 156 aa, Homo sapiens
QYTGTRKLSDLHMSEGTSLAVVSILAMTDIRVFAAFSRRPLYLGIQVLTVTTPSGIKFNQNIFIFIIHYFIKILCYHYLHRPIIALWDRSSLQVSLQIAIKVILQAPLQSLPITENSSCLTNFSPLAVLDSNNRNLSSSALQATLRKFMAKGFAAR

SEQ ID NO: 959225 - protein, 40 aa, Homo sapiens
MCMSRWPAVMLAVRRTASAIGMNRRRLHGFRSITQSWGYR

SEQ ID NO: 959226 - protein, 35 aa, Homo sapiens
CLVVLLHSGTAETGTAWKLTWTPPLSEFGYLQLEF

SEQ ID NO: 959227 - protein, 103 aa, Homo sapiens
SGGLLPCRATLPGPVGGWHVEQPVQNAGAQQHGGDGRVVGVAASGRRQSRAGQFQFMQRTVRVGIHPVAAVQHRQRAEQVGGKTLHLGQRRAAGARAVHGNGM

SEQ ID NO: 959228 - protein, 32 aa, Homo sapiens
HTCTVVYTCTWESTPAPGSPTTCTGMSTTFTC

SEQ ID NO: 959229 - protein, 75 aa, Homo sapiens
PQISAAIFTGGLYYIPILQASQILSTSPVSPFPDGIYGSAFIVATGFHGLHVIIGINFLTICFIRQSNISPLHPN

SEQ ID NO: 959230 - protein, 36 aa, Homo sapiens
EQINNNLFELSHNTFSAIRNAPTVTRITPVQVWYYR

SEQ ID NO: 959231 - protein, 33 aa, Homo sapiens
NISALLIYANHPTIYKPAMAHPLMSGRSDYKAF

SEQ ID NO: 959232 - protein, 64 aa, Homo sapiens
RILNGCTISTVSTTDVIDGLIVYHEQHNQSAPGLVLELVTDENCRSSTYTLWKAERAAAKWKTP

SEQ ID NO: 959233 - protein, 52 aa, Homo sapiens
DPLLIIAAAIGMSVNIEVVNPIVDMDPRIGLAVIPRVTCPVGQVIGSIEYSS

SEQ ID NO: 959234 - protein, 71 aa, Homo sapiens
  misc_feature (28)..(28): Xaa can be any naturally occurring amino acid
FSTGAAGPGHVLTPENLNAIVTGSSIPXSGMPHACGVTTGYQPGSWGTKRLYLSCALIKSTQHSTLSVQST

SEQ ID NO: 959235 - protein, 59 aa, Homo sapiens
SHTSRFTISESGQRRLVTYTTTAPPQSSLASNKCSRLWGMGPSIGCYHQDAAVEGCRCL

SEQ ID NO: 959236 - protein, 37 aa, Homo sapiens
LPRVIRRVHDIEVSTTDVVDGLIVYHEQHKSECSHGW

SEQ ID NO: 959237 - protein, 40 aa, Homo sapiens
LVMRPSQLVQWHSLSIPNIFSSSAGFPLTWYPVNCQVGIE

SEQ ID NO: 959238 - protein, 64 aa, Homo sapiens
GREIPPMCSKICEPGYSPTYKQDKHYGYNSIQRLHIAMKDYHGQRSTQNGPVQGSFLVCIRDFL

SEQ ID NO: 959239 - protein, 56 aa, Homo sapiens
GCRSMLSGPSMNTRVIILLESMDTLQPGKSPTHTTSCPLTNNLLVKVGVALPLRLR

SEQ ID NO: 959240 - protein, 36 aa, Homo sapiens
RLTLVVIPTCTVIPLTSPSYVPITSPFYFSNQSQLY

SEQ ID NO: 959241 - protein, 55 aa, Homo sapiens
VKIRRLHCSFLFINKFFYTGPDQLCRLVASHCGSVHRHYIDVTCLFCHWSLSERL

SEQ ID NO: 959242 - protein, 87 aa, Homo sapiens
EPELHRARRSPARLVQGCLNAPASQVLVDQLVSVQCKRATNCSEIQVNDVDLIHHQSGRMHDAKALHKRQDVVAVLAIVRTRQVHRP

SEQ ID NO: 959243 - protein, 42 aa, Homo sapiens
KPSPALQKMKTVILNPFLRATWWQGSVCLLSEAVVEMAAPVL

SEQ ID NO: 959244 - protein, 100 aa, Homo sapiens
VFTTGATFPCKKVLLLLWIDTYLCTLCGFDGAAEHDRLRNASILGLPPSYCMDHAFKVTSQYESTLSTSICFQILIEHQHKRGRREHKALIKQDNLNAFN

SEQ ID NO: 959245 - protein, 40 aa, Homo sapiens
MTGHFTLLSNISEQVQRITLDIPVQVPVQVWDYRCRYGEI

SEQ ID NO: 959246 - protein, 117 aa, Homo sapiens
FNLLRCLGADAFRTSHYLYAEAVDADVYRYGIVVIDECPGVCLVLPQFYNKVSLHHHMPVMEAVARRDKSHPGVVMWSVANEPASHLESAGYSLKMVIAHTKSLDPSRCRCPEQVWD

SEQ ID NO: 959247 - protein, 45 aa, Homo sapiens
PHTHGVTLTVSTLTVSTPARERVFSEDRAVLCAEIVSALDYLHSE

SEQ ID NO: 959248 - protein, 127 aa, Homo sapiens
MASRELTPVESHANDSSLLARSGSLKQEHSKNIGLSIFLVAGHIMAVTTTLNVHGGSRMNRYYEGVKDVEWENEKGRYIIRNVPFHVYEEYTNEAVYSSDVTLKLLLLKELMEENEIPSEIDFMKAK

SEQ ID NO: 959249 - protein, 174 aa, Homo sapiens
PRITTCSSLALMSYPLMWLTWTAGLCALCLATVVPLGVRRLRFTTGMTECILRWLACCAWGLLTDSMEQGRAVCAHAQHALRGGGDGHGFLMSVQELKVSGVLTRICPTPQDKTELCNKQYQLIKAESKSYNIPVNDLVNIPRYRSLCGLKCGSVKEETQNSQDSMKHFTHSTQ

SEQ ID NO: 959250 - protein, 67 aa, Homo sapiens
MLTHQSTWIEIGQFLERSRSIVIPIGSNEQHGPTGLLGTDWMCPEIIAHEAQKNADILIGPTFNIGM

SEQ ID NO: 959251 - protein, 83 aa, Homo sapiens
SAAVLLDLWRCIICNTYIDSNKGTVDSVQARCALDKATVTPESVYKVQSVTIVCEALKLGQRILQCNASYCLKENQGYSYRGY

SEQ ID NO: 959252 - protein, 68 aa, Homo sapiens
QKDKENDNETRFSLKGKKKCILNPYTYHALLLPITVKFQHASSEPTHYSLCLMFLTVVVFYFLLIILG

SEQ ID NO: 959253 - protein, 71 aa, Homo sapiens
SIHLLDEDERQRLHKAHLLKPYLTTRHQEIDAWNQQLDAPESVLNHRQMTNIGTFRAYLNEYLRHHPRIRK

SEQ ID NO: 959254 - protein, 44 aa, Homo sapiens
SSSVLAAGGGEIRYGQQDKVTRPCQGMCQPKTGTRLTSEQDASY

SEQ ID NO: 959255 - protein, 140 aa, Homo sapiens
LRSDRELDGGDIADGLRRVRYTLYISPVVNLRCTAPHTHHACNLDIHNTPGIERHRAQLVWLRVNPLTVLGHYRPARHELHLLVVKESLGIAVFFACPDILAEVAGVHRLTVRPLFGFNLDELLRCTGRLVNHHHIRLHL

SEQ ID NO: 959256 - protein, 54 aa, Homo sapiens
HTALRAQGACGVIRMSHSLQHSVPASPFGPGRTGGSRWSHAQLWQHPIHHSWPQ

SEQ ID NO: 959257 - protein, 84 aa, Homo sapiens
YTGLLIPFLHQRLHLSESTSCISRDMSLLSPACKETRANKVTHFLLQRFPNRKQIQGPSGKTGQALRSAHEVSPTLVMHVGYLS

SEQ ID NO: 959258 - protein, 61 aa, Homo sapiens
  misc_feature (34)..(34): Xaa can be any naturally occurring amino acid
VSIPCVDESCPSVDVCPPPQENHPQHLQTCRHTXNQSAGPVPPGEHFIHCLWAVRSSSSGV

SEQ ID NO: 959259 - protein, 44 aa, Homo sapiens
MNENLFASFIAPTILVPTLPPYCIILIIPRILTEQDGGYRASKF

SEQ ID NO: 959260 - protein, 78 aa, Homo sapiens
SAHPDGMRAHANNDLSVVGNGERARDRNNMGKPPFPLVVVHGAVHQLERDLMTAGVREAFNSPNLFQIHQELTRKEVL

SEQ ID NO: 959261 - protein, 64 aa, Homo sapiens
SGVSIWLTRHTPRKPYEDDLLLDASGGPRIHLILFTVGRLTGLLLTKSSLDIVLHDTYYVVTHI

SEQ ID NO: 959262 - protein, 81 aa, Homo sapiens
LDDSLGDVVTSGPLDEVSALPETDLHRSSTHAVCRSGSGLVGRQFEEFLNQSSRFYFWMNGAPHRLPAVELTGSKTHILDV

SEQ ID NO: 959263 - protein, 39 aa, Homo sapiens
LTVPEPTRRPTVIVITLPLTLTITAGELLVRSVSKCTPP

SEQ ID NO: 959264 - protein, 62 aa, Homo sapiens
ASCWPHFNRKCTSVGARIELIAALCVAKAKVLCCVAVSSLERGPVSAASVSCYPTVERLLNM

SEQ ID NO: 959265 - protein, 34 aa, Homo sapiens
HLCFRHHGRLCHCLSTLTVDCSPAICFFLSFYFY

SEQ ID NO: 959266 - protein, 56 aa, Homo sapiens
TYLSILRFHTSLSTSWSRTNLSVGLNGPAQDSSLRRVTRLDAYHAVISIPHLDYSR

SEQ ID NO: 959267 - protein, 46 aa, Homo sapiens
DCVATSAATGPVRDTINGYTCTCPRSAVGPWVGGVTEGSTEALGAG

SEQ ID NO: 959268 - protein, 165 aa, Homo sapiens
GYDIVVITDDSHHAYPDHRRKARSGNKDLQELGIELDEATRWIKGLDRIHRVRRISHCFDLTGTPFAPTGKTSTETALFPWVISDFGLNDAIDSGLVKTPRVVVRDNALPNAQTYKSKLYHLYREPEVGQDLNRPGAEPHEPLPQLVQEAYTLLGADWRETLKAW

SEQ ID NO: 959269 - protein, 186 aa, Homo sapiens
  misc_feature (2)..(2): Xaa can be any naturally occurring amino acid
SXVRSLRPDVDRKYRYAKRKARRAEETDSTKLIGDEQLSGGAFTGELDNAVDNDRLQEPATGATLGKIGIASPDDIAACCRECARRSEGMGLRYSDNRAAVFPKVVQVATERWDEIVEWIMRESGSVRAKAEFVPEGENGEEGRKAPGQAGASDPPAYTLNRNSITSPSWTTYSLPSWRSLPASRA

SEQ ID NO: 959270 - protein, 125 aa, Homo sapiens
MSRGTDANPGKPPLKRDKPFLENALKGSGFIPNLLAVLDNAPAALETYITVSGLNAKSDLSLADREVVQLIDDTNHGCDFCVAGHTAVARNKAKLPEDVIDALRQRGELSNERYETLAAFTREVI

SEQ ID NO: 959271 - protein, 39 aa, Homo sapiens
DCVLTRTTSVFPSGLALGLSDPGVSGSSPQLHLGPLGVP

SEQ ID NO: 959272 - protein, 79 aa, Homo sapiens
LTYRIPVQWYCVGVVVTVGQRKEVLSPEKTQALSSVVTGHNKDLGTQTYICNVNHKPSNTKVDKRVEPKSCDKTHTCPP

SEQ ID NO: 959273 - protein, 178 aa, Homo sapiens
RRMTVVQKPAQRQKSSGKGVSSDHEVGFQERHLDDGHQVITSSTVDNGITSNIGRGPFPEAPEPFLSGNGLVGIDGALVSPTTSSPGLSLESDLYHIRGLGHSHSQGTCGAACQEAAPNAGMLRALGVELFDRIIQADADRGKAHLALRAGNQPIVEASGALSTHHGQNGAHHTAVLG

SEQ ID NO: 959274 - protein, 40 aa, Homo sapiens
PPRSEQILSQFFLGYLFLLGNLLFWFRNHLVLSVILISNV

SEQ ID NO: 959275 - protein, 41 aa, Homo sapiens
MSVSCSALCFAVTCSRLMVFVLLGLQVVVVVTAWVYGEFGP

SEQ ID NO: 959276 - protein, 98 aa, Homo sapiens
RVLRITDPVDIDVVGFDGTELAEMVSPQLSTIEHALAGYRPPSGSRLLTELKVEESCTRSTESGDVWTGADISRSQIPETLSTDNAPDTCANYRFRVG

SEQ ID NO: 959277 - protein, 33 aa, Homo sapiens
PPGSSECLANKWKLINIFKNNQYGPGDTPMAQD

SEQ ID NO: 959278 - protein, 51 aa, Homo sapiens
YGCRRSAVIDNSVYRTVKVLAIGITPITSDPDLDHWYRDSFKILEWECLAS

SEQ ID NO: 959279 - protein, 74 aa, Homo sapiens
QLLRVSLHHFRRLYGSTFLCSHRLPRSFPSLLAQSFPALSASSCQLIFHFTSKHHFGLRSRRLILALLQTRWLV

SEQ ID NO: 959280 - protein, 120 aa, Homo sapiens
TCWERGPRKRSFMYHAPENYGHRAALEDCIGEMFSLPWGFPSTQPTRGSKLWRRRACQLKIMQYFTHFIRSGNPNYPYEFTRKVPTFATPWPDLCTPAGGENYKEYSELLPNRQGLKKAD

SEQ ID NO: 959281 - protein, 34 aa, Homo sapiens
CDSIAIPGFTFICSDRCPRIWGTARERDQCGQRV

SEQ ID NO: 959282 - protein, 56 aa, Homo sapiens
MRKRSCLSGDRSQCRGEQVDWLAVPRRSVAEDVIFVGNDGRRIRRLPAKLPIRRIA

SEQ ID NO: 959283 - protein, 39 aa, Homo sapiens
SPLFSSSPTPLHIDRSIPRRPPYDSRVTETRHSLIIVTS

SEQ ID NO: 959284 - protein, 119 aa, Homo sapiens
WCCFAFHGAVAGFAGRINSVVLPVGKNKITVLSILQACISVALTMVIALWASAALETRLMQLPTAHMSLKVVLSRVGRALLILLALLISLTIVGIDLTVLSVFGGALGVGLGFGLQKIA

SEQ ID NO: 959285 - protein, 33 aa, Homo sapiens
MTGTCSRVHSGSNPAPRKPTPIWSATCLDLHQV

SEQ ID NO: 959286 - protein, 128 aa, Homo sapiens
  misc_feature (4)..(4): Xaa can be any naturally occurring amino acid
RSPXFSTGAISRQGEIGFPKAAIVMKASFPMAGNTVAGTFVYKEPIDGVSKITGRWEYDRLVDSGSDVKIYSPEEVAEYALYKESDELTRALDVVQQSDAKQIELYSLVVAGYGTEEVFRRESKFIEN

SEQ ID NO: 959287 - protein, 75 aa, Homo sapiens
MLITTHRPTCMMSLRQYPLIEHYRIKKLAMLVTYHGVDNKKNKGQLTKSPLAQMEEERREQVAKIKKMEMEMEQV

SEQ ID NO: 959288 - protein, 44 aa, Homo sapiens
SSPIPLLSTWYFHNHDPIFSYVQTPLSTTPTTITYPSVVLYRIS

SEQ ID NO: 959289 - protein, 43 aa, Homo sapiens
PEHKVRRKAMTIKVHADHMISSINVSAQCPPEVCPDKPGQKAD

SEQ ID NO: 959290 - protein, 61 aa, Homo sapiens
MLKPETSSDSPSARSKGVRLDSASVEIHHIMAKGPAGRRTQRCTCVVIRVERLQEPLISNV

SEQ ID NO: 959291 - protein, 56 aa, Homo sapiens
LSASPGLSDILLAGPVRKLEAEISELHALDRHGLLIHHLSARSTRPQALILLNYSL

SEQ ID NO: 959292 - protein, 75 aa, Homo sapiens
VPGNVHMLYPKEEQENRILLYACGNCDYQQGADNSCIYINKITHDVNELTQIIADVSQAPTLPRTEYLPNQGVPS

SEQ ID NO: 959293 - protein, 80 aa, Homo sapiens
YLDCAQHPQEQIYMGSVHILDLYTQTELPTYPFRFRASVLKNDLPESNIALCFDIYVICPFENHRFNEVLSLIDHVSYTV

SEQ ID NO: 959294 - protein, 33 aa, Homo sapiens
PQKMRFGQDGMTTLVSVTDSLVPNHVAENGIFI

SEQ ID NO: 959295 - protein, 31 aa, Homo sapiens
MLFKCCSSLLSSSRFRTVPTRSMSDKPGSRQ

SEQ ID NO: 959296 - protein, 33 aa, Homo sapiens
MGNDPTMTADDDMCTRIYVRRVSGHRKNRGRIP

SEQ ID NO: 959297 - protein, 47 aa, Homo sapiens
MLFRRGRCVFADEDAVSPMKMPFRDEASRCSADGRYRFRMKMAVFGK

SEQ ID NO: 959298 - protein, 86 aa, Homo sapiens
ISSALISVRISGDHSPSDSGTPMTFMCTGGTHLCSGAPCGMINDLIINMAQPDLLITTTNFYDQRTDTFNVLNDIVKINTPLKAMC

SEQ ID NO: 959299 - protein, 60 aa, Homo sapiens
QLIGDNDQFPLPKLAAEHLLQAKMIVLSGPGLAMSLRTYSSKRTVNMDYLSLLRDALGTA

SEQ ID NO: 959300 - protein, 65 aa, Homo sapiens
TQQAFQCIDHAVAGFIQTLKLYKTMTMSLCITASLRLIAKYFSVERRGRSTRCTRNYLLKATLSK

SEQ ID NO: 959301 - protein, 41 aa, Homo sapiens
  misc_feature (2)..(2): Xaa can be any naturally occurring amino acid
IXSWQCWGCWLLTPLSNTLQCQVAATSQCLRMQAHRGRPAS

SEQ ID NO: 959302 - protein, 39 aa, Homo sapiens
VVDSGLEEPALKIEWNIYIEATQLQGTDDASMSVLLFEG

SEQ ID NO: 959303 - protein, 34 aa, Homo sapiens
PYKCARILSTACGSLYDITRLQGAVFLELGVGEV

SEQ ID NO: 959304 - protein, 39 aa, Homo sapiens
  misc_feature (14)..(14): Xaa can be any naturally occurring amino acid
  misc_feature (21)..(21): Xaa can be any naturally occurring amino acid
LEDRVSYTDSWECXGSISPQXSHNTWEVLEYIQIRLVGY

SEQ ID NO: 959305 - protein, 119 aa, Homo sapiens
EVERFTASSFGHPMFKLLRNGDYQAVQCRRKGLLVCGRQWTEMHGTRQQGEPTSCAEVQSCASKGSRAVSRLYFGTTGYFKPARACSLPQTTTMGLSKSSPNLHNLTTHDQRALCWTLG

SEQ ID NO: 959306 - protein, 97 aa, Homo sapiens
RGPEEDIVEQSCIRLRAGALFQDRAARLGKSISRLIVVASLIDKPTQIEEGPVPGPVRVFGGFSSSYVGSLSVYQATKQFQPPQCSLQNSGLPSSWR

SEQ ID NO: 959307 - protein, 43 aa, Homo sapiens
MSPRDRVSSGKSMWQQCAWSDVCCPVSYAGPGQSVRWTKDGEE

SEQ ID NO: 959308 - protein, 162 aa, Homo sapiens
RRTYSWTTRGTHSLVDTHELPSLSDTCTSANHHSGISGRTGPVIFSKMVLLHPNQAFLKPQTPHRRQRLLKPRTRHSIHLNLPNATAVKRRHRRSPWRQSPSDPGDPLLSGTVHPTPGIADSTTQRSTAGILLTRGLTGAETGLMSETLTYLDKGNYIQPIH

SEQ ID NO: 959309 - protein, 46 aa, Homo sapiens
SWYRATDVWGRNWGGFRTVHTCTFTFYRLLRLLVDVRDDLTDGRTT

SEQ ID NO: 959310 - protein, 45 aa, Homo sapiens
PLTTPDGHYLWYELVYLYYRTTTERRTYAEGVFALCSQGWQGAFH

SEQ ID NO: 959311 - protein, 78 aa, Homo sapiens
  misc_feature (23)..(23): Xaa can be any naturally occurring amino acid
WSIEIAFPSPILIFCELTETQGXPSAPMTGTIGKVFVQAGDEVEAGGSLMVIIGLKMEHTIKSPKDGTVKKVFYREVA

SEQ ID NO: 959312 - protein, 86 aa, Homo sapiens
LLGYSRDPVRQIMLMSASLEGIARKIKSCSGRRALEDEALWASAGWRPDTLEEQAMLEVKSWFLARAGKVRGQTPKVGKQEKKKKK

SEQ ID NO: 959313 - protein, 60 aa, Homo sapiens
IRDPYTRPSDSATLVSATNSEQRLTSSVDAPRLDRKLDVFCASSRALSYRSCYLGAGHEV

SEQ ID NO: 959314 - protein, 183 aa, Homo sapiens
  misc_feature (64)..(64): Xaa can be any naturally occurring amino acid
PPSTSDGQEMSDPKCICAIPDHRDWKELKLVLTLVGVGWFLLLPWFLSLFLFSNFGLPVSSVKXSSNPQGRNHIILCSSCLGERATLYGAVIFLAVPCLELMFTLTQQLCHLGGWHFGLGSLGLCLAKPAEGKFAATFGCGHILCKVLTPCSVEASPANMARWLSLPFWVPIEHKLSSEEAGP

SEQ ID NO: 959315 - protein, 38 aa, Homo sapiens
RGSRLPSTSGEEEDRLLSMAQLYLNGELVGRSCRRTES

SEQ ID NO: 959316 - protein, 44 aa, Homo sapiens
STSDHMYQKMIVFLSGFFTFIDLDLSQLVDYQKLENRSETSMVG

SEQ ID NO: 959317 - protein, 90 aa, Homo sapiens
SYPSHIEAGKAGLPGRVCGKEKRVFWGPVVRENPVSQVLDARVNGFLFHFLHSFFNSFRKLPVLPLCRVRVIHLGALSGARGWGLGKWVT

SEQ ID NO: 959318 - protein, 41 aa, Homo sapiens
  misc_feature (1)..(1): Xaa can be any naturally occurring amino acid
XPKQQHIWSQASQQRLHKGSSAVAKQLNQVASSPASENGKL

SEQ ID NO: 959319 - protein, 70 aa, Homo sapiens
VLQYLTLSYVTCITSSECLPALRLTGLPSEPHLRFCIYHHTARLDVLSPYISVHTVYSRVKILGTGKSNG

SEQ ID NO: 959320 - protein, 64 aa, Homo sapiens
KDESSSSVTLPRPNPARQLSDYSELQRVKQELLGEVKKELQKVKEEIIEAFVQRAEEAGFSLYH

SEQ ID NO: 959321 - protein, 86 aa, Homo sapiens
GNVDKQFSWASCFNLGFPVYPAFSPLEIVWWAQMYAHQYYMQYQAAVSAQGHTSNFKPNQATTSQALNLGMFLEKKPPTRSKTNWG

SEQ ID NO: 959322 - protein, 89 aa, Homo sapiens
LKHAPVKRLVVWKRMEILSIATTASLSTPVYHVLFRPMLLQLIVLSQSSLYEELAYVLAVGHPELNYFSIFRLLNYSTIAGKLYLKRLH

SEQ ID NO: 959323 - protein, 86 aa, Homo sapiens
MRVTVSWRDGSISLSKIGRRGSRRETGKAQILRAGAGHSCMVERPDNHQSPHKLCYGRVSQGLINRAARHILGLDSVEWDESIVYA

SEQ ID NO: 959324 - protein, 43 aa, Homo sapiens
MYNAFSSEIEDLRTFQHRNVICVVGPASPITVPLRESSPKKEE

SEQ ID NO: 959325 - protein, 32 aa, Homo sapiens
SPLALNSEYSAMLLPKGTLLGKYTLETRVSVE

SEQ ID NO: 959326 - protein, 139 aa, Homo sapiens
PIIYPRIKPGGQIQVQSQLQMACGAWLVSNATHVLESETPNGQWFTGILGSLKIADTQENAYLGAANQATGADPNNLQSFLIWQILRSISGAKLVKVVGTKNNGGVSPVGFVDVQPLVNQLDGWNNATPHGTVYHLPYF

SEQ ID NO: 959327 - protein, 117 aa, Homo sapiens
LLRSESSASAPIRAGARRRPGLEERPVELFAQERFIGAGTYDVTRVEPKTIENNRVKSVFYTDLTAAVRLKDGYRFFLTVNNLFDRAPPLAPNGTLFTFIPTNPLLYDVTGRQFTAG

SEQ ID NO: 959328 - protein, 126 aa, Homo sapiens
TINRGWIPNVNQLLTIYSKTIYPHSSCLLSILFSTPQPQLKCPFRKDAFSATCLDYSQIASLFFWYCDAGTVYVWLCFSQTEGILGDSSNTNWMGRQVIKQSHGYCTEHSMPHKDSGPSKSDSSRA

SEQ ID NO: 959329 - protein, 71 aa, Homo sapiens
LEDGKPGRLLRLTGEDGIVRMDLDEQLTILHPPLPGEAPGSLKHAGPVDFVRMKRDPPSFPGPWSVTHDPP

SEQ ID NO: 959330 - protein, 59 aa, Homo sapiens
ICQTVQVAHTARGGGTYVGLYDKLAVQLVPQRSQVIALIYRHAQELLGIWVRHVTPDSM

SEQ ID NO: 959331 - protein, 138 aa, Homo sapiens
QETLLVVITSIEMVTACPLSILFHTAAVPEPVQRYAILTCALFKVVDLYAWLLEGSAVSYFYPVRIDLPSEEAGMTQQDEKTLWSFNLLMQPVPKKPTGPETTNPALEISVGATSEQMPKLRGVHAKTSPVKANYYTL

SEQ ID NO: 959332 - protein, 92 aa, Homo sapiens
SSNFFELRVLKASGAAVMRDGVLLMPERETCRTTLNRLAMDVRDGGGTALVLRIEEPADSYFIDLFDRSEDYATLLIDITKARDTMSTDTVQ

SEQ ID NO: 959333 - protein, 90 aa, Homo sapiens
LFRGPRGSRTPRGRVISGGRAFARSPHAHLQGEADEVGGAGDAELGLDGGEAVGHGLVADAQAVGDFGEAPTLGEQAEHFQVPKSKEIRA

SEQ ID NO: 959334 - protein, 50 aa, Homo sapiens
LSPRTDTTLVLLMGMNGVHGLFDHHEMFFYGLPPSACSCTDLFCPFPFTA

SEQ ID NO: 959335 - protein, 64 aa, Homo sapiens
VVGFSRGPDALHESTMCSDAPLPCRGRVQTRGPVLHPPLPLADSQTTTPYCTQIARIGSEEVSH

SEQ ID NO: 959336 - protein, 98 aa, Homo sapiens
TEEAESANSLRPGALCFSRITQDIPKSQRSDPAGASYAAATLQASSAASSASPVSRAIGRTSKPQESPKGKRKLDLNQEEKKTPSKQTSPAVAICPQA

SEQ ID NO: 959337 - protein, 68 aa, Homo sapiens
PRHVLSYGEFTGSISAARSSLSCLRVRPSPHFTYATLIPRVCQHTGRMRGLTLGYQIPLVISSPLPIR

SEQ ID NO: 959338 - protein, 187 aa, Homo sapiens
RQFLQHVELVRPVVYPTQSQCGPEELGTSVKNPKDKRPVWFGESVTDGFHVRVWRSGLRSLRDVAIQLTFLRLSVHRGLPEHHLIHCKNSVAYMDQHDWQPQNALILQGSYDIEIRAECNSSLRASGRQVSMAATSHTGAWGKTVIEYHITMSSRLPIIDVLPLDVGAPDQAFGFDVRPVCFLLLPQ

SEQ ID NO: 959339 - protein, 49 aa, Homo sapiens
RCAALSARLRLYSPKRLPHNTFFTAQSSTSLWTPRKAKLRDLSAASTSA

SEQ ID NO: 959340 - protein, 47 aa, Homo sapiens
MLGAQREVDSSIVGPPRKKSPNELVDHLSKGAKEHGSCSFGASDQSC

SEQ ID NO: 959341 - protein, 37 aa, Homo sapiens
MPEGPVLTAPFSVSNDVIRQAGSINELIRFDTYIPSL

SEQ ID NO: 959342 - protein, 35 aa, Homo sapiens
FRRLAGFFGVISRIILVFSLLVTFYFLSLSPAQPG

SEQ ID NO: 959343 - protein, 94 aa, Homo sapiens
RYREIGAGDTLTARSAFHIPQFAKVHVTPHHQTHAQTGRNGAVITSARAGSGRFALSVQDVSFVGFNKTTGHATHVAEPPSQLIRKMKIDGIND

SEQ ID NO: 959344 - protein, 48 aa, Homo sapiens
AHTQVVLSEVVLVELCWSQVVQVAKLCWCQVVLVPGCAGARLCWAQVV

SEQ ID NO: 959345 - protein, 39 aa, Homo sapiens
LAHLGPSTTFMHNLCDQHYTWYQHNLLPQRDMHIPGDSA

SEQ ID NO: 959346 - protein, 36 aa, Homo sapiens
PELCCRKAKNHIRLSLSYSSSTILLTKDPGTRHNLA

SEQ ID NO: 959347 - protein, 57 aa, Homo sapiens
ARTGSGLMLLQCAPFGGGKFTLVLDSVLQGHGLVQLVVVSAYPCAGTARSSSRMSFW

SEQ ID NO: 959348 - protein, 39 aa, Homo sapiens
TLTRPDLSFINYTSYTIKVYHNHHPIILFHPPQLSLAPN

SEQ ID NO: 959349 - protein, 36 aa, Homo sapiens
  misc_feature (10)..(10): Xaa can be any naturally occurring amino acid
PHKTCKQYRXQTSIHRRSHSHNRPRTYILITILPLQ

SEQ ID NO: 959350 - protein, 36 aa, Homo sapiens
  misc_feature (11)..(11): Xaa can be any naturally occurring amino acid
DPHKTCAANQXAYTLSHTSYYRNHQPTHSTNSPGRC

SEQ ID NO: 959351 - protein, 48 aa, Homo sapiens
TTCNSNYHLPLTKAHKIKIKQTLQTSNAANQYRCKPVPLQTSNRCKPV

SEQ ID NO: 959352 - protein, 37 aa, Homo sapiens
TQDLLLTSLVLMNRTAYPRFRCKPVTLQTPLQTSSKP

SEQ ID NO: 959353 - protein, 48 aa, Homo sapiens
VPFVAHADKAVLRCQQGIADRNAFTFGGGRLRSLAHEALNSAQILADK

SEQ ID NO: 959354 - protein, 47 aa, Homo sapiens
PYSGTTNSYTVHMKKVSTHITRVTLLDLICLHTHYNRPKSFPGLHIQ

SEQ ID NO: 959355 - protein, 38 aa, Homo sapiens
TIGGMLFEFISNSAVAAGTWLAEILVSEGLGAVPHANH

SEQ ID NO: 959356 - protein, 59 aa, Homo sapiens
RPDTFKMEFVNSATSSHHTNHSSVWLRRYLLGAGGHLHTGSSWSQGLREEGLGEGHKQE

SEQ ID NO: 959357 - protein, 42 aa, Homo sapiens
GTPHKTWQKQEAPLCAVILNIGSEHLLVNDIFCQSLPGSPFK

SEQ ID NO: 959358 - protein, 104 aa, Homo sapiens
MRSATSTKTAFSKEQDEVNVGTESSCHEGCVALLGERHPQSVPRRYLTLCSRSVKAKKQKGPTENSSGDGGRSSKKKRQPRPTEGSVRNAGSSVYTVFKKIQCD

SEQ ID NO: 959359 - protein, 64 aa, Homo sapiens
PARLILWYARPVYICGLSIRPSPAPHTNHSSVWTDENILLGAWRASSHGFFLSLRILCEEHKQE

SEQ ID NO: 959360 - protein, 121 aa, Homo sapiens
FIEDSVKNAESGVLFLVTHAPGRLLATIRSRCRRLSFPIWTPDRLTTLVRNRTGVDLEDAEHAAAMAGGSPGAALALAAGTTFEMDQLARQWVEGDIDRAEALSIADKFRGAEGQERFETL

SEQ ID NO: 959361 - protein, 35 aa, Homo sapiens
IELGPLLLLRKTLLPASRFLLLPLPASPFLDAHHD

SEQ ID NO: 959362 - protein, 55 aa, Homo sapiens
YYLYKPITHRHWNIYYLLFLALELRSSLGSALNLLIRSELVQPGHLLGNDHIYNV

SEQ ID NO: 959363 - protein, 74 aa, Homo sapiens
MTSPKSALASQCIPINFYQQACYFITVFWPSRAKTTWYFPLGPPGGPIQARYNLAGSTPQGPPGILSGVPRNSS

SEQ ID NO: 959364 - protein, 55 aa, Homo sapiens
MPLITLIATSLDSAYERSNNSSHPNRSTSPSPPLLTLTKISPTLLNPIKRLAEAG

SEQ ID NO: 959365 - protein, 141 aa, Homo sapiens
MEEFHGMTLHDDDSCHVIPVLPQVMMILIPGQTLPLQLFQPQEVSMVRNLIQKDRTFAVLAYSECTGKGSTVWNNSRDIAYREEQDFGIEIVKVKAIGRQRFKVLELRTQSDGIQQAKVLNSSRMVLPSDMAAVQLESLNK

SEQ ID NO: 959366 - protein, 127 aa, Homo sapiens
SDPRLPHLPLTKTLLDNTVSRALPEFDGNRFQNVARKGVKFDEREKTKESRDSETPDVSLLLNWMKDKALKDKIEEAVVSQRLTESPCALVASQYGWSGNMERIMKAQAYQTGKDISTNYYARQKQE

SEQ ID NO: 959367 - protein, 32 aa, Homo sapiens
SWFCLTKTSGLTTDPVLLLPVLIISEGGENSS

SEQ ID NO: 959368 - protein, 46 aa, Homo sapiens
MRFSGEVTPLRIEISYRMAEAGRHSGIFFWRGLRELFTHDRRQKQE

SEQ ID NO: 959369 - protein, 36 aa, Homo sapiens
  misc_feature (3)..(3): Xaa can be any naturally occurring amino acid
DPXSPDPGRSRKQPFGRSRKRQKQEAGVLVRGRSRK

SEQ ID NO: 959370 - protein, 48 aa, Homo sapiens
DLHTRAVMFLYTGFSTGTLLEYGLQSFPKNVKFHHVLATIGLRVAAGR

SEQ ID NO: 959371 - protein, 52 aa, Homo sapiens
FCFCHGDKFFDVLLDSVCRSSSSDVLPASARLLLCSINSQQNISSLTCVLPA

SEQ ID NO: 959372 - protein, 56 aa, Homo sapiens
MAASCFCLLLLQNGCFLLLPLSCLVFLLLAASCFCRFLLLPLSLSLSLFLSQGLEE

SEQ ID NO: 959373 - protein, 111 aa, Homo sapiens
TLEGRTSFRYGGLIHRYTVWRGAGSRRLKVSWLVIKAETRYQRKPVTSYVRTTINKNARATLRQHQTHDPARTTYLSRTIACGGIRRASAILRSQNPVMVKRKRTRPTKSS

SEQ ID NO: 959374 - protein, 46 aa, Homo sapiens
PHKTLAEAGSKEKNEKGALKRRAGDLLEDSPKRPKEAENPEGRSRK

SEQ ID NO: 959375 - protein, 36 aa, Homo sapiens
PHKTLINRWRHTEIVRPHLQNASIRRGRSRKRQKQE

SEQ ID NO: 959376 - protein, 48 aa, Homo sapiens
SQDLNHQYDYTFDWTMLRQKQEAGRSRKRQKQEAAGTGSKQQAAYLTT

SEQ ID NO: 959377 - protein, 36 aa, Homo sapiens
MLLPLLLLCFLLLPLPASAMDQGLVRGYPTLDTSYT

SEQ ID NO: 959378 - protein, 56 aa, Homo sapiens
QDLVGRSRKQAEAGESLEPGRSRKQVWEGQKQEAEEGEEKKGKKIKTHHAPGRSRK

SEQ ID NO: 959379 - protein, 78 aa, Homo sapiens
MLPTMPKTNNDIAVHYIYSHKLSTTHSLFTNIVPIAILNLCRLRIIEWSRIPTILKSPINHIVYDYVHNLNLPHCFRA

SEQ ID NO: 959380 - protein, 40 aa, Homo sapiens
PSQTLLGWQKQEAEAVLSIFFLDAPSTLADGRSRKRQKQE

SEQ ID NO: 959381 - protein, 44 aa, Homo sapiens
SSWGLFAWLVAWPLAWLVVGYLELYGPEVGTRCRIQFTLCYPHA

SEQ ID NO: 959382 - protein, 53 aa, Homo sapiens
MPVASHSIPASASAPLLLPASAFCCFLLLPSLCCFLLLPRSWCRGSRSSHIRN

SEQ ID NO: 959383 - protein, 39 aa, Homo sapiens
SQDPVQLGILRGRSRKQLCCANGGEENFGSLPGPRAEAG

SEQ ID NO: 959384 - protein, 34 aa, Homo sapiens
FCFCRFLLLPPASAASCFCLPAASCFCHSSQGLV

SEQ ID NO: 959385 - protein, 76 aa, Homo sapiens
LVVTKRDAARVDDVVKSMYPPLDPKSHPKSPAKSSTTSHAKSRTTSHTTGHPKSHTKSHPTSPTTRHPKRTPGASR

SEQ ID NO: 959386 - protein, 39 aa, Homo sapiens
LLRFLLLPLPASAFTFSLLFLLFFTFFIFFFLFFLLLLL

SEQ ID NO: 959387 - protein, 68 aa, Homo sapiens
  misc_feature (5)..(5): Xaa can be any naturally occurring amino acid
HRVYXCDHHIFTVGIDVDTRAYFTSVYQIIAIPTSHEPRNEPRYGPRKVPPNAPLNEPRKEPHQEPHQ

SEQ ID NO: 959388 - protein, 36 aa, Homo sapiens
DQLGTNIYNQPTSHYYPHVTQHRHLHKERLKKVKGT

SEQ ID NO: 959389 - protein, 42 aa, Homo sapiens
ARRPVQLSTLLSVYLLNPATSHTIEPREEPPTMPRKLSRVPE

SEQ ID NO: 959390 - protein, 58 aa, Homo sapiens
SSYRVMWAIDEKAVEALVSSAWLGIFLLLTIWRSPTDKSATAVSRSFHHARPIVNSST

SEQ ID NO: 959391 - protein, 63 aa, Homo sapiens
SRQDNNLAAGCRRSCGDWRFWGQNNGPCASKLGHGGQPKFQKKRCSVNDVWQELWRQNNGPRK

SEQ ID NO: 959392 - protein, 40 aa, Homo sapiens
IAFWLLVWLVGELPLPPGSTVLTSGSQGTTVTTLLSFHQG

SEQ ID NO: 959393 - protein, 41 aa, Homo sapiens
ERMSRYRFCFCPHQNPASPPCTYEFEQHTPGFRYDQLIHLH

SEQ ID NO: 959394 - protein, 102 aa, Homo sapiens
APWVGESTDRLPVTTRNIPLSILRNPSSQLPLPEVATRLATQSAAHGVCSLCLRNSQRLSLHNEAVAAETPGHCAPGSQLPIYELSLPSTLVGLWFLSSEGF

SEQ ID NO: 959395 - protein, 63 aa, Homo sapiens
RMQRIAFARWQSARTRDQWRTGMLNRLVAYTGWRDMLDRRAGRTLRRKPNRQRRTSFRHYGKR

SEQ ID NO: 959396 - protein, 37 aa, Homo sapiens
RWELKLADFGLARANVSAHKDFSNEVCDLCRYLPPEE

SEQ ID NO: 959397 - protein, 37 aa, Homo sapiens
ALCCTSHLDSGNLSFLQSCAAVQVGENPVFILHEPPK

SEQ ID NO: 959398 - protein, 44 aa, Homo sapiens
RSVGIRFAHHAKPVKHYLNFTSSIANPTKTLTKILNPLDPLCLM

SEQ ID NO: 959399 - protein, 129 aa, Homo sapiens
MGRHSLPSSSAKLIMHAMAEWYMRGEQYDQAKLSRILDVAQDLKALSMLLNGTPFAFVIDLAALASRREYLKLDKWLTDEIREHGEPFIQACMTFLKRRCPSILGGLAPEKDQPKSAQLPPETLATMLA

SEQ ID NO: 959400 - protein, 61 aa, Homo sapiens
MGLKDWIGQTSDLIFQGETNVLGYIPDLLVTDAHSADVSHMAAQHRCVLSPNEPHNMGPIN

SEQ ID NO: 959401 - protein, 58 aa, Homo sapiens
RLGRKKRKKLLGHNDGRMNHVQIKRPINGVAAPIILSILPLRATHESPATSHARSPTM

SEQ ID NO: 959402 - protein, 35 aa, Homo sapiens
LEGGSSRGSLGGACGCALGGGHLSLILHKRSRVYQ

SEQ ID NO: 959403 - protein, 78 aa, Homo sapiens
MPIEGISCRLLLILFASAFSLKDNGLPAEQENKHRRYVEHSDTQELYKTRVNEPHGFSKISTGLLKTLNCPDSKPIGD

SEQ ID NO: 959404 - protein, 50 aa, Homo sapiens
SCVALGVARCGARIVCTLSWRLGWLFGWLFGWLFGIRSDPIPSVPRLLHV

SEQ ID NO: 959405 - protein, 41 aa, Homo sapiens
TGPEDFTSMLIKDPVSWLPSSSSCPSVYLGSPSILSLFPRK

SEQ ID NO: 959406 - protein, 40 aa, Homo sapiens
LVRGALRWLFCGALGGHIAGRVVVRLGWLVRVLARGCNNE

SEQ ID NO: 959407 - protein, 47 aa, Homo sapiens
LVCSHDKPEEHPTRHPKSHAMSHPMSHATSHPKSRANVATRTRHPSE

SEQ ID NO: 959408 - protein, 44 aa, Homo sapiens
EITISRGGGTKFFHSEVYELVVTEIGAYAVRIHKNREVRSRVLV

SEQ ID NO: 959409 - protein, 33 aa, Homo sapiens
LVNVFDVIKGEKEDRSKPEGVFDCVVRVEVYYI

SEQ ID NO: 959410 - protein, 34 aa, Homo sapiens
ALRWLMVWPFVWLVEGSLGWLVAWLVVWLIEVAQ

SEQ ID NO: 959411 - protein, 33 aa, Homo sapiens
TAAASDPEQKYQSEHSWQHQMTDLGSSVPPLCW

SEQ ID NO: 959412 - protein, 102 aa, Homo sapiens
RGLSAWRLCCKRASWSGVCCADIMTLSMDHVLIPYLYASTSCGWDQEFLKVPWGCGGLDRTLLLGRHQVFPAPLPLHTHTHTHTHTHTTHTHTPSDTEGSAR

SEQ ID NO: 959413 - protein, 44 aa, Homo sapiens
TRSDEEAAAERLALEWALCARTQDFLLVAHPASSVCVLSYWYLS

SEQ ID NO: 959414 - protein, 42 aa, Homo sapiens
LNTGWYLSKLIRCVMQTTSITAAAVGCFRCLSYAACGRGSRG

SEQ ID NO: 959415 - protein, 44 aa, Homo sapiens
EPEEVDSSTEEVVSTEDGTSQNPERWHIFLFYTLVVLPSPPLCC

SEQ ID NO: 959416 - protein, 31 aa, Homo sapiens
MPHNLDFDARCRQMVVSWVAFVFYHPNPLAE

SEQ ID NO: 959417 - protein, 47 aa, Homo sapiens
MVPQHRGGGQLDGQQRENLLLVDLPKNNALQRLSGLRVGLLCAAPPL

SEQ ID NO: 959418 - protein, 45 aa, Homo sapiens
DSTEGGVILMKTRLLVEVWGSVWYVCACLVYRASQLRNSWIISLF

SEQ ID NO: 959419 - protein, 78 aa, Homo sapiens
RTRSTGEKGLMLLNFIFLFFSVFTYWRYDYVSPMSTISYYCFRDSTGGEVTRIIETFGIIARVELGTLETHPVAEYRS

SEQ ID NO: 959420 - protein, 44 aa, Homo sapiens
TGSRQHRGGIVWQSSYGQVSKKQAERTTTTLKSKFKSKGESSSV

SEQ ID NO: 959421 - protein, 44 aa, Homo sapiens
DLSPLGRQEVEGRGKSAKKDHETHVNKSGGRPIKKKWSRGKVRD

SEQ ID NO: 959422 - protein, 53 aa, Homo sapiens
CLQDPKRRKGTRNTKLKKKDKGEAGQRRNLLSADMNIFERPWGLLYPPLCPPL

SEQ ID NO: 959423 - protein, 47 aa, Homo sapiens
TAQRRYSLESLYGRSATKKRKNNNTQKEQVQIQGGRWLLCVGTDARN

SEQ ID NO: 959424 - protein, 49 aa, Homo sapiens
RSDEDYLYLVGRCRSSTGTVRSPTLNVAFSREQSHKVYVPAPANSNDRQ

SEQ ID NO: 959425 - protein, 36 aa, Homo sapiens
  misc_feature (18)..(18): Xaa can be any naturally occurring amino acid
VVTLDDPDSTEEERRHPXNETIHPQPALPPLLLCAV

SEQ ID NO: 959426 - protein, 54 aa, Homo sapiens
DSPLGQQQRREWRPLRGVTPSWSERTRSDHIYKYASIRRAASNAKVMFGSNSEI

SEQ ID NO: 959427 - protein, 39 aa, Homo sapiens
GLEALGSSGPPGGSSFLQLPEPVGSGHPVIHHLFHPCLP

SEQ ID NO: 959428 - protein, 36 aa, Homo sapiens
TLQDPDSTEEVDSTEEDYSKPYLSMLSTSSVLSHRG

SEQ ID NO: 959429 - protein, 40 aa, Homo sapiens
GCLEDPRRGGVPPLLSVLSSCPPPLCCPPPLCCPASSVLS

SEQ ID NO: 959430 - protein, 57 aa, Homo sapiens
MRGRPDHTGRCSLLRRILRRSVRLLPMKCSNCQQGALFADVQLLSWSFGDTDAFEFR

SEQ ID NO: 959431 - protein, 43 aa, Homo sapiens
ALEDLTEEKLETWHAPGHRNYGYVISHNPETKKTRVKLPSSVL

SEQ ID NO: 959432 - protein, 46 aa, Homo sapiens
EDPTEEGACPTPSSQPTLTMRQGLEVEFLAILAFRASLALPPPLCC

SEQ ID NO: 959433 - protein, 66 aa, Homo sapiens
AQPSDHYTIIFNTFVMMQLFKLRSTPVKIHCREEVFDGIFSQPPSSRTYRFGALSEIHDCHLSESA

SEQ ID NO: 959434 - protein, 69 aa, Homo sapiens
DSEHWGGTQAQRYRCGGTLELSEICWEEHQRSGIIAEVAELRLKDNAGKDSSSGITLGGIHAQGITLGI

SEQ ID NO: 959435 - protein, 36 aa, Homo sapiens
TAQRRGHCERAGWLREQQDDPSTPCVSCPSCCPPPL

SEQ ID NO: 959436 - protein, 44 aa, Homo sapiens
  misc_feature (18)..(18): Xaa can be any naturally occurring amino acid
ALEVPKHRGGAGLGGTTXPVRRPYVSLPCPASGWAQSFQSFLLS

SEQ ID NO: 959437 - protein, 85 aa, Homo sapiens
LRFPHDSKHWYAVVMSPVEPVDGLTTAKHRPRKKRSSPLAAVRLGDRTARHRGYRSVPSVVPTWVRLAYDQCSTTVYTCDIIPIR

SEQ ID NO: 959438 - protein, 39 aa, Homo sapiens
GQHRGGGQHEEVDSTVGGNQPERLNAGTYFLFYTPLLCA

SEQ ID NO: 959439 - protein, 57 aa, Homo sapiens
GGRLTVRKTRRPGDGLDVAVPKLKGVRWGSQNGGNVPASHHSALSTHSPPMAVHLLC

SEQ ID NO: 959440 - protein, 69 aa, Homo sapiens
IYNIHSHVSKIIISQDDVTRMRILIVIYTSMQAFLWGKKITKIYADYVEHKPMVRRRHRVTELAIRHSM

SEQ ID NO: 959441 - protein, 36 aa, Homo sapiens
DSTGEVDSTEEVDSTEEVDSTGASNGETLEKITNSR

SEQ ID NO: 959442 - protein, 64 aa, Homo sapiens
TRDEVNDFLPYHQIIWPPVVLKPTRYTDYGGLIFNSYIFPHYSKNQATCDSLYVDNRVVLPIET

SEQ ID NO: 959443 - protein, 37 aa, Homo sapiens
TRTTTTEPVLSFIFPSLTIVVLEARSLDQQHQHHLGT

SEQ ID NO: 959444 - protein, 40 aa, Homo sapiens
MSSTLYGILISRSDRCSTGPLSEWGSYHRETRQGFDLYMC

SEQ ID NO: 959445 - protein, 56 aa, Homo sapiens
SQDLSRSDDYEVKFSASKGHSEKEVADSPSGLNEELRVDEETQEVLENLKDRWSER

SEQ ID NO: 959446 - protein, 50 aa, Homo sapiens
TTYPRRKRPTKYNLPRLSVHTGRCVRQLSTSSVEERPWGSQRMGQPPSSV

SEQ ID NO: 959447 - protein, 85 aa, Homo sapiens
MEVEVEGEAVLGVSFLLALFFFLAFLLLLCAVRTEEVDSTEKTFQTALFLDRLLDGSPLPQEVVMSLSKCYSSYCAVHLPLGSEL

SEQ ID NO: 959448 - protein, 59 aa, Homo sapiens
MPVIGLTVRVIMTVSVDCTFGPLIVSPVLNLTQAYAEQNVFMLLLLTLVLLSGDRLVRA

SEQ ID NO: 959449 - protein, 47 aa, Homo sapiens
TTQRRGQPEGAEENGNSDTKKKAKRDYAVIQTPAHLDCFLSPPPPLC

SEQ ID NO: 959450 - protein, 36 aa, Homo sapiens
LHRARTDIPIQSTGRIGAWVKEYDGVVVVVNFNSVG

SEQ ID NO: 959451 - protein, 45 aa, Homo sapiens
TEEELRSKGDRQDICQHRVQVLQLQCPPTVPVLCQQRPPLPPPLF

SEQ ID NO: 959452 - protein, 34 aa, Homo sapiens
SPYRVATSPSYLYFYLRLIYSTSITLLCTLYGGS

SEQ ID NO: 959453 - protein, 37 aa, Homo sapiens
AAQVGQHRGGGQQEEEQKLEAHSDWVRDVAWAPSSVL

SEQ ID NO: 959454 - protein, 49 aa, Homo sapiens
STEEVDSTGSQRPWVYVSEGDRGTLLLQCLGAQGAGQWKSHVGGPLLCA

SEQ ID NO: 959455 - protein, 43 aa, Homo sapiens
RVMTNSLVWLYLETGMDTMTSLDYAVAEVLIGDFLTPSSSSVL

SEQ ID NO: 959456 - protein, 55 aa, Homo sapiens
IIYQDFGIISHMSLTTPDKKEPFGYHRYGLSYDINWHSYGFTRVSTPISLPVDIA

SEQ ID NO: 959457 - protein, 37 aa, Homo sapiens
ATSSVLSSAVTSICAVHLLCAVHLLCAVQLSTSSVLS

SEQ ID NO: 959458 - protein, 40 aa, Homo sapiens
LFLPTYSARVYPLPLCTILSLLFPPPGIAQPSRRACSPLW

SEQ ID NO: 959459 - protein, 53 aa, Homo sapiens
QLDQLVMLPLLLALRFLTELIRGTLCLIYASLWLLLCFPSRVPNPYYPNLPIS

SEQ ID NO: 959460 - protein, 143 aa, Homo sapiens
HAGMTSDNRAKAASIRYLEARIGAIVVKRHQATSSIRACMWGRGHYKGFAQGHQLSWVALKQVWCSNQCSMSIHRQQQGQQHSQAEGVFALCHKGGKVHFHRHMGKVHPQGVGLHPVSCTAIGRWSAARAAITCTGPRMTVQR

SEQ ID NO: 959461 - protein, 179 aa, Homo sapiens
PEDSVARTITRWFYHQLIPTFGIKNRIQNPDVKSILLSPLTRPVVYYVSCSAICVAKHSFMPIVRAELITSGPDSSPISEARSPLQQNFQDNNSRVTVVCGRPGRECNYSREDKDRQKMYATIYELKEDKSYNVTSVLFRKKKCDYWIRTFVPGCQARRSSRWATIKSNPGLTSYLVRA

SEQ ID NO: 959462 - protein, 44 aa, Homo sapiens
LYHIPVDNKVIFPKKEPIEDDVFQKICPLSKFIVTDLVIMMVRA

SEQ ID NO: 959463 - protein, 50 aa, Homo sapiens
MSAADQKTTREDKPSAPIKPTNTGHWRKDNYNYPLITVDYLSSSPTSSER

SEQ ID NO: 959464 - protein, 71 aa, Homo sapiens
DIVFPNGRAVAMGARYRQQLEVYPIYSKLSAGAPGDVHMAALDLYTTNVSFMGAHIVWYVDNTDPRTALRV

SEQ ID NO: 959465 - protein, 67 aa, Homo sapiens
SDSEDSGRSDIPLPLCRRYGVATGQLALRNIFYVNSVWRYSHGSQSLLEASWATACLVVRRGRGYRC

SEQ ID NO: 959466 - protein, 64 aa, Homo sapiens
VRPNYLRLTSDRLVGYDIYFRMTRKLRIGVGIEWGLLLRRGRRTVVLRLRSVSRIVMVRAEPGT

SEQ ID NO: 959467 - protein, 37 aa, Homo sapiens
DSTFAGTGTVWHGTVRLDSNCNVWLWNCTVRQDTRNI

SEQ ID NO: 959468 - protein, 83 aa, Homo sapiens
VPDTSAARLRFGDPQPIWARTVFLGFLRLNRAHCMPRGAAARLHLYAGLGLWYHNSGSSAGMLVPPLSTIGHLCSSDADRVPI

SEQ ID NO: 959469 - protein, 54 aa, Homo sapiens
FRSLGPSREGVSISTRWVSLLFKASISSSSRESVVGRWSHSLKIFRCIVCRPTR

SEQ ID NO: 959470 - protein, 40 aa, Homo sapiens
GALSWSPRHSSKLPYSEPMLEQPGRPSRYLIHIYCVIVRA

SEQ ID NO: 959471 - protein, 72 aa, Homo sapiens
ARTPPFWAPFISRSEIPSLTWLGPPPQLLLPVSPPRVWRLACVRRSVDFCGAKKRSAEVMSTSAVRRLLVRA

SEQ ID NO: 959472 - protein, 60 aa, Homo sapiens
GITVLLGLSFHLLGASEFFGFSLHRIRRRLRLHLAGIHQLPRTSRHYWLNFPHYLLRPSG

SEQ ID NO: 959473 - protein, 32 aa, Homo sapiens
MLDEITGPQVLGLKLNIANEVSTQLLVAPTRG

SEQ ID NO: 959474 - protein, 77 aa, Homo sapiens
MQLLPFARTHTSGDHTSGPLKREGMLASTVSQSNVFIAPAAIAKAVRGDLSPMSLQAPGVPEFHSSILVTDLGHGPS

SEQ ID NO: 959475 - protein, 40 aa, Homo sapiens
RNLAGTTIYLRQVSISIAYTLFGYWFGYGCLVEVMMTGFD

SEQ ID NO: 959476 - protein, 43 aa, Homo sapiens
VIKAQKNLRKITSEVINRIIPYRRAFLDRWCVVALDVLSRRNE

SEQ ID NO: 959477 - protein, 47 aa, Homo sapiens
MDGAMTTQDSEYVIEDGFSDETVRYAHEKLNAWQGFFATLVDVVVRA

SEQ ID NO: 959478 - protein, 47 aa, Homo sapiens
ARRGRREEAYRGLQAKVNRKAADRALPLPQISPLPVKTARGPPWSER

SEQ ID NO: 959479 - protein, 60 aa, Homo sapiens
MGKLGISSLRHRNPIQVDHYSHLFGGPSYIAFRRVHRRKQEGFDEGLMTGFDERFDEGFD

SEQ ID NO: 959480 - protein, 88 aa, Homo sapiens
ALNRDVGFTVLASAGRRTPDLSVIHSVLASRSAWDSSAVSHCCHAHFHVLDPTPIPQCFSLMQEMSYDKVCYFCVTATRAQMCISYTC

SEQ ID NO: 959481 - protein, 36 aa, Homo sapiens
THSCRPFITCWSSNPLQLKPINHDRILICFTIGFRL

SEQ ID NO: 959482 - protein, 36 aa, Homo sapiens
IIELAPLTCIKPFIKPCHQTLHQTLVQVDHYSQRLF

SEQ ID NO: 959483 - protein, 103 aa, Homo sapiens
DHLHLNAAGYLLTAFVVFCLVFAAPNVIAPPTLRIDDRGMTWKSWRRSATYLWSDIDKFLVGRAVRGGKPKIAFDFLPGKTPSQVNATALNRSVNGYDRSMAN

SEQ ID NO: 959484 - protein, 50 aa, Homo sapiens
EPNPSSTLSTFIKRETAESNQITAIIGCSGQLVYGFRGYDDRISMTGFQM

SEQ ID NO: 959485 - protein, 51 aa, Homo sapiens
SNLPAIEMEHREVVVIGAGPSGAIAAALLNASDCTDRTLLIDIRSRVYGFD

SEQ ID NO: 959486 - protein, 33 aa, Homo sapiens
AGSCLWDLDFISPFPFSLGARDRDLLRRFRHTP

SEQ ID NO: 959487 - protein, 33 aa, Homo sapiens
LPLADRDAEKEDYICVRCTVKGRTKPKVKTQHN

SEQ ID NO: 959488 - protein, 33 aa, Homo sapiens
MSSVRYGASVTESVSERSRLLGVCCVGFESNLA

SEQ ID NO: 959489 - protein, 42 aa, Homo sapiens
QARSVRLLRVCCVARLLNPLTDAPLTDAPLTERLLMLYDAPL

SEQ ID NO: 959490 - protein, 38 aa, Homo sapiens
MSCTSSGHSSVEYAVASSTPMTSRLCNQHNIPPAGVTA

SEQ ID NO: 959491 - protein, 48 aa, Homo sapiens
LYKRSISKRSDNAEHQYSISKRSGHACWGYVVLEEEEARRWHKICLLR

SEQ ID NO: 959492 - protein, 35 aa, Homo sapiens
ISTRQSIEIYREKHIASKPACLVSHTLHTGHRSSH

SEQ ID NO: 959493 - protein, 39 aa, Homo sapiens
SDQVQADEAQYCQLVRQMLDDHKVCGDPLGQSGLNVRRR

SEQ ID NO: 959494 - protein, 41 aa, Homo sapiens
MEYGLHPTWDSYEATSKPVPFLVPEVPTLHAPRVNHNYSGG

SEQ ID NO: 959495 - protein, 107 aa, Homo sapiens
MSTHIHSSIIRNNQKEKQPKCPSVGKWTQEICLVRTVDCYTAFKRKDILSYATTWVNLKDIVLRERSLSQKDKYCLIHIYEVPRAVKFIETENRMVIISGVISVEME

SEQ ID NO: 959496 - protein, 35 aa, Homo sapiens
GHFLHIILCNPNPFPIAVSSEISSYLRIIDLGLCS

SEQ ID NO: 959497 - protein, 41 aa, Homo sapiens
PTRDFQFFYLPYFEKLIAAQRGPLRHGGAPLALFRSPHPVG

SEQ ID NO: 959498 - protein, 110 aa, Homo sapiens
  misc_feature (46)..(46): Xaa can be any naturally occurring amino acid
  misc_feature (86)..(86): Xaa can be any naturally occurring amino acid
NFYSQDIIQESFPNLARQTNIQIREIQRTPVRYSTMKINPKVHNHXDSPRVETVYEIDTFIFLHTKVIRHMCRVWRYIRVLLHMFXRIHSGGLIKRIPMHDKREDYSKKG

SEQ ID NO: 959499 - protein, 33 aa, Homo sapiens
YRKGTDVNALSMTLPILARPPTPSYSFTHSAME

SEQ ID NO: 959500 - protein, 33 aa, Homo sapiens
TTHDKYLFFQCLSLATLSNTHNKYLFFQCLKLV

SEQ ID NO: 959501 - protein, 35 aa, Homo sapiens
LNFYTLTICLYFKGYISDEEIERQLKALGVEADGK

SEQ ID NO: 959502 - protein, 87 aa, Homo sapiens
LEYPGYLATPDTDVLEVRYDCYVIKQTDSCRGCHQSSWTRRLLAAGEVTNVCPDKLRQAKMNIIPEIPATPTLNQSVEERSQNCMYQ

SEQ ID NO: 959503 - protein, 76 aa, Homo sapiens
TSYPDLEFVTSYCSLYITVRNGITHRYAYDLNCNSDEIHKVVELVILMREECQYQQLHVQFYKPNNNYAEPCKQAP

SEQ ID NO: 959504 - protein, 41 aa, Homo sapiens
SCYTRHEVNECQAYYTIAPIAGSIVLAAVLLKLGGYGIIRI

SEQ ID NO: 959505 - protein, 95 aa, Homo sapiens
MGGHIHTWYEALWLYRNLTARLRGVGLSVLDRWIHISTSRGPGDLHTHCRGLPLVGSHGQKGLVLYPRLYGSHPPRSTKWAPPDSGYELSMRKHL

SEQ ID NO: 959506 - protein, 41 aa, Homo sapiens
MTSRRQNSSVTKLKKEEKEEESKKKEKTVTKEEEQLRRRKK

SEQ ID NO: 959507 - protein, 37 aa, Homo sapiens
AAFSHGKAGATVAGLGPVDPERQMWMLLEPTSVKGSS

SEQ ID NO: 959508 - protein, 36 aa, Homo sapiens
QCKEQRTHLPTGVESDKNNPQNIYLFTDSQIACMFT

SEQ ID NO: 959509 - protein, 33 aa, Homo sapiens
MAEVKVLFVRNLANSVTEEISEKAFSQFGKLER

SEQ ID NO: 959510 - protein, 34 aa, Homo sapiens
  misc_feature (1)..(1): Xaa can be any naturally occurring amino acid
XLEDPVTCYTFDWRIVLETTIWALTYFFTESLWL

SEQ ID NO: 959511 - protein, 47 aa, Homo sapiens
MATCDSLTLTIEYVLLIEALIRIIITSQDVLRCNYYTNGGFNREYYS

SEQ ID NO: 959512 - protein, 59 aa, Homo sapiens
VDSTTYSVPASPHLYFGGISLLFDGDGITIDDKLPVLSLDGAMEFAMGGIILEHVYNAI

SEQ ID NO: 959513 - protein, 45 aa, Homo sapiens
ADVGLVLWVPTYAEGGGCGPLSSMSSQLPPFCKAQGPGLHSGRLL

SEQ ID NO: 959514 - protein, 60 aa, Homo sapiens
IEVGWVQWVKEYDGVVIVKAARVSAVNTYCRYMVCSHDKPWNSYAVIVYAVQIVYAVIVY

SEQ ID NO: 959515 - protein, 88 aa, Homo sapiens
RLYRILDRRHVAASGEYKEALQVTGHAISSVHAHEDIMSTPSCWEISSMPSTGGPSHIRAKSFSWYLQDREDCEDTADGSREAAGTGH

SEQ ID NO: 959516 - protein, 166 aa, Homo sapiens
YRILDRRHVGRQTRMRLTDDQADQEDRDKQIATDIAGDFIGSRIDVVEHERRMSQLYEVRHPNEDQAADQGDQHDRPRNGPARIAGFFGQGTHRIEAQEWITGNRRAAHDQGHLHIAAEKRCHRPQRLAGVTADVVDRQEDKGHQHQHHEAIDIIDLICPERRGVC

SEQ ID NO: 959517 - protein, 67 aa, Homo sapiens
  misc_feature (52)..(52): Xaa can be any naturally occurring amino acid
GLWARRSATIVMIRGWGRSHGSSVISIGPTECTETYGFIQVTLLVYHRGWPXFCVQDILLCTSNGSS

SEQ ID NO: 959518 - protein, 58 aa, Homo sapiens
AYTLPCLPVPHTPDPPALSTAPAAPSSGSRRRCRTFTFRVSPSQYSGPSCSIHRAHNP

SEQ ID NO: 959519 - protein, 35 aa, Homo sapiens
RLRIVAILQGSAILSQPEACDGEEEADPPHNHAPQ

SEQ ID NO: 959520 - protein, 93 aa, Homo sapiens
MALLPPGMPRLILHSLSSSTLPADPNSLLWVIRHMVAMTLAMPLGLWLLLYLVYDTGDVSSKVATPIWLLLYGGLGWYRLGLNRRDEYQGVPS

SEQ ID NO: 959521 - protein, 60 aa, Homo sapiens
QYLAFYHPNRGMGSLATRRRIAHQIQSRMADVAFASEAIEKVREFSGQHYSPAEAITGGW

SEQ ID NO: 959522 - protein, 139 aa, Homo sapiens
SSSTMPTSAVLSTSTRIFDCQLLRIGQNRSPAVTLCSQSRDDWKLQTALQAYYCPMVAESSEDSDEESKGLGKENGIGTIVSSHSPGQDAEDEEATPHELQEPMTLNGANSADSIPPLYHLYTTSPTFTILQYKKGYRA

SEQ ID NO: 959523 - protein, 35 aa, Homo sapiens
MSGHAFLSFHCVCMCACVCVCVLRCVLFLSPGRGG

SEQ ID NO: 959524 - protein, 33 aa, Homo sapiens
MACLDHGRRTTVFMGPLKKELKLQIEEGSVNSR

SEQ ID NO: 959525 - protein, 107 aa, Homo sapiens
  misc_feature (11)..(11): Xaa can be any naturally occurring amino acid
HRNTDANKRTXHPTWLAEKQTKAFASTCQKWKALTISGAEGQRGSRQVPPHCGHGPIWGAARHPLVKLKMGWVRWLTPVIPAVWEAETGGSLEVRSSRPCFYRSLKT

SEQ ID NO: 959526 - protein, 43 aa, Homo sapiens
MSGHVRARRFGVGLFLLVLSYREEFEVEETDLDYPGLQARYMQ

SEQ ID NO: 959527 - protein, 47 aa, Homo sapiens
PGKPILGAGRFVWSFHLHVPGSPTCTAGATAQRRALATCTLGTRYMQ

SEQ ID NO: 959528 - protein, 82 aa, Homo sapiens
MLAESGYWYLREWADPIACPSRGLHTGCETSNMSVITKWIPELSRPRASKRYEEVVKGSLAAYIKKIGYNPGKCKGMGPVHA

SEQ ID NO: 959529 - protein, 45 aa, Homo sapiens
MKPEQWKNPESSAGCAGPKIHSQARPVPVEVVQKFCRIDKSRYMQ

SEQ ID NO: 959530 - protein, 31 aa, Homo sapiens
MSPFFSMIVVGLVMLATCLVAKPTPSARYMQ

SEQ ID NO: 959531 - protein, 72 aa, Homo sapiens
GGTESEDEIIVVVPSPENTCSSLFHHLVVFVVMAAADSKVGTEVDGMPLLGGKGGDGFDNNVPLFIAWPVHA

SEQ ID NO: 959532 - protein, 58 aa, Homo sapiens
KVKSVEPLLFESSVRLKAQVLRSSLFKNFNLRPCTGKPPWNPSTFGGRGARITPRYMQ

SEQ ID NO: 959533 - protein, 36 aa, Homo sapiens
DPPCITGEGGAFPQAVGVKPQNLLQVLQKVQLDSSH

SEQ ID NO: 959534 - protein, 46 aa, Homo sapiens
SNSLLHPPSSPRRLPSARPGSCQVGIIEEFTKNNSLIIPTIIATIT

SEQ ID NO: 959535 - protein, 40 aa, Homo sapiens
VGPILMRSEYRRIILFVQNSFDSECLEITADVSFYAASPN

SEQ ID NO: 959536 - protein, 132 aa, Homo sapiens
NVIDITFPLRVNCETSVHSFMILHFCDDFLMGNDFFLEFEIWTLIGCFLSRDLEPPRDLDLDGDWKYLDPFIEPDLDLLSEADLDLRREIDLDRRGDADLDLRPLLLLREREYRLPLDRECDLDRDLIDNVI

SEQ ID NO: 959537 - protein, 65 aa, Homo sapiens
AAQGVKVYKDGKFTFNTDQAVEIIQKYVELYAKKAMPPEVLQNNYLGNSKLFLQDKVAWTTGVPS

SEQ ID NO: 959538 - protein, 76 aa, Homo sapiens
MVELTCIITAGQLLLRLTWERHPNYISHYASLYTYDLHNSNSSDYPRNRCRLNPSLRFHTSSKPLPGLGYLGYVYL

SEQ ID NO: 959539 - protein, 33 aa, Homo sapiens
PTDTIELCTPGRPNLTRKATKTISQHQISTSII

SEQ ID NO: 959540 - protein, 47 aa, Homo sapiens
LSSSQVLNSTTILANRCRLNPSLRFHTSSLVYLDDNTASNPEIRSTW

SEQ ID NO: 959541 - protein, 33 aa, Homo sapiens
LESSSGTPGRPNPGSQVDLTQVDLTIFSLHLAV

SEQ ID NO: 959542 - protein, 145 aa, Homo sapiens
SNLSSVPEHSCPAPPRPWGLRRSSPAAGHSRMTCLACSCRKNGGVFRLLLLAGKTVVVVGAQDPPSLLGVVCHLFGCVEEEDPGGLSEKDFLVGLLDAPSDLIPDSVEQDVNEEGVALGGDVTLGQEHFVVAALHQVLLQGHECS

SEQ ID NO: 959543 - protein, 74 aa, Homo sapiens
NVVIAQLPYVLSTPSSADRLSGRMQVGGALMQVDAVEEHTCVSVVCYSQVLSGPGGGGHECLISRRVHNMIIRQ

SEQ ID NO: 959544 - protein, 69 aa, Homo sapiens
MILKRPKSIGERTISATVVRGALLCIIFFSKKYGSREGDRGVITDRGGGSQHYPEERHVVERHGRDTNV

SEQ ID NO: 959545 - protein, 67 aa, Homo sapiens
  misc_feature (4)..(4): Xaa can be any naturally occurring amino acid
NIRXHHLLSAIYRHLQQNPDEGYKVSASTHVKTLGQGVAHEVARNGLHFLPQKPTIALMKLKGRRWI

SEQ ID NO: 959546 - protein, 44 aa, Homo sapiens
MFVRVPCRYWLPERHIGSSDFCFLKFSGCDFNQPLCVLYMDTNV

SEQ ID NO: 959547 - protein, 82 aa, Homo sapiens
MIQPSADPQHSCHIYAHFCAYAPPGVYRVCQCECRCLNLYPETQVYPHVHGIPRPVLDLVSDLLLLTGIKADPELGMGTRMF

SEQ ID NO: 959548 - protein, 88 aa, Homo sapiens
IESSSVPEHSCPLVDTLVDCELGEAAIVQYHRLIKIEGLENLVHLDLAGLCLSTEIETIEGLDTLVNLEDLSLFINRISKIDSLDTNV

SEQ ID NO: 959549 - protein, 34 aa, Homo sapiens
FEFARHDIVIDVSPWAIMRMTAPVKLQWGLDTNV

SEQ ID NO: 959550 - protein, 148 aa, Homo sapiens
TFCFRYLYEIHEDQLSLTLTSDYVTCPDIESPLKQEVEKILCSFVILLPTEPNKSTGPETTKPALKFSVGTDSDQNPTSEQYMLRLHQSKRTTILNSSNNLTNGTSYPRDNSSNPILESISTIGFTTSMLDQDIPMVQPLLKVRLFND

SEQ ID NO: 959551 - protein, 36 aa, Homo sapiens
LPITKVSHWINLINQGTTTRTPSDPKPGLTPSWSYR

SEQ ID NO: 959552 - protein, 82 aa, Homo sapiens
GHTIYGIWPVLPLTASPPVCFAHPTLASSLSCEHAQPCNFLKDFVPLFRLPGIFLLLDISTTPSLFISFRSPLTCLCGHECS

SEQ ID NO: 959553 - protein, 61 aa, Homo sapiens
MLDQDIPTVQPLLKVRLFNIKVLRDLSSDRSYSRSVSIYFILPPRTKGRLLYRTRMVHECS

SEQ ID NO: 959554 - protein, 42 aa, Homo sapiens
HSCPIKSLYCQEQWLMPIIPGIFGRPKLVIMVTQVITFYDMA

SEQ ID NO: 959555 - protein, 42 aa, Homo sapiens
MIQSSSVPEHSCRDEKLYEAAAGLSSFMISPVRETYNALTNW

SEQ ID NO: 959556 - protein, 133 aa, Homo sapiens
NIRVHGKAMQVAGTQERVLIEILCIDENTVTEIREIVICYQSEFGRDLEQDIRSDTSGHFERLLVSMCQGNRDENQSINHQMAQEDAQRLYQAGEGRLGTDESCFNMILATRSFPQLRATMEAYSRMANRDLL

SEQ ID NO: 959557 - protein, 111 aa, Homo sapiens
LSSVPIRVDKPTESKSYQTCIKRFRSGATSEQNPTSEQYMLKTSPVKANYYTQLIQLTMTNGTSYPRDNSQSYSRVHINNRVYDLDVGSGHPDGAAAIKGSFVQRLKSYVI

SEQ ID NO: 959558 - protein, 46 aa, Homo sapiens
YNYAKAPTIVAPMWLLQPFADAIKLFTKEPLKPATSTHSASGHECS

SEQ ID NO: 959559 - protein, 71 aa, Homo sapiens
MIHSALYLIIRVPTRCMPTVYYNPFADAIKLFTNGAPKNPPHLSSALYITAPILALTVPFYFIPPHDDTNA

SEQ ID NO: 959560 - protein, 50 aa, Homo sapiens
MLAVIPVLTKKINPRSTEAAINVFPHASYRIHDPSNSYPLQTIYSPDTNC

SEQ ID NO: 959561 - protein, 78 aa, Homo sapiens
FEGAHCQMQYLEHFFAAPSRDFPLPCLILVVELLSQKDTVTWSTARKLFRLTGLKNTEKWSWRLNGLHMEPALGHECS

SEQ ID NO: 959562 - protein, 52 aa, Homo sapiens
LCLNTFFTKSHEEREHARETDQAAETYEVAESSFRISMKPDCDDWEIGHECT

SEQ ID NO: 959563 - protein, 76 aa, Homo sapiens
HSCRTVYSQRIAIQKIMDAVCLRTNFLWRLLWKRRFISLVLNWNKSYHVYFYAYSGSKSVRASRCDEMCLPRLYTT

SEQ ID NO: 959564 - protein, 97 aa, Homo sapiens
NRALYLNIRVLILYGSNNLINGTKYPRDNRRNPILESISTIGVMTSIWVQDIPIMQPLLKVRLFNIKVLRDLSSDRSNPGRFLSTSNSSLYERTRMY

SEQ ID NO: 959565 - protein, 33 aa, Homo sapiens
LIHRVGQYIVREIAIRMIMDAVACCRKYLMAAS

SEQ ID NO: 959566 - protein, 92 aa, Homo sapiens
YNRALYLSIVSSVEYCAPQDRMLQISLRILVQLLCLPVDAPPVSSAVSAVAAAAEACVLFEPEILGSVGLSFLEGCKEGAEGGGNGAGAGGS

SEQ ID NO: 959567 - protein, 98 aa, Homo sapiens
TIELGTIRVCRYQPDSTGPACVCSQLGPSVVWCQMCAQILGMMGRAISDPTDCPAERKPGCCMATDRRFQLITLKTSRACYAGKRAASLLCRFVAKAE

SEQ ID NO: 959568 - protein, 77 aa, Homo sapiens
LKQQPKIAHCILFNQAIGLVAPVILIRYRRWLTGVCHSHNRPRTYILITILPRQTQTTNALTVASSSSLKDFKLYYH

SEQ ID NO: 959569 - protein, 91 aa, Homo sapiens
NRARYLIIVSHAYLLQHTTLCCSGVIIHNLYQGTEIFDKNRRSIQEPYLSVQSPSPIWLPSISRNTFPHRFLTPVDHYHRNRKHIMRTRMF

SEQ ID NO: 959570 - protein, 56 aa, Homo sapiens
RIELGTFVVCQIPSHMQCPGPRTPKTLHAWELPDAYSLVFQRLALYVKSLAFKWTR

SEQ ID NO: 959571 - protein, 41 aa, Homo sapiens
  misc_feature (13)..(13): Xaa can be any naturally occurring amino acid
MIQFELVYLNIRXQLDTECKKTLNLELLRLVPNYTEDTNVQ

SEQ ID NO: 959572 - protein, 57 aa, Homo sapiens
MDGIRENYLSQYSEIAIQIMMHIQDQLTLKGDLCAGLGSVMRVKEHDPLHALSVAPD

SEQ ID NO: 959573 - protein, 44 aa, Homo sapiens
DPRVYAELMLRMVLTYSAIKTYCLPLQTSHLTKMLNMPSTDTNF

SEQ ID NO: 959574 - protein, 37 aa, Homo sapiens
VGVMPILLHGHPEGQAVVDVGNNIGPVIRQLLASLQK

SEQ ID NO: 959575 - protein, 44 aa, Homo sapiens
PSVALSHLILQILSYPPVVWIRHRSSGTSQSAIARVSRALRTLF

SEQ ID NO: 959576 - protein, 75 aa, Homo sapiens
EASSVPVSIRDPNEERVGASTALRLPRKSWLLSQEIQVLSSTPKGILNAISSLLALGHFLPDPALCSVVVRDTNV

SEQ ID NO: 959577 - protein, 46 aa, Homo sapiens
MTHVSPVTLHNNICVTKTLASNLPGSYDIRTEYPRISVYYQRHELF

SEQ ID NO: 959578 - protein, 91 aa, Homo sapiens
NIVSRVQEEIKRNSDDLEQKIVTDALKKKTGTSPVQSFVDTGTGGGAWDTLRHTEHQHQGRRDREGGGEEGERGYKESTNTRYGDGGTLNV

SEQ ID NO: 959579 - protein, 153 aa, Homo sapiens
SSRYLNIRVSPPACTCVMPYRWYITVKSYEKDNRPACHADEDKLWANMVLPLCSTPQEVELTDSKDDDDIDLFGSDDEEESEEAKRLREERLAQYESKKAKKPALVAKSSILLDVKPWDDETDMAKLEECVRSIQADGLVWGSSKLVPVGHEC

SEQ ID NO: 959580 - protein, 38 aa, Homo sapiens
VLPQTEGSEEAAEPRMDTPEDQDLPPCPEDTNVQDTNV

SEQ ID NO: 959581 - protein, 127 aa, Homo sapiens
HIRLSWYRNIRSLSPEDLKTAVSSEATTPVSVQHMRPAIDEEAQESSARSSLCRIVVQVMEMGFPMKEHEFALKSLTGASGNASGLPGVESLAGRLLDHSDIQVTELSDADTVSDEYSDEEVVEDTN

SEQ ID NO: 959582 - protein, 39 aa, Homo sapiens
MSPGTLTRLRNQLSLEMVRANSVESPTLRSSDRRRTVRL

SEQ ID NO: 959583 - protein, 73 aa, Homo sapiens
SALYLIFVSALHYQSLSSTINFSHTGLSPTMASVSNAVLISRLAKEDYGSCRFRSLTTFWNLGLDTKCSGAIL

SEQ ID NO: 959584 - protein, 41 aa, Homo sapiens
LRTRAEYPRYRALRVPFTISDGIYGSAFFVATGLPRDFTVR

SEQ ID NO: 959585 - protein, 75 aa, Homo sapiens
VSLPIRFVRFEDSRDQRMLFMAQMVMIIASVCFVWNSPGLMEVVVGGPGVDCVCANYKKICISEFLFQVCSFQTE

SEQ ID NO: 959586 - protein, 66 aa, Homo sapiens
MINRARYLNIVSLRQLGSPSWAPAVAAHSLYLAKSVSTTNIAGHFNDESPLGLRRILYQSTDSLNM

SEQ ID NO: 959587 - protein, 36 aa, Homo sapiens
ELSTLDKGKKNIASSSPPSYATITLLKPLLLPWPYR

SEQ ID NO: 959588 - protein, 56 aa, Homo sapiens
MIQSSSVPDHSCPHRCIEYVGAFRIGRESCCVKKVRCTPINIISEHGFRRLVWSTG

SEQ ID NO: 959589 - protein, 57 aa, Homo sapiens
MIDEYGILAVGLVYGCSLRRRVKSVEVKPPYDWLNSSSLLDPLSEGQILVEVDAAVH

SEQ ID NO: 959590 - protein, 69 aa, Homo sapiens
NQLCTVNIVSFIVPTEESVSMRSLITWPSAGTAASVAHCTVISVLQNQCAFQLSFVFFFFSITVVSSLF

SEQ ID NO: 959591 - protein, 152 aa, Homo sapiens
RDPLQELMKLEKTPTVFIGYLEQTIKQVVITISEMSPKALVDTSCSSNRDSVASSSHIAQEASPRPLLVPDEGPTALEPPTSIPSASRKGSSGAPQTSRMPVPMSAKNRPGTLDKPGKQSKLQDPRQYRQANGSAKKSGGDFKPTFPSLPAF

SEQ ID NO: 959592 - protein, 148 aa, Homo sapiens
MLSNVLQLNEDLLHGAARNGAQITQRKLEAARDGVAVLRDYLEGECVQWLRRYLENGKDKLERADPPKTHVTHHPISDHEATLRCWALGFYPAEITLTWQRDGEDQTQDTELVETRPAGDRTFQKWAAVVVPSGEEQRYTCHVQHEGL

SEQ ID NO: 959593 - protein, 37 aa, Homo sapiens
LIRPDDSKCEESSERCCGRVYPGVLYVCIWRLETLWR

SEQ ID NO: 959594 - protein, 34 aa, Homo sapiens
ILFSHSINPTSIANPQNTHQDLKALSPMPQDTNV

SEQ ID NO: 959595 - protein, 52 aa, Homo sapiens
TNSSFVPVDRATPYYMAICNDGRTADLGHDAGLITNGRRPLYPPYKWLLTSP

SEQ ID NO: 959596 - protein, 123 aa, Homo sapiens
MVSIASHLIRSILVSRDAGSPEPPKRERSKAQIARGLCQRHDQQEAPEGFAHNTGYHGKRITNDRHPAEQQCPATEAVISLLGLFQFAFADGKPAFVPVVLDRATQQPVQHRAQHITRGTQVV

SEQ ID NO: 959597 - protein, 52 aa, Homo sapiens
KSVGAGSPGSCSSVCSTGVHFFFLKTPRRSQRKPSASSKGTTLAPLPGHECS

SEQ ID NO: 959598 - protein, 75 aa, Homo sapiens
VRRPCSLHSGLLYSPLLLSDEHSMGSEYRQEEPANKERSRVKAVALWKKREVSSKGMALEVHSDKAKPTGFGAES

SEQ ID NO: 959599 - protein, 74 aa, Homo sapiens
AGSHRRDDAEPERLEYSNRRVRRPVQVYFYVSRGRRKRSPMPELQVSAGDLRIGAPTGLISAGFPLSIGNPLWH

SEQ ID NO: 959600 - protein, 36 aa, Homo sapiens
KKHVITLYNPLILPVTQAPIFISFFIAKKRDGQPIL

SEQ ID NO: 959601 - protein, 51 aa, Homo sapiens
MPHVPGFCSQQQMHPVNHQDLALHVVRTSSASINSTSLQAAHWLMHRSAGM

SEQ ID NO: 959602 - protein, 42 aa, Homo sapiens
MITVVPGWHSPAARREGGIVIQWSAPEEKYHRSSSTRRGHLE

SEQ ID NO: 959603 - protein, 158 aa, Homo sapiens
LEVSVEMSEIEKEAEMIHGHPSHILKSTTHPIREGQADYIDWPPLLTRKKHLLGDSLQDLGQENKSRGPTCKSRGTRAVLCSWNPSSPDSQKKKKWPGRCVQLVYTFFPYFFFFPVPGKGGSWNMWPGGGPESRGHTTPSILVPPKVCGTTGITNGTG

SEQ ID NO: 959604 - protein, 44 aa, Homo sapiens
SFTSYPTILTKKAVWQVNSLIFLCSEVHCCAVAAFHIVDPAVIP

SEQ ID NO: 959605 - protein, 34 aa, Homo sapiens
GSPPPTPRKHILVDGDTLIYHGNSGEVGCYVCFS

SEQ ID NO: 959606 - protein, 43 aa, Homo sapiens
TTAAEYINELDDGSVSLTGYNARYFLEIPNGYEILRQFVTRWV

SEQ ID NO: 959607 - protein, 153 aa, Homo sapiens
YSERCAFRWDLRFFLQQYGRDIFWSASVSAILVSLVYAQHSCQYRWEARVVHRLNSKTVFVESLALWSMVKFDSIYQESDKGEELGPGNVQKEVSSSFDHVITETTRELIARSAATLITHPFHVIISEIYGTVHGKRIQVLWHYRASIIPIYR

SEQ ID NO: 959608 - protein, 67 aa, Homo sapiens
PARWEMHVRHFLKELKAELPFDPAIPLFGIYPEEYKLLHHKGTCMHMFTAVLFTKSHAKSPPRAPPC

SEQ ID NO: 959609 - protein, 73 aa, Homo sapiens
TGPKKVIRNLAPGSRQQIRSKQHNIQHGQPNQDVEMRWVEHEHRLHTRKALPCNMDVMPEDQQMGEPNHSSAR

SEQ ID NO: 959610 - protein, 73 aa, Homo sapiens
DLSWRVDTSYFEDVGEQQFHERSAGEIVVCGLGLRDSVEPKTHDGKEDTLHTCGSLSNKSFNGKYKLLILISI

SEQ ID NO: 959611 - protein, 105 aa, Homo sapiens
RPPNISSIPTNHQPTMNNQTNLTHTDLTHNTHRHSHRHHTQDITLTLHTELTHQTHIPHPQNHKHHTQTSETPHTHIQNTHTTHSRPHTHNTQRPHTQRPHTQTS

SEQ ID NO: 959612 - protein, 102 aa, Homo sapiens
MFSFSISEYSISLLSLLNRSSSCAEDVNDDCICLIVLCDSSTLTFHLFPSRSTLLCSFCKIPSVSARTDLYQTHSSCSNVCISSASFNLCSRTLTSSDPEVS

SEQ ID NO: 959613 - protein, 114 aa, Homo sapiens
SSLISNRESTSTDEHQMHQSTRPGSQYYNMESTTQMTPPQERASAPITAPTEVEVMDETKCCCSSQTKEKDNHTAPQMTLDTDRSWGVTYVYICCLVMDISLCSDHVICSRTHS

SEQ ID NO: 959614 - protein, 52 aa, Homo sapiens
PVHSDRTTPYLMYFSVVLVKGTLHTSVERPREVSLTMVFWAWRILSLCSVYG

SEQ ID NO: 959615 - protein, 52 aa, Homo sapiens
LEDPIPGLDCWHHYTTTDRNSSTIFYDPAGGGDPILYQHLFMIIRSPLKCQG

SEQ ID NO: 959616 - protein, 211 aa, Homo sapiens
TWTLSVPHSEGSLLATGQRSTFTPQGLQYQDHPVLWTRRMIEDASSKSQRISITFAPVQYPQANLRLQQAGHSGSTPVPAQKERAPVSGTQEKNKIRPRGPRDSSYYSENRSQLKCCFSTRIGSGSLATGRPVTWHGDVAVKILKVVDPTPEQFQAFRNEVAVLRKTRHVNILLFMGYMTKDNLAIVTQWCEGSSLYKHLHVQETKFRCPA

SEQ ID NO: 959617 - protein, 134 aa, Homo sapiens
SDAGRQSKEDIEGMVQEAEKYKAEDEKQRDEGVIPAIHLQSYAIQQCNSELIEACSNTSTGTALTHAGTNTASMLAQDVMQIIELDLISNPALLQKARICTINQKALKKVSHPHHHQAVPECRRHARRNARGIG

SEQ ID NO: 959618 - protein, 114 aa, Homo sapiens
MLSEGNPKLNLAFLSHPSLTAYPALHNPENQDIDWGALEGETREERTYRNWMNSLGVNPQVNHQYSDLSDALVIYQLYEKIKVPVDCNKVNKPAIPQSGKHYDEARELTLRDSI

SEQ ID NO: 959619 - protein, 36 aa, Homo sapiens
RLVDEDGSDEQGRLVLGYGRRFHIDNCCDEIDRPLS

SEQ ID NO: 959620 - protein, 58 aa, Homo sapiens
LSLRGAWGPSISSQQLSNIKPPAINPTSHEEPHNGPREEPHNEPHKEPPNEPPNEPHD

SEQ ID NO: 959621 - protein, 38 aa, Homo sapiens
IYYEADRNSTPASSTPPEEDTPFYTNTYSDFTVTLKCQ

SEQ ID NO: 959622 - protein, 66 aa, Homo sapiens
WLTCDLLDMSLDTPSFMVQVVLERHTSHHQRQLCSTLTALKASSDYESLRDIHDFMIFTRTASSHN

SEQ ID NO: 959623 - protein, 51 aa, Homo sapiens
MAKEKNDFFRFFFFGRQLLVVARGGVRGSTRGPGRPQHSGAEEFFQPRVPC

SEQ ID NO: 959624 - protein, 51 aa, Homo sapiens
HVLWLGLEADSRGAKQIICQSHQLKPATSHHVVAGHSVDISAVRPFSTSTG

SEQ ID NO: 959625 - protein, 72 aa, Homo sapiens
LCRVRASANSCAELYEQWENYPACTKLKKLHLVYAGPMLFDSNLTSEMYWWVDKRSYFNEKVVLATRLVCAY

SEQ ID NO: 959626 - protein, 34 aa, Homo sapiens
MTGEHTLRGLAFQMGGHKDWVLSTHRAGLKQVII

SEQ ID NO: 959627 - protein, 81 aa, Homo sapiens
QQIAKMHHVPQAGLTLGIGELHTDYPYRRTINAPITAPTEVEVMDETKCCCFYKRRKRKTSRAPQMTLDTDRSGGVTYMCI

SEQ ID NO: 959628 - protein, 33 aa, Homo sapiens
NGLRVRISSLLLSMCFLLIQGHCSSTFCKSMVI

SEQ ID NO: 959629 - protein, 52 aa, Homo sapiens
VSDHRAPVWSCQGYSSSSQNSSLWFHQTPIKLVWSRTNCCIHLFNTMIQSQN

SEQ ID NO: 959630 - protein, 40 aa, Homo sapiens
PRKGIASPLLKRETKDWIRVVGEMGPWVTCQIFVRHLKYC

SEQ ID NO: 959631 - protein, 83 aa, Homo sapiens
MCMTDLRTSEDQWGVPTCLYPPGQRQSIIVAAISVEMEKWVEDIQTAIDLAYKSSSPAHEFLASSPRYNKSPDEATAAEQESE

SEQ ID NO: 959632 - protein, 72 aa, Homo sapiens
RLGQNKEKLQPPLNARRNPQEEDEGTRRTLYSSSNHHFVKGLFHQRWDHHWGGLGPIWDYFPLQGRSSHRMD

SEQ ID NO: 959633 - protein, 94 aa, Homo sapiens
IYEDSLKSYRSDHGARLVYKTLTSPIIDALITFHAPALIIIYLLCFLVLYALFLTSHNKHNSYNISDAQEHQNRLNILPAIILVLIALPSLTHP

SEQ ID NO: 959634 - protein, 43 aa, Homo sapiens
KSYRKKATTKWSQNTILLSYLKVSRCIVHHKPVFYSLNWVTEL

SEQ ID NO: 959635 - protein, 55 aa, Homo sapiens
PKPTVLHYQTCIKNFGWGDLGNDNPHRPSSYMRRLHQSTANYYTRLDPIHLTNSN

SEQ ID NO: 959636 - protein, 42 aa, Homo sapiens
MPLFLKPHNTNYTITNNLSTLMEIEDLSELFLPANHTYVLIC

SEQ ID NO: 959637 - protein, 182 aa, Homo sapiens
YSESIVKRCRGSTSSCMLDKLTVVSPPRAIDLNLTMLRECLPLIIFLRNRLKYALTGDEVKKICMQLIHYNRWRRSELIKPTLLDSLDVIQHRQDGREYPYQIYDTKGRYDVHRITPEEASTSWQSEKDLMWAQNGLPHLMTHDARNQIRYPDPLIKVNDTIQIDKETGKITDIIKFDTSNL

SEQ ID NO: 959638 - protein, 134 aa, Homo sapiens
GVLEDPFYIGVKSKPTRRPRLRICTLYYIPSSMCDCNKTALQRPRFFHQAMNYSEIRTRRQERGGALRGQGSPSAITIYGASVSDCVINVKMFYSLGLFLKQGSRHKTSMSGVSVSKMQHQKPFTPWEEGCLRA

SEQ ID NO: 959639 - protein, 222 aa, Homo sapiens
  misc_feature (215)..(215): Xaa can be any naturally occurring amino acid
VRLFNCRLDDIPGQYGPTKGWRLQCEGLHTNKELARSPTLKGRDDGHRKQVWEISTSPEGAEQKTCILKIKGSITPPVVQWLPLGVDDGEVTSCGRVSWEQVEVAAQVLQYSDISLHPVEFCARSITFPILDKCVHLNQHVGHVHITSPLRKHLSKSLDVPGTSFGVPHGGSPFEAGKPHIMSERVGSLIFGNFSLPASLSSHPGDPAWFFPSCXSPHDQSH

SEQ ID NO: 959640 - protein, 142 aa, Homo sapiens
MVWIEDLTSHNIPLHESLIQSKAPTLFNSMKAEKGEEAAEETVDVDEVGSRGLRKEAITINIKVQSEAENVNRKGAASYPEDLAKIIDERSYTKLILHVDQKAFYGKKMPSRTFIASEKLNAGFRVSKDSLTLLLGANAADI

SEQ ID NO: 959641 - protein, 113 aa, Homo sapiens
VDIEYALQCSMDSTGGCSPSKGMSGIVLCAAVPPHSNNNWQQHGVWACPQHLCGSLASKVVRSRAGGISSHQLCADGSGHTPGKQFLPNAGSRDALFMQSYVVQAQHLALTQT

SEQ ID NO: 959642 - protein, 148 aa, Homo sapiens
  misc_feature (143)..(143): Xaa can be any naturally occurring amino acid
  misc_feature (145)..(145): Xaa can be any naturally occurring amino acid
HVLWAMYGILPAGSVQKPHRHQSIALDFIIDCPKGCYSLVGTELDADGQIRNPQRVDWSPGLAFVTPPGYWHAHFNESDSEAFLIPIQDAGLQTYLRALDIRFIESLPVRCFAQSFNDKVDKTPDLGRYDALGRVHKPHRKAXIXRGD

SEQ ID NO: 959643 - protein, 30 aa, Homo sapiens
GVASPGPGNPVSPGSNDSPGPAPQIAGNTG

SEQ ID NO: 959644 - protein, 87 aa, Homo sapiens
SSVIAGILFNNTGGHGLIRLTLILNPRDYPLSLALPCTMPMRHNYTKLLSAYDNQTYNRSLHTLQVSHIATRRSHEHSHRKPPEGEL

SEQ ID NO: 959645 - protein, 119 aa, Homo sapiens
TQSRVDILYAYIHIHASIYIHLFTHSYTYVHTHVHTCLHTDTSMYTHIHTSVCTHMSVYIHVCIHTPLYTHTSMYRYICTHIHTHSYTHIRTHICGDRGQRALSSGSVVIVSLVLASFV

SEQ ID NO: 959646 - protein, 90 aa, Homo sapiens
RQIMRRGSKADLVSDIGDTVEDPYTSLVKLLPLNDRRYASYDATYETKESKQQQDLSISYSGLLQSAPFTQSKHAFIAQRLKACPIKQAQ

SEQ ID NO: 959647 - protein, 66 aa, Homo sapiens
IIIPTIQNSKCSSSKPMHQHMGWARPWWLHPVNPQHFGQASRWDGSLCSVQAVRSTQPGATSVQHP

SEQ ID NO: 959648 - protein, 66 aa, Homo sapiens
YQSVYTRSLQSRKLVGTSGFSKGTYSQVTCLSTLCSRCTYRALMTHREAKVSSKKQNMAGRRGSHL

SEQ ID NO: 959649 - protein, 130 aa, Homo sapiens
SYTTPLKSEQRPGTVAHGYNPSTLGGRGRQITRSRDRDHPGQYGETLSLLKMQKLAGHGGAHLWSQLLGRLRQENHLNPGGGCCRELRLHHPAWRQSETPYQKKKKKKKLHWLPKFFPHNFCLQFGHGCG

SEQ ID NO: 959650 - protein, 107 aa, Homo sapiens
  misc_feature (65)..(65): Xaa can be any naturally occurring amino acid
SDRSVILSYSSDSLIRKCYCREITRIRKKKHRKNSRKHKKEKKKRKKSKKSASSESEAENLEAQXQSTVRPEEISPISENRFLMRKSPPKADEKEKEKQRERKGKRV

SEQ ID NO: 959651 - protein, 49 aa, Homo sapiens
VKVAGQTCRIASVFKPNVGTAHECKYVLCCSYYTNGGFNREYYIACQRS

SEQ ID NO: 959652 - protein, 115 aa, Homo sapiens
MRMTAPVKFQGVWMGMAVTHAGLCGCIEAVCNERISGLFVVRLCMAACHNSCLHQGIVQGKGSAHVYSQGGLQQCRCAGGNHTHSPPTVLQSTGGTVLLDPAGLGGSAMGFRESY

SEQ ID NO: 959653 - protein, 68 aa, Homo sapiens
  misc_feature (22)..(22): Xaa can be any naturally occurring amino acid
VCWYLRRVSQPYEEPWQQPSEXQWIRHVLSRGSLTFETEKRTHQLYVRGVIMDSCDELIQSISFIVVC

SEQ ID NO: 959654 - protein, 63 aa, Homo sapiens
DIRVSSDLQYEKNGYTSKFADLSGGWQRNNDALRQAKQESTEYRRQVQSLTCEVDALKEAMSP

SEQ ID NO: 959655 - protein, 67 aa, Homo sapiens
NKVSKPGKHEVQQVATCNIKHTNADMAKAQSMKGGSISAGRIQKYLPQEEIKSQRLAKIYAHAITHI

SEQ ID NO: 959656 - protein, 66 aa, Homo sapiens
EVSRPYINRNYVVDGLSYCYLSTISLGNHISSHISNTILSLLLMEHQEFGLRNYEIHITKDMMRTS

SEQ ID NO: 959657 - protein, 68 aa, Homo sapiens
SVTPKDSYMQSGNQKQEVIAVLHQIKQTLKKQQFKKDKKSLYNDKRINLTRLDNLKHIMYLILEHLDS

SEQ ID NO: 959658 - protein, 52 aa, Homo sapiens
HCYTCAPGKSVFWVVLCVSVALNHSLYSVAHDGGGSAVCSAEWLSARVFCLD

SEQ ID NO: 959659 - protein, 55 aa, Homo sapiens
VPPVLPALSAEEKCLASTAIPYGTDYDVRVLLRFPQRVKNQVTADFLPNRPRNNW

SEQ ID NO: 959660 - protein, 156 aa, Homo sapiens
  misc_feature (27)..(27): Xaa can be any naturally occurring amino acid
RSHLSEQQKYQHVSSSLMTAVCYSAIXFETPLRGGRCSAEKRERKAAAENTCVTKQKELQALYALQALLVTLEQAPKLLRIVFDALYDEDVVKEDAFYSWGRSSKDPAEQKGKGCGPLNLSQAFFKGGSVKQEEESDPQLRAGVATSNVAHLGPED

SEQ ID NO: 959661 - protein, 34 aa, Homo sapiens
VLIPIYNYIELEDPLTGGEETWLHMGLYLWDLIC

SEQ ID NO: 959662 - protein, 71 aa, Homo sapiens
DTPLNTTRRHGKSESLCGVSQPMAASLSTGASSRLSADDEIQHLTVAAPVSSGLATFLLARKCIKEKLTVA

SEQ ID NO: 959663 - protein, 103 aa, Homo sapiens
ECQNLLLTTGANFNKKDKYGRSPLHYAAANCDYPCLFALVGSGASVNDLDARGCPPLHYAATSDTDGQCLEYLFRNDANPGIRATPGYTAVHYTAAYGHRLCL

SEQ ID NO: 959664 - protein, 45 aa, Homo sapiens
MARTCSGEAVRNTRGLMRCPTGVAEVAPLVYLPVAIGDGQLLHGK

SEQ ID NO: 959665 - protein, 46 aa, Homo sapiens
KCRQVENLEDRGIRKISGTGKALAKTEKYEHKSEVKTYDPSGNSLN

SEQ ID NO: 959666 - protein, 57 aa, Homo sapiens
MFGDLLHSQDVMVVGEPTLMGGEFGDEDERLITRLENTQFDAANGIDDEDSFNNSLN

SEQ ID NO: 959667 - protein, 34 aa, Homo sapiens
MTLVKIADCRDNVWIAESPVCEETPIDMHHTPHM

SEQ ID NO: 959668 - protein, 150 aa, Homo sapiens
WSATDSKGQFWLTSRSDHSPRYSVLIYLTPGSSRALETGYKTSWASIAESSEGQSWQLYFQPPCPTSSTPRGAEYPETNPGFVTLSYVGPPDSRQLTHSRPSRSETPVDTGLGTNWITARAAVGPRGKESGLNLYLVRKPRHQDPSWDPF

SEQ ID NO: 959669 - protein, 56 aa, Homo sapiens
MRGPSREKLLTSTEGLCPSALSETSRFDNDLQLAMELSAKELEEWELRLQEEEAEL

SEQ ID NO: 959670 - protein, 37 aa, Homo sapiens
MDFFFSHKDSMVTLGLPPLHRNYCHSYCNTLVTGTSM

SEQ ID NO: 959671 - protein, 65 aa, Homo sapiens
TRNMYELIKKSWVGGEGNDGSGVISELHVSNSWECGAGPSDLSAHPGQDNTGLRRSWRSYAELGR

SEQ ID NO: 959672 - protein, 99 aa, Homo sapiens
VLTRISQQSLSEGCHEPEGSLITVFPELGLHIHIGDFSQYHVLGILILTVVQSTMAIGVHTPDFTRVLGLMLNDVASSLLEAATRVGGRSASRMASYDA

SEQ ID NO: 959673 - protein, 38 aa, Homo sapiens
MGPAWLDGTRTGEQNPPLVSIKNIWLRSGTVAHACNPR

SEQ ID NO: 959674 - protein, 44 aa, Homo sapiens
TICISNSTQVQPHGAAPDAFAFLHRFIQLLALHISGASFSAVRT

SEQ ID NO: 959675 - protein, 135 aa, Homo sapiens
MLRSVSCQDEHQAETLRSSTQHGTFYVIRLKCHTLPLNSVIRNYISLSSPCYKTAITEAEQHIIKGTEDSIDSPDRHGQRQAHNHGGRRKRSKVMFCMDAGKRACVGKLSFIKPSDLMRCIHYHENDMGKSHPHD

SEQ ID NO: 959676 - protein, 91 aa, Homo sapiens
TRLLTGDEREVQAAFARAAFNVVFHNRDDHPRNFAWRLGRDSRWRLAPAFDLTFSEGPAGQHSLDVGGEADVITRQHLLRLARDNDIPAAV

SEQ ID NO: 959677 - protein, 113 aa, Homo sapiens
LGTPPPESGSTRAGSHPQPQLQIRIQALPAAATPNGGGVKSWVAQGSWARLHGVSGSTSLGHVHWGVGRHRHPSLCLRPSKPERMRTEETNKHARSLGPRAGSTLLAAYLSLA

SEQ ID NO: 959678 - protein, 30 aa, Homo sapiens
MAESSATFTPMAPQVMWAIDEKAVEGVRWC

SEQ ID NO: 959679 - protein, 58 aa, Homo sapiens
MGDLQPKKVCGLVSTNYALSMSDSYHNVSSLLGQLRGDVSSDDWQNLDKRTSLQGSVH

SEQ ID NO: 959680 - protein, 39 aa, Homo sapiens
MAGPLITILLGNSTTNAKLSSAGFGISPICNLLLRKKRT

SEQ ID NO: 959681 - protein, 54 aa, Homo sapiens
ISNIRYDNNSTMPNSWQTLIWIQAVMNKRIRNAQLAQYNFILVVGEKEKISGTV

SEQ ID NO: 959682 - protein, 48 aa, Homo sapiens
AFSYRVKRERLEYTLVSGYEEGGRVKDYSEIGYVDRLMNYGALYNVRD

SEQ ID NO: 959683 - protein, 48 aa, Homo sapiens
LAGSEQVTGMNAACKLIIQQGAQSTAFGMGFLLNSRLISQCKLQGHCS

SEQ ID NO: 959684 - protein, 76 aa, Homo sapiens
TLNHSTAHGYRTFISMAQQVAPDPHPVRTHVSTVNQQCGHTQHMAPPARQQAQAKQTFWPKQVFIHAHLAGKQAGT

SEQ ID NO: 959685 - protein, 34 aa, Homo sapiens
ISDLMITLPVAPNVLTTYRRDRTHPAYVTYILKI

SEQ ID NO: 959686 - protein, 31 aa, Homo sapiens
MGVQLGQVDHIAAVGGGIGVRRRGQPVRELL

SEQ ID NO: 959687 - protein, 51 aa, Homo sapiens
GREEKEKERVPMLRSTGMILEVVETVDFQPNEQGNFPPPTTPEELGTRILI

SEQ ID NO: 959688 - protein, 36 aa, Homo sapiens
ERRTPQLRKKLMRRILDSAEFIKFTVIRPFPGLVIN

SEQ ID NO: 959689 - protein, 52 aa, Homo sapiens
TLDDPTPSEAEKSYISYVLNSCDSVKISSVSRHQTWKMSPDVIDMWYLSSNY

SEQ ID NO: 959690 - protein, 48 aa, Homo sapiens
MGRKGDEGWILKGYALGRQPGLVRMIAPCDRSSGRRLTATCGRLHIPV

SEQ ID NO: 959691 - protein, 106 aa, Homo sapiens
CLSLSAAPPKLLRTCGELQLGVSNETVVMSEEADRVDAVMPRMARDWWGTEATAPENFQGLNPSTVVTNAFHPEWNRQILARAQEVSIKRGSSENVSKEKGFRAND

SEQ ID NO: 959692 - protein, 57 aa, Homo sapiens
CCPGHLLLEEKVELKRRSLPFRVHGSVCQLMKACSMSVCAVRACVGMSACRCDRHLG

SEQ ID NO: 959693 - protein, 96 aa, Homo sapiens
MSSPLFRITEAIHEVPPKSTTQAQVVEDLQLPVHAGAGHGDPTLEGSPSAAGSATRPTSNCLVCGTTIETNNLTYLLLRNHRSSKFSSLQCSSCDK

SEQ ID NO: 959694 - protein, 35 aa, Homo sapiens
AVENTLQSLSWLSQLSESLLTPSHTPPASLGMKDL

SEQ ID NO: 959695 - protein, 108 aa, Homo sapiens
  misc_feature (80)..(80): Xaa can be any naturally occurring amino acid
VGTAVRRTDCLSVLYLWRSCCINRPVLHALGSILLSEVLCAVLDAVTVEKVVIQTLASIGSWSERATAKHMENSQVASNXYLFVYFFYLLDFLHKGLKVEFSNKPVSV

SEQ ID NO: 959696 - protein, 74 aa, Homo sapiens
  misc_feature (26)..(26): Xaa can be any naturally occurring amino acid
AQQSGRQQTCSQCTLISWHSCLHNRXSLACVSGPILLQCRSGVLYLDGVNGGEDGDTKLSLCIWQLGLERATGL

SEQ ID NO: 959697 - protein, 40 aa, Homo sapiens
RSYWQVFLTSGLAYRQDGCEYHRLFLRRCEWVGPQGHPGL

SEQ ID NO: 959698 - protein, 48 aa, Homo sapiens
VSLYHIPSTIIASFIDNVRFLREQLEAKDLGTPNVVPCQKEQGYQDCE

SEQ ID NO: 959699 - protein, 124 aa, Homo sapiens
CISVPLVQFQTGMVEAEFLKASSKPEASGLLPRLTFQNSAFDSLSWIGCCQSLRHLDLSGCEKIPDVALEKISRALAILTSHQSGFLKTIYEPNYFYCCKSRDITMQSTKQYACLHDLTNKGIG

SEQ ID NO: 959700 - protein, 34 aa, Homo sapiens
LGTLSAGLPWRTAVTTFVVPRKFGVLKPKSLCPE

SEQ ID NO: 959701 - protein, 81 aa, Homo sapiens
KWCLKLANRLYGENTYNSFLSLGFQTQKTYGADLASRGSFSDASEDARKTINHVGQQDRQKEKFRERVRLRGSWLNNSDRN

SEQ ID NO: 959702 - protein, 41 aa, Homo sapiens
TFLEANILPLFRWRLSKGSPGLCQFPELQQKELQLCAWEPS

SEQ ID NO: 959703 - protein, 44 aa, Homo sapiens
MRTSPNSEVYAAEGRKPFIWEMKISTEIWPFEPGFPQLGTTQKP

SEQ ID NO: 959704 - protein, 31 aa, Homo sapiens
MAMRCSGVGCGLGLGGGGSVSAKPWRNEDTE

SEQ ID NO: 959705 - protein, 52 aa, Homo sapiens
MTRCRQTQNTSTELFDGSQERAAALSAEALGAGTAVGLPFLSCASSQSFSRK

SEQ ID NO: 959706 - protein, 48 aa, Homo sapiens
MQTAGTGLCRMDLYILCFSPSFSPPWNIREQIKTSIQTRQNKTQHLPK

SEQ ID NO: 959707 - protein, 33 aa, Homo sapiens
IHVLWTPCCLFVDCCCLLDLCLSRCVDAPGTAP

SEQ ID NO: 959708 - protein, 64 aa, Homo sapiens
TQNRSAESTLVINGVTDVAARSSSHPKSCMNSMNATAEAIKNLIEEQKAQCPKGKNEKNFKRGI

SEQ ID NO: 959709 - protein, 38 aa, Homo sapiens
LQVVEARDQVTDRHRTHQQNYPGEQVTASEFIRTKKGE

SEQ ID NO: 959710 - protein, 62 aa, Homo sapiens
SPPYGTLASSRISDVLNVLSVGPRSIAFRSKYRWECLDILQHPDLLECLGLRRRNPHGVKST

SEQ ID NO: 959711 - protein, 35 aa, Homo sapiens
YNNLKSLEAASEKVGGWLELEGGLLDFVLFFSPGY

SEQ ID NO: 959712 - protein, 56 aa, Homo sapiens
AVSGHACPLTLNLRLRDAYTGAPALGVNRRRTRRCIDKGVTIHTSPVTYEAMGRRV

SEQ ID NO: 959713 - protein, 40 aa, Homo sapiens
DVRGVEGGRGLNSACEGHCPSHRDCFGVTDVEVPPAPLSI

SEQ ID NO: 959714 - protein, 44 aa, Homo sapiens
LLLRSPLTAPPVPGDDDGLRHDNHALPTPSSWTSSPRDTAPRDQ

SEQ ID NO: 959715 - protein, 34 aa, Homo sapiens
WDLYLIFVISDHCTLRNRVFAFDMDNCIRFKIPG

SEQ ID NO: 959716 - protein, 119 aa, Homo sapiens
PRGDVSLYATEYGQVAKSTTTQCKKNKKKTDQLTCTSTPNTSYGPVGTSERTGYTTLTTFRVTARDEVSRRAVYLLRASSYNDDCQAAKVEAFLVQQGLQNLNFQDRVQRNYTVTMPES

SEQ ID NO: 959717 - protein, 46 aa, Homo sapiens
MHYSPDASVDPSEEIEASVEDAPTPEKPRKVHAKWILDTDTFNLNW

SEQ ID NO: 959718 - protein, 70 aa, Homo sapiens
MAHKRPENSPTKASKTDDQAENGNGESWRSPERTKASSCPSLSHVTGATESPPDEPAHVERDRVGRRSGP

SEQ ID NO: 959719 - protein, 34 aa, Homo sapiens
APDYIAPWPARRAGRPGIAQNLQDADAQAQVPLD

SEQ ID NO: 959720 - protein, 113 aa, Homo sapiens
SVLATRVLLEPHDITPVNVLGIVLLSLVLFSERIEAFFDRDAECTALLSDSRKPRMNRSLIVLLAALFTQGAWAETHSIKAFLADPVTVLDEQGKQQRELAKKDAPTQPLPVL

SEQ ID NO: 959721 - protein, 122 aa, Homo sapiens
KRHPHLIHHEPHEEEESPHSTSTIQATPTSTTEETVYPARNTWFGNRLALKDIATTPRARLPFHNSGQLQTSASYPAIQMQRKDTHHSPVGQFLVLHFFNTISHPNGTSVIKTGKNGWICDS

SEQ ID NO: 959722 - protein, 92 aa, Homo sapiens
MVDGKRRRIWAYGIQLDEKILTDYAPYPILPTDVYFVCLTLVKSSPSSENVRAIRGILSVRQHCPNTPIILVGNYTLILGDDKDTIEKLKEK

SEQ ID NO: 959723 - protein, 69 aa, Homo sapiens
MGIFKCSLGMNIHIWGINVHFWAFEFSFQQLVQLHHTSPFTLCTLHSSTSTFMHCRSYGVLTTHIEDSV

SEQ ID NO: 959724 - protein, 77 aa, Homo sapiens
MVEQHQVPVGFFSQAGFQFGNAGYFDQTYIGAKAQDYGLMQCAAKQRVVIGNQDFVCGHWLNDPVFYGSSDGFRVHQ

SEQ ID NO: 959725 - protein, 66 aa, Homo sapiens
PVKAHPVDAHPVVVRDKALIEADEVAAQGRHEHLDLDRVFRVGDELDLGVDVPQVVGGIFGDGNSQ

SEQ ID NO: 959726 - protein, 70 aa, Homo sapiens
LLATPLKGGSKTRHADGPEADAGIEEVELTAVDRITATPPKKTAAIWYQMKLYLKVRTGLSSEHRHSVNA

SEQ ID NO: 959727 - protein, 60 aa, Homo sapiens
MHDAVSILLILPQRLRYDLNVTSSIAPDAKISLSQLSVSAHSLRAISNFECIIRKALGIL

SEQ ID NO: 959728 - protein, 74 aa, Homo sapiens
QLFAIRRTSNNSMRFCPTICVRWFTESITACHAQTPKSYGYRRVPNTKRDELCYILSMGIKYDMYPTAWPLTLP

SEQ ID NO: 959729 - protein, 117 aa, Homo sapiens
VDVAVLVITDPAEYPAISSGVFFFLSQDVFEDATGSRVFVTDVLDYLAVAVYRIRSATRSSYTISFKVLPATLLRMGVFRQQVGVELRLAAQLHDTLGQFVGVLGFLGRMFQELIGS

SEQ ID NO: 959730 - protein, 49 aa, Homo sapiens
MLEGLAGRYRRIPEPVRRDRLAYLFVPAVIVNRCWSVRPGLLNTGVARR

SEQ ID NO: 959731 - protein, 78 aa, Homo sapiens
LLATPKTAALGAHIVDRIRELLGENGLSIAELTELEPPSPNGLIQSLTLLLSGSGFSTLINRVTARNACSGHQGMGGN

SEQ ID NO: 959732 - protein, 36 aa, Homo sapiens
FNLGAPLMIIICLGALTWAGTHLLDPYRPIDRIKPG

SEQ ID NO: 959733 - protein, 41 aa, Homo sapiens
AVVGVHIQAQGHFPAQHLATQGGAFQHIQGAETRSRRVKYG

SEQ ID NO: 959734 - protein, 109 aa, Homo sapiens
YPDLATPLLQQSPDLHLMEAKQRTQIDISLNALTGSEMSAGETIFEYPNCQFPYLRMHKNVERKESIPRNHEEIFLFFDRYFPFAVKHLVVNRRNRKSTPCATTGERSD

SEQ ID NO: 959735 - protein, 32 aa, Homo sapiens
DGRTGAPVQPLGEWDPVKIDVRDRSDLRFHVP

SEQ ID NO: 959736 - protein, 55 aa, Homo sapiens
MAATSIRSNRMGKESQGFTLIELLIVVAIIAVAVPAIGVSRCTSQPGAEGVSGAD

SEQ ID NO: 959737 - protein, 37 aa, Homo sapiens
CGNFCTYQDLVELSASLLPMPSAEPVWLRWDASAVSM

SEQ ID NO: 959738 - protein, 44 aa, Homo sapiens
TLERSLLLATLLLATLLLATFLLATLLLATRMMEGIEECKRSVT

SEQ ID NO: 959739 - protein, 101 aa, Homo sapiens
MHTHWMVWVMARLPLINSEKPTAKIRIEIRYDTLAPTCAGIELRRPSSKPRLNNSNVMGPGLKVMVAQNNRKKRNEDRVNALVMASTLNKEKQQQQGERGQ

SEQ ID NO: 959740 - protein, 53 aa, Homo sapiens
  misc_feature (44)..(44): Xaa can be any naturally occurring amino acid
MLDLFLAGMIIIRPQISGMRGAHPRTRQQRADTWAECDGGAIPXMGRHFTSYT

SEQ ID NO: 959741 - protein, 102 aa, Homo sapiens
LLATPHTTGLDLGMIVNLGQLQHFTHFKHVDAIQLFAIQAEKQQSPGDSALPAVCAGLLNPSHLPCPDSYILGVRRVPNTKRHELCYLLSMDIKTTVSRHPG

SEQ ID NO: 959742 - protein, 98 aa, Homo sapiens
KAHPQVPDGVEVRGKQVAAYTWDDRQGKNLLVLAEQVGERDDDGTQSAFVYAAQYVLGGERPKRVWMLYDDVQHCEFDAGLRFDRAATKVTDLLGDGN

SEQ ID NO: 959743 - protein, 67 aa, Homo sapiens
MWPRFATVYRLESSPPPAPAPRYGPPITSTCDQRSPFTGSPGQCLRFVIQVDPIQTRGLYLRIDAGC

SEQ ID NO: 959744 - protein, 100 aa, Homo sapiens
CQSTRACTLFDLLRLLNENTPSVIRDMDEWFQDFPADAAWNVYSDYCVGNPDKANDSFSFVITLNHDTDENFSEYVSSVAPKDLKNTRQASEGLISYLNS

SEQ ID NO: 959745 - protein, 58 aa, Homo sapiens
YLFLVHASLSLWRRLVFSVYSCDAERQENGVNPGGGVCSEAEIAPLHSSLGEESETLS

SEQ ID NO: 959746 - protein, 70 aa, Homo sapiens
EPTGLVNHVCMMNSIKDRALLSYVTFQTRLVNSYLSLWEVDRPFKSIAQTSGSNKSEIHNVTNEPIPCQG

SEQ ID NO: 959747 - protein, 50 aa, Homo sapiens
RNREISREEKQNTEEKKLQQKSLLAEQWSDLLAHLENTHSDHFITLRWCD

SEQ ID NO: 959748 - protein, 59 aa, Homo sapiens
GTSLICILNIRTIMLLFTHALKNPVRPCIKPTVFVAFLVFGCSEFMLKIRMQRNACFLL

SEQ ID NO: 959749 - protein, 67 aa, Homo sapiens
PSYGTLLLATQEIHLLERVLRMGVAIVTSELNKAELYLAWTCSMQVHPFSIDHPSRCFYKLIGVHLW

SEQ ID NO: 959750 - protein, 100 aa, Homo sapiens
MGHAGHDGEPDSPRGCYSSRGLTAFCTLLMAVLAPCSQPEVPLHRISTGWTGGRQVRRPGTDLLQQAEVKGDSGHGYWRGNDTQVTFQRLKPYDIMIKDR

SEQ ID NO: 959751 - protein, 35 aa, Homo sapiens
MQTKAEKGKRERTGTQGTPGCTIDTTEYKPEYVKS

SEQ ID NO: 959752 - protein, 63 aa, Homo sapiens
RYLFLATPAALERKHLCTGDHAVYLGIDHHAADDSRQTRSSEQIEDRKVKAGPSQALARYTPL

SEQ ID NO: 959753 - protein, 110 aa, Homo sapiens
SEIFVPTSQGRHANHRFHTLETQRFQSQAVPRSLSQAVPRSLNQVVTRSLRPGCTKVPEARLYQGPMSQENTPRSHSQEEIRSLTKATSKFPEPGAIKSTETRIQQSSCA

SEQ ID NO: 959754 - protein, 67 aa, Homo sapiens
SIGHAQWLRLYPGTLEDKWVDHKVQEIETSHGQYGDTPSLLKIQKLVDVVAGVCNPSHLGDGNMRIT

SEQ ID NO: 959755 - protein, 68 aa, Homo sapiens
MQTRQRECHRMLETCEHYRRKRERGETDSRHTGEGQEGWTQKPQSYLGSSILLVLHFICFMMHDLRVP

SEQ ID NO: 959756 - protein, 118 aa, Homo sapiens
MRVLTRNVAVVQQAGPTLLGATDERNTVQQALNLVCSRISLGAAQVDAVQLRLVHFFQVPFPAGADHGEVVRCLVVGGRVERHISARTRQELGLTSGIDGEERGADGPWSAFGDYWNA

SEQ ID NO: 959757 - protein, 40 aa, Homo sapiens
MEDVESRACQKMVVSFLVCRVLYQTELMNDLGEVSCYPVE

SEQ ID NO: 959758 - protein, 119 aa, Homo sapiens
LPLIWPRHRAQRGMDAQLAKVKDPSLTPSAQVLAAMAERKESFAQFSLHQSEVHAEYFRKEPSAPEEQAHFEELARASLAQQAELEQNEVGDFDVFVGSYQASQHPHYSASLKTGFAIS

SEQ ID NO: 959759 - protein, 39 aa, Homo sapiens
MNGVKFLLFSSLVTHAAVLGCHVSPVPGFQPHAASLVYL

SEQ ID NO: 959760 - protein, 74 aa, Homo sapiens
PLTGHASVAEEISMFLPSVRTCKSQVPEIIVVRGFVAQALEDLAGGRGGDGDVGPADIGEVDGLALFRFCGVCH

SEQ ID NO: 959761 - protein, 52 aa, Homo sapiens
LTEHKRDPMQTQATGHAIGAGTCEHYRRKRERDEDLAPEHTVRRATKVGTRK

SEQ ID NO: 959762 - protein, 35 aa, Homo sapiens
IHAIQRLRSEIDHVKKQCANLQAAIADELSSVARR

SEQ ID NO: 959763 - protein, 69 aa, Homo sapiens
RDIQESQRPRREQDPGGLISQHSRLSQPGYGTSLSNKNIINRQKQFIETNLKGINSPGPKRSMAGSHEY

SEQ ID NO: 959764 - protein, 50 aa, Homo sapiens
TDTEGHGNHADRRETGKREEERNQDKLSGYTCPNLLAIACVTRRQYPTRL

SEQ ID NO: 959765 - protein, 39 aa, Homo sapiens
ISLSNSFTSYFGHQASWLKVGIKGQHHCFGHKSYKRGQK

SEQ ID NO: 959766 - protein, 72 aa, Homo sapiens
KASRFAGSSSAAPPSGGAEVPAGVWIGWTRPCHGLQLAMDSSSCPNGSSGESWGIERHEGPMKRNMEQSSLN

SEQ ID NO: 959767 - protein, 71 aa, Homo sapiens
SEHKDSRDRLYKVPEPGCTRSLSQVVQGSLSQDDQGPMSQDASQFLSKDTPKFLCQAKQRYQSHVLQRSLQ

SEQ ID NO: 959768 - protein, 35 aa, Homo sapiens
IGLRLCHRVSSPAFMLSWDCSSISRPWSVRLSSVI

SEQ ID NO: 959769 - protein, 40 aa, Homo sapiens
TLSPSSSSSPSSLNATEHTVDRKATHAITNNEQLYRQQGL

SEQ ID NO: 959770 - protein, 43 aa, Homo sapiens
MATVYGRCRREAQDAEDIRHDLEQEIASYRRLHRGPETPRMIG

SEQ ID NO: 959771 - protein, 66 aa, Homo sapiens
DTRSGPETLRTDYLTTGWNSPGYLSPTVSIKTQLSGEHTYRLGPSVYSYIESFASLLPHLGGGNVY

SEQ ID NO: 959772 - protein, 95 aa, Homo sapiens
ADPCLWSVGVLDNSPREDVRVIPLSENPPGAGKMVYTRGRNYRPLTGQLPVRILQRPGKKSTKLGGAHVNVGLVIAAFANQLFKQDTFLKVTSTK

SEQ ID NO: 959773 - protein, 127 aa, Homo sapiens
IRSECRAPLNSNVRRRKLQIPVRTSRSICVAPRPQRLHPPTSDGMARLRAVVAIVGGLLAPALDAHPASNFIIEVVEQHMLVLGLSHLLPSRTAKRLSALPHPSVDDRLMKRLVDGPVDVELPDVNR

SEQ ID NO: 959774 - protein, 161 aa, Homo sapiens
SRDPPEPSPIGRLAGLVLVFDFHQVRWAVVLEPGLDAHAGQALGDELQLAVLAAGVVHLHQGAVQRQGGGVEVPWVFGRRVHEKQRKGMVVGFAHQLQGFGPGFFIDDHRQHLCREERPVVDRDDVDLVRQVLPRQGQASIGRGGFSVFGVGIIVEVGIWK

SEQ ID NO: 959775 - protein, 119 aa, Homo sapiens
  misc_feature (13)..(13): Xaa can be any naturally occurring amino acid
DPERRMLIEALGXSAGAEMILKASLRGGAAHLGAHLLKAENEHVELHEVRGFMAGDVKGAMKEAQAVAQGTRCKQFLFSVSLNPPEQEPVSVETFERAIEKIEERTGLKGQPRIVIFHE

SEQ ID NO: 959776 - protein, 42 aa, Homo sapiens
MASITVYSDYVCPYCLLAEQVLSNVIGDRDIRIAWRAFELRP

SEQ ID NO: 959777 - protein, 55 aa, Homo sapiens
VYTYVAIKCVQKFDSYLYCTLRMDWASSFKSLNIKTTISSIHITCTCTEPHTGYR

SEQ ID NO: 959778 - protein, 44 aa, Homo sapiens
MRQKFDLFLICTLRMDWEVLLTSLNIKTTISSIKVTRTVFGSSF

SEQ ID NO: 959779 - protein, 68 aa, Homo sapiens
MEPTHRFVASVPEDTCTLTCGAKMGNGTEEDYNFVFKVVPIGESGVGKTNLLSRFTRNEFSHDSRTTI

SEQ ID NO: 959780 - protein, 46 aa, Homo sapiens
VEYEVLERRLLCDCECVRSFEFAQAEKLLRILARVRLLKYTAPVKP

SEQ ID NO: 959781 - protein, 49 aa, Homo sapiens
RSADRLGTAVLHRIKGLGFLFVNTTDVANVMGKVRAQGVVANELWFHVH

SEQ ID NO: 959782 - protein, 73 aa, Homo sapiens
MFGVRSKGMREASQTYVRRYSGQMRPKLSFLAIKKNAMSGANPTPHHPENTIPMEHGDGSIMLWGCFSSTGTG

SEQ ID NO: 959783 - protein, 73 aa, Homo sapiens
TYVYAGPSHDERCPCRHHVDSGGNKPTRGYRPRFLAPKFTGKKDAWTRQVGCELLQLLLLTAPYQFFFSSLTF

SEQ ID NO: 959784 - protein, 104 aa, Homo sapiens
CRALECYGVVSAHCNCHLLGSSNSPPAAFQIAGIPAVHHQAQLICVFLVESRFHHVGQAGFKLLTSSDLPTWASQSAGITGVSHRISFFFFFFFLRKAKRGEFF

SEQ ID NO: 959785 - protein, 44 aa, Homo sapiens
PVAKKGGRSVAGASTSHDNRHIDVVGYPPSVDGLLCEGQRRASW

SEQ ID NO: 959786 - protein, 111 aa, Homo sapiens
MDEQSVKITMLIQSLLWLEYLPEEYSRVCWGPRPRPTPENSPGGPGPLVSETTSGPGSPHRSGPGAKNGPFFLKRLNIWELFPTYRKIGKIKIHTNTYILPIHLLSRFICC

SEQ ID NO: 959787 - protein, 65 aa, Homo sapiens
IDRSVYGEHAPATTEHFKNYLRLVARACGPSYLGGGGESITQVSPGGRGCSELRWYQCTPASTSW

SEQ ID NO: 959788 - protein, 40 aa, Homo sapiens
MTTRYDADVLQLQIHLAHHLYSLKESPSERVQMTHGHAAR

SEQ ID NO: 959789 - protein, 135 aa, Homo sapiens
DKCEFANCAMRRYYTLFVTIRANAGVRELKAGIWRPFSRKAGRLIRVRREKTRRRDGKKLEEFEEHENIRYGPAELPEPVRGGDRTGIIPHLGGEYTLDSGVVHRWGKENWFLLENIGDVMKESAQAAFSYVRSI

SEQ ID NO: 959790 - protein, 88 aa, Homo sapiens
EAAGPEGECWRPEFKLSTSIRRLLPSSAGLDELPGADCAGTLTEVLRLINIVVSKELLDDEEYEEIGEDVAVRVQSKYGVVESIEIPP

SEQ ID NO: 959791 - protein, 48 aa, Homo sapiens
MVSPPYCRHRLSYGTKPRTSVGLTVRLLEKMPATGALCSISVRPVEVS

SEQ ID NO: 959792 - protein, 98 aa, Homo sapiens
WVFYRISGMEVAWKVAIEVALGVGFGGCFAGGFVDFGAVVAAILTGNEKITMQNLNDRLASYLEKVRASGGGHADLEVKIRDWHLKQSPGSPERDYSP

SEQ ID NO: 959793 - protein, 30 aa, Homo sapiens
  misc_feature (16)..(16): Xaa can be any naturally occurring amino acid
RACRLLAAGRLSTSYXPAQSLVLLGPSQLP

SEQ ID NO: 959794 - protein, 46 aa, Homo sapiens
MTAQSMADGCHISDTVDAGRCQIIPTISPGSCTLTGEIVGTEATKF

SEQ ID NO: 959795 - protein, 56 aa, Homo sapiens
SDSGLPQVLPDKVGITTAVYRDDLKNICYETDVSSAISEKTGCIRSRFKRVRISTT

SEQ ID NO: 959796 - protein, 67 aa, Homo sapiens
TTEVHAVVFVYDMTNMASFHSLPSWIEECKQHLLANDIPRILVGNKCDLRSAIQVPTDLAQKFAEST

SEQ ID NO: 959797 - protein, 34 aa, Homo sapiens
IPIYVWKVSGSCSEISPMAIILPLQTEQRSFTYT

SEQ ID NO: 959798 - protein, 102 aa, Homo sapiens
DAQVTNKQSTVDDTINGKRKTPKNIMRKLRMKEREHRDEERQVSEAEENGKLDMKEIHTYLDMLSTCASVAAADRGLLQMQTHPFCKKASLHPGQNGGRGAS

SEQ ID NO: 959799 - protein, 89 aa, Homo sapiens
LLRSHSRLPGIRSQFFAAPVGHLSLMRVHGTSSDVLGATARKVGWHQIHKKAFSTSIERLSMAVNPGGQSLQEAEIAPLHSSLGDSQPP

SEQ ID NO: 959800 - protein, 84 aa, Homo sapiens
MGDKAITNDITKNLYHLRALVTACMNFLCNSSGSCFFIYIIKAQYHKMHELLIDKYSCNLELESVPRLTADGTGPGTIPQKQPS

SEQ ID NO: 959801 - protein, 93 aa, Homo sapiens
  misc_feature (46)..(46): Xaa can be any naturally occurring amino acid
IRCGLMCQHLLGSQLEYFVAIKRGFPFQPHGAWWWPMNVSVCSDEXPKGTYFQICVHCSGLCMALHVCVSVSVYVEVSTSYSDCKVVLLHLFP

SEQ ID NO: 959802 - protein, 82 aa, Homo sapiens
EYRPTRTYWEPELCRTRPEAVRLVSDFLPSTLTLSITRCMMTIFCLLLKSTSRIGNAPCTAGTEPTNSYLALPPCFSLQELP

SEQ ID NO: 959803 - protein, 114 aa, Homo sapiens
LTIEGHASVHLVGWHWLLDTFGCLGLRHFEGGRPHAPCGWHGSLVLGMHWFLTVEGCAMLFHLLPANPEGAGTAGLLLLLRQLLLQHLLAPDLKRGNTPVFVPFNWSGPYSRVF

SEQ ID NO: 959804 - protein, 46 aa, Homo sapiens
ACWSSLAGSPVSSPDSSPYSSYLSLSSAAGFTILLSDRNLRHHAFF

SEQ ID NO: 959805 - protein, 45 aa, Homo sapiens
EFCRDSPPSWAPPGLCPGNPPRTHQGAAAFSSKFGVAAPMSLPSC

SEQ ID NO: 959806 - protein, 103 aa, Homo sapiens
  misc_feature (79)..(79): Xaa can be any naturally occurring amino acid
VPEMTRAERECDEAWMTGSLGFSRFWPQHSLSVSRSRGTGGLGGACGGAGFGSRSLYSLRGSKRISIGGGSCAISGGYXQQSRSAAIALVAPGVDLVSVVQTG

SEQ ID NO: 959807 - protein, 64 aa, Homo sapiens
MGAHALTFWAGSFVLADTDVVRPAQRWMWACDEAPGLGAPSISLAVTDAALLHTCSWDTAIVSR

SEQ ID NO: 959808 - protein, 104 aa, Homo sapiens
DPLTDPPGPTLRRKALLCLKLACGSHSAASTGIVNSVAVMLALSTVAVRILSCSSSIVLYYWLYLTGGPRGLPLVPVTDLHLQLSVCLLQGTHLVQVRDRLETG

SEQ ID NO: 959809 - protein, 119 aa, Homo sapiens
MCVYLTAVIRKHELLQIGEYNYITRIMELTTQRRCDRAWVCNTHADFADKCPKPEMLTIRFLNAENAQNIKHKVRRMQDTQIDRESKSTGRIRQNLIMPEEVRGKARRSLGDGGAQGGC

SEQ ID NO: 959810 - protein, 92 aa, Homo sapiens
MHSTANCSAQVAPHGDSYSTNGSSGVQISSWSSSFKVHCLWTTFTSCLVFSLGLFAGSDLLNGHGPQAPLCACLGLLVILMLARGLNATYER

SEQ ID NO: 959811 - protein, 47 aa, Homo sapiens
YTIPRGSQHTTHVTVDVRESIRRAQVARLKGAARLAPAAGWLAEYLE

SEQ ID NO: 959812 - protein, 44 aa, Homo sapiens
GSPVHRSCLNYPTVLIGLRIPSDFRFVALTEPHSCVNCVRSGPS

SEQ ID NO: 959813 - protein, 42 aa, Homo sapiens
GVWHENGCYYSVAIWLIEESAMSDFTSVCQLPPIELVIIMPH

SEQ ID NO: 959814 - protein, 76 aa, Homo sapiens
SSYRLGSRHDLCFVVLLLPAPVSFIYVCTSLVISACDGACISVMASPCITRQYPLVNPQPGSIEHEVRGFFVNGLH

SEQ ID NO: 959815 - protein, 63 aa, Homo sapiens
WSPPIALITSATVPHLPRLLPLAAAPALFHHGEARPGPNLAHDMTALLGAKNRAGPRSSNSLN

SEQ ID NO: 959816 - protein, 102 aa, Homo sapiens
  misc_feature (63)..(63): Xaa can be any naturally occurring amino acid
RLSRSPARSLPSGVPAEITFHVSMMGCPIAPHPEMGRHLPSSTIPIVGIVAGLAVLAVVVIGXLCVRYCHVLGRRALVEKEGATLRLRPATVPRALMCSLTA

SEQ ID NO: 959817 - protein, 89 aa, Homo sapiens
SHDPGTIFAKISHPSYSRLGVKTQRAVRSGGILGMWQPIPVTTTLLLQNLCSTNSTLNLAFQVVRWLRDCVSLITNVLAFVSIFQHLDI

SEQ ID NO: 959818 - protein, 76 aa, Homo sapiens
IAPARLAVADLQRSSSGDLMLALPPERGRPIINGLRRAAAMSSLCSTDCSWTMQDRRSREVKVALPHHGSNEPLDT

SEQ ID NO: 959819 - protein, 43 aa, Homo sapiens
DLSRIPGTIFAERDSVSCWLVPHPRSGLRSPFFLERVHAGVQS

SEQ ID NO: 959820 - protein, 44 aa, Homo sapiens
MVDLYTDPRRFCTVHALCVFVDSTSLAKEFEFSIASVYCTYPLI

SEQ ID NO: 959821 - protein, 37 aa, Homo sapiens
NCPIVPESWWLTPATPRTLREAKAVRSLGSGDSRPLR

SEQ ID NO: 959822 - protein, 45 aa, Homo sapiens
MSTGSPSVYRVLIGLIYDNFCAIARLIGTKTCRQVYEFRVKESSI

SEQ ID NO: 959823 - protein, 101 aa, Homo sapiens
MARTACDEYQELMKTKAEPWNVEIATYRKLLEGLSNARLSGDGVGPVNISVVTSSVSSGYGILAVAMAVASCGGLGGGLGGGLAVGSSGSYYSSSGDAVRI

SEQ ID NO: 959824 - protein, 53 aa, Homo sapiens
MFCLGQTTRSSAHRPLSLLVVQREDKVHLEHKQLPTPTSGPGAGMGIHLTLHA

SEQ ID NO: 959825 - protein, 103 aa, Homo sapiens
YSLVLSALTEAFRHSRCRSWHLRSKESFRCFWMFDASSFTDCSSSICLRIFFPEHYKCWAPIFFSPFGVPEFCSISTIKLAALGFGASVAAMVSFPPQWYHYF

SEQ ID NO: 959826 - protein, 36 aa, Homo sapiens
  misc_feature (21)..(21): Xaa can be any naturally occurring amino acid
ANYEYCPRCCKYCLSPVLAAXLLPDFVRAMASPIIG

SEQ ID NO: 959827 - protein, 120 aa, Homo sapiens
HVEIEFDLIVSSVCPDCYLPAAHDHSEGSKPPSPVLPATPGETAGPETKGHLSSSACSQRRALGLCYREQQTHSIAVCSARLEDDVCRLLDGQTAASHRAEASPHGSASARTEPTSYAQT

SEQ ID NO: 959828 - protein, 65 aa, Homo sapiens
SSTLTDPRDVESPRGFLRYPALGLRRFCDLHDCLRTWDHDVLNLPILALLRPYACCSPPVTKRGI

SEQ ID NO: 959829 - protein, 93 aa, Homo sapiens
RNTLPDSPYRGACGFSVWRRPPPHCFYPSRVRAKGQPAIPFCMSARPGPIGAIDANVLRPSGALEECYVTVIDRHTYAVRFIPRDTGVHLIYV

SEQ ID NO: 959830 - protein, 59 aa, Homo sapiens
CSLSSCDWDSVYTPYTSNLRTFPLISGILTVAFSLFSLVDNLCADESQTSCLQSICAWP

SEQ ID NO: 959831 - protein, 35 aa, Homo sapiens
RAHILHTSIAHTSSRTHPAHIPRAHILAHTSLADS

SEQ ID NO: 959832 - protein, 60 aa, Homo sapiens
AAQINLSGDGFARDMRPIRVLGLTGLAQHRHIENCITPPPHCSAKRPRIYAVNARNRGRR

SEQ ID NO: 959833 - protein, 79 aa, Homo sapiens
RVLVDIDCWRVAMFSGILLRIVLQLTCRIYSPLKLHALERRALIRASLVVESVLKAVFAKDVFAKDVFAKDVCAKDVCA

SEQ ID NO: 959834 - protein, 105 aa, Homo sapiens
SSTIISPADCASILPMSSSLRASHDSELQGGRRPTPTIEWYKDGERVETDKDDPRSHRMLLPSGSLFFLRIVHGRRSKPDEGSYVCVARNYLGEAVSRNASLEVA

SEQ ID NO: 959835 - protein, 118 aa, Homo sapiens
NFSAIYTHTGSRIYDEKIAAQVHAMEAASISTLILTTHLASQGVHLLLRGTYFRKASSSLRFSICISRSALAKVSSSRTLRRPYDVGLHTQAQGLLCLKLGAEVHQRPDGHCQSVAGC

SEQ ID NO: 959836 - protein, 36 aa, Homo sapiens
MLQVVSPAAAEAEEGGVQGCYLLLTNSCFKCVFFWY

SEQ ID NO: 959837 - protein, 72 aa, Homo sapiens
MRLLERMQEAGHGELAGGLDLRVPSGLSSSCNLMDSPCNDSGNNRDSCLKLATGEDDDACDEQQQVRTTAPV

SEQ ID NO: 959838 - protein, 43 aa, Homo sapiens
CPLCPPTEPLSICLSMKPKCYQWTHRPRYSNMTYIDHCHAHHL

SEQ ID NO: 959839 - protein, 111 aa, Homo sapiens
YYGSCEHAVVTTTTFTGADGGSGRPVARLYVWKSGLGHTVENWMQVGAVEVARTDWILTIMFNSGRQHSLLTGLTVGCDRKTTDVKDNSEDLSRSSWKQEADVNGDGMELV

SEQ ID NO: 959840 - protein, 55 aa, Homo sapiens
SVAMFPTHGLKHRKINLLILILDPFFSNSYGRGNYVPFIVTGPNGHFGEVLTSSS

SEQ ID NO: 959841 - protein, 51 aa, Homo sapiens
SLRGDQDEDAEDHCHPQVIDKETRTLLPPSFFQAAGKIADIQTERAYQKQP

SEQ ID NO: 959842 - protein, 134 aa, Homo sapiens
MYTPEAPVGVCSRCSFSLPSIGSLCYTAQLDPLLVARTEGYFVSRVLALWCTGRVGSHLGLENECKVLLSGSSSQPMGEPERRWSSSGVGLLGGPSSPPTALAKLHLVQPVDGLPECWHLLVCSSTGVFPSRGY

SEQ ID NO: 959843 - protein, 60 aa, Homo sapiens
MILIFMDAGQPETVISNLHPDQTMPRIHGRCRPQSTEIGSTGSLQDVHDHTFMTGRCPGG

SEQ ID NO: 959844 - protein, 35 aa, Homo sapiens
AHARRELSWMVSTAPTDSVRTSTPGAHFTVFILYR

SEQ ID NO: 959845 - protein, 69 aa, Homo sapiens
LTSNSSYHGRPQAYSILLSGKDISLDNHYGKANVILEKLIEMTQQDKSPDGLGKTGCFPLFLVVVLRHN

SEQ ID NO: 959846 - protein, 47 aa, Homo sapiens
MDNSEERTHPPTTPEPQRPAMNTGPRTIQVKCLEERQRNGAKMSEQV

SEQ ID NO: 959847 - protein, 46 aa, Homo sapiens
HIRQNPKLLDEHIKKPNMEYNILTQDIYEKPVADMLMQTTVRPSPP

SEQ ID NO: 959848 - protein, 36 aa, Homo sapiens
ESARIIASQRGTSSSNSVYESGLIPITGPRKSPVFE

SEQ ID NO: 959849 - protein, 37 aa, Homo sapiens
TCQADSTKPHKLLSTESELWLSHVFPPDIRKHYEAIV

SEQ ID NO: 959850 - protein, 78 aa, Homo sapiens
RIIARKDQVVVSNTATALSASYYLSFIFFNLITGKLLYILADFLIFFFFFGKGIPPLWPKRDVQGHHHCTSRSPGPMC

SEQ ID NO: 959851 - protein, 102 aa, Homo sapiens
RLLIGRINAAELRLHSSSHSNSSNSKGSFGCSPGSQIGAHVGLKPGPARSQNSNPSLKLNNSPNEGTGIFLAHRSCLPGDRLLLDWHQAQMPTISFLLIFRH

SEQ ID NO: 959852 - protein, 48 aa, Homo sapiens
PRLFDRIVEKSSQSSDRRLDKRNTWCVLISQFGPVYFLIREAEFISEL

SEQ ID NO: 959853 - protein, 70 aa, Homo sapiens
YGPAQYIQQQNKKWYEFIREQIQQYGIIMRDRTFLLFVVAGILVAQMFMQLDLLTPGELRGTQLDIRYIM

SEQ ID NO: 959854 - protein, 49 aa, Homo sapiens
DPSHRVCGEHHNIHRQPRSCLTWIVLRQVRNGRSSQQVEDQGAVDGQQQ

SEQ ID NO: 959855 - protein, 85 aa, Homo sapiens
  misc_feature (73)..(73): Xaa can be any naturally occurring amino acid
CVEGWPNCRVSRQNAHRNRLPQRMLARMDARWHLHHVGKSESHGQAVVANVDHILACLQTVQRFLNSAARFRXTLCTQGFFSCNR

SEQ ID NO: 959856 - protein, 71 aa, Homo sapiens
DDRRRSVIEEVKRVQPVQACVSYKSAEDLPKVRGGLGVSIVSTNKGVMRIVLRALPGVGGEVLLHCVLEGG

SEQ ID NO: 959857 - protein, 65 aa, Homo sapiens
DSKIQYRVEQVLCRGVCCTLTKDDEDTERAALFDHTELTGRHDRIDRLIALSRFRAWWCMAVLSL

SEQ ID NO: 959858 - protein, 83 aa, Homo sapiens
GTALRAGWLAAPGGDGARHSSAHEVLSPLCRLVQRTGRLSVTSQASMTHSEVMACTNTMFSGVHDTRGELSGEPGGFRNFGKS

SEQ ID NO: 959859 - protein, 81 aa, Homo sapiens
EDPCRGVSWWAAENGCLVYNKTNVKFLASTTDCLQILAYGTKKASSSYWLVVDPTALVNIMRTYTLRKYYCGPPSRVLEGS

SEQ ID NO: 959860 - protein, 45 aa, Homo sapiens
MIEVSKVWIMLTNFSPSCIKGAQGSTRDCTGVDHDGYIEVIGSPN

SEQ ID NO: 959861 - protein, 108 aa, Homo sapiens
VTAYFSQLMDKLIEREDRNAARRIHIVQSGFDEPQKKPTVRCFLTPGVNSVTQRKTVVCPGCCRRKVVTSTATVHGAAVENAGPLSATRGEFPLWPLNPLGFNGYGRE

SEQ ID NO: 959862 - protein, 40 aa, Homo sapiens
RVRVGYFVLVRVGKRVDCSEKNISAIGLVEVAMRVIDRAQ

SEQ ID NO: 959863 - protein, 38 aa, Homo sapiens
LVDGYRNRHTKSMHTPGMRRAIICHLSCPAVRFRVESN

SEQ ID NO: 959864 - protein, 74 aa, Homo sapiens
CVSSVPVCWLFAHGDDEADFLVTYCDRQESDRRSTSSGTGAPNSGIAVVTDDYPKEILQATLGADYRALAQLKG

SEQ ID NO: 959865 - protein, 49 aa, Homo sapiens
  misc_feature (26)..(26): Xaa can be any naturally occurring amino acid
  misc_feature (37)..(37): Xaa can be any naturally occurring amino acid
IDDNLKKLYSKATIEKNDAIRTEKNXNSKRIDAPARXSGERLCRYELES

SEQ ID NO: 959866 - protein, 177 aa, Homo sapiens
  misc_feature (92)..(92): Xaa can be any naturally occurring amino acid
QKALALDPAGSGVRSSRRDLVQLLDHLRHLVTFDHLLFQAVEQAVALWVTHAETRKYSAGQGFLVFVDIRRVQQLVQIKLVVEHQAQVDLAXGLEVFVDRAFADTHGIRNHLDGDAVFTLFEEQAERGVENFLLTAAKFTDLTGVLCAGGKVCKGRKIGRVAQGHGYVGLRFTPKRL

SEQ ID NO: 959867 - protein, 40 aa, Homo sapiens
RISQRRLVTTPIRPTAHRGGKKVVDLFGVQIYSLVFQLVT

SEQ ID NO: 959868 - protein, 89 aa, Homo sapiens
LEDPEVHRVKHQPTDEVDLHWGSVIKTQNIAGALKPTVILVDYSDFGGKAATGIRWYVWLEVRDLVGNCLDGLGSAKRGRVSVNPWAST

SEQ ID NO: 959869 - protein, 37 aa, Homo sapiens
TQRDVPLRTYWITREQVVTYCYVLCMVSARTRDESDF

SEQ ID NO: 959870 - protein, 123 aa, Homo sapiens
SHRVGTVPWLRSGANSICPGRSSGWIPVICTVAAGNPARQRVIILVDNDRHRIVAAGEREGQGEAIFSDAAARFVDDLEFRTITTVIDEFIEALHQHEVRANCGPVLEKGWHSTPEADGTGGK

SEQ ID NO: 959871 - protein, 65 aa, Homo sapiens
  misc_feature (14)..(14): Xaa can be any naturally occurring amino acid
  misc_feature (42)..(42): Xaa can be any naturally occurring amino acid
LSEALALDQQVRRXPKKVFEARSCAAPRHLLAPPVVGPLTTXLFFQAVEQAVALVGGVPKGQCGN

SEQ ID NO: 959872 - protein, 113 aa, Homo sapiens
MTNRDDMDGEAYAFALIRWLREAALQNAADDVHVVNGIQNPAYRPTGGNFFPFFPGIPVGGARIVIIHVNRKTRQSHRCLFLVCGGEKKASCCVSNIRNFTGLMNFPGLRKLG

SEQ ID NO: 959873 - protein, 68 aa, Homo sapiens
  misc_feature (6)..(6): Xaa can be any naturally occurring amino acid
TLDGSXHPRSGLVAGMKVQLGNTALMEAAALTTKVYKNVQSCWPLKLSIIYLAVDGVLAGLLSGLQTR

SEQ ID NO: 959874 - protein, 49 aa, Homo sapiens
AYVQQLRTNRCNAGVCALNGSYTSEVALIHMVKQELKNSDVFDPVTNMW

SEQ ID NO: 959875 - protein, 71 aa, Homo sapiens
RALAVATLEVVQRRTLYSSWGQVHCRPAHLLSFEAVEQPNDWVVITCAVEHRLDTNGRAHRYVFENNSVRQ

SEQ ID NO: 959876 - protein, 150 aa, Homo sapiens
TLAGSLSGQHESPGVRHLSSPPDACAVADGLVHALLDLRLGQPDFKGFGIREENGEKYLAYEFQNPMPVRELNIRGAHNQSNALAALALGHAVGLPFDAMLASLRTYAGLEHRCQWVRDLNEVSYVTMTPKPPTSVPALEAIAGLGADIR

SEQ ID NO: 959877 - protein, 97 aa, Homo sapiens
  misc_feature (47)..(47): Xaa can be any naturally occurring amino acid
SGYDFMARLLSISTNNLFPGVSLELEGPSDRQLNRVGHPHAVCYKVXLGLASSRVQPGPGSYHIQLRLGGDRFGPKSSNHSLYRIKLPAGEGWGTEA

SEQ ID NO: 959878 - protein, 72 aa, Homo sapiens
MKLTSSWKLVLFIHGDPQRPAEAGASSADTNTGAVVAGETLVTATESGAARPHLDPLPLMLPTSPCGGGWHP

SEQ ID NO: 959879 - protein, 100 aa, Homo sapiens
YKETRYGPRIYMKAGTSLTMLHYGQAHTVQPLDFSGLKEVRTRSVLDTMKNIHPIYNIKSLMIKRELAKAFVNVTTHKDWERLYATDSNTKNVNKTRVKL

SEQ ID NO: 959880 - protein, 98 aa, Homo sapiens
DPNTAYRDTSNYPPYSVKLGQPQTPEQGDIQELVRKDLPNFLKKENKNETVLEHIMEDLDPNADKQLSFEGFIMLIGEANLVPPHGERLHALLNLRVT

SEQ ID NO: 959881 - protein, 103 aa, Homo sapiens
IEVLSSAHINFTDASADEAMGQHTRCCNAWVVSFIGRTCGYRDFQDFLDALSSRKAANMLRNRAATQVAGQGIEFEWLQGHELRNPSGQYVYACYANTYAVVG

SEQ ID NO: 959882 - protein, 40 aa, Homo sapiens
  misc_feature (20)..(20): Xaa can be any naturally occurring amino acid
HRSPLPFSVKVLQSIHSIRXVDRHLGAAAIYLCANYYLHN

SEQ ID NO: 959883 - protein, 37 aa, Homo sapiens
DQTRLTVSYVDTSKLVFDGLMEEGDSNAALRVLVSSS

SEQ ID NO: 959884 - protein, 65 aa, Homo sapiens
KYIYELELVPCGGDEVAPISRAGRPLLTAILQWWMILLLPPVMHRPTWQTVAVNMSVRKPGSDGL

SEQ ID NO: 959885 - protein, 61 aa, Homo sapiens
LGPVHTSAGPGQLKVLGAPSVAVPDAQNTMPGVDFLIITILTGVRWYAIVVLICISLMISD

SEQ ID NO: 959886 - protein, 37 aa, Homo sapiens
IDSSWYHVGVDDRIRPVTLAHGVSCHRLALVTDAHVY

SEQ ID NO: 959887 - protein, 32 aa, Homo sapiens
RLELVPFTDFPYSAFYTLDQTYAKIHFTIIFI

SEQ ID NO: 959888 - protein, 46 aa, Homo sapiens
ELELVPRRIVSALSQASTSEYAAALFALFFIADYTIIIIINTLPIL

SEQ ID NO: 959889 - protein, 44 aa, Homo sapiens
TPSVAVITSPIHKLARAPCSRSDPGNGERLFEVLAPTSATLCAP

SEQ ID NO: 959890 - protein, 109 aa, Homo sapiens
VVPRLCPLYVLLESATECTEELVYQRLLGSGARVAGIYCGKDVKELGPEAELGLVGELCLLRKCFDEGVVISSAVQGGKGPLEAFHDFQMGMGAIEGQFHMCQREGFPG

SEQ ID NO: 959891 - protein, 58 aa, Homo sapiens
MRVFMILCILTPRSPGVPRSCFAIEALRKGTYERMFRWLVLRFNKALAKTKRQGASLH

SEQ ID NO: 959892 - protein, 75 aa, Homo sapiens
PRGARITLTGSAGAYLTRAGAVNPLRPIRDGDRGLHLFPMNEEFPVGAGHKLALIKSLPLEHTARRYYRWDGLGR

SEQ ID NO: 959893 - protein, 64 aa, Homo sapiens
TTYFRDSPGFTHSGLPATLTTKDMGQESTAFHSSSDATGTTPLPARSTASDLVGEPATFLQSFF

SEQ ID NO: 959894 - protein, 35 aa, Homo sapiens
YILPGGSAVSREEGRAPWRYLRFGESRLPPPRKYV

SEQ ID NO: 959895 - protein, 106 aa, Homo sapiens
TTYFRTRSKGPYRVFCSEHQVQALRQNEIRGGMLPCIRPLELQQLRVRQPCRPKLEGLCLRNTAEPCQRRVPDPCRLRVASPCRPRLAEPCYQRVADPCPLRAALE

SEQ ID NO: 959896 - protein, 33 aa, Homo sapiens
DYRASPTTYFRNFNTTFFDSRLEEETPLYATTY

SEQ ID NO: 959897 - protein, 104 aa, Homo sapiens
PLPGYLKRIATKAVAELPQFYLTLGRFPLDKSALNRLQVRSIQQTMARQIHQKRTPDFHDKYGNAVLASGATFCIVTWTYRATQAGIERNLSLVVRVTRGGGGT

SEQ ID NO: 959898 - protein, 90 aa, Homo sapiens
SPPHPEICPQNPLNPLVNLTRSPKRNGSLDTRKKPCRESKKFNTLAITAHSYSRGHINNRTYDLNVGLGHPDAAAAIKGSLVQRLKSYVI

SEQ ID NO: 959899 - protein, 36 aa, Homo sapiens
MLQKQKKEKVTERILEEKFYWTGGKLSNLEEGQFKP

SEQ ID NO: 959900 - protein, 105 aa, Homo sapiens
TPRVPCIPKTKEPCQPKVLEPCQRKTNDRCCTKMPKTKELMGSEPYHLTQLRCEMEQKTQEYQILLNVTTRLQQNIATYRRLLRGEDAHLSSKHASGQSYSTRGG

SEQ ID NO: 959901 - protein, 70 aa, Homo sapiens
LTLEQPRDSQFTTDLVYRLYEAIQNAAQSEVLGNDTDMLKKLLLLSLATDTHKTCNTQSYLLTINYRIFI

SEQ ID NO: 959902 - protein, 112 aa, Homo sapiens
KNPPPPRVCNHKWNPFEFQRVPFAFKQEEHLVNAELRRTARESSNFPTELVCSLIGLKPELVVEPGKGGRERGPEGPRAAGWRRKWSHPPPTPGEDPGDMLLSLAPGRGTEL

SEQ ID NO: 959903 - protein, 47 aa, Homo sapiens
MVCPEGPEERVPDSLLWDRLRERHRLPSTDAALFREAERDRDRPVMQ

SEQ ID NO: 959904 - protein, 113 aa, Homo sapiens
RASLPAPSFHGLTSRIITMSWFSKDFPNGVVTIQHPRKPFSPRHTRHLVTPITRTLTSHRTDSGAPLSEVCMGGSTWGCTLMTCFCPAALAPCPVGVGHLCVAHSCRPYILIM

SEQ ID NO: 959905 - protein, 80 aa, Homo sapiens
MRGAGDIAIKLPEAGGKGFTIMAADFGDLLQHGLPFDQRRRHYFWYRFSRGRSGNGAQLVDQLFTRGVIIQHIRQCAIRR

SEQ ID NO: 959906 - protein, 84 aa, Homo sapiens
  misc_feature (43)..(43): Xaa can be any naturally occurring amino acid
  misc_feature (51)..(51): Xaa can be any naturally occurring amino acid
  misc_feature (69)..(69): Xaa can be any naturally occurring amino acid
  misc_feature (82)..(82): Xaa can be any naturally occurring amino acid
PDQARQLTKAMMRKAKASRLVTQRDGEVQNLDSFISKDPIQKXPQMNIERXKEKKGYTIGMPQANGHTXPCGSQGGRKQGFXNL

SEQ ID NO: 959907 - protein, 73 aa, Homo sapiens
  misc_feature (15)..(15): Xaa can be any naturally occurring amino acid
  misc_feature (34)..(34): Xaa can be any naturally occurring amino acid
  misc_feature (52)..(52): Xaa can be any naturally occurring amino acid
  misc_feature (55)..(55): Xaa can be any naturally occurring amino acid
  misc_feature (72)..(72): Xaa can be any naturally occurring amino acid
TSLKTQRVILNLKVXNVNSLVIEQNQMNKAPKMXRRTYKAHGRINPNISSPXHNXMTPTEKEQIVPKPEKEXA

SEQ ID NO: 959908 - protein, 31 aa, Homo sapiens
  misc_feature (25)..(25): Xaa can be any naturally occurring amino acid
MAAYLQWRRFVFFDKELEIPPLSYXGAAPGA

SEQ ID NO: 959909 - protein, 41 aa, Homo sapiens
NNNPPPPPERKSQAASAVMWATLPLLCAGARHMDLAGCGAA

SEQ ID NO: 959910 - protein, 43 aa, Homo sapiens
  misc_feature (28)..(29): Xaa can be any naturally occurring amino acid
  misc_feature (38)..(38): Xaa can be any naturally occurring amino acid
EAEAVAPCSAAARAVAPDLFVFAAKTKXXQRRLTSAAXSLPLS

SEQ ID NO: 959911 - protein, 44 aa, Homo sapiens
GVALSAGCEEGGSGQAIAMAVAVAMAEVLIGSVPGPAEDLALLE

SEQ ID NO: 959912 - protein, 41 aa, Homo sapiens
METHISCLFPELLAMIFCYLDDRNNGQTAFLCTAWRDSAYH

SEQ ID NO: 959913 - protein, 36 aa, Homo sapiens
  misc_feature (31)..(31): Xaa can be any naturally occurring amino acid
VWNNNLMLTVALTESQAQAQIGPWPCFAFEXTGRQG

SEQ ID NO: 959914 - protein, 108 aa, Homo sapiens
  misc_feature (56)..(56): Xaa can be any naturally occurring amino acid
  misc_feature (59)..(59): Xaa can be any naturally occurring amino acid
QSPELGGPETGRTNWGTVAPVSKWSLGQSEARTDAAPPTGNGAEGGGGGLRGRGGXRGXCPPPSPSPTPTAQRGPLQGCHTMSCPPWDTSEYKTEYNKKQHGETGAKK

SEQ ID NO: 959915 - protein, 33 aa, Homo sapiens
ADPKWELSRARLTLGKPLGEGCFGQVVMAEAIG

SEQ ID NO: 959916 - protein, 43 aa, Homo sapiens
  misc_feature (28)..(28): Xaa can be any naturally occurring amino acid
RKKINMHLFDTVILIHTVMARPHATRDXCAVRGRGPGTDGHMA

SEQ ID NO: 959917 - protein, 62 aa, Homo sapiens
  misc_feature (33)..(33): Xaa can be any naturally occurring amino acid
  misc_feature (35)..(35): Xaa can be any naturally occurring amino acid
NNPPPPPPLGPILYSSFWPGEAHDLTCRRPLRXSXLYSQDSTHWQKPSKETLTDLAGSRQAR

SEQ ID NO: 959918 - protein, 40 aa, Homo sapiens
  misc_feature (28)..(28): Xaa can be any naturally occurring amino acid
VKAVVSCDRATALQPGQQSETLYQIYGXLDGGYDQVCSLE

SEQ ID NO: 959919 - protein, 97 aa, Homo sapiens
  misc_feature (35)..(35): Xaa can be any naturally occurring amino acid
SVLGTEISPELVPARPGEKIQSTQAKIGPYELQDXTLYHLLRHGMRPSRIIFLSHHAWRDASVGSWPPGFRDEDRHSYDLSAIKDWTRLFLRRFVGN

SEQ ID NO: 959920 - protein, 132 aa, Homo sapiens
EPGDHEGGVFPGYLGAHLAGVDEFSDQVCPLGAQHVQAGDLSVTADDDETIDPVFEEISDSFQAPRTFAHPLATEGSDHGAATVEDRADVVPPEPTDAIATIDHSLVALVYRIDLGSHTYAERTTARTAAFM

SEQ ID NO: 959921 - protein, 51 aa, Homo sapiens
GLSCVPKILVISRLSNKSMVSQSEPKGNGNINKRLPSIVEDEEEEEEGEEE

SEQ ID NO: 959922 - protein, 82 aa, Homo sapiens
QNVSLRRGLLLSRNECVQVKGLVQIQRLLKLLASSFFLLDWSGQCPPNANQCTLIPVSVSCSTVFLISIALQPRRSSFVTIN

SEQ ID NO: 959923 - protein, 79 aa, Homo sapiens
  misc_feature (69)..(69): Xaa can be any naturally occurring amino acid
PVVHPTLMKVALQGEDLRELRRHVHADSTDFLAVKRPSQCVFPACTCTCFFFPSEQEGAAGGERPVPKXPPQEAEQLSH

SEQ ID NO: 959924 - protein, 37 aa, Homo sapiens
QSMPGAAGRRCPDRSPPFGPDFGSTGFFYAPEAREHE

SEQ ID NO: 959925 - protein, 56 aa, Homo sapiens
MVVEHPEFLKAGKEPGLQIWRVEKFDLVPVPTNLYGDFFMCDVYVILKTAQLRNGN

SEQ ID NO: 959926 - protein, 39 aa, Homo sapiens
  misc_feature (36)..(36): Xaa can be any naturally occurring amino acid
TSMYGKGKSNSSAVPSDSQAREKLALYVLLIICSMXELR

SEQ ID NO: 959927 - protein, 49 aa, Homo sapiens
  misc_feature (30)..(30): Xaa can be any naturally occurring amino acid
ESLSCARAPREPTQHALRAHWFPPAAVVIXVPLRSRRCRGFMVLCVQGP

SEQ ID NO: 959928 - protein, 114 aa, Homo sapiens
  misc_feature (1)..(2): Xaa can be any naturally occurring amino acid
  misc_feature (46)..(46): Xaa can be any naturally occurring amino acid
  misc_feature (48)..(48): Xaa can be any naturally occurring amino acid
  misc_feature (61)..(61): Xaa can be any naturally occurring amino acid
  misc_feature (112)..(112): Xaa can be any naturally occurring amino acid
XXGKGPTEDGPHPASSPLCGAPSHPQTPFPFRGEAPRPLILSCYLXSXETQEVSCALLQAXQPAKGRATAERVGATDTRSGEDTEKTLPRCQDPRGGGTVVVTGLFAGPGEXVA

SEQ ID NO: 959929 - protein, 97 aa, Homo sapiens
  misc_feature (35)..(35): Xaa can be any naturally occurring amino acid
  misc_feature (41)..(41): Xaa can be any naturally occurring amino acid
  misc_feature (44)..(44): Xaa can be any naturally occurring amino acid
YQIPESLKSITWQRLGKGNSGQFLDAAKALQDGLXSKEVMXGWXCRRMFFSDPKEGLKDVDTRKIIKAMLSYVWSTDRPDLRARVAISLGFLGGARP

SEQ ID NO: 959930 - protein, 85 aa, Homo sapiens
  misc_feature (4)..(4): Xaa can be any naturally occurring amino acid
  misc_feature (16)..(16): Xaa can be any naturally occurring amino acid
  misc_feature (33)..(33): Xaa can be any naturally occurring amino acid
  misc_feature (57)..(57): Xaa can be any naturally occurring amino acid
  misc_feature (62)..(62): Xaa can be any naturally occurring amino acid
FKPXNVEPMEKEFGLXKTENKAKSGKQTFNELXCQELKKVIEAYDVVLEVLDARDPXGWRCXEVEEAIVQSGQKKLVLILNKLGE

SEQ ID NO: 959931 - protein, 81 aa, Homo sapiens
  misc_feature (10)..(10): Xaa can be any naturally occurring amino acid
  misc_feature (28)..(28): Xaa can be any naturally occurring amino acid
  misc_feature (65)..(65): Xaa can be any naturally occurring amino acid
  misc_feature (67)..(67): Xaa can be any naturally occurring amino acid
TGLVACFIDXVVENLAGLKYRVIKGNIXKLTEKGGLSFKVDVFTLNAAFVLVDSVIVAFIEPLAXDXGIPQIKCFLNVVKI

SEQ ID NO: 959932 - protein, 105 aa, Homo sapiens
GGTRGAPGAAMRGPGPTPFPTPSPRKSWEPVFDPEPEPERDPRCGAVTPAEAPGAGRALRPGGCAAASTMGAAVSRRRALRSEAMSSVAATVRAARALGEVPSHR

SEQ ID NO: 959933 - protein, 163 aa, Homo sapiens
  misc_feature (83)..(84): Xaa can be any naturally occurring amino acid
  misc_feature (103)..(103): Xaa can be any naturally occurring amino acid
  misc_feature (105)..(105): Xaa can be any naturally occurring amino acid
  misc_feature (130)..(130): Xaa can be any naturally occurring amino acid
TRCTVLVNLGILRIVVTGGSGLVGKAILEVVADGAGLAGEDWVFVFSGDADLTDTVQTRALFVRVQPTHVIHLAAMVGGLFRXXKYNLDFWWKNVHMNDNVLXSXFEVGARKVVFCLSTCFFPDKTTYLXDETMIHNGPSHNSIFGSSVAKRMIVVLNRVYFQ

SEQ ID NO: 959934 - protein, 86 aa, Homo sapiens
  misc_feature (21)..(21): Xaa can be any naturally occurring amino acid
MAATAGAGLIAAIYAFLAPPXYEVSSVLRPAAINELDALNRSEIYTLPPGDALVRVGASLESYDTRLGFFRSNQKLFKAFEQPGRT

SEQ ID NO: 959935 - protein, 132 aa, Homo sapiens
RRPSGPGGARWYEQNDSLLGATRGSQYPARQNHALSISTVNDIVIQISTVDVSNFQLAARGWLDAFGNVHNSIVVEIQACYCVVGLWLHWLFFNAQCAAGGVELDNAKTLQDLIHGSQRLSLLDVWDMAERK

SEQ ID NO: 959936 - protein, 51 aa, Homo sapiens
MDGGCLVATSEQGLVGCGQGAVGGGPVRAGEVSQSASMLRIDGVAHSVPLG

SEQ ID NO: 959937 - protein, 130 aa, Homo sapiens
  misc_feature (59)..(59): Xaa can be any naturally occurring amino acid
  misc_feature (73)..(73): Xaa can be any naturally occurring amino acid
  misc_feature (76)..(76): Xaa can be any naturally occurring amino acid
  misc_feature (112)..(112): Xaa can be any naturally occurring amino acid
MGYCEELIPEYLNFIRGVVDSEDLPLNISREMLHQSIILKVIRKNLVKKCLELFTELAXDKENYKKFYEQFSXNIXLGMHEDSQNREKLSELLRSYTSASGDEMVSLKVYCXRMKEYPEPVFYITGETKD

SEQ ID NO: 959938 - protein, 127 aa, Homo sapiens
  misc_feature (50)..(50): Xaa can be any naturally occurring amino acid
  misc_feature (72)..(72): Xaa can be any naturally occurring amino acid
  misc_feature (78)..(78): Xaa can be any naturally occurring amino acid
  misc_feature (85)..(85): Xaa can be any naturally occurring amino acid
  misc_feature (88)..(88): Xaa can be any naturally occurring amino acid
GEVALIIRFSSPFDICCTSTAFFVIMSITGEKGGIQQVKGPFRSNSISLXNLFPSRVSCLHVQAQLLWFKSXIFRVGXLSNISCXETXADASTELQQVILISVGTFSLLSVLAGACFFLVLKFRGLF

SEQ ID NO: 959939 - protein, 142 aa, Homo sapiens
VYIVHFTQAAALERAQALTSVNFCSKEEEEAIAEALGGFRFTTGFGKTLSRLVRHGIGVHHAGMLPKYRRLIEVLAQDGLLKVICGTDTLGVGINVPIRTVLLTGLAKYDGVRTRHLKAREFHQIAGRAGRAGYDTMGTVVV

SEQ ID NO: 959940 - protein, 118 aa, Homo sapiens
VFQLVPLPTRREVDASEHRIAHHDAECARVRRDGTLIVGAERNLFRICLGSGVGECLPFVEQARVDLTDQLAQPLDDVFEFLGARFRRDGLSQRAVGVGEVAQDEALGPGESVMAYQL

SEQ ID NO: 959941 - protein, 107 aa, Homo sapiens
  misc_feature (6)..(6): Xaa can be any naturally occurring amino acid
  misc_feature (41)..(41): Xaa can be any naturally occurring amino acid
  misc_feature (67)..(67): Xaa can be any naturally occurring amino acid
  misc_feature (91)..(91): Xaa can be any naturally occurring amino acid
ALQGPXRVLATPSCRISRDIISSSCDRRGPWCFNKKETPAXGFFYFSCETRSRSLPEDLVSLFLPCXWRQSVQNRGPGVAQGRLTCHSWSXSRFQVQGFSSVLTPTI

SEQ ID NO: 959942 - protein, 104 aa, Homo sapiens
GRGRGWGKRGPNTEPGSYRGRREVASLGPSSLPGLRQALGVAGAPTRGSRSTLPGGLLWARGQSPGGGGCGPPETRRRRASAWVCGEPLMGVGRPDTLFQGGRA

SEQ ID NO: 959943 - protein, 38 aa, Homo sapiens
EVCPRAVFAGGNAAGRGVGADDQKTEWKSEVGPPARPA

SEQ ID NO: 959944 - protein, 126 aa, Homo sapiens
  misc_feature (35)..(35): Xaa can be any naturally occurring amino acid
  misc_feature (80)..(81): Xaa can be any naturally occurring amino acid
DNELGPHPDGGCYARLPALGLAPRTEKKKRCAVAXWDLASLRCSLGAFCECDFRPDFRKDLKSWVQGNLTACGRSLFLFXXMDKMPPGLMEVLRPFLGSSWVVYGTIYRKAIFIFLKWLPQLGPHG

SEQ ID NO: 959945 - protein, 34 aa, Homo sapiens
GPETKVREAFQPQEPDFPTAPPDLEQLRLTDELA

SEQ ID NO: 959946 - protein, 39 aa, Homo sapiens
LLWRPKWRLRRRQRPRRLAAQAAQTAAADLLYLALLVFA

SEQ ID NO: 959947 - protein, 103 aa, Homo sapiens
  misc_feature (30)..(30): Xaa can be any naturally occurring amino acid
ECGALGGALRTGRGNPSALQQQQKQKPSCXFFCPRIRCLEFVSPPHPSSRPSLFCHLTAPPQTAFPEETGRPRPEHPPLLGGRWRTRRLAAGARLGDAGGPAS

SEQ ID NO: 959948 - protein, 111 aa, Homo sapiens
  misc_feature (6)..(6): Xaa can be any naturally occurring amino acid
  misc_feature (58)..(58): Xaa can be any naturally occurring amino acid
  misc_feature (91)..(91): Xaa can be any naturally occurring amino acid
  misc_feature (110)..(110): Xaa can be any naturally occurring amino acid
MKPNDXVYSRGERENRCSDTSDPGRVQPHESSPCSPLGRDLVRGPRGPPTAAQGQTLXGSQNADCRGRARLKKRPTPGKIKITSFNVRLWXEISTPGCLSPSPSKSPLTXL

SEQ ID NO: 959949 - protein, 123 aa, Homo sapiens
  misc_feature (44)..(44): Xaa can be any naturally occurring amino acid
  misc_feature (46)..(46): Xaa can be any naturally occurring amino acid
  misc_feature (50)..(50): Xaa can be any naturally occurring amino acid
EGGPRQLRPHEEGRKMPAELLLLLIVAFASPSCQELSFLRRVAXLXEQTXFFFCERLALALAREQITAIIEVPAKARVEVDIFELQRDSQYETTDTIAMARRMEFCDSPRPASGASPSCEPWT

SEQ ID NO: 959950 - protein, 38 aa, Homo sapiens
  misc_feature (26)..(26): Xaa can be any naturally occurring amino acid
GELDVQWRENAEDGETEAVAVCPSEXLSGAGPEFDRSR

SEQ ID NO: 959951 - protein, 36 aa, Homo sapiens
  misc_feature (33)..(33): Xaa can be any naturally occurring amino acid
AVWAGKRCSSCQAVPRPARPEPRKKGAVPGVLXKQL

SEQ ID NO: 959952 - protein, 50 aa, Homo sapiens
  misc_feature (20)..(20): Xaa can be any naturally occurring amino acid
SGERGLFSFLVSRRGLGPGXMGMKGMKEKKGRGAAKTAAKMEKKVSKRSR

SEQ ID NO: 959953 - protein, 35 aa, Homo sapiens
  misc_feature (35)..(35): Xaa can be any naturally occurring amino acid
KLQALVFAAAGGSVRRTGDGPLDQNSRAQTSFQRX

SEQ ID NO: 959954 - protein, 34 aa, Homo sapiens
  misc_feature (34)..(34): Xaa can be any naturally occurring amino acid
DTAQAASSSKAHRHCRRCSQGCYEGRSGSFRLLX

SEQ ID NO: 959955 - protein, 183 aa, Homo sapiens
  misc_feature (9)..(9): Xaa can be any naturally occurring amino acid
  misc_feature (13)..(13): Xaa can be any naturally occurring amino acid
  misc_feature (70)..(70): Xaa can be any naturally occurring amino acid
GPARVSSQXYRTXEELRNMILTGPVVNAYMLVQIDNARLAAVDFRTKFVTEQALRLCVGAVINGLRRVLXELPLARGVLEMQIVNLKEELACLEKNHGEEMNALRGQVGGEINVEMVAAPGVVLCRVLNGMRGLIVKMAEIDHTDCLDWFFSMTMGLNREVVPNINLVPSDKVVIVSAPAPHA

SEQ ID NO: 959956 - protein, 40 aa, Homo sapiens
  misc_feature (27)..(28): Xaa can be any naturally occurring amino acid
MPLGILPHTEEYVFGSTPNHIMKSPLXXGCFGYDQRVSNF

SEQ ID NO: 959957 - protein, 37 aa, Homo sapiens
GGKDGGGQVLEAFATRSEAFIEHRGRCRRVFYRNDLP

SEQ ID NO: 959958 - protein, 42 aa, Homo sapiens
  misc_feature (33)..(34): Xaa can be any naturally occurring amino acid
ETKLPVPAALAPRVRPAPSRQAWTLRVDLGVHXXAPATPAVT

SEQ ID NO: 959959 - protein, 33 aa, Homo sapiens
ELEQYDPPELADSSGRVVRDKWSADMWRLGCLI

SEQ ID NO: 959960 - protein, 63 aa, Homo sapiens
EAGPQQILDPESPGQERNLSRTGSERILLTWIRKSRSRDRFFFEPGIKIAKSRIAEHRPRSGL

SEQ ID NO: 959961 - protein, 93 aa, Homo sapiens
ERWSGLRHEGQWSPGRGPGQRRELRLMAAVRFPDVRRPSTECFFAPHPLPLGCGSVPLSPGVLWRRLYPTLVPRQAGSRLWAIPGPGPWWAMY

SEQ ID NO: 959962 - protein, 35 aa, Homo sapiens
DFMFELSDKPLLPCYNLQVSVSHGPCNWFLFSDVL

SEQ ID NO: 959963 - protein, 84 aa, Homo sapiens
GDRPPSVSSVHSEGDCNRRTPFTNRVWEDRPLFAGSTPECLHALIMRVQAGVMVFPPPPGLPAGSGPLVGPHHAWDEEPKPLLW

SEQ ID NO: 959964 - protein, 87 aa, Homo sapiens
  misc_feature (51)..(52): Xaa can be any naturally occurring amino acid
LLVLGAAQFVLQAAAAPLDLRPRGRLRGQCQGCSLASGRWAVVALTDFVPXXAEAQRTLCPGCHWPRLVVGKVRRMGRFVFFVFFLA

SEQ ID NO: 959965 - protein, 115 aa, Homo sapiens
MPVELYRNGIMMLDGPFQPFYDPSTQRCLRDIWVLFGCVCSSSDWAPMIFFCKAISCSSYHTFGDVEEEWGYTASPDTSHSEGKPLHSLGDPSLMPSRRISLKPGWEGSGEARNR

SEQ ID NO: 959966 - protein, 80 aa, Homo sapiens
  misc_feature (39)..(40): Xaa can be any naturally occurring amino acid
  misc_feature (57)..(57): Xaa can be any naturally occurring amino acid
TNIDNSTTIQKLFKRITKQFKAMFRRKAFLHWDTGQGMXXMEFTKAKSNMNDLVTEXQQNQEATTEEEGEFKKEAKEEVA

SEQ ID NO: 959967 - protein, 39 aa, Homo sapiens
ALRAETAAEKKKTPPPPPEESLRGGAGETQAWRFKGEGG

SEQ ID NO: 959968 - protein, 48 aa, Homo sapiens
TKAGIGPALKGQALRAETTQEPPWGGRLPAGAASGGQTGPEAGEGARK

SEQ ID NO: 959969 - protein, 108 aa, Homo sapiens
  misc_feature (4)..(4): Xaa can be any naturally occurring amino acid
  misc_feature (24)..(24): Xaa can be any naturally occurring amino acid
  misc_feature (41)..(41): Xaa can be any naturally occurring amino acid
  misc_feature (46)..(47): Xaa can be any naturally occurring amino acid
  misc_feature (88)..(88): Xaa can be any naturally occurring amino acid
ASAXFLAALMTSDVFLSGPLPRVXSVISIIIKHNRKKSCTXGLVTXXPFVHFFIQLALFFLEAPHLFRSLRFLLLGKLSHDRPGSLAXYHLIVFCLAARPASALPFFC

SEQ ID NO: 959970 - protein, 87 aa, Homo sapiens
  misc_feature (19)..(19): Xaa can be any naturally occurring amino acid
  misc_feature (36)..(36): Xaa can be any naturally occurring amino acid
MRVMAPRTLILLLSGALDXKKTCACSHSMRYFYTAXSRPGRGEPRFIAAGYVDDTQFVQNDSDAASPRGEPRAPWVEQEGPEYWDRE

SEQ ID NO: 959971 - protein, 37 aa, Homo sapiens
  misc_feature (11)..(11): Xaa can be any naturally occurring amino acid
  misc_feature (25)..(25): Xaa can be any naturally occurring amino acid
MRRQVMAALVXSGALEQGGEKARGXGGVPRGRGVFQF

SEQ ID NO: 959972 - protein, 44 aa, Homo sapiens
  misc_feature (21)..(21): Xaa can be any naturally occurring amino acid
MFGLGSDSEGFSRQSPSALCXGTLVSPRDVELAPLAVADEALRY

SEQ ID NO: 959973 - protein, 36 aa, Homo sapiens
VSRLFRSTAEVAVAVALVAAAAAAAETLGRVVSGAA

SEQ ID NO: 959974 - protein, 104 aa, Homo sapiens
  misc_feature (7)..(7): Xaa can be any naturally occurring amino acid
  misc_feature (24)..(24): Xaa can be any naturally occurring amino acid
  misc_feature (41)..(41): Xaa can be any naturally occurring amino acid
  misc_feature (73)..(73): Xaa can be any naturally occurring amino acid
LAFLLPXEAENREPSGDRWARELXLLGSWMVTVRPETGHRXRGCPAAGGSRGGLFSPSSLLGSYNPLTLGLFXLVYFFLACSAYGLTVSAGVFLPSLLFGAGWG

SEQ ID NO: 959975 - protein, 105 aa, Homo sapiens
  misc_feature (34)..(34): Xaa can be any naturally occurring amino acid
SVRGGGGGGGSGGGGAVGLVREREARRWRAVFLXLAAACRSGEQRPRLAVRRSPAHNSGARSPRPSPRRAPPRAPSAPLRLTCHQGVGGHWSPPPARGRSMGVWA

SEQ ID NO: 959976 - protein, 37 aa, Homo sapiens
  misc_feature (28)..(28): Xaa can be any naturally occurring amino acid
IFSFACVIKESTPLLFFLATLLQSSTTXHVQGKDRDR

SEQ ID NO: 959977 - protein, 112 aa, Homo sapiens
  misc_feature (61)..(61): Xaa can be any naturally occurring amino acid
  misc_feature (64)..(64): Xaa can be any naturally occurring amino acid
PPSPRALGGGDDGGTGGAGVPALRLFWITGFFSLTPSSQDPAARVPGLVLFRARCQVPGPXRRXEVGRKRHAEEPGTLGASGRRRRPSSRPLWAVVDGSRNWPPAGKGLPAL

SEQ ID NO: 959978 - protein, 39 aa, Homo sapiens
  misc_feature (30)..(30): Xaa can be any naturally occurring amino acid
PVFGGEAAVAAEVRRLLAFQDRKPEKFLNXVCEPFHWIY

SEQ ID NO: 959979 - protein, 109 aa, Homo sapiens
  misc_feature (20)..(20): Xaa can be any naturally occurring amino acid
  misc_feature (56)..(56): Xaa can be any naturally occurring amino acid
  misc_feature (58)..(58): Xaa can be any naturally occurring amino acid
  misc_feature (66)..(66): Xaa can be any naturally occurring amino acid
  misc_feature (68)..(68): Xaa can be any naturally occurring amino acid
  misc_feature (97)..(97): Xaa can be any naturally occurring amino acid
  misc_feature (104)..(104): Xaa can be any naturally occurring amino acid
  misc_feature (109)..(109): Xaa can be any naturally occurring amino acid
EKMLLSLVLHTYSMRYLLPXVVLLGTVPTYVLAWGVWRMLSDFLPDRLYQALDDRXYXVYQSMVLXFXENYTGVQILLYGDLPKNKENIIYLENNEXTVEWIVXDILAX

SEQ ID NO: 959980 - protein, 30 aa, Homo sapiens
  misc_feature (4)..(4): Xaa can be any naturally occurring amino acid
  misc_feature (8)..(8): Xaa can be any naturally occurring amino acid
  misc_feature (29)..(29): Xaa can be any naturally occurring amino acid
MKMXDAKXKRNEQLKRWIGSETDLEPPVXK

SEQ ID NO: 959981 - protein, 119 aa, Homo sapiens
NYTEDEYLGEHNSKFEIQPKKTSEEAPRKGGQRCLLSGAAVVNAFYSSGRNQIVFPAGILQPPLFSAQQSNSLNYGGIGMGIGHEITHGFDDNGRNFNKDGDLDDWRTQQSARNFKEQS

SEQ ID NO: 959982 - protein, 113 aa, Homo sapiens
  misc_feature (3)..(3): Xaa can be any naturally occurring amino acid
  misc_feature (5)..(5): Xaa can be any naturally occurring amino acid
  misc_feature (44)..(44): Xaa can be any naturally occurring amino acid
GDXGXCGATRPGTSERKDSARSAQPSAFMEFCADSLYDVPVVVXAAPLLSARVNRSQSFVGVLGSHERGPRSFPVFSPPGPPRKPPALSRVFRMFYVVHPAVKVPISERLYLV

SEQ ID NO: 959983 - protein, 63 aa, Homo sapiens
  misc_feature (1)..(1): Xaa can be any naturally occurring amino acid
XAARLLLLGIFLLLLPLPVPAPCHTVVRSECKRSHKFVPGAWLAGEGVDVTSLRRSGSFPGDT

SEQ ID NO: 959984 - protein, 49 aa, Homo sapiens
  misc_feature (19)..(19): Xaa can be any naturally occurring amino acid
  misc_feature (26)..(26): Xaa can be any naturally occurring amino acid
EQKPVLGPASKAQALKAGXAAATIIXPPPPDLQAEPGRRKRHVRRRKEQ

SEQ ID NO: 959985 - protein, 35 aa, Homo sapiens
  misc_feature (7)..(7): Xaa can be any naturally occurring amino acid
TIPPESXNPLNRFLIRVYHPLLLKVLHWPKTTHEE

SEQ ID NO: 959986 - protein, 120 aa, Homo sapiens
  misc_feature (34)..(34): Xaa can be any naturally occurring amino acid
  misc_feature (40)..(40): Xaa can be any naturally occurring amino acid
  misc_feature (90)..(90): Xaa can be any naturally occurring amino acid
VLCARSSSAVSRQSSLGLPGPPGPWTCLTDGFSXELRGEXIFFLRPKEVELLLKTWLPGEGAVQNHVLTLLRWRAYLLLTTCLPLRVDCXFSYLEVQAMALRETPPPVTFELESLRELVL

SEQ ID NO: 959987 - protein, 39 aa, Homo sapiens
GGAAIFAARTRSERLRESDTLSASIQIAEPAVSAAAMDD

SEQ ID NO: 959988 - protein, 48 aa, Homo sapiens
  misc_feature (30)..(30): Xaa can be any naturally occurring amino acid
  misc_feature (47)..(47): Xaa can be any naturally occurring amino acid
GSVGSRGVVLREDPGVLAVFAAGHTQDTSXAVFAGDCSPFPEYSPLXS

SEQ ID NO: 959989 - protein, 119 aa, Homo sapiens
  misc_feature (25)..(25): Xaa can be any naturally occurring amino acid
  misc_feature (32)..(32): Xaa can be any naturally occurring amino acid
MSRKVCLSFIDSSLYTFVSFPVQVXCLGDWQXLNEGARNVCRTRLWQACPAPAGCNPSSWNSTGYLRGTKVGGREEVFNRTHIYGQASSLTIQVHPSFKDPRGQQRGPPSSTGGRFFTL

SEQ ID NO: 959990 - protein, 142 aa, Homo sapiens
  misc_feature (27)..(27): Xaa can be any naturally occurring amino acid
  misc_feature (54)..(54): Xaa can be any naturally occurring amino acid
  misc_feature (79)..(79): Xaa can be any naturally occurring amino acid
  misc_feature (93)..(93): Xaa can be any naturally occurring amino acid
  misc_feature (117)..(117): Xaa can be any naturally occurring amino acid
  misc_feature (142)..(142): Xaa can be any naturally occurring amino acid
MRLIHKRQISLKIPPDLLDAAGTDCTXIGTLQQKSSEDQGIKGRIEKAANPSGXKKLKIFQPVIEAPGASKCIGPGCCXVAQPDSVYCSNDCXLKHAAATMKFLSSGYEQKPKPKEXMKMKPEKPSLPKCGAQAGIKISSVX

SEQ ID NO: 959991 - protein, 36 aa, Homo sapiens
  misc_feature (23)..(23): Xaa can be any naturally occurring amino acid
YESYLGRRGPTPPGNSTGRGRSXLTFQVEVTELKFI

SEQ ID NO: 959992 - protein, 64 aa, Homo sapiens
  misc_feature (36)..(36): Xaa can be any naturally occurring amino acid
SPGEPGGAAPEREVAGGGQGLPGCGGGGAVAGGGCXRRFVAGGEQEAQFFVAAGEGDIGPGLQG

SEQ ID NO: 959993 - protein, 114 aa, Homo sapiens
  misc_feature (31)..(31): Xaa can be any naturally occurring amino acid
  misc_feature (34)..(34): Xaa can be any naturally occurring amino acid
FPLQCLRGGDGSTMDPRLSTVRQTCRNPSVXVLXTALAIYHVIMPVLLFIEHSVEVAHGKASCKLSQMGYLRIADLISSFLLITMLFIISLSLLIGVVTNPEKYLLPFLSLPIM

SEQ ID NO: 959994 - protein, 46 aa, Homo sapiens
RRSGAGQSILRPGAGPCGRQIAYFGPAAEPGRNTDFVFMTTHVTLE

SEQ ID NO: 959995 - protein, 36 aa, Homo sapiens
  misc_feature (27)..(27): Xaa can be any naturally occurring amino acid
EAVLCLQLWQRTVPLDTLKGLGVGFPXGPVLRGAVF

SEQ ID NO: 959996 - protein, 46 aa, Homo sapiens
LLVSGVSAMAALDSLSLFTSLGLSFLISRETLKNSALSSLCCARPL

SEQ ID NO: 959997 - protein, 121 aa, Homo sapiens
  misc_feature (18)..(18): Xaa can be any naturally occurring amino acid
  misc_feature (49)..(49): Xaa can be any naturally occurring amino acid
PPSKGEALYGRILMGLVXCFIDIAVENLSGLKFRVIKGNIYKFPWVRTXLLPVAGGHAERRLRARGLCDCGFPTAGGCWQRNPPDQVLPQRGEDPPRGAAQDVGDQSGRGDPARRRPPPPA

SEQ ID NO: 959998 - protein, 70 aa, Homo sapiens
  misc_feature (27)..(27): Xaa can be any naturally occurring amino acid
KAQCLLKAQSEGSEGSCSSGRDTISVXGGFCAHTTWWRAIISKVGGAHLWESPGPGCGVVLLPSASPTGR

SEQ ID NO: 959999 - protein, 107 aa, Homo sapiens
  misc_feature (91)..(91): Xaa can be any naturally occurring amino acid
AEQRVESVERMELCPERLTCCSSRPNSRPTRGRPVPAQAAGRPELALERPTSGRFGPAEAAGRPKLGLEEPTDRRPFGACRCHRRAGAEPXEATVRPEPGLGSLAPG

SEQ ID NO: 960000 - protein, 46 aa, Homo sapiens
SKEQCPAQLRGQMGQIPEALRRSLLLMMFDQTHPTLGSHLVPAVIA

SEQ ID NO: 960001 - protein, 58 aa, Homo sapiens
RPVAAMIEQQKRKGPELPLAPAKRQRHVKAGEERRLAQEPGSSRRRREPSCKRHLQDA

SEQ ID NO: 960002 - protein, 107 aa, Homo sapiens
PIALLASTVIDQLLAQIAGNAPISIAFLFMSGRAKALNPMRRLLMRAFSKTLAAVLLCGVASLAQAADTAICYNCPPDWADWGTQLKAIAASTGVPSAPGQQELRPI

SEQ ID NO: 960003 - protein, 41 aa, Homo sapiens
EEAWEGPVCSEMIGESIVPCLRHQTLLVASLFLPAQPAFFS

SEQ ID NO: 960004 - protein, 44 aa, Homo sapiens
  misc_feature (30)..(30): Xaa can be any naturally occurring amino acid
SQWPTPGSVGIVLVPSVPLQSSSRYRNASXACLAEEEQRMQDYL

SEQ ID NO: 960005 - protein, 139 aa, Homo sapiens
  misc_feature (4)..(4): Xaa can be any naturally occurring amino acid
  misc_feature (50)..(50): Xaa can be any naturally occurring amino acid
SRPXGPDPRPQEEQAPPPPREGAQTERREEQPGAAGAGAAPGLDSTFFNXEKDSELFHSSVEAIVNAISHARAQRYVNTLLKLIPLVLGLPEQLRQAVQNGDMETSHGICRIAVALGENHSRALLDQAQHWQSSLALVN

SEQ ID NO: 960006 - protein, 79 aa, Homo sapiens
  misc_feature (20)..(21): Xaa can be any naturally occurring amino acid
  misc_feature (28)..(28): Xaa can be any naturally occurring amino acid
  misc_feature (62)..(62): Xaa can be any naturally occurring amino acid
  misc_feature (70)..(70): Xaa can be any naturally occurring amino acid
MGLQACLLGLFALILSGKSXXFSGALPXEELPPGCLSLGRADPEEELSLTFALRQQNVERLXELVQVVSXPSSPPSGNS

SEQ ID NO: 960007 - protein, 36 aa, Homo sapiens
VKHSFVSESSMKTSRVCVVADGAVLGGKRANCAHPP

SEQ ID NO: 960008 - protein, 164 aa, Homo sapiens
FQPPYHPTARAAQARAEAVSAPALALQSGPGRRPGGEGGDGSPGAEAVEDSGAPGSPSSPERGAGDSDGAPGRRGLRPGGGGWVASAPALSGEERPGGCCLPLLGRRFLRPGSGRSGRFWGFGVPRGFWSSPPPPRSALLPRRPSPFFPRPCFSPRLALPSLLR

SEQ ID NO: 960009 - protein, 116 aa, Homo sapiens
  misc_feature (43)..(43): Xaa can be any naturally occurring amino acid
ISQIRGAVSSFQFFNSIGSRQGVPGGKGCRYNPKSVSKGVFSXYTWQLWSSSAESSAAASPPRGTADLASTSPAWLFITAEDLDLEKKASLQWFNQALEDKSDAASTSVTETPPIT

SEQ ID NO: 960010 - protein, 103 aa, Homo sapiens
  misc_feature (83)..(84): Xaa can be any naturally occurring amino acid
LVMAALSLVAACWGRAAVDDPVHFPAAPGSSARASETMVSVTMATSEWIQPFKEAGIPPGPAVNYAVMFVDNRIQQSMLLDLXXAIMNDLRVSVPRGSVGFLR

SEQ ID NO: 960011 - protein, 46 aa, Homo sapiens
AAVAAVAAFGPRQAASVAEVAGRVLGLGREGAAGADPPALMPPAAC

SEQ ID NO: 960012 - protein, 65 aa, Homo sapiens
  misc_feature (19)..(19): Xaa can be any naturally occurring amino acid
EKTRIVPPGHAAPALGTQXRSLFLRGCAMAAGKTLNPCAVVARALAVLAVFLRAARALLDVLGTT

SEQ ID NO: 960013 - protein, 60 aa, Homo sapiens
  misc_feature (13)..(13): Xaa can be any naturally occurring amino acid
  misc_feature (15)..(15): Xaa can be any naturally occurring amino acid
MALNKITRVGFGXIXIFTESILLSYDHVELTFSDMKNVPEALEGTMKGTGYVTPGGGMFL

SEQ ID NO: 960014 - protein, 38 aa, Homo sapiens
REVAPNRKRTKKITVRDAETNRTRNYKEQEGSISNTAN

SEQ ID NO: 960015 - protein, 73 aa, Homo sapiens
  misc_feature (2)..(2): Xaa can be any naturally occurring amino acid
  misc_feature (67)..(67): Xaa can be any naturally occurring amino acid
TXKKQLAPEGHPPYPKVQTAANVGDQRSTDWPPQHSKTPGAGRENGTETPTHENPEREKARQAPASXSKAGAA

SEQ ID NO: 960016 - protein, 131 aa, Homo sapiens
  misc_feature (62)..(62): Xaa can be any naturally occurring amino acid
  misc_feature (70)..(70): Xaa can be any naturally occurring amino acid
  misc_feature (84)..(84): Xaa can be any naturally occurring amino acid
  misc_feature (100)..(101): Xaa can be any naturally occurring amino acid
  misc_feature (107)..(107): Xaa can be any naturally occurring amino acid
KNHKEACLPRGERREAGETEQNTAHSRNPPGDQIQGREPHNGRTAPRTRGRGQNGNTNQRGXKAEDPRAXVSQTGTAHPGEGIXTGTPPGGGEDRKPPVXXKKGDEXQRESEELGASSNKVVGRHRHRPST

SEQ ID NO: 960017 - protein, 80 aa, Homo sapiens
  misc_feature (31)..(31): Xaa can be any naturally occurring amino acid
  misc_feature (51)..(51): Xaa can be any naturally occurring amino acid
  misc_feature (57)..(57): Xaa can be any naturally occurring amino acid
GKAFGFDNEGDSNPGRQTPKTTSNEPKKTSXDQDSDVDIFPSDFPTEPPFXPRPGGXTKEAQYLPESDEEEDDVDFAMFN

SEQ ID NO: 960018 - protein, 85 aa, Homo sapiens
MPKALFRCLGWVLPVGQRSWTMSSWRESKVLNISHVMLPMPNYVRILGDLTSSAAVALLRARFCLEPTPSPPGVRLSEGVRARAE

SEQ ID NO: 960019 - protein, 96 aa, Homo sapiens
  misc_feature (4)..(4): Xaa can be any naturally occurring amino acid
  misc_feature (7)..(7): Xaa can be any naturally occurring amino acid
GSTXPGXMVKGPVVLGKNRSANGSAKSPECGGFCGASSTIGGLLYSEPESGCSSDDEHGDAGMRVGAEYLARIPEFDPGATKFPALDRGGMLVWSP

SEQ ID NO: 960020 - protein, 63 aa, Homo sapiens
QGPAPRGYRSSCQDAGAPGVEEKSTGATFTPPVAQGPNAPGPWRCFRPECDYWAARGAAGAWG

SEQ ID NO: 960021 - protein, 57 aa, Homo sapiens
  misc_feature (5)..(5): Xaa can be any naturally occurring amino acid
  misc_feature (9)..(9): Xaa can be any naturally occurring amino acid
  misc_feature (20)..(20): Xaa can be any naturally occurring amino acid
  misc_feature (39)..(39): Xaa can be any naturally occurring amino acid
GSFGXRGPXSPPRGAARVWXSHVPPPGPSFTPPLPTGEXLKCGESGPGTIKLVTGPG

SEQ ID NO: 960022 - protein, 50 aa, Homo sapiens
  misc_feature (46)..(46): Xaa can be any naturally occurring amino acid
MVPYKGCGMEGKKTWVPELLLAVSNSQCGQRTQALKGSFIPPKLEXTARA

SEQ ID NO: 960023 - protein, 101 aa, Homo sapiens
  misc_feature (13)..(13): Xaa can be any naturally occurring amino acid
VQSVERDLVVEQXFKFTVGSIPVENHIIARNVVRASLRLHIFTSIRESTLARNPINVRNVVKALVGLQVFRPIREFNWREVIHMYCMWERLYSEFKSSSPS

SEQ ID NO: 960024 - protein, 109 aa, Homo sapiens
CPECGKGFSRRADLKIHCRIHTGEKPYKCDECGKIFRQASNLLAHQRVRSGEKPFKCEECGKSFGRSAHLQAHQKVHTGEKPYKCPECGKAFGDSSSLIQHMRIHTGEK

SEQ ID NO: 960025 - protein, 76 aa, Homo sapiens
CPECGKAFSHGSQLTLHQRIHTGERPYGCPECGKAFNWSSHLQIHMRVHTGEKPYVCSECGRGFSNSSNLCMHQKV

SEQ ID NO: 960026 - protein, 139 aa, Homo sapiens
CPECGKGFGWSVNLRVHQRVHTVEKPYKCGELWKGLQVELNLDMHQRVHTGEKPYECNDCGKPFSRVSNLIKHHRVHTGEKPYKCGECGKYFSQASSLQLHQSVHTGEKPYKCDVCGKVFSRFSQLQSHQRVHTGEKPI

SEQ ID NO: 960027 - protein, 54 aa, Homo sapiens
  misc_feature (46)..(46): Xaa can be any naturally occurring amino acid
  misc_feature (48)..(48): Xaa can be any naturally occurring amino acid
ELEFVEVAALSAPKAWYPAQGIWWGGLLVKVDALGAEDNTRKPPAXAXDGNRGQ

SEQ ID NO: 960028 - protein, 46 aa, Homo sapiens
EAEDGGDEEEEEEEEEEEGISALDGDQMELGEENVFLGGGRLGPDG

SEQ ID NO: 960029 - protein, 46 aa, Homo sapiens
LTKLGRDDVLLELGPSIEEDCQKYILKQQQEEAEKSLQVAAVDSSV

SEQ ID NO: 960030 - protein, 42 aa, Homo sapiens
EVPAQLDRGVFGARRSLAVPSTSAAATLVECLVVASGEEQTL

SEQ ID NO: 960031 - protein, 93 aa, Homo sapiens
VEAAGEAHGQRLQEHLRESRGAEQTSRAELHSVTRKLQEASGVADALQARLDQACHRIHSLEQELAQAEGARQDAEAQLGRLCSTLRRGLGLQ

SEQ ID NO: 960032 - protein, 49 aa, Homo sapiens
  misc_feature (31)..(31): Xaa can be any naturally occurring amino acid
AAKMEPAVGVPGPLIVNNKQPQPPTPNTPAXRTVTTRGTAFRRGPPAWG

SEQ ID NO: 960033 - protein, 40 aa, Homo sapiens
  misc_feature (24)..(24): Xaa can be any naturally occurring amino acid
  misc_feature (39)..(39): Xaa can be any naturally occurring amino acid
SAVAQEEDLEPTRRPPLVHVWCGXWIPEVSIGWAEKMEXI

SEQ ID NO: 960034 - protein, 38 aa, Homo sapiens
  misc_feature (28)..(28): Xaa can be any naturally occurring amino acid
GPRSHGGRRAPSMAVSAVEGKDSESIRXCRVVGHSGPD

SEQ ID NO: 960035 - protein, 31 aa, Homo sapiens
IPPPPGGRVPEWNMATCAEILRSEFPEIDGQ

SEQ ID NO: 960036 - protein, 36 aa, Homo sapiens
WQFLVPRLGDSPQALPSGSSLSGEGQSLLVPVRPAE

SEQ ID NO: 960037 - protein, 47 aa, Homo sapiens
REELFQGDAFHQSDTHIFIIMGASGDLAKKKIYPTYEGRSGVVFCPK

SEQ ID NO: 960038 - protein, 83 aa, Homo sapiens
MRTPGPPRRGSRRSLLPRPAPCPPTLFTVASGSQWFAGTDDYIYLSLVGSAGCSEKHLLDKPFYNDFERGAVDSYDATVDEEL

SEQ ID NO: 960039 - protein, 36 aa, Homo sapiens
RPWPEAEEVAPGTELGSWRKRGWRSSVPDSVCSCDC

SEQ ID NO: 960040 - protein, 49 aa, Homo sapiens
  misc_feature (3)..(3): Xaa can be any naturally occurring amino acid
  misc_feature (35)..(35): Xaa can be any naturally occurring amino acid
TRXGKTLRLSECSFRPEHVSMLATGYEQVFFRRLXTLTQCCLGQKHLAI

SEQ ID NO: 960041 - protein, 40 aa, Homo sapiens
  misc_feature (28)..(28): Xaa can be any naturally occurring amino acid
  misc_feature (33)..(33): Xaa can be any naturally occurring amino acid
QWRPGRDSEPAGLNQGDAEDDDQNTRYXKPFSXARHPLLA

SEQ ID NO: 960042 - protein, 43 aa, Homo sapiens
MAAKGAHGSYLKVESELERCRAEGHWDRLPELVRQLQTLDMPG

SEQ ID NO: 960043 - protein, 49 aa, Homo sapiens
  misc_feature (46)..(46): Xaa can be any naturally occurring amino acid
QPLSPVPQQQVVLIALFVQCFGLGPSAFLRSGTLHPAQPCYLFFMXEEH

SEQ ID NO: 960044 - protein, 107 aa, Homo sapiens
  misc_feature (28)..(28): Xaa can be any naturally occurring amino acid
  misc_feature (34)..(34): Xaa can be any naturally occurring amino acid
AQPVKGGCVCNKDRGRCIVLELQEGGIXLRPPLXTPCDRFGSLTRSFGYKSGRTGGEETARGTGRNGLSALNHHKPWLRKGHASPSRRMTPIRDPQRPVHVDSQGNF

SEQ ID NO: 960045 - protein, 36 aa, Homo sapiens
MAESLASAQAPSRVRYGRCRPEEDEGACSVEAAARL

SEQ ID NO: 960046 - protein, 61 aa, Homo sapiens
  misc_feature (17)..(17): Xaa can be any naturally occurring amino acid
  misc_feature (31)..(31): Xaa can be any naturally occurring amino acid
PPQPSLAPREQEAPGTXWPLVETSGIYYTEXREREREKSASGRPSWAAVVGSPPLAHTSLL

SEQ ID NO: 960047 - protein, 33 aa, Homo sapiens
  misc_feature (30)..(30): Xaa can be any naturally occurring amino acid
  misc_feature (32)..(32): Xaa can be any naturally occurring amino acid
VPGYSSRSVGGSEADYPAAERIKEIPSWTXLXR

SEQ ID NO: 960048 - protein, 40 aa, Homo sapiens
  misc_feature (30)..(30): Xaa can be any naturally occurring amino acid
TTEARAGSGGSHSSLRDLSIYGLLNRLCLXLGACWLREPA

SEQ ID NO: 960049 - protein, 89 aa, Homo sapiens
VCPKLAVRCVGLVSGWVCLSHGTTSGPPSFFGQRQHVLNHFLPSGEMDEVAVQKCRNALKLPVLEVLPGGGWDNLRIVHLGRVMALTYS

SEQ ID NO: 960050 - protein, 170 aa, Homo sapiens
HGRQWHQAELAVSTFWPNEYQVLFEALISPDRRGYMGLVDILLLSYPCAKAPHFSRLGDVEVNAGQNASFQCMAAGRAAEAERFLLQRQSGALVPAAGVRHISHRRFLATFPLAAVSRAEQDLYRCVSQAPRGAGVSNFAELIVKEPPTPIAPPQLLRAGPTYLIIQLNT

SEQ ID NO: 960051 - protein, 55 aa, Homo sapiens
  misc_feature (37)..(38): Xaa can be any naturally occurring amino acid
  misc_feature (49)..(49): Xaa can be any naturally occurring amino acid
MNLVKFCARTTPSRLSSIFTLYSAFPDLEPYRPNPVXXTFLPTANWMLXYCPRYR

SEQ ID NO: 960052 - protein, 48 aa, Homo sapiens
LTRTPSSEEISPTKFPGLYRYWRALTSLFFLDEPPDVGSDDEIDHGKK

SEQ ID NO: 960053 - protein, 45 aa, Homo sapiens
  misc_feature (35)..(35): Xaa can be any naturally occurring amino acid
TYYPPYFWVGPSGKMAAVQAAEVKVDVSDPRLCKXELKRRLLSEK

SEQ ID NO: 960054 - protein, 43 aa, Homo sapiens
WNEKDAKNRQGEADRMSRKAHITEKVTIFVSMGRDPPAETQPQ

SEQ ID NO: 960055 - protein, 45 aa, Homo sapiens
  misc_feature (41)..(41): Xaa can be any naturally occurring amino acid
GQRVSKAGPGAQALTRPGSELAAALADISHPRGAAAPCMRXGPLS

SEQ ID NO: 960056 - protein, 103 aa, Homo sapiens
  misc_feature (42)..(42): Xaa can be any naturally occurring amino acid
  misc_feature (44)..(44): Xaa can be any naturally occurring amino acid
  misc_feature (55)..(55): Xaa can be any naturally occurring amino acid
  misc_feature (60)..(60): Xaa can be any naturally occurring amino acid
  misc_feature (62)..(62): Xaa can be any naturally occurring amino acid
SLMEDSDDGPSLPTKQNEEFRPFIRRLPEFKFWHAATKGFMXVXRTFFDASLFFXRPILXMXFIMLFCITMKRQIKHMIKYRYIPFTHGKRRHRGKEDAAKVS

SEQ ID NO: 960057 - protein, 84 aa, Homo sapiens
  misc_feature (26)..(26): Xaa can be any naturally occurring amino acid
LFWGSPRCQDLVSLVVGLDQKVPRSXGAYLVTGALRSGTDTASLSGPHPRGLPAPLGLAQWWGAFPSVGVRLTHGPGCARLSAA

SEQ ID NO: 960058 - protein, 32 aa, Homo sapiens
NNPPPPPSREARWLRQGVALGLTREVGDTNEQ

SEQ ID NO: 960059 - protein, 34 aa, Homo sapiens
APTLGLFSNYSTMDPVQKAVLSHTFGGPLLNTSR

SEQ ID NO: 960060 - protein, 66 aa, Homo sapiens
  misc_feature (37)..(38): Xaa can be any naturally occurring amino acid
MENTSLSVFALCFLLLAVFFSLFGSALSIDETRAPLXXKEKMMRFGGRLALNTKEELATERLLSLK

SEQ ID NO: 960061 - protein, 96 aa, Homo sapiens
MREPEPPAAAASASPPRTGALGLVALALPAPCPVPRAVMCLRCGSCCCEAERMVVVDDADADAACVMDVLCSVILDAVCCACCLLLWLLMCGSGLA

SEQ ID NO: 960062 - protein, 471 aa, Homo sapiens
  misc_feature (178)..(178): Xaa can be any naturally occurring amino acid
MWLKPSSQMNNGRGEPAMWSWPTDEMLTCVILTWGVSRSNGTLPAPALVTVPETAFHGRRWMLQALGTCSMRPRKAIEPMHDPMNSQRAIWPWMVGTRRWPPCRCDGIVGLVGLLLLLGSKCLRPSAPPVPPCLCPIGIASTLYRGTWPRYLRSCTAPGHGIALGADPNEANFSLIIXFLGRGFGRFSAQKGAQWWLVWPLLNTHVGSAIRFWVIWSPNALFWPLLGNQVRPPNGRRGLDSRISLPSLSFTRSDAFLINSGGDVRCRAMHIGVSLWALGTDVRFPLGATEPRLVVSRYFVGPLRAWGPSMLVLDSGLNVKGVREPSVQVPLGGRPFPASFGDAVSGARGLACGEHFVCGICGMHNEIPVTRLSKGITPHPPRVTIAGGFPRGAHWCRLKGGPSNWGAGLHTPGWACTYRRDTGGFNVWFIPCTVRHRVVFIVCSSADIYCCPRWSLGTSQARDWRLSATSI

SEQ ID NO: 960063 - protein, 128 aa, Homo sapiens
GGPKFLYLEGMGPNQKILRGLFGSQLYRKEVRGTPQTVLCHVPWVCTRESSTPSGIVGEIYAPRAIAFSFTHVALHRGCVCLCYKREIYISAHKRTRYLESARSHTSLCDATNVCVLTGVCSPHKYLL

SEQ ID NO: 960064 - protein, 72 aa, Homo sapiens
LPWGSLADSIPCPGFTFGHIHHHEFSVMLITLVAIYCVASGLGMCVGLRWAPEWTYYFGQLVGYDILVNVCA

SEQ ID NO: 960065 - protein, 256 aa, Homo sapiens
MCCDANAVPLCVLCDAVMCPVCVPLLVHVTDCLTPEWMLSDALLDASISVSDVLVLLLCMHLSMVPVHLPFHHYFMQWPDHFLPVALVLCHACSRQPDLLPSCGCSCLTALYLLWEMYLHLSLLAANPFACQLRAPAQPLLPPALRRPGTLTDLLLSGFLPPITPPEKFLLSQLMLAPPRETLQKRRLRQIALMDVGNMGQSVDISGLQLALAERQICIANGKAKASFPKYSPVTQTRESSNSGFGQSVASQITEA

SEQ ID NO: 960066 - protein, 265 aa, Homo sapiens
MLLCEHVADNSVVCEPGCLLGPRGFVCQWFFGCIYGFHGKSVQAFSVGAVYVTDKWLTLSNEVMAPNVPSNPPAKSSGKHGVLNGPLSAKREGAGDCGVLTHWSRHPHSSCLGLSLLAAVGRHAQAALSAVGAVPGPFAAGSCVHGRSMPVSLEGFLCEPTVLPLTHDAETCLRGARRGKLLLRPESGHSLVSTDVKERPDSSEQVTGGDDHDGPSDGDSYGLILKELQNLAFAGAVNRGPTEKPRKGTRGASERAPGSKDRRQM

SEQ ID NO: 960067 - protein, 85 aa, Homo sapiens
AFGLSIRDFCCRCPSSVFGFGRISGAPCYVSYYFQLPGVGSHWSSCVCHCRLSVVSASVVFPLLSSGHAHCNASLLFYVVGIFAS

SEQ ID NO: 960068 - protein, 71 aa, Homo sapiens
  misc_feature (46)..(46): Xaa can be any naturally occurring amino acid
  misc_feature (51)..(51): Xaa can be any naturally occurring amino acid
  misc_feature (60)..(60): Xaa can be any naturally occurring amino acid
GRARIRRDVVLSRVPEQEEDRTVSLQNAAAIYDLLSIIVGQKFSSXVLSEXLERAMIFVXGEFHLWYQVAL

SEQ ID NO: 960069 - protein, 150 aa, Homo sapiens
MAYHAHGAITQIMDTDTVGMDDAMLHCCLVIAARGGSGEWFPGRQVPPLRSENVPVLPWSGSEGSYTKGIFSSPCLGVTEAFMKKFATQHLLEPHCRAERALSVVVESMPFDMSTPSCHVPAALPSWKAVSPIAKSSSGLDELPQRHLLH

SEQ ID NO: 960070 - protein, 48 aa, Homo sapiens
PDGAAGGCLASTLTFWAGGPRTGQAVAATGARKSSFSWFCTELCPDAV

SEQ ID NO: 960071 - protein, 281 aa, Homo sapiens
GVVEPENLARERKMQWVQLQRLERKVHVPIYPGEMELLLNPVPDEPTACAGYMDGSVVPGVPVPHCVDDDYSLVPSSCEWCSCLCLNVILHNDAMSVAPMRPPMAAAQVPCMGDVPATHQHAHHPFSSANTTTIHRTPNAGIIPPTLLRVSGRDHGDETCECQKKGACWMAGNPAARGCLINVQEEMEGSVDISRPIHNWEGPHPSFPYSWDRQQWTLWAACSILRQRGPHLTVALEPRDHSLPFPHPLVGKERSGPSTVSSRCDALHKQQLKNGKLDLMT

SEQ ID NO: 960072 - protein, 103 aa, Homo sapiens
MPRDINSPYYPGHYPPNIDCTWNIEVPNNQHVKCAASRFFYLLGARAVPAGTCPNGLRGDQLGRNTAGDECPSSVVTMQHATMITCSASTHDHVLHLTPGFLD

SEQ ID NO: 960073 - protein, 46 aa, Homo sapiens
VARRRAVLPGERAAPSRPRQRCAHSALPNPGLSSFPRLFPFRARDE

SEQ ID NO: 960074 - protein, 173 aa, Homo sapiens
GTRTTVAYHHPEESRASPPRWGSLRGRLKVWFHEPQSKGEENQREEVACSNRPAAATTCRLRRNTASPASARSSEKCPRVPCSSGVFPASLSVWLCPFGVLVGQLCGGVLNPTCHPMLTHRGVCQRQSKFPGFDAMMGAWNSCLDSSSEETSVSVRAQIGNKTLTSTVILMDG

SEQ ID NO: 960075 - protein, 39 aa, Homo sapiens
  misc_feature (29)..(29): Xaa can be any naturally occurring amino acid
PASGSFFLCMWLAAAEQFSSLTPRRPSLXGLSSRHWSHG

SEQ ID NO: 960076 - protein, 35 aa, Homo sapiens
ETLGTGGGNCSKPSLALESTRIFKAGPLRGGWTHA

SEQ ID NO: 960077 - protein, 77 aa, Homo sapiens
ESKAERTRSRAGELRAGRVRPPVPPGARGTRRQGPLRRGLGFLLPLPNLTITYIRREMSKPLGLGVKVSSGLGLSKP

SEQ ID NO: 960078 - protein, 42 aa, Homo sapiens
LPRWDPGLAGPRWPPAQATAARMDRKALAATCALNQGALDFF

SEQ ID NO: 960079 - protein, 38 aa, Homo sapiens
AFARLWSVVISALDPGPASLFPGVAAVASPPPLSPPPP

SEQ ID NO: 960080 - protein, 39 aa, Homo sapiens
ESPGQERNLSRTGSVRNSRTWIRKSLRPERLSRNPDLRS

SEQ ID NO: 960081 - protein, 51 aa, Homo sapiens
  misc_feature (38)..(38): Xaa can be any naturally occurring amino acid
MSGFWEEACRGLRAQGKPLGLPPTSGLCYLLPAGLAYXPAVGCGELGRGSG

SEQ ID NO: 960082 - protein, 160 aa, Homo sapiens
MGRGTARGHTGHPRGGEAIPYLFPCWLNPRVDHLLCPSPRTYRLARLGDSHHLEGGCPPACALVSGNIPGLKFPLSSSLLIPGYHRTFSGPRVSAPFPVKSAAVLATQDPHLTWRVVDHSFPGYWGPPGWGEFPEVLEKEEAELGIPGGWGPTSGGTQLL

SEQ ID NO: 960083 - protein, 290 aa, Homo sapiens
MSKPGPRGPPNPPPARGKDRPKPLFLLGESLGAAPKRELTPSLGGLGDLGGERRDGSPLFRAASRGPPKSPSGCRRAMGFALVEVAREMYEGEPLLNDKRVPPSARGGVCWFAPRVRLQPRSLIEIECGTHSHGGVVVCAGAVFVEKPPLRVGGRRPSVGVVIGAPVLTRRPPRITVEYSSLNTCFVCMMLFFLRSTKFPPRWKETAAALCVRLCEPRVSPSGGGAHSGSPPLCLCVLTWRRSIFKSAPRSVGLPTWGTSEPCACSHKGGLSAVLPRRRELLGEGGVRQP

SEQ ID NO: 960084 - protein, 113 aa, Homo sapiens
MCGRPTVFPRGAPCDLPPTMWGPPCVCGGPPLERSVVAEVSSICGERSVLCVRREGLSHTFRATSFSRGGGGLNPVERDTWKAAYWRGFPQCVLFPATRKRHCFCSPTSSPTI

SEQ ID NO: 960085 - protein, 78 aa, Homo sapiens
CRRHPAAAASFLPPQDLAPAPASAACGASTPCPAAHGLMSGVCLPCTASHVFPCCPCIVTLAIGPRQHVSSCSSQARA

SEQ ID NO: 960086 - protein, 70 aa, Homo sapiens
RYHGNVNQYKGLPSLTLSSCWIRASENLSGHRHNTTRDCTCQMDRPDQKRASEHSITREIDSKRQINGKR

SEQ ID NO: 960087 - protein, 113 aa, Homo sapiens
SFSFLVYIPLVFNFYDGRKATRLVSLLSSTLLLCLTFFSTFCCDPVLSSYLGVLPTFSRPFSHVLRGTFNPLIYSCGSPSGVLPCFYPSVVSALCPVWPSSFLLLGFPCSVTL

SEQ ID NO: 960088 - protein, 77 aa, Homo sapiens
MDRYPPKSCVYAPWRCRMFGAKQNKQGIAFCVCPTNCPSPGGVVPQSPNCNRCDTETWVSPPTHYWGVTTTSHIGAD

SEQ ID NO: 960089 - protein, 183 aa, Homo sapiens
SQVKSKAKKSVDKHSDEYKIRRERYNIAVRKSRDKAKMRNLETQHKVLELTAENERLQKKVEQLSRELSTLRNLFKQLPEPLLASSGHCYARPPRASPCRPGLRLRGAPAPAPSPPHHTDGRPVKTIGNWGTWQTTGSHVGAGRDQGHRFTKIDANQVLKQWLNALMYTGLTQPTCNCQPGPE

SEQ ID NO: 960090 - protein, 114 aa, Homo sapiens
MFCCPAHCLFMQFFWVQSGLDKTMQRFPVSTQPIVLQPHQLRPEDSGLATALEDVTTLNQKSSYCSTPHKSDQRMDQARVLLGGSYGEDSSTLTGTVSRMEISTRGMGYEVGEA

SEQ ID NO: 960091 - protein, 180 aa, Homo sapiens
LAFLSCLVSFWGLPVAWLLPLVVSYHVCLFGGGLLCVSGFFPTALCRVLLVRSVAVMCGSSVCGSPLRGRIVACAGAVSGVCSVSLYPCRDELVRKLLGALRPCRAPCSVLCSGPPNMLRMFFDATVLYVGRGVARMLFYSWESTQGPSLISQGKGVAHYILSTAFFKWLREAEDESDHN

SEQ ID NO: 960092 - protein, 117 aa, Homo sapiens
FVTIHILSLFILIVFIGCSSSLTFVCSHPGVYRVLLFCVVILVVLLGLLIRWILSSLIVSLMLVPLSVIGVVLRHFVSSGVVLLCHWLIRTYPWFPSGNSLSMVEWTVSLSAQVVCH

SEQ ID NO: 960093 - protein, 192 aa, Homo sapiens
PLNYPLFINSIYLSGLYASGPGYGGRGVWQGKKRVKQISWLHSSLIASKIPTQSPVCSLCVHLPSPHPRGIRRAGSLIKLCRCRTSGSPHSLFHNPPVCVKKPPEGFPPLIGDIFSIVGLCGHLDSCRGFPLLLKFYYISPREHNSTLLRGVCSPPSLERRDAHNFLPLWNHNVWVGPNEAGARDGEKIPKT

SEQ ID NO: 960094 - protein, 264 aa, Homo sapiens
ALHCPAGSAPALRVHMCCSLPAPCLPGLNCARLRWRISADGDEGDLKSGAQSCAAAHGRDVDISPKQDEGLLKGRQERGLQVHEMPMIGDRVFVHYTGWLLRWHKCLTPVWIARTNFSFDLVKLGRSSRLGDIAIATIEGGGGVPHSPANQNMPTVQQCMSSKDFPPIVQRLYLTVELFEFKGEDLTEEEDGRDIISPEYRLAVAAIAKPKWGCYSVAGCPGGVLPGREFFAGGARFDIARGRRCCLWLGGLAWAGGSPFQPVF

SEQ ID NO: 960095 - protein, 347 aa, Homo sapiens
CLLNIFFFPSPPLCRGGWNRGKPPPLSCRESGRGPIFTLISLFRHKVPSVWPCGGWEMRWSLQPLFSSRGLGPPSLTQISHAGGERAVVVCGEREPHRETRKSEKKRVFSLSRERRENTECVSLSRALCAPARAASLCVRERESERERDTLSTSGRHTEKRVSLSRESVSLSHHPQCVRQRDERHHTHIECLSHTLCEKQVVSPHTHIYISRRERERGETQIMSPTQKNTRCVSHHGVCITLSHTHTHIEKDSSLSLSETQREIALMNTLKNTYPETSLRRKPQESKKVVCVCTHPLYEIKHSLSVRTKYKVWDHAVEKGEIPLCVWCALQQLCSPTREGVCAHTHL

SEQ ID NO: 960096 - protein, 189 aa, Homo sapiens
SIIVTDDVKQGRCNRTRSPRSGLCVAGLLGPLRVSGAGGHCSAGALALANGFPSAHEALKSAPSSFAARWEVPLLPPCALALPMQQLGPVMMLPLVPLCMPNWRPCDWLPAQNSLPLAPCGITCASSVGPAVLPRDVMCCCMGWPCVKLGGLLSGEFCEGACAGAPVHPVSPHPEERVKESLHPGAVMV

SEQ ID NO: 960097 - protein, 105 aa, Homo sapiens
QPAVYAIHHQQLPHGFTNMAQCYPVPMSKLESQQPRPLTPGGAHPAQVMLRAPTPESWGAPLKARCPRVGCRALSASTPSPYPYIWTTPQGEQPGQAPGISRRSR

SEQ ID NO: 960098 - protein, 549 aa, Homo sapiens
MLPRVGCPCCCLLPAACLLLASCCLLLHCLLLVAAEWLAGWRGRAAEVLVPACPAPCSSPECCLSALPCSVPSCHCVCCHATVLLGLGLHCLCTGNVQRLQLPIGAVMHLSLGEGPWWLAESLACSVVVACACDFAEGCRCGSLQCRFVANSLLLACWCPIGWLAGLSKYAPTPWVAFPGCALVPPFGRGCLGLGTVCAPAGGCHPFGYNGDCLALWCNLPWSGYFGASANGPSVEGAEGGFWREEARVKRPELEGSKDLQGKNRGKWPYGALGDGRSPSLVFGTHRLTPFRTASYYMGGLGAGWNVATAFGFGAPGEMAPLSKHVPGALTSTICGRPEGRLVGYPGLAREHRRSSLLSANGKPRGPSEVCVRNIGVFGRRDAIINPLLCGPFGNGECPQMKRVFARNAKPPRLVPRWHLSPVVPERGVETLASPKGCLLGRPWKSFPNPIFLPFSGAFHAGGPPFLLMSPYIKLPCWRISTLTWFDKSLWPLLRTLRRDCQGECTLRHGVTSCGWEWILLCDVSTRHTTCRSCKSGWRSRTTGDGDPE

SEQ ID NO: 960099 - protein, 139 aa, Homo sapiens
GRPTTLGPTTPRSNIMKIYFKSRFLLSPKQLLCRRTAALSRWCVPMPTIVLTTAEGLLTHRVSNPRIEERAGRVQCAERSVSHCTHVGPSSEETSFTQASTHWVAPRGDFSYPSTLASHSPYVSGFMIHLGYHLLLLRI

SEQ ID NO: 960100 - protein, 232 aa, Homo sapiens
MRVRGSGKKIAGPGHRRAGENREEVECAGARGGFRAVSASLVINEMREDIAFVDALSTGGLYLRNRSKLWEMDNMLIPDSKNAGGGLGGERPQPSSRPPGLTRTRGTARSKRCETGRGEGQGGLRRWQRMLVERGPADREERVVVSAVGGNQPMDSGQLVEIGLTPWRSRNQRAFGFLFGPVYALSHLTLRFVLWSVVDDLHMSLDCNVFCGTCFGWQVLSLPDLGLNVRLP

SEQ ID NO: 960101 - protein, 186 aa, Homo sapiens
AYADEAKKRSKPICEDFTFCLTSSRQGKIENTSIKRDTSVNPLYDETLRLRSQNSLLAPCSDRCHVSHIWQSVVVLAEYTFLGEAEIHDGFLECLIRNWIIASLYMERLSAEIPDVACHHTKASWLVSLKVHPSLQNLLLEADRKKSNGGEGGELHGVDHREAKNLTAAKAGGTSDSFVTGVPRFP

SEQ ID NO: 960102 - protein, 135 aa, Homo sapiens
MGPSAFLPREAQQTGIVVKCEDDFPKDDPSKSGHLTCLPESIQRVWAVTSHSLAGEVRLGPVYPKCRDKEGECRLVGPGVTILYDVAAYRMVRLCGNSLGTNSWHKPPYQMRPSRYPCANGTCAVVVVGDYLVDG

SEQ ID NO: 960103 - protein, 323 aa, Homo sapiens
MPALSSASLSESTKARCRRHNTCVDLETKKKKKKKKQNQTTNTTAQPPARDKAGGRAEHTTTQEPETRNEEARNDKHHRIYNRDSTPRSATTTQAHHHKHKQARSRNTQQTDSRKQRQDAQQLTAPSTAQRREENKRQREETGKRDPQGQAQSRANHRKQSDRRDRADRPSKTTPRQRDAKSEENRRKQARKGKATKADRRDNETTNETHQERRHIERKDTKKTNEGEARDRRKQTTAEKKNDTNRSSLENATEGELRRRDDDTEDSGCDDDREDAERDRERRQQSIRDKTEQRANQEITQTPERLVRKVQIEEREPEQRPEN

SEQ ID NO: 960104 - protein, 172 aa, Homo sapiens
MGVNSSRCLHDQVGAVEYVFSLRSSYDIGTRPILRIMSLLEKPGRHRQFMPTCPCTRIATVLHEAMSSREAKLIIAEGRTVITNRYYPPSHTVGTDREFNWNLRRLRQVEQSHPHRMLDLSLASCPAWMAALASTADSYSCDENGIKITRYESPPHSDEDHLPPLVRNRKTP

SEQ ID NO: 960105 - protein, 153 aa, Homo sapiens
MCVCREGPTVEAPTSTPTRLLRSGAWACPLRLVFLARRVEERRAPISFCEKCLRWGPRCVREWAWFPPGRGRCCGKTPLTPALVCSPCSGGPRDLFFLLPFFKAFVSRESLLQPSGGPPQCGSPQYRPRGFPRKGCKTPPNWCGGTEGGYLRP

SEQ ID NO: 960106 - protein, 118 aa, Homo sapiens
MMDCCELSAPACWDYIDAHHLILLVLNGARRDMLPPSLPGLQGSDAGTELGTTCLSTWGLLLIAALKGDFETLERMCLIQLGRRAEGMTRECCDKEVCGRNWSQGTPVVSKFENAQKS

SEQ ID NO: 960107 - protein, 92 aa, Homo sapiens
GLAMLRGPVAASFGSFSCCCSRALPEPRGCLQACGMWNLTDACGSVPVCSGLVLSMLPAVSSSCGWLCVPSSNAGTWTALHACHVCCALTDL

SEQ ID NO: 960108 - protein, 105 aa, Homo sapiens
LYTVSVTNLDGAFNVLLICMLMYMLCGSVSCCALRTTPLPFLAKPTCTPEFLRKFPAGKVPAFEGDDVILVCSESNAIAYYVSNDVSLRGEVRPRSAAGPSGAVG

SEQ ID NO: 960109 - protein, 70 aa, Homo sapiens
VRSRRSWYNTCVLRNGSITMLRSPVPAGALVAAGLSRGHRGLAHSPLTTLHTCLLTSKMLGCCMLQMCVL

SEQ ID NO: 960110 - protein, 108 aa, Homo sapiens
MARENLCELGQRTVQEAQSIDEIYKYDNEDMQQMKSWLAKPCDYSDHHYFKYLQNLSICALLKMCDALPDTGGNFGSDWVLMLGKVDGETMIIMDSICFWLWRALKTE

SEQ ID NO: 960111 - protein, 289 aa, Homo sapiens
DRAIAVRCGPAQCPWSPCCQYEGPTNASLLQAMWRNSSWLGTAKVSEFSCGSHPHEKATGLRPGAADGSRYVLSQHFWARPRPGWTHRVSRDVHMQSSPAPPKCVDNPPSAHSLTYHISISIISKTHNFNDKTLVDGVAKRLLPVSKGPRHMAWRVRCSRDCVHYITSRWKLPMAEVREESVQSGLCTSAYQFVRRDARISQAYRKPSMVLARCNVIWEATYAYRYRDKDTQEKRSAVTPKVERTDTESTRINEHRDVAPLHNQTCTGTEKRQGRYHGMRITTARGGST

SEQ ID NO: 960112 - protein, 214 aa, Homo sapiens
IDPASVTDKDTLTIHYLMLPRVREELIDKKTERAVSQMQSVIELEEVSQSTEKAIPIEVSLGKKLWLVQSSIQKGVLKDIKSVEEAVSLEELNVRKVTLSTDKNKYGIRLRAEPDHMVLGKRLEGSLLKAVMTSIKQLSSRGAGAVPEDWDHWLWKAMNGTDEDIRHMYTFDHGHRWDCAHLTAHSDAQAQGLLDVHSMTSQKVDDGNGRGRHT

SEQ ID NO: 960113 - protein, 219 aa, Homo sapiens
GRLESLGPGATLQERRDAAGLGCRAPGTVDREPAAMGWRAVRSELVLTGMLLAMAQQHEGWLQELVNTFFSFLRRKTDFFIGCEKKGGREAYHTDFHATTIMLAHEDPGREKEKPWHGGLSWREKAGAGLARLGQRNAKSETSGPQIKEQLDEECRGVLQTTRYDQKKDAENHEAQLKKVALTPQWKAGYMTEDEEEDEKDKGQLKPNLVQGTDLPITA

SEQ ID NO: 960114 - protein, 216 aa, Homo sapiens
MPYGDDPRALSCSHLEDSAHGAVALDAAGYHVEPDFSSLVSPLMPAEWMASPGFLLSVSLVLSAATDIFTVKTKKKAIMVRVHDPMPEGPKSEPTDEVNEVTIIKKCVGQVNPAPTSVDTKQRSDGHQQWRSLEFNLNTTLEIAATHTDAPNRADTRGSKVRVPHDPEAKSVQVKTTGDGKTRDRQHTKRTKRRAERHDRGKQRRTRSAQTKNHRT

SEQ ID NO: 960115 - protein, 44 aa, Homo sapiens
MNHLKKKYQGPDDEAVAKEPNIPGKNILIAPILGLSCYLTVNVA

SEQ ID NO: 960116 - protein, 133 aa, Homo sapiens
DSQGGKTEVNYTQLVDLHARYAECGCVILAFPCNQFGKQEPGSNEEIKEFAAGYNCQILICYSKICVNGDELPTLLMEVDEDPTQGQWASWEMPSMCEHYTKFLICQELAAVVKRYWTLEEPLVIEKDLTQYN

SEQ ID NO: 960117 - protein, 227 aa, Homo sapiens
SWGWEGGRWVALRPAAAPGSTWSAAPVEEEVDFMCFPVDWKNLAQNLLCLCMWCLMLVMCMLMACPERMCFLLLMTCAVAMDLQPCAAWARLMDARTRGRSSQALGRSRRDLRAAWGVWVAGPRLHKYGTEGGLWGWPQFRAKLDLRVLAVTSGLGSVLPLLSWFGSLNCIVAVSPEHGHRQERGTLPWPPSGNEFRYFQRMTTTSISRKVTRIWVIMGYEDLFLHS

SEQ ID NO: 960118 - protein, 211 aa, Homo sapiens
MLRRSTYLCRSQLEEEIAALVIDNGIRLCKAGFAGDDCSPETVFPSIVWAPQTPECVMDVAWAKKDSYCGLTDGTMMQAVHPDPVSTPYEHGIVTNWDRHGEDAGTTPIYNELRVAPEEPPDAADRGPPEPQGQQKKKMNSHNDRDHTTPPAMYRGPIQRPIAVPVLPPLGLQHNGIGHGLLETGVPQNVPIYEGYKLNHAHPCSDLGWRP

SEQ ID NO: 960119 - protein, 186 aa, Homo sapiens
MNGRNKFEGEVTKENLLDFIKRKQLPLVHEYNEQTDPKISGGEIKTHILLFYAQECVCDYDGQLSNFKTASRELQRAQILYHLHRQLTTPTNQRILEFYGLKKDRVPGRAPHTHLEEEMTKYKPEYGGADGREDQQSTATDFLEGKIKPTPDEPGAAGGLGTSRQYRMLARRRTQTDEDYRMRHTN

SEQ ID NO: 960120 - protein, 90 aa, Homo sapiens
MLPVLAPHVGCGYDELQTDGNPAACHSRLGRMMADSESQEDIIRNYCHGTIAQCLGTAWTCSIPPGLVNGPGPASSVNTSLVGGGPEQGP

SEQ ID NO: 960121 - protein, 124 aa, Homo sapiens
MYILICLLYTTTLIVPPSLHHACHSSLSLFLPLPQSNVTLSALSRLPSPLHSVPCTHFVLTTTYPSLSAFSLSVPPLRPFPLLPIWLRSLFLYRFLPAPYHLSQSLLPPCLLPLLLAFVLYPGP

SEQ ID NO: 960122 - protein, 147 aa, Homo sapiens
MARGGAIRRRWREEGACSLSQPSPAHALALDGMTAAWNLWLLNKYSRCWMCFCCMQDALCCRPASRVCVEFQCSGVTLMPMCCLPAWMPIAGMPCVAHDLPVKTAGPGWFQPLCPGLSRGPWQPHVGPLAICQWVRLRVLALRMNIA

SEQ ID NO: 960123 - protein, 168 aa, Homo sapiens
MKVVIPSISSETLQGSRTPVYMAIPHQSSNTPIDASWSDIHIYTNFAKHPHSFMVTESYDISYRHDGPIVDALSTITRGCQAGPQSGKRNIWTSAGRPIWNSTQLIFGYTERTTWVTTATPGQDRTDWLQRVAMDQNTHTNGHKTTENKGEQASHGTGSINPRQEHGD

SEQ ID NO: 960124 - protein, 172 aa, Homo sapiens
MHTMCRTVSPWGVTYEHSKTHTITNVDRPRTRVCDLAHPKDNNDCRGTTWMTMRVIYMSAILEKGGDMQQHSDCDFGVHHKVPSDLAVWVATTYRKFNLGVTNIMGSTTDTVGRLPPSYTATNCHVETHLADRFDSMGDGFHLYPESHTIFDSHQPIHISPPYLSTHMVGAN

SEQ ID NO: 960125 - protein, 118 aa, Homo sapiens
GACPLSVMNGCAVALIWVCRCARAMSLQPEVDACVAWSPDALMPDACDALMLMLAVDDLLPPAFCAPAACLLCHVPLAFVMCCDVACVIAYIASYIECLRVNSHDCDDYMVCVAKPLR

SEQ ID NO: 960126 - protein, 152 aa, Homo sapiens
MLHQQLQLLLSHAHVEPLLMRFRMVLGAIGTQWKLENPCCMIYHRYCNHLCTMCIQKRHISPLQHQHLIVVEHVAIPGLPINIHKLLWSASQADVSKPRFGVSWRGRSQSSMCMMWPHASKGYSHVSDLDLPQVANQAVPDHFATSRSSYGG

SEQ ID NO: 960127 - protein, 175 aa, Homo sapiens
MIKVFRGYKYFSSGKHKFLFTLAPWIQFYNTVGEPPVGHLVKRGVLVGHALLYSLGGVLDSHTLQALTHTYTKQESVTSLWRNLSEHIYVTRTVLVDIKSHNLSHTHNNMCARVIFNPNTQRKYEGVTCATHDEHNNKKRGHKHPPAHHTPTTPHFERYVVALCDEKRERATPES

SEQ ID NO: 960128 - protein, 133 aa, Homo sapiens
  misc_feature (5)..(5): Xaa can be any naturally occurring amino acid
  misc_feature (12)..(12): Xaa can be any naturally occurring amino acid
  misc_feature (104)..(104): Xaa can be any naturally occurring amino acid
MKVDXSTTKGVXVSWIFSPQYKPEGEPPCVARGCQRGVAVCSDRSRVVAKHFECGNVEECVPELWALPVGLGLYQKLSVVESLRKRGLYEGHTQYRGCGVGEGXKNYLFISKGVTLEHPCGKRGKILVGNIIQ

SEQ ID NO: 960129 - protein, 208 aa, Homo sapiens
LRLAPPGAAERRVMLLVVLAGGVPAGAPGGAGGKPGPSEGGGMLAVMQPMWLLVRHRCGFLLCGVGLCCAVMCGHATPVLRRPKGRKKNEKKNEGEREEKAETHARPTNEERRENENEKERERRSNTKKREKQATKKRKKKRKKKRKKNRTRKTGPGQARQKERERERRKKKQQKENGRSKRANKKRKNNKESQRRQKKEGERKKNKK

SEQ ID NO: 960130 - protein, 320 aa, Homo sapiens
QSIATPDSGVLRAHGSTWGPERRGEESSGHFLVCCHRYMWLVGMAVGHLIICAMIPNACVDASPNLPPTEKIRAHPTISTREEQYITQTNNEMTHREKERQKDKYHTQKNNENTHRHATPHTNRLDSDNDTRTAEHEEPTSNEGAASGSEGASRYRQTQRDEHSERQPGGATQPSGPQESGRELQTAGSKRTTNDETSTTPKGDDPDRTTCTPKQKANTHKKQQTKKTTPYQNHTGRNPITKDERLDTTNIDKKTEKKERKAQSIQTGGNHKTDNEQLNPGSHKPQGKQTRTTRLPKYQTRGHNKKEGREQKQKTETQHK

SEQ ID NO: 960131 - protein, 132 aa, Homo sapiens
RRSAVRVSLTGRKWKNEIDRRMDHMTTGLRHVQMLAFAGDLTLPETVFPYPSSGAPDTRAVMVWHGARMDSYSGDDGPEQCSGILTHECTPIDDGIVTNWDDMEEDLAPHLLATELRVDPEEQPVLLTDGPT

SEQ ID NO: 960132 - protein, 102 aa, Homo sapiens
TDRGTIPLLNNIPMDNLLLLIVPIHNRNGIPQAYRTKNSEAIYNIRKGPNVVGPIRAYYNPYRCRHKTSSPRSPVKTDTSTITLYITRPRPYSHLTDQHHIY

SEQ ID NO: 960133 - protein, 107 aa, Homo sapiens
WGSLTVILPQYHPRRGGRLGKALVGARSNRMGTGDRICTGKEAKEAQSKEATSKVTSCGSRRIASPFRTYPHSHHYSWQTHQLQRGHPTNLFRTSQLPQSRKNSAMW

SEQ ID NO: 960134 - protein, 206 aa, Homo sapiens
ARKHPPPGMVLKAFFPTCCVSAGQLGCWWDGGCRSMSSAVVLAGPALSLHPHPWSMQLLAQVRQAMPGGLWPCWAPGATAGRSPRRAWACSWEMPGVRVLHPIEPMASWLVPGMMMAGTVLGCCEATHLASCPLDPWLPLVEDQVMLIFYDQRQVLLVSSYNCHLSCHDLQAGATTDSTGGPGLPVFDTVARSEVLFLQYRFDEGP

SEQ ID NO: 960135 - protein, 69 aa, Homo sapiens
LGPHPARWDSPAYPYYVHPLRLAVDNGVEGICGAWCAPAYVPPAVHWCCCAVLCCPNLKVLVTVGDVWP

SEQ ID NO: 960136 - protein, 118 aa, Homo sapiens
GHHQACSPDYARTQFLSPTHERIPTRGERGKSLLRAQRSDEAKVLLWVLMEIGLPAVLPHSLKCPYCHWTPDQPGCLLRIHAYSPRDCYESSMAPSGLVDWRVCVRLIDFAAMCCLKG

SEQ ID NO: 960137 - protein, 194 aa, Homo sapiens
ETRPRRRRQQLQHHLHPPAMEDEEEEEEEEEEDEDEDLEELDGAWRWNALPPVACPAGPMCPPAPCLPGAPSDGLLEMTSVPAWLPRVDPLPGLLPAVAPGGWQPSCGALSPGVCLTVPCAIPAVVLPQSPPSPRITRRTTDASGPGLPHKQHNEDKKKQQKQKREGTKENKKQINYNHTRHTLTTPPHTKQLT

SEQ ID NO: 960138 - protein, 104 aa, Homo sapiens
CCRGLAAGEAQILSGGSATVTGPLPQQDPGTPRQAQGWGGWAQRPSTQHILSHVHIVTIPYPHYRFCIGEIVFPDCSGHRPTIYEPRTPDSVMDIASTIDLSIL

SEQ ID NO: 960139 - protein, 70 aa, Homo sapiens
GLQGSHRCSVQRGSVSCVLSAPPHFHFCAKPTCTPEFLRKFPAWQWSHAFDVCDDCDSCSVLMMPTAYLP

SEQ ID NO: 960140 - protein, 171 aa, Homo sapiens
FPLFLDHPYLHRVSFITCCLLEPFLSAPMLGDGEWILAAGMDSLCDLDGAGKCLKSPRVRCACQVMLCQLASVESGDMSGVLCPASPHVVKTEAYVCYACSLTHTTHHVFNDPFYLGDDKQSNCGLAILSKLLLPMSWPVAPVLWPCPCPHVHVNLGLDCFPVPRNSSSLY

SEQ ID NO: 960141 - protein, 70 aa, Homo sapiens
EIGLGAFDAGLLWALAFSAADQWCLLFVVVDDFQCSSMLSVWDCSRRNMNLAEIRELQMTQSWAVGFNPR

SEQ ID NO: 960142 - protein, 108 aa, Homo sapiens
MARGPTVMHSALLGGTEHGWCVITCPVSLFERLAHIEPILAMVWAISLPLPYLVLPGGVPSAQEDSITPGRAPQAFSLWPLTFWLQVTVRQNISEDKKMITKQNRNLS

SEQ ID NO: 960143 - protein, 220 aa, Homo sapiens
MRGVTQYRLGLANQIQRTSANLHVRRYTAKASTSYRDSNSNNRNNATTGGTTPAKQKTQSYTENMTQTTENSETHESTTSQTTHRTDEHKHHESKATEKTERGIARTTEDTTHSNLANELAPQEKNARKHVSSRHNVAAHSTEPYKKSTTSKKQQAHKRSNQPEHKTQPTLNSQPKYTKSIDTGNQHTSPRQYKRQQAQPDTSRTQQEKSSHSCDETTYT

SEQ ID NO: 960144 - protein, 105 aa, Homo sapiens
GVRRYVGVNYVSDDASGGVCKTRVAEESYYALYMWVISFKNSISFYLLDCLFSTNFKARHYMCLVLPYQLWGWGVHSYRLLCAPVAILGCHPPLSRLWRGVIKVD

SEQ ID NO: 960145 - protein, 107 aa, Homo sapiens
MLHQCSMCILFAIWWTTIVPLSVSWVLMLLQCEVATCHPVVCHHPVPSSPSVPRAAEATWWDTMTLAMPHTCPYARVTCACCCGLCLVRPHPLHPVVHWHRSPAPCA

SEQ ID NO: 960146 - protein, 70 aa, Homo sapiens
MANGAFLHPFPSPRTEHSARDTLCFNGKLTPPGRLHIDRVGAANHRADSSGWPCRLPGFAMGRLFVGTRG

SEQ ID NO: 960147 - protein, 215 aa, Homo sapiens
YNFKWIKTKLLKPQFLGKTTGSGLSGYLSSNLDLGPPVRAMRFKSRTPREDISLCDDSFGSKGISPQKSPVWAFRVMCSYTTFTKDFYSWTPLWRDLLLCPCVQLSTCAGGSGLQFTAHQEHVAVRARLVRGAITQGVLSPMNETCGVPEISVHSRVTERPLFPRFSWNLAHFGRANPPRGGRAEADGGGGGLWNAQEESLSARAALETEGLRFL

SEQ ID NO: 960148 - protein, 249 aa, Homo sapiens
VTPPCPALHLHRNPHGTVETGVDCGNRGDCGGQGKQAAGHGTGSGRLNGKQRRPRGQPRVDWAHSRSRGGPAGSFHPVPCQMSPGQPDLRHIGHRTGSKRWPRGCMWPPSHILSSQRGHLAMAAADTSWDPGVHPVTITPALWVPSGDASRKGCHKVRRELTFLWKKLVIPLSPATRLKPFTSSVDGQRDSPPYDDRVQWLTPVLQRRLWDELVSIDQFRDPAEDSAKVLHHQRTPACLPLVDPLSRAR

SEQ ID NO: 960149 - protein, 113 aa, Homo sapiens
MAMAFLSAYRTKNSRLYTSTQRPNVEAPTGYYNLRWGHKIFTKEPLEPVTSTITLYESRPELSSSPSLFYYEPPLRRTDPWSTRARPPICSEPPLAKPFTQSSDEGEHSNLKN

SEQ ID NO: 960150 - protein, 128 aa, Homo sapiens
LWLLVAVAGLGLAVFALLDVCTWCAFRAPCCARACCSLRVCDLLAEQRFPGRCCPRTCDLLLHMNNCAATCCEADFAAASAHLTLLRGARGAEGVAGAHGCLAGLVALRPPPVRLRLAGGPSRVAAPA

SEQ ID NO: 960151 - protein, 96 aa, Homo sapiens
METDDEEPDSATGKRCSLTTDEEDDVDTKKQKTCRGMTSTGNMKETVKLRIQKGRRSPIHPSTSRSQNLKVVTFDYERSAVPPWAVPTADDRGHHN

SEQ ID NO: 960152 - protein, 268 aa, Homo sapiens
WKKQVLKWYGVSQGNEGPSPGPNKIISQRLHERRGLGGGCAASREASSRGPWCGRARGSLQLVVRGPPGVCVLRAPHRSRAPAPPRSGRTRFHSLPPEVGECIVPATEWGSVTPEDLAGCVARCCTARCVYTCVRIPLGGRRASLVLWADPWGGAYWSLRNGGLSLFLCWPPPFRWVCWPLPHCWGGGLLHACGPSPERHTMSPAGRLWAPESSGATPLSVVTPAVFPPKTRGGFVWPDMLEGGPSGETVPREPSAGRDAQLSPGPVD

SEQ ID NO: 960153 - protein, 171 aa, Homo sapiens
MTSVEWLQSVVPVAPDCPECASVRTQAGSATHQARATPAWWSSVGSVCRNVGIVPRGRASVVTSYKGPENSGRQKSSIHILPRGVPWGRPRVDIRRAGSQNQEKRLAKGGENWGPGRTKHRGNSVAEGENPTIFYIGSQGVWPRDQALNRRWARAGIRKWQPKEGWGNSTA

SEQ ID NO: 960154 - protein, 246 aa, Homo sapiens
PGPRWTLRELLVLDVPINGPPCVEYVKPCVQWDENGAMPGEAGEPGPSWDEWRAPRGPKGERGENGLQSVPFSVLPGPPCDPNGPPGDDGPKGSSWSQWVFLEILVPPGEPGPAGQDGPPGDNEEMMVNPWQTRIPRLLLVNHGPSGPPWKKGSPMCPVDVPLMCRQWDEEEGPWVEAGLGSALLGGLGPIGPPGVPLGKARTGWAFDGDPGPVGDNGLAGSQARMVPLGHGPQDFRPQEICPMSE

SEQ ID NO: 960155 - protein, 403 aa, Homo sapiens
QNGPAPAPQASAQSQRPSGTSIRSFEDQRRGDELPTKDRQHRPLDLGRCHLFGSRYLAVSARKRPRRPVAAVWQSRGKGCSEAHPRSGVVTPRRDPIAAANAGPSVMDDPALCRSEGSRHTGQGGLTFPCAMTPPDVTDGGMSGPARVRPPCTPRLPRPPASLDCTEVHVATRLSGACVAGQGRGLSTAGGVEEERKREVRGENTPVHKREHTRAQRDGNPPGGRNGQDGRTPLCIALGEASINEITEQRGPRDGGARVGVGGRSGAAGDLGRCVAAGAQCQGVARMGRWPGYRMPGPWGSQWAGRALLYGLGRPSEGSSTGRGVVAAGPRRQSRGAGVSLCLWPGGWHCWGFECQPPFARCPVFSCGIVVFPSWRHLPGYLGCGPRLCPRQVGSTPHPRCLH

SEQ ID NO: 960156 - protein, 104 aa, Homo sapiens
  misc_feature (82)..(82): Xaa can be any naturally occurring amino acid
MARWGATSRGIIPVAISLSDVEPGVHTTVIRRIWSGSVPLRVVSSLVPRSVGPLLPFQEAFLFHRTLCDCLTSPLFHRGCYXGPHHQCWSLILPTWIYSLWAPG

SEQ ID NO: 960157 - protein, 86 aa, Homo sapiens
MRGGRRRGLLRVYTGFHFPFSSLLSPRFGGKLSQEPVAKPSRQVVIPRGVTWYRAESVPRHEFVGSQHDEKLSNREKRSHRKTEDY

SEQ ID NO: 960158 - protein, 172 aa, Homo sapiens
MAKVLTPRACYAELSAKSTPSGFTLDDVIQTGVDNPGHPYIMTVGCVAGQTRSPTEVFKDLFDPIIEDRRRRIQSPDDDHKSELKPEQHCKGRETDHGTQLRAELAGAHGPRRNPMEFLPPPRQMKDRGRGAETIDECSIDRMPYTGRTDKLGEAEYYRCTQSMTSRSSKRT

SEQ ID NO: 960159 - protein, 68 aa, Homo sapiens
MRMDGQHGRAMDRRENWSKKDAIAGNDGGAAGDNRGRTGTGAIRQTETHDEIRPPVNWPERNVRMQKQ

SEQ ID NO: 960160 - protein, 120 aa, Homo sapiens
MLGFDYVRALLGHQRQCSSVCLLRAPPNVPGYSMLLACAQLSWPARARRPRRTACLDTSSAAAADPYETPRQRGAREPGLRSRLETQRKIRAPKVSGGRVWREKKDPGGGPTHTMGPATV

SEQ ID NO: 960161 - protein, 147 aa, Homo sapiens
MGCGGGSHRPEIHLALLLGAQRMGRQKGGGVSNPPALRKNGGSSHFTPPFLPGPQDGATSGCGAVGPQMVLTLENVRTTNKIPIKLKLLVSQKKKQKKTPPRAPDKFLTHRATGGGRQLHLCAPTGARRANRSRTEEERRAGRARAR

SEQ ID NO: 960162 - protein, 80 aa, Homo sapiens
  misc_feature (59)..(59): Xaa can be any naturally occurring amino acid
  misc_feature (65)..(65): Xaa can be any naturally occurring amino acid
PGWEKRMSRSSGRVYYFNHITYRQPVGAAQRQQQTVCVPKTGAVVEPAMGPALLCYLAXFFFGGXGGPFCKQKVCPPKYP

SEQ ID NO: 960163 - protein, 254 aa, Homo sapiens
PLCAMAVQPQWTELLCSICLSIYQLTLVSLGCEHYFCRRCITGALGAVQDVLHGLPCCLPLSAWRTVLPEPCAGCPASMLANICGCATCSFPAGLPSSTLLPAPLRPCQAHDKVKLFCLTDRALLCFFLLLSLHCTEQHQVTGIDDCLLTELQRELKDQLQALQDSELGTTEALQLLKADNWRRPSLPPRACGPLSGEAFERMHRLLRERQKAMLEELEADTAATLTESSRKSALQPAVRRSWGSQICKNGGEQ

SEQ ID NO: 960164 - protein, 113 aa, Homo sapiens
MSVLGAKPAAAGLLGADDERCWLNADGCRTLKNRGYAQACRSKRLAACCAAVCCDGLMLLPCLGLPSWTAACCGPMGVPCLCPVELRSLQGSAVTWANPRAAPWSGDPSHLFL

SEQ ID NO: 960165 - protein, 67 aa, Homo sapiens
SSAELGSGEPGECEGLVCPECLSPLLCARRNEEDEPPLHLGVNPLVRTRALAAGPPAGMMWLCMHQH

SEQ ID NO: 960166 - protein, 209 aa, Homo sapiens
PLRRRCFSAGRNGMKRSAALVIDNVLRACAKLVFAWGRLLPEPCFLPSSCAAPDTMGVMVWHWCQKDSYCGATDGPEQCCGILTLKYPIDAWHRHQLGTDMDEDLGTTPSTTELLLWPREEHPVLLTEAPLNPKANREKMTQIMFETFNIPGHVLWPSRAVLVPTYASVGAHLDIGHWTLGDGVTHTVPIYEGYAPPHAIMRLDLDGRD

SEQ ID NO: 960167 - protein, 235 aa, Homo sapiens
LWARVSGEHERGGFIGAGQLAFALCQGASQQQASLVAHNDKWLAPQTWTCATVSALRNAWCGEVDTPQEGDWCSTVDVLFLAVKAHTSSPYILDEIGADIEDRHIVVSCAGLASPSCSIEKKLVSCLRLRRPMGHPLHDQQLQIVVREGATVYATGTHAPGGRIGRLMEQLMSSVVFCTEGVSRTDRMASRGLSGSGRLRIQSLDSLADGGVNGTPRRWKSARAMPHGVQDVWTR

SEQ ID NO: 960168 - protein, 206 aa, Homo sapiens
  misc_feature (122)..(122): Xaa can be any naturally occurring amino acid
MATEDPQSCHGLGLPVMAGWGYGSDKRLVKAWGAAPSPQWVAVTGDEHNQLLLEEHQARAWQGAMWRMARLAGEHCQCGNGVREWACLVALVCAWGTLAMPAVLDVGCGADVLCFWAQCVVXHFPMCATVWVAHVLCCGLVKVVCCDVGHAIDRWQQESPHPHPHPPPYPHFTLPLLSPTRCEFSGWADALLNLVARVPSNLGGSF

SEQ ID NO: 960169 - protein, 192 aa, Homo sapiens
  misc_feature (72)..(72): Xaa can be any naturally occurring amino acid
  misc_feature (84)..(84): Xaa can be any naturally occurring amino acid
MRGINLWCPPCVALHTCYMCGDLHMCGEVYLVMSSAPCVERGVTRSLYSACVLSVCSAREGVWGSLCGSREXVLRPTQKRGNIXLIVWAGGVWGDSFIERTTAGGGGVCVCKRYHRVCGAIIHITFIRALSQRRGLFSRDSLARGVLQVPRGPLYPRGARRVLQISLQPWGRLTNVYRQTTCGVVNPLCWVG

SEQ ID NO: 960170 - protein, 142 aa, Homo sapiens
TQVCRATTDGDGEPDVQRSCGLRMLSQTQVPPDYPRFVESVDEYQFVERHVTRDINRIPGSPQSMNIILPHSELEDHHQKNHQQTKTWTLLYDTEQLIEMQQKSPIIQRNNHSMRKPEDDCEIRESGKETSGTLQKDSEKIY

SEQ ID NO: 960171 - protein, 41 aa, Homo sapiens
MVSRLPVSKDEPDTLTLRSGPSPTERLGMESRGASRTNNYE

SEQ ID NO: 960172 - protein, 173 aa, Homo sapiens
  misc_feature (53)..(53): Xaa can be any naturally occurring amino acid
MRELGELSLLATAAAFVLPTVCRANVLCRHSSGECTLAGAAAGCNSYKLAVDXSGGWAWVSEALVVVSAFISFFSGVIIRPLCATDTDRVLSRPCAYSTGVMVPSVSDPRIEVHVRQLMAFSLLMSDCTDVLTRAGHAEVLVSCSARGSAQICACFWSRASMRVPRNVKAKLA

SEQ ID NO: 960173 - protein, 55 aa, Homo sapiens
MVARGGMARFLWPLEARVNPTVGGVPMSLKEMVSKLKKPRGNILLDKGWQAVDVQ

SEQ ID NO: 960174 - protein, 110 aa, Homo sapiens
MQKAGFDLGWPAAFSGTQGCPSPCAQPTQVRAGLGAYAVAVFTPAGIVRSLEMSSHSTPPTSAIWSGQYTGSSAAPRRLDPSPLYPAAFKMALLLHRNILHAGVGTWGGP

SEQ ID NO: 960175 - protein, 279 aa, Homo sapiens
SLQLPCRHAIAPSLEWHCLECPTSTMDWHAGCCGHVCSTMPGPVMILQTVMCPVQCQWLRLHLPLLPLLSVVPILCPSVLLPHWFWYHTECVLLPVPAVRSMPGCDAHVVCLAIHEESVCRGTQSVHYVVVIPEDVRDSNVHWEVPACANCCMLCLERMYLFQTHPHSPWKPSGPQMKWRHVLAEELKLGHPADRPVIALSWNVYKKGELLESSLMDADRLSAAFASLRIARSTPGSSGLRAKRATGCREQVVCTETKSLLGLESAGSSGSPVVFSWDQ

SEQ ID NO: 960176 - protein, 211 aa, Homo sapiens
MYQQRCEDDLLADPLTSLAEAAGLLDLWPAHLSLLAPRLCTMSSYTGTAHWLPQLSSPPPWAGPRSPWTIKQQIDIVSCSGCGEVRPRPLLSAMYLCDLPRTLLRWGWPYSGITLKVKGPSISSRVSGFGHPLRDSLRAETVVLPLGSDLRMPFIVGDTQTKQQYCSVLICLRTWGPAAFPRGMPKRPFCPALSLPGLPASVPVNVPSPRS

SEQ ID NO: 960177 - protein, 154 aa, Homo sapiens
RRRVRSRPPSAAGSQAAPRLELPFTKHLTTHIDTVRVRPAVSDSVCRLHLHTVASSCAERAGSSGGPAVPTRAYGGIINDGPLRVRHHLSEAQPRWWAVLLSGTIKPSANTSCLANLARRDSRHTNLMQRHTPDEPLETYPGIEQYRFESTRLT

SEQ ID NO: 960178 - protein, 64 aa, Homo sapiens
MGLQPGDKYRGDVFILADRAPTAPRTGPPCSDGRLCQCPVSVCGDQYWLPLPELCVDAVEMICS

SEQ ID NO: 960179 - protein, 104 aa, Homo sapiens
SPLGILQDAVRRVLRRVRALPRRRPEWLSRNASEFSLSLLHGDFHASNYSSSKRYLVTAGDVPSILLEVAYLLERDTSVWILKKGAAVSYKDIGDGIAARYSGA

SEQ ID NO: 960180 - protein, 256 aa, Homo sapiens
GSRVAEPWADAPSPEEKLHRITRNLQEVLGEEKLNGDTEGAGDLEIYVGELATTGNTTCGLLCAQCREIADFLKEGVRYTNSVCVTSTHILDNDEMPLWELQNSESAYYEQCDQWQMLVERRVCPWRSSEFSLKAADYQLSRRVHTRCVQTLLRGHTARIPRMAGAEVVEQVEHPLLSGSLYPGGAGLGLKESLTRRCPFWRRDQQKDFHLCEEYSCLGYSNGPLVNHGSGYRGRALRGPVAWPRGCPEVGPWEGG

SEQ ID NO: 960181 - protein, 253 aa, Homo sapiens
  misc_feature (152)..(152): Xaa can be any naturally occurring amino acid
MELVVHEAGVTPTLAFPEESLTQLAAGHVFGVWVWHSPCCACEFGSLETVATRACALTCAAPVGCGGPVLAFTNVVICGDTPGVLYRGHILKFSAPENLGDTLGPQGRRKAQFNSESAYKSAETENTIVMWTSGDTPPEGPFSENLCGRVAXHRGEHEREPSPKGPSQKEGVVGRDAMHNRVHSPRKESVRETAVVETPCACGDEDAEGLCGPQKCGLSVSPWGKISRCGKTKAPSLVWCLPSVLVRFPPQNI

SEQ ID NO: 960182 - protein, 267 aa, Homo sapiens
QRRFFIPLRARRSCATPWMRCPRRLPQGTIKHEPVHMMWWMGRAATGQKFSLCILTPEKEHFIRCGDQGDLSDVVAWMMLMVYPRYHTSQQSERRRRKVEALSHTHGSPGDLSLDGWHVHHAVGQTAAAGSSIPSAEKVPTHQDPALWSVKQERGAAHGSGRREGRVLRPCELVLRFLSHPAGPGSGAWWAAWGLSDSHWAPAALLRSFGEAVCGILPGGGRSAESASGCRFHDGPGLMIDLGLVLAAQGALGASASARGLTGSGAL

SEQ ID NO: 960183 - protein, 237 aa, Homo sapiens
MVGVRRPAGVRWRSGWDVRGRGCLAVGIPDDVHTSRERAGGIGRALHMVLPLAPRGVLLGRTSCFLSGRAGMLEGLDQMLTGAGAALQHFVAGVASQLWDSAHRVRGCPCTLSMDASLLTCEWTPGPMRCSFSPWTGAPPRALPAVACWTAHLLEWLNEWQKAPAVSWPRSSSGLKRPPCYAGTLNNVVCDLVRRLRRQRGRGYGAALPWFGTWRVESYKFGLEGIAAVLLGSRLGC

SEQ ID NO: 960184 - protein, 168 aa, Homo sapiens
ILLMSDSVSKEQTPWDAIKLICEAMRTKPYVLLCSSPTKGQDFAQWSLGNGMPSHKVIGGDYLVCLTPYGLPRPLPWSVLALLRWQSFQEGTMLYRLGVSTVGASGCPYVILCWWDRTQQIPSSWGMLCTGRHSCPEDWGRFAPRGRGVWCALTESSFWYCVNVSDWQ

SEQ ID NO: 960185 - protein, 145 aa, Homo sapiens
AAAWSGWSHGSGACGSSETPRGPSAACSALPPGHVAAPGALVGPRDLLCLCHVPPPASWALSALGLQGCPSGASCLCSHLLQMCFCPCDGVLSRAVLAGQWNIAHVLVDMWPWPAHALDALPARPCVPPSFGPDPDEPVWTVAHV

SEQ ID NO: 960186 - protein, 246 aa, Homo sapiens
MCPPCWGGCKTPIFPIKGDGTQAVLPIFYEETKNILQPYYFSHTSSLIYERPAHNTPAVGPPIFLKGKKAPNVLLSPTPHEVRGKTPGECSSSCGVTPACCSPTAGHNYNAGGVGPKVCPLKASQTLITPQNTTSPRPSVGRHSTNGGHLQATKQRRHRRQPHGLGAPSRAWSPERPPGSSREKTRRPPKGSGTHPGNLFPPFREGPPGATLGDRRPTETALPQTRAHTRGAGQKPPPQRKPTPWP

SEQ ID NO: 960187 - protein, 118 aa, Homo sapiens
MVSCSVRSVPAARRPGLPVPPSRPRAWGCVRRLRLGMGVLVQGEMGALSCVGILRFLLACPVLAAFEMPLDSAFLSIFTSMLCSHSLLSPVVTLFHHLTCPSRPVRRPSCVVTCSLVP

SEQ ID NO: 960188 - protein, 265 aa, Homo sapiens
MRDSSEIQKRRDHTAVFQTGRWEGLDHEEEALSSGRCARGRSHVDEPQESSGGLPDLCTVIIVNTPSLLPQDMMSYIGPKRTAGGAGGECTGRSCNIIGRRYVQVVQADVFDLMDVLACVLLADELPEDKVDAREKRRLVKSRAWARRSSRSVDSRPDPKVPMSVYVGACEGPVRRSVAAFAECLGAVGQASSGGLSEYVNEARVRVKSPNGVRYTSAYKLENAQGIPQVYTHQGGRGGHKVRTGTVYKLTKGDVRTSRVTTEGN

SEQ ID NO: 960189 - protein, 192 aa, Homo sapiens
  misc_feature (106)..(106): Xaa can be any naturally occurring amino acid
MSWEGKWTRITSEEDDEEPIPESSELDTSENFREKKEDTRKVLEWDPLETELGVKTLDCQKTTYPFEEFINEPLNEVLDLVQIIFQSRNREQSLYDMSLYMMLSKXAVILADRLSDEILSTGSHGRVIHLEPQYWPLKMAAGKILETALKTFGCGTGGGPNPGGTPKGHNTRGTKGTRGGKAPEDPKEAKNT

SEQ ID NO: 960190 - protein, 205 aa, Homo sapiens
MGLLVPATIRGCRAKREHPVEQRGEYEKPPPQDYFSTSILGVPHHTRKHLGRKIEVSKKARRVHPRGATRSYIYYYEMTIMRQIIIFINKGDGVHLTWCPPRHFSIMWVGFQTQGDACDVTKLSRSLRLRPSGGKGGSPPRGGQKADDSFDKEGGVHQRGAYSPLCWFGYSNGEGQEQLGSPRVLPLAKQGVFYIVVVSAPSETR

SEQ ID NO: 960191 - protein, 161 aa, Homo sapiens
RLLVGSCANNAFAFGPELRSLITPLAIQTHNFAAVAAAAYYRQLSSSSSNAGPWLPPVAAAGAAQRDPPRRGRLYLPRRPFSFPACQRRLSDVGRVRTRRPGPLDSACQDRRQAYRRAASLSSGRLRRLLMSPSLGSLAAALPILQPASSILRGLRPRGRQ

SEQ ID NO: 960192 - protein, 102 aa, Homo sapiens
MQTRGGRRKNNTLYYSTVEESTDAPNRGKEGGRVDTHKRGSEGPEDYVGRAPKKKMSPVSSRNQQHTQSDSRVVGDKETIHNRREREAIHSTLTMQEEESPP

SEQ ID NO: 960193 - protein, 564 aa, Homo sapiens
  misc_feature (500)..(500): Xaa can be any naturally occurring amino acid
FGRLIPSPQEGLIFSFQLSGPSGFLGSFGPYMPERSRGVGQRAITEELGEGLVKFLSSSLQVENSEALFYSFFIEALSRGERGLVKRGSAVHSFVGVCHRYYRYSLPTQKVGYLPFSVSGPRERSILVGETEEDIEYLRDSRDKSPSSQTRDSSNTDESAPCAMGETLSRVRQPVCNPRALTLVGISLQQENYCAPTTRGRPQWRHHLISSCGVGGIFGAPAVRQPSRGGDVVSSHHKRGLSDIRPSVGRPVAARARKHHNTRCVGVFTPPRNTPVVRWAAIGVTPTRRIYVRRPLGVMVGAGIPPENTRQYVATSPRSCAHSIFAPPVSYGPRLLVGSALFVAVLMGPPSSFHSLPLEQEVHSPFCQQGGAPPGRLLVCCFSRVPPKRVFCVGPPTRSVPPELFASSYSRPPLLLVSRANNESGARRAALLSPETRNLTVSVSRQMYSPVSGSVLAPPQKCALRAIIIHSPRGVSPPRGSRRRRFGPHPRQSVGRSSLXLVRTAVGTRHSIHINARILLTHDEGRRQSSFILSANAPSSVGVHVLGVDHITRCHVLSSSLVCV

SEQ ID NO: 960194 - protein, 158 aa, Homo sapiens
MREWTMATEEEILDNIGEDLCRGFRNRTCRASCKEIVDSYHPCQSVDIIKGEMSRPGEVCSAVKLCEYLHEAPSRAESPEAAVSPSKIPRAEHDRGGGPFMANIPLLLYLKKAPKQGPQPKGINGGRLAVPASALVTGIPTAGTDHSALVQALWCTVR

SEQ ID NO: 960195 - protein, 123 aa, Homo sapiens
MKGLCGNTRCVVRKLRSFITFRKEKPVVGFTPHMVGSGGNYPWGVENISYTYNMWEHAERRKHTSPLGNNYLRGGHPPTKKEAGVAPRKKTPLQGGAPEGGKKFHKIQAGGQKTHDEKTTRSG

SEQ ID NO: 960196 - protein, 125 aa, Homo sapiens
MPPSFWCLGLFYILRCYRRQMLEIYNETFWMYLYPRFSSLHLLQNVNGMRYPMENVPLHICGGEVMWSKKLFPGVGTQQSILSTGGRKQNSLGDFPTYLPLCGALSTEIYSPQHKHLWLMHPRIF

SEQ ID NO: 960197 - protein, 268 aa, Homo sapiens
KTHRVFIGSNTQRAGKIRPPGRGAKSRSGGSREGYPRGGGPPSRPTLRNIISPYSVQALANRGHRLARGGVGKRPDTTRAPAGSSVRSWSSSRGSTLGARNTDTWRESLRLTGREENVAPAGGEAWVGPGVIRSFRSPGPPSPRRCQPAPGAGQGGAGNPQCYLPEDPGGDEQTLPGKRALQGVKPARPPAGVFMARSHGRGGGSPCGRHKESCPVQNPDPRFRGVPARETVPTGGGAQYALTVGDRGWNGNSQSGKRVVTAMGPPQE

SEQ ID NO: 960198 - protein, 205 aa, Homo sapiens
  misc_feature (140)..(140): Xaa can be any naturally occurring amino acid
MGEMEQLRQVSGVSSRMQIAMMPGKGLCKTCTPGQYVVDVWPRGGGHAVQSADAADVKGTPGQAFTPLQIGPTDSTLLVSASREDGDSCLRVVHHASTHSSEVRADPICAPPGSSDLCLCPISGTSVACGGLDDMCSIYXLYSREGKCHVSRELFLLTQVSLSCVSFLDAPTIVTDLGGHRVCLRGPRSGRETGPGDPGAWLTRR

SEQ ID NO: 960199 - protein, 148 aa, Homo sapiens
MPCPGGVNLKECVVALLPRPVLPPSLGCVTVLWLTFRCLLQPRVSFLAGLSVSWVEKINILSGDETVKTLVDMWTLLGNDCPEQDSAPPDCSWRQKCASYVLALSALELQCLTHTWWPWAVPLPTDPTGVLDPRLLVGCAVAVLAVHW

SEQ ID NO: 960200 - protein, 131 aa, Homo sapiens
MSWRCTMVDSAGTLSSWFNLKGTRNSCACGKPLGGLSRITVRATGPGESPRFGLADIHKRHRDPGESKGLEGERETKNPEVPRVKTICARGATVTQIPQAVSAKEDTHNDTGGDKWRDAQDEKTIFIRTMV

SEQ ID NO: 960201 - protein, 171 aa, Homo sapiens
  misc_feature (112)..(112): Xaa can be any naturally occurring amino acid
VNGLYGSLGEPTQALVRPSGALGNFSLEHGGLARCPESMYRELRPGSPYRVSPTVLRPRPSACMSRKQAMGELLPWRDPFIMDLCSSAVSRVFLGVGRGPSSQNHGTPTSRXLISVMVRRGDPEFYPVASTVKALEAVEAVWEIAKSDQADARIAPRVPSLVWTDGVRPEL

SEQ ID NO: 960202 - protein, 68 aa, Homo sapiens
  misc_feature (58)..(58): Xaa can be any naturally occurring amino acid
WCLALPALSVTMEINAGLPAARRCCYHPVTMNNGCPVRRVRMFKDDLLQCLLTVAQLXPAGNAADASS

SEQ ID NO: 960203 - protein, 162 aa, Homo sapiens
YTYPEQLEGFTALIAAQYSGAQVRVLSAPPHFHLGQTNRTPEFLREILLSGNGPSDLRVMMDICVFESYAELPYYVSNEELLGKFSRGSSPGGASRVSFADAGYSAPSASTLGVPRPLGIMQHNETGHLRNARGGSEGEFWGCWMLTLKYEDFAGGRTSDIG

SEQ ID NO: 960204 - protein, 229 aa, Homo sapiens
KVSDSGGFQSAPLRVSGGRPRTQTVHQACSLSDSTTGYCAGLRSRRCSGLSRAQGHAGAKALDSGQEMGSGLTQLVPAGRQSRSSGLHLGLGLTVAGLLGPREATPSAPAHAWWHGALLANWQHVHDWETRQSPGAWKAALLPGNVWLLGVLGQLHSGVGPPSGHQLIDTTQGRLCGGQVTTLGAMAIDIHLMASWAIGPEPPRQCVADYDRRLTPSRHLNLGRKLRKT

SEQ ID NO: 960205 - protein, 216 aa, Homo sapiens
MAPRVAETCGGLFVKKNIQGPPHNLGVGWGGHCGSCLQAQEEYQNVSNSMFGARVPEHLSRDGEGSKENPRGWGGSLFGQSGVSSGYWPYPSGWGMPPSPYAGFGVGRCAQLETPQGARCVGVCQLLPGRVGPQSGLTMGLGALPRGIFGRALAPPQVFFLARGLHAGPLALPSVARLSPMPSHGWTPGASPYQRADLEGVDKPHWPLRGNTGARR

SEQ ID NO: 960206 - protein, 157 aa, Homo sapiens
MAIVYSGSIRVWGCSTKCGSLTLRSREADRVEGRRESSGGLLRPGNKTQEEKPRMHGVVTKLLSTFRWVPQATLALPSPGEGLFPRLLYAERPKLVPIGQTGTGVLEGFPSVQHAGVKLKRLTPRIPIIVNPAWEPPIVPQMWPETNSEPQARKPER

SEQ ID NO: 960207 - protein, 181 aa, Homo sapiens
KQARYEAWVAGIYAYGLETPSGIQQRGHSTWYSKGYDVMAQARSGTGKTGTLPYQILQQMELDLKATQAWVLSEPTRELGSAAYQKVVTVHIGGLLVVRLLFTPVIGGDQTCVLRCGNVQMEAPHIIVGTPGACVGYAWIGDTCAPKTTSNDVLYMDEADEMLSRGFGDADLMTYSKSSRA

SEQ ID NO: 960208 - protein, 248 aa, Homo sapiens
MALTQIIGVCGPDAGDVSQVACPIQVNLHGPGALELAKSESEEAEQVAGGNRGSQFEAMASFPSSTSDSSRNRVWAPSCKHWWLQALMISDAWGLSRSLPWEPLPLQVLLFFFLLGEAPGQSRAGRGGGSGGASPGYGGGPGGEGALSGIVEGRGEAWARAGRPGTQAGPVHAIVPEAMAGRTIVPQPSEAGGSALVRLSEANTTVALVAPPGSSGEAPTGVAGGFGPLSPGSARLRGGEHRHFSGAP

SEQ ID NO: 960209 - protein, 175 aa, Homo sapiens
PHIALKLLLLNIDAKILNKILANRIQQHIKKLIHHDQVGFNPGMQGWFNISKSINVIHHISRTNDKNHMIISIDTEKNFDKIQQPFTLKTLNKLGIDGTYLKIIRAVYDKPTASIILNGQKLETFPLKTGKTGMPSLTTPIQHSDESSGQGNQAREINKGYSSRKRGSQIVPVCR

SEQ ID NO: 960210 - protein, 261 aa, Homo sapiens
MPPPIDILSGFPTAAYPPKLRSKSKLSSLQHTGLTTKGMSHFLHFSLSALLQQRNSRLYCFQQGSLTSALPPLYDTLFSLSLLPSATSTHAAPLSTHARVLHTPRTSLCAHTHPLLLHATATHLYAPGCTRTHTLTLALTHATSNPLHSTPLAYTSTTASYLSLPTPPLCTRTPSTRAPFTPWAPLPLPAACPPLAYSLSYPSFLTSSPPSLSDPSLTTPSSPRSPRPRHAPPPTAPNPASPPHLPPHSASPPSPSPWPPA

SEQ ID NO: 960211 - protein, 36 aa, Homo sapiens
MFANAGWNLCKASELVTNEAGGTSIGDDGKVVLRNV

SEQ ID NO: 960212 - protein, 189 aa, Homo sapiens
ITGRTQQCRSESAAFPMLFEMNGGRTYNRNVSQCSAAWHPALNRLFTAGRDPTHKNYWSCQLSTTQASTTIRTPTGHTTTDLAKRTLVLLLRYTCATPTLYLLCLSLCTTDPASPPPMDTATTTRRTPPHCSPTQAHPPSQDLYASQPPLTPPTATGTTAHYLRHSALASATAPNSFPLRTVHSLLTAT

SEQ ID NO: 960213 - protein, 110 aa, Homo sapiens
VAGGVVRALPRRAGLVSMKCFGFIFHGCRVLPCLYDSSSRDWDCCSSVLYFLKSVFLELIRSWWILRESGRVLSIGEWVVWHRRYSGAERIATMPERIHWLREVVPSERI

SEQ ID NO: 960214 - protein, 294 aa, Homo sapiens
QVDESLLNRHAMAWAPEEGDAEVMHAGCPAAPCCRGAARKEHERCTGNMKDEYSKRRHTKHNQTTKTNDNTRDNTSHATAKHQKTHHNHKPTDDTPQQNTPARPTEHRQDNAPKENSNTQTRTNKQRTKRAANDEKKHNTTTRNKQNHSNTHANKQQNGNAKKPTREHERKRRENKNDDNKEDESKNRRNTSTRNARTNTHTHKRRAPRTPRKQRRQEKTTTARTPKRKNRNEAKPQQPGHQGQRADEKKRRNPHQAEKRDDRRAQETQETTQEHEPEKPTTRNQRRQARTGKR

SEQ ID NO: 960215 - protein, 71 aa, Homo sapiens
SPRMVSIPRSETLPGRGWCMFRGLAQADGALIISVWILGFSLVWHDEVQGQHSSDPTSCATVRSWAPWRLL

SEQ ID NO: 960216 - protein, 196 aa, Homo sapiens
  misc_feature (53)..(53): Xaa can be any naturally occurring amino acid
LSVGFIGAGQPGFCPGHGLRMQQASCAAHRIMASSPDMDLATVSALRTMGVKXDYPDNSGMTVQHSDVLILCACERLRHHSLFYPGSEHQAPTLRTEHIVVSCAAGVTISSIEKLSSVSASPQGHPLHDPSLQSWCGRGPPCMPQARTPSVDVTVRLMDAAAEQLCVLLALEVREDLIVCRHGAQWQRSRLRIHSP

SEQ ID NO: 960217 - protein, 160 aa, Homo sapiens
SCRSAWGCNLELSQRGDTFSPLSLTEEERPSSRHKEQKKDKQIKRTRSKKPPNSKNNTTPRQTKKQDNHQHPDTHNTNKKKRKQSEKDETQTTTTAHTLTLTNIRRAQKHQPTPKMEQTRQSSHEEKYHMTIHTKRDTAKKPTTKKQTPKMTKEKDEDTV

SEQ ID NO: 960218 - protein, 161 aa, Homo sapiens
GAGDRDGDRERLGSLAALPFVASAGSLRQSEPPAQRGPASLSDVHLPCDVLAMLVALTCTHPCGAACLPCAALHVPAGDGMNEKPWLPLLTLDADEMFDPGAEELTLSEEATWSEEATQSEEADQGEEMNLEPGGDPGPEESTRSEEVTMGGNGVQLVLTC

SEQ ID NO: 960219 - protein, 182 aa, Homo sapiens
GSASRQQIQARSSRRWDRPPADHPRRARDTTAPLQDPAHQPWKPLGSLVFPCEAVIALPCVMPTKRRLRGRSACGVPPLRVLRRPAQLAPGCGPLAWSLPCVNIGTRAATREEGQRFREQREAEMGRGHHRHNRGPQPFTQQGVGDPRERNHPPAEKENAPGEASENAHTRHEETAHRNRWG

SEQ ID NO: 960220 - protein, 106 aa, Homo sapiens
MPTLMTKSRLKAILSAVTTRPEETWTRGRPITLGWRVPPPYKFSPLQAWDGTACTSAGSHYNPVDCKPPREYKPRQISMDHNFTSKNRLTSPWGVTRIIIQCEQNA

SEQ ID NO: 960221 - protein, 197 aa, Homo sapiens
MEHVLVQAENNGSHGTVFVVLDAGNVSRIPYTGFILSVVCHALRVLHQESTLRVVPVQTGGKPRKETRIQVAKSYDPSSSQYAEEISEECMSSYVMDDICRSLSIADAMTSETGFWKSVQKTGSSVWQHPTGHRKISIKMDSKRANCVPFDSSLEGNIVIQSSSDSGHRLPEEGNLLLREKSTELTSEADVEAVMGK

SEQ ID NO: 960222 - protein, 154 aa, Homo sapiens
MSYMFCGMNLDVCMLRLCLSDLMNTDLCVPSLLVTLNVHCTKLSCYLCDDDSECNVTCMCAYVYLPSSDIFPGETRTLTLADLDPKLLSALRDFHPRTERSLLLALDSAPSSGDFGLMRRCVHLSPLRFSSVLACPLPVLFVHAIMMGFGGRVV

SEQ ID NO: 960223 - protein, 68 aa, Homo sapiens
GWEARVVAAELGKSMKPGKVVLVLAGRYSGRKAVTAEKHLMSGTSDSPLTASGFVVWRGIVTAYPAQS

SEQ ID NO: 960224 - protein, 102 aa, Homo sapiens
LLRSETAGDVGRAKEMDETVAEFIKRTILKIPMNELTTILKAWDFLSENQLQTVNFRQRKESVVQHLIHLCEEKRASISDAALLDIIYMQFHQHQKVGMFFR

SEQ ID NO: 960225 - protein, 88 aa, Homo sapiens
AGRLRFLVLLGARPAFGTERSCVAGPLPVKVLPCESLTSCALLLALCMKLVFDVMLACLPAVACMSCLTCLALSDVMLAGTRWSPLPD

SEQ ID NO: 960226 - protein, 112 aa, Homo sapiens
PVKESQVAMKEMSKRDGNGEKRHELSDEVSCENAMMNGKAPAEDVFKNAPASYCEEVKRVPLHLNVCKPTDRASCGEYVSDDSDYEWVNARCDVNMTPPPQPLHERQPQKRE

SEQ ID NO: 960227 - protein, 247 aa, Homo sapiens
LVPLGQQEQQVPILGEVLLSLPITEEGACLERAALQEELQLCKVAGAGTAGPRVTQQGAEDGGALCLDGGPDRPGSPHSSELPWMLSGCLRVIQLNWEPAGMELAHCAGPGEAQACQEDTSCITRGFLGLPGNSRPCMDTCRGEHAQPEDDGGGGARLARYTWLYTAHSHNEALGSRPHNTTCYERIEDKKRQPERGEPPEPLESIAQAGVLQEAERLAQWPEVDPEEPDRMSEEVRARIHGVNCRV

SEQ ID NO: 960228 - protein, 209 aa, Homo sapiens
  misc_feature (122)..(122): Xaa can be any naturally occurring amino acid
MLTDLDDMNLSEPFSVDIYAYWSVEESPSCPIPRAGEAMLALVSRRLMMDVAASAKSRERGERTGHTLPLIDPWQQIGYSYELLKKDLNAYGHFGYLSNPTARRLASASTSRRSVRWPAEGXLTLGVHPCHSPVIAGGTNSRAVSEVAMKELGRIGIGCSQHSIVRGIASGTVMFRIMAVTLESSADPRIYYDLKTGIVTGALNAERRC

SEQ ID NO: 960229 - protein, 122 aa, Homo sapiens
  misc_feature (12)..(12): Xaa can be any naturally occurring amino acid
MGCSAEIGKNTXSAGLSVWGSGVLYKGGFGTRGNNGVVGLALGEGSVGEHLVCVKVAPYKGRSKGTEQKVKAGEGRLVSVVSNVQGVATALNFNTRKCGSVSIPLGGGCVLRTPRFSGARKY

SEQ ID NO: 960230 - protein, 106 aa, Homo sapiens
MCRCPVQRIIVLCTSRGCALRLHPWSHPFITRRRPALRTATGPPLIEGFHGPRQFPGLVSRLGRRYPLRGVRAIQLGEFRRFSVWGDTLCVTNGPPIFWRKPERYY

SEQ ID NO: 960231 - protein, 74 aa, Homo sapiens
SPATSSAKPSTPMAYGHIGRKYQLNSRWKLNLFKLTPFMVNSSVVCKGRVDSIKEPIRLCVNDLIENTFICASA

SEQ ID NO: 960232 - protein, 62 aa, Homo sapiens
MLQEKYTPKVKQYLVEREAGSRKSTKRKRHNTSKEHTQEKNRNKKKACGGRTKQQNKIASKS

SEQ ID NO: 960233 - protein, 205 aa, Homo sapiens
GDCPKGQTGLLGQQRGKSGGGILATRSSSSFFLSGIRSFEEPLAAFDELNLCQAPQQVALKCLRKAAFTSALWCTAARVAVVHSGRQGWNTSLTAVCRSLTSLRGRAQCGVCVEFLSAGNHLCVDVMWAFHQRPCRGVSSPVCDARVFVISLEGLCFDGCARTGAMDRFLGAVWLAAPWLSSWDVTGGRSTMGALGALGEALGGH

SEQ ID NO: 960234 - protein, 227 aa, Homo sapiens
QAPWIPHESRLVCSVPAWLTQSVVAVGSAVPPGWGWWGSSLLPQLSTSATTCCHTMVVDDCGVTTGLVDAMLPSCSTVKPKLWVSVMCLLPLERVPPVIYNRMDPRAHNPYVPGKVPLWPMRNFLMCANLIHDGCLLWKDMLTGALQHVVLSACLIDTMYLVFLQEIGPVSTSFPTLVINAFQWYRLQKSNQYDDIANQEKRDVSDQQQSQLRCRSATVSRDDLEPW

SEQ ID NO: 960235 - protein, 158 aa, Homo sapiens
  misc_feature (105)..(105): Xaa can be any naturally occurring amino acid
MGVTMLQEFVGSSSVYSFGGVDLLWLNALMRTSVAARGEKCDDIFYNVYVGRFDVVTIGVSRPVMKFWLIADGHEAPVRTRTVRLMDISCSISPLGTEASELHSXYGGCGGIVTSLNGGRLQIVHLMRFFGLSEYCYTWWFQYLRRCPGARVSLGGPG

SEQ ID NO: 960236 - protein, 153 aa, Homo sapiens
  misc_feature (50)..(50): Xaa can be any naturally occurring amino acid
  misc_feature (112)..(112): Xaa can be any naturally occurring amino acid
AGGSCRPPVPPAGAPGVCGPSGATLGPRGLSKTQYVQSHVRQEDMKGSCXGDAYVGQNGRQRHCENATSAELLLQATWYPATTRWYSYLARVYALLGGPSDFLPLAYMRGVXPCGDFHTDPRVDIRARCSEAQQHWMTAHVLVMSDQLGARIV

SEQ ID NO: 960237 - protein, 214 aa, Homo sapiens
TERPGAEIRQPGRGSFEDCYSILGRQLKHGFPAEDEFPDLSAHKTTWPMVLTPELYAELLRQEHCQSCASLRGLTVIHDMAVDNPGATLYIMTCGAAVCCVLTDVSPTEVVQWIVFDPKSSDGPVHWLATMPSCMMHKTDLNPDNLQWLCDDLLTPTTCLSSRVRTGRSILWLLPPPALRAAGSCRAIEKLCGWKPLSSLYVRLAGRYYGAQEA

SEQ ID NO: 960238 - protein, 140 aa, Homo sapiens
MCPKTLFSGPSDLVSTAPSELSSRIGGRVCPLTLRGNYPPVAPRYKCALSAKVHPRGCKWASCGAPRLRENSPHNKVASQRRLLSQQTEQGSLGPPSAKNSPLIINFGVREDNHIKTTKYEDNILGFCGAPLELLRCTSE

SEQ ID NO: 960239 - protein, 197 aa, Homo sapiens
MTGRAGRPAADNVCRVKLRSERWFGIRHRLIEKKGRHCERTTPEVDIDEKREANNLIRAEEIAEEEETVYPHTAKTNVKHRESRALLKLSMNSPKMPRNRQQKKEEPVIKNDDSLLKTKKFEKEKGCPKLTMEDVVSSKTKKSDKINDGSLLEEEIDAPKPKKMKKEKEDEMEKLERKAPKAERMDFLILKPDCNPR

SEQ ID NO: 960240 - protein, 75 aa, Homo sapiens
MIPSTCVTYPEEKSRPLASSLDTKLQSSDDLSNWSLCIRPVFRALKLAVLDGGRGYVWLPFAEEARQMDGEGVDS

SEQ ID NO: 960241 - protein, 137 aa, Homo sapiens
MRADAWTLRGARAGSRHCGAWYWALLSPSRSQLATKGAGDQASQRVSTPGRTRRVCVFGLRGTRDMPIAAKRGKSTAFYGNTRELLYLIGNELQRRPRKEDYDWSDGLLKEGHPLSSSEEQREARQKRNPSRKFELP

SEQ ID NO: 960242 - protein, 68 aa, Homo sapiens
MCAHANSINRPPMDAQCKVIGKDKRRERKKHNNQRHQKIAKPNGSRSTPIHKKKANGKIEHKPKSKTK

SEQ ID NO: 960243 - protein, 273 aa, Homo sapiens
  misc_feature (114)..(114): Xaa can be any naturally occurring amino acid
  misc_feature (250)..(250): Xaa can be any naturally occurring amino acid
WTDESLNKKTHVHQLSTHISRNPDKRWTSVLHLGGVAVLHSPTTSGMWFLFSHYVGLKGLNVLSVAGFHVFPPVCGIFFLTSGVDKQRPSSVKAWWSLKCASCWPYRCGKSHTXSVSPLTYIAHEEEVCVVPSLEGPNKSREVLVVSWRVVPHIQPKSIHISHHMWQKRGHVARNIVELSEGVSERHLPLRHQQENCEKCVAAPYLLVWPPEVTKWELYKRDREERGGGGETPCDSAGIKTPKKTTSREXKSEVFRENTLWGTHPGGWPPEGQ

SEQ ID NO: 960244 - protein, 106 aa, Homo sapiens
MAGGTYGCIRAGELILASNYPAELQAVLRERRPQETCSGDTLFPRSSRGTSRIGDIVTGGECRPLSKTGRLQGAQVTRLPAPRSSPRSSEADIGPFPTIEITVIFS

SEQ ID NO: 960245 - protein, 190 aa, Homo sapiens
MAAGKMGDIQTERAYQKQPTIFQNKKGVLLGKTGQGESLPADTYKKHRTRGLSRKPKGGYERATLHVNKESAPSHVDKWCSISKRRNSFFVARWCDTKKWKKCKGTMCGQLAREKTIQRDNKTFPHKYNNPASRKKRRHQKKTSAPGVTTLCVPRVAYDKGETRLNKNSGVTQLGYTKEGDRKCAREPPQ

SEQ ID NO: 960246 - protein, 261 aa, Homo sapiens
MESNVGCESLSRACPLMSLQSLTVLCRLLQQLLRWLCGSCSVPPLPPVPVTLVLCVPRWTLQQHCAGPPVLFLWLCSVPACAAGPLCCVMLCGCVVVLCCAVCVCCDMPVCVAAALCAPHVPIGCAECVVSLDAHITTDLCMDRLTDSLYLTCVPLMVDQVHAGDVTAYQLSCKWEPFWYKGLTGNEFRGTLGMRRIALRTAGLALGDTCCDVMPQVLLRNGSRGRAPIRGRKSSPCSRPSEQFSQMPCEVVTPIRSKLPA

SEQ ID NO: 960247 - protein, 180 aa, Homo sapiens
MTPRARIVLYIVITACRRPEYKLCKVRRIFVGHYKESLYLCDIMMTRYRYVRYPESPHQRVNEYHSDLSLETGKITGSSSSSTLVNLCIRDWLVLNLGRIGVITTMREGTLESCDVVHAERMPMANKLGHSTFPTLVYRQWAKTMDFSSPRQGFRLTIAETRAKDGAKEAGSMAWGLSLA

SEQ ID NO: 960248 - protein, 211 aa, Homo sapiens
MRMGGPSTINSPLDWGSPQDLLNGVPKSPRAKDRCRYLVEQWVAQSLSKCDYPHVGVFNVVFLVVCLFSWSSLVWVSFEGLLGWTQGGKMCKICAPTFNSLGALVWSLEFVLMFSLGYSPLRRPSHMFPPVVLLLVAMRSSHTYFFLCGRNHAPQGGGARSLGSCASWGHTLWWPGMFNLSRFAPFRWFYPTLGPSLGGSKLSGGPVVGRV

SEQ ID NO: 960249 - protein, 150 aa, Homo sapiens
MVKKRRGEHSVSGSFPPQFEPECVRQRGRYLRGGGDYPRGTSECVGKTYNDSQLLFSGGTPEGGFTVKVRTKRGVVNTSQERGVVSSSCGVACVVTPRGAVCGEEKGSLSKRGADRTNTYESLHEEIKKSSFVRNMKVIREKKVEEEGGQ

SEQ ID NO: 960250 - protein, 125 aa, Homo sapiens
RGVPADPQCPRAVHRSVWTFRATLGPRACRDPVVQAPWTRTERSAGSHVADGPSVLQMHLRGALLSPGPCYPARSSLLAELCTHLGATSRILPLRTSCRGVLARGQLQLNLAEESATKCMEGQSE

SEQ ID NO: 960251 - protein, 147 aa, Homo sapiens
MPTVRPAWHMLLLLCWWQLPRSPLLPPVPRDYFVLVCHDVTLQHATVAVSPLCWFTLWAVGILGPALVAAVNLLRWWQGLGRCWFGSGVPAPGAVVWREMAWGPKWTPCGGFGWQPFLVGGRPNNNILAAPTLVALGGLGITAGFGD

SEQ ID NO: 960252 - protein, 41 aa, Homo sapiens
MGSLSLTRSRGYFTAAARRQNTSTMNLSKFHLNKGIKQVYM

SEQ ID NO: 960253 - protein, 129 aa, Homo sapiens
MGNQRLKNVKKADGKPGEKAGTTEGRAEGFEESPSAGLRQVTLPCGPWAGWSPGGGHYGGPWGGTPPGTGGDWPCVGGQFQGMCRTISGDVLGWMRFDANGLPGEELAGNVVFDLLEGGILSPPPGTGA

SEQ ID NO: 960254 - protein, 139 aa, Homo sapiens
PLGPPLPLPAGWGKQSQRKKRKKKKKTKPAVSQPGEVPQRQNVISRGVKKIFWLDPLPLLAGGQLASWISGPCPPSPGLVPPVHNVSYIWDAHLVSLSCHSPLWGGPRVSGTMKANKMISDVSVWGEGRPRSLSSAMIW

SEQ ID NO: 960255 - protein, 196 aa, Homo sapiens
MREDRAQSRLGQCGNQIGCQVLGGHQRVSMGSNPTGSYQWMTVDSASLETNQQCTTIEAAGNKYVTIGAIRGVILEPWHLVDSVRSGPLRTKILLDPDQRICASADGVAAGNNWAKGHYTVGSRAGSTRVLDVDEEGVPRAVTVSRAYQLEPLSVRGGDGVRDGHPAHQLRSGKSTHDRIMNTFSCHALTQGVRHG

SEQ ID NO: 960256 - protein, 259 aa, Homo sapiens
AGAACCVCCCDVAAWHSCVPAAPRPRCSYPLPAVPVRELGICCHPAGCLCLCDLLSSCVLMPAVPPAVWPVCCVLCVSTSMSCPAFTCCCVTAVASSPVPTPSVGPMMLLGAALHVLEADAELLLLCPVAYDPCCMHLIVPHGSVSTVPCAILTATLSALPDAPLRPFLLGGPLHCLLLMCAVHAFHVTLACVCDCPLAGWPNPMRPPWDCGCLWLWPLLCGGWLPVGFRRDSPMPPLGGPLGDWTLLLPTLGSGWAPW

SEQ ID NO: 960257 - protein, 100 aa, Homo sapiens
SCECFCCSQSPVLPALLLCVLNSMCCGVTLMPVLPAACDAMLDACVARCLDAAVLLSTHACLAGQHPCGPALPCVCMDVCAAETCTLCPVNAPQPPLPHP

SEQ ID NO: 960258 - protein, 171 aa, Homo sapiens
GYCYRGFIGILHHGIHARPSVGECNDPLTSSPVPKLPGLYSDALTSSPVAVTFHHLMIESCGAPRHRVAPGCEEDVIGEDAHWRWHGNGDYLRHLQSCIAYESRGTVVWDEIERQYGGAETATSRGHGMHELEPCGRVTEECLGLECLGPHVPLGSCMTSDDEYEETPLCL

SEQ ID NO: 960259 - protein, 246 aa, Homo sapiens
GLGYRALMANKIEEKNADPKPTPVQAGEFSISPHTMAPEHRVCALNASPQSDMSGALRTEVRCILMPPEYNCPCGLPNSQMVDGCDEKMCMCMGVSPCVFMVGAHPTPSKQTSPALSGLGIFLLLGHPGHAMGGMRWCATMMCGLCWGLRGHLVCLQAVLGHPLVCMPASCHEWFCMVSGVSGISLWPCNVCGSISVWVVDLVPYQGVFRLPVVVGSCPLCNEPLFQALRSQALCLACCMSWLTLA

SEQ ID NO: 960260 - protein, 69 aa, Homo sapiens
GVGALCPVGELEQPTPVRVGAMDWPECSCVEHFLLSKCEPGHRSAVVALEAKTCGWRSWYLGCSEPSLC

SEQ ID NO: 960261 - protein, 248 aa, Homo sapiens
GVRGNLTEGAAVGWRDSHRDGEEKTVYGDTHSREGRADMRQQQDDPPKPEEDSLGMQMHMPAPVEGTDFPGAVRQCLGALPALFLPVCRPQPSSPSDLVPHDVLAPVWDANVAWISRSDGARHTEVCGGLGVSVAEGGLPMIGMHRGVNSKQLQHLTRLHLAGAGVRGLSLPGCVSREELAAEVPLPDVLRRVVVPRTCRAMVAPAWIGWSQARGCRAESETRSARVCRWPGRHSVAWAWWAGSRVRF

SEQ ID NO: 960262 - protein, 240 aa, Homo sapiens
RRTERPAPDRTAARRAMPWGSSHNALKLRFPAEDEFPRLSAHNNIMAKVLTPRDCTRSCAPRARRAGSGCDDVIQTGVDNPGHQYIMTVGCVAGDEESYEVFKDLFEPIIEDRHGGYKPSDEHKNEHQPRQPAGRERPGAQYVLSSRVQHGPEDIRGLHAYPTGLAARGRSQSNSKKARRMERPPVQDWDGGHMGWTNTTMHKNHEVSGKETDQSEDKYLIKKRRFCHFVDLGIARSWRS

SEQ ID NO: 960263 - protein, 181 aa, Homo sapiens
VSCGWTWLVIGRILVYGNRAKWQIFVKTLTGDITLSVEPSDTIGKCEVARSTDKEGIPPDQQRLIFVKAKQLERWATSLLSYNIQKESSLHLVLRLERWDVDLREEPELEESIHPVNVEPSDSIENVNGQDTRIKKESSPEQQGHLCRQQLEDGRTLSDYNIPEGVDLHLVLRLRGGCRSS

SEQ ID NO: 960264 - protein, 89 aa, Homo sapiens
MVPGKAHVLMEMLLPWYPASRPAFCLLLLTLMADCVACKAVHSMNLWDEDMMRDVRPCNGHQCRLHEWPQIGLGNVDSCWAPPWRGPSP

SEQ ID NO: 960265 - protein, 101 aa, Homo sapiens
KNPSSINGNYTKIVNPLLQNVSNQAGVFKPKVYVGYVNRVNIIYVVGGVKHKKYEEQFEPNNVTVKSPVGNPVVAYQKTVVEPVEVPACGNVAEGETRKYS

SEQ ID NO: 960266 - protein, 164 aa, Homo sapiens
VAPARRARCSIVAAWGGGAVWGAAAAAAAGFVRKEGGLGPGLRWWGLLRAGGSLLLCLSCSMLRPTFPLAGGGGARKRGAGDEGPLQRWKRAKEAWAGCKEEISLTGIRAQIGCVCIERVSEKYFGSSIILKIIRGHPGRLRREELHYSQKPSREKSSGNEHEV

SEQ ID NO: 960267 - protein, 191 aa, Homo sapiens
MTGLVQLAAVPGGPWVALAMGNRGGFAWSVSGQWHPGVVGSAVAWDEGPGDRTVRGKSRRDAQGSRYNWYVDVPFTHSMVPCWVNGHESITGPWRVDLSLYSACPLEESRRSLILLPGGSLSKDEVIEDRCQCIMQIRAGQRIRFTGVMCAIGGYNGHVGLGVKCAKECGHAIRGASFWPALHVPVGKGMG

SEQ ID NO: 960268 - protein, 52 aa, Homo sapiens
MALQCFVVVLAQYMPGELAERCRNVQPAAAGVGIIWHHGDRAPSCKRGRGAD

SEQ ID NO: 960269 - protein, 83 aa, Homo sapiens
MSSWERMWGDQSAKTASENLHPIVYKEIARRNIGAATVQATDVGHKSTKLTNSDKKSLWETDLRITQLTARLEYSKTLNEAQN

SEQ ID NO: 960270 - protein, 178 aa, Homo sapiens
QAAGKMGDIQTERAYQKQPTIFQNKKRVRRGETGKEKLPGYYKKHRSGLQEHPREAMEGTYMDKKVPLHGYRVSIRGRTPLGRWVTKMKMQRTMVIRRDYLHYIRKLQPLRESATRTVSVHRVPRASGTSRSGDIVTGGEVPASEQDRALQRAQGHQGCRHQEAVPEVLRLTSARSPH

SEQ ID NO: 960271 - protein, 146 aa, Homo sapiens
  misc_feature (98)..(98): Xaa can be any naturally occurring amino acid
  misc_feature (123)..(123): Xaa can be any naturally occurring amino acid
MRGDWMQTAIREDGASLNEAGLQNAKRKPVAERYVCARAWLSCALVGWYGTELPGMLVALREYRLKGCEQAPGRRKHLYRLHGHMVSPSECHNVVAWXRGRPSAEEVGQKPGIRCVWHRVRDXSSTMHEGVADGPNTTRMDGLTFR

SEQ ID NO: 960272 - protein, 261 aa, Homo sapiens
GAGGLLALLALLCVACALGGGRAQYERYSFRSFPRDELMPLESALPATAAGQCSSGRRLRGARERWCYRGRSRVGACTCVARAEQLRPFMPTCNMQLPAACSLWALPAWRSAMLVPEACCTLSGVALAAACCCTCARMLRAMQGRLPCPSCAVPSASLLMVHGCDIPAASECPYNVPCEFGRYFKGEDKSPRNAICRLLHTLSKLEASLIDEDDEGGTLAYYKSLPGAEDYIKNLETKSYESLFIEQCGHTTVRTGEHPSQ

SEQ ID NO: 960273 - protein, 210 aa, Homo sapiens
MPLHEKGGSAPPMSGLCAPWDLAPPGPSRPERVWLDKSLFRPVHESSYLPEELADVACQRMAGLRAVGPVVGLVHPSGSQVVCHHCDLGDLGSTSPPSIRLTRCLRGVGPQGRCLHRYLRWCKLREACGDSQHQASKCGLSPELWPGSRKPTWSDGASPRWAVLQALVVREVWLEKSPVMMLCRRVGFYEALFDGHPPVKCRLQERAGLA

SEQ ID NO: 960274 - protein, 110 aa, Homo sapiens
  misc_feature (83)..(83): Xaa can be any naturally occurring amino acid
MSNRNGIPNAYRTKKFYAIYNYGKGPNVVGPYGLLQPVRLTPIETCFSQGSRRRKPAHIYHQPVVHHRPRRCELLTSRCVLLXKRSPLPAIAANLPAWVQSLLQRVMGLR

SEQ ID NO: 960275 - protein, 191 aa, Homo sapiens
AARTRSRCAAGERCGTGSPRGESCARPPGAREDAPAQPARGGVLLLVILNGTGLPARAPGERGSKWNLFWSGWGENSVQKYRRVGAAAVPIDCTGHLSMSAQPRVSYIVCNKQFLLTNKAISEAEPASDMHIQGLQSRYSASSDCWGTNDRVYNVGTIARLPVLSQLIEQMRIELVRVLDVYTAEFALLVS

SEQ ID NO: 960276 - protein, 130 aa, Homo sapiens
MCSRGNSRRTMKDGMFTTCAVRTRGSSDKGEGGRGGKNGRITPSYRTTLASSTHPVKAATVADPKALQDRCAPDSSRAPPGDSKGTRPESPKRLQMTFSTPFYRRNSESIPPKNHKANEDGRVRAPKFRV

SEQ ID NO: 960277 - protein, 97 aa, Homo sapiens
MWANYEGNNKRRTPTTLRQRNHWLHSGRGGPEAYHNIPRAAENPYVGGPRGNRTIGHQGDSNYSARRHPNADPKEQPGEEKGVRRPHTGEKNTRDID

SEQ ID NO: 960278 - protein, 133 aa, Homo sapiens
MALANVNIGMPHLQCRGLVDLLPAAGAAPAVMVLPPPLLLLQLRTKKVEAKKRRILRSLTDDMGYGSFLEPKSLLSYNMFNTKLDTFKHTTHTNTTRALNELRRCGTTMHVPPETVAQWPISVCSLWTQLPGP

SEQ ID NO: 960279 - protein, 272 aa, Homo sapiens
  misc_feature (146)..(146): Xaa can be any naturally occurring amino acid
HIKITVLRAVQRRGSRYGATMNDLLRQHLSPGPRGARMDNRLSAVAVGLGVCGWAVVDVTVDWIVRVASCPSYHNQAPSEEDLLPELHPSNWERRSGVLRGYAFEIRVRRKLPMTSCTGHGIRGYGAPYCLGMAFGPCVASRSVAXLKVEIQCQTSQAYPFLPWVSVGWSKLAVVTTHTNASDSDPLLSAPGLASARRDTQVIFEWAQFAVPDDHHRHLLTKDGLAMDVVVGTASAGPHFPPGISYSGHSGRLKRRWTVLGEKPGGVGMGAC

SEQ ID NO: 960280 - protein, 268 aa, Homo sapiens
AVLRLLSSPKPRLSRLPLPARLLGEQNTFHQDHLSQVPHVEIKASKQVYMSPCRQGVRKSRPCIICDRGYLEKDVRCKTPEPCDSEPYMCVEDVAMSGDLRVAHSTFTRRDGLPISDMYRRACMLIVVWDARFRKEPVSKSVCYVKFFKYKSKACRDQFEVTAVNGVMDMVSKQQPWFRMEQEYTLMGTDGHAPWVGFQTAFPGPPGSIITVVWERDKSLVAGSIVDGQYPGLVDAGSQKAGPSRGKTAKGNPMALEENHGSLGGPHS

SEQ ID NO: 960281 - protein, 67 aa, Homo sapiens
KPSGQYEAAWLNLDSGLRSGVGMERMEHQQQVGLVGPGRGNSSKCGAGGSTVRAVLLLSYLYPCYTY

SEQ ID NO: 960282 - protein, 95 aa, Homo sapiens
MSLELWNLTHVGVVASSDMINYFRHTADILHEDRHAIVVRSSSRAWHAVALVWFDALGNAMDGQGPLGSKTRSDLAETPGIILDSVRNPAYWLRL

SEQ ID NO: 960283 - protein, 109 aa, Homo sapiens
LGKEGRGLIGRGERPEEYEEGYNDGEVDDEEDEEELVKKKGVRSENENLKMREKMMTRVEITVLCEKIPSCEFDCLYTQKSTLVRAAVLSNTVSLPWISLHYMYLVRDD

SEQ ID NO: 960284 - protein, 237 aa, Homo sapiens
VPLSASLLAAAASAARLLRRRGLRQVYRQQSLNSRFLFNPLHRIDRRAPPCLDASRITPSSADITDHRDLRGDSNGMVVERGSTNVIEVAPADYTGRCLHEVRRVGEARKVVITEVVRTEEAKVTVVEVDEEELIEREVIGEEKDGECRLGNCVGYVVKTGQTVEMMSELHRLGRITERRQRGPDDVMSPTADHGLLLAKIVNSPPCTSAALRLPVQILKPRVLEIMGPACPGWQAP

SEQ ID NO: 960285 - protein, 157 aa, Homo sapiens
AVSSLRHGVCSPYLILVLLLRKRGSHLAKDVTLPVCYSRLLLRPGYCELCSLANLAQQTITTCPYACQVNLSTVIRLVLNLAGTGRAVARIPRVLRWWDSPALASGALWYNHCVVDGRHVCIQPIIWLPFGIVVVNTTHRNDIDHLLLPWPASGPTS

SEQ ID NO: 960286 - protein, 190 aa, Homo sapiens
DAVCSGVCARGALCVPWDGEPGGFRGGFGSGIRGRGAACGRGPGAECRGALRSAMAEDKDVDARHQMLGRLVKDMKINVPVRRSISSPCPLMESEIIDFFLGGLSQWMSVLKIMPVHEARPCAWPAAPGSRHFVAIWGLQWPRRSGVLSAPMECGHLPSVVAIILAKLSICPRAAECYLGGTRSASPTLS

SEQ ID NO: 960287 - protein, 108 aa, Homo sapiens
WLGLMAGCLNSASMAPHVPVYVPWRSRHFSAHVPWTADGAWWNPWRPALLIPCADTIDMLRALPDPAQLVCAAFSACGVLATRCAMCLGCALVKMAPVYISVRSRRVL

SEQ ID NO: 960288 - protein, 235 aa, Homo sapiens
MALACGKAFGWLLHAAETSAAATAGEKPHHCPGVWQGLRARLAPVHMHLRTALCCALLAPQCALCVLPMVLLCHVSSAAVLKTPLRTAHCVLSCALPCVLHVAVQCAFCGMMLWLLACMHHAAHTLCLSCPYLLPPLAAKPSVQMLQLATPPAASTLVRAGPTACPHCSNGLRPDAQLLLHAPARAFGRASLSAVSSAGSAFGQASSLTKHKRVMRVQPVLELPGAAAEQRLRLG

SEQ ID NO: 960289 - protein, 188 aa, Homo sapiens
LVLSAEAPFRSAVFLRMDACSGLEAAMAPSRNGMVLKPHFHKDWLLAAVATWFNHAGPVMILHDCNVPCAMPNGCCLHSAPAPRCLCVPFLAHLCCCPTGSGTTLNGALPACGFSLEELSGGLAFTRKVARTIWHFCGSDGGGTSPQESLLGQLCSWLKEYRSKLILFPRKPSAPKKGDSSAEELKLA

SEQ ID NO: 960290 - protein, 218 aa, Homo sapiens
LRGDQKAKMSERKVLNKYYPPDFDPSKIPKLKLPKDRQYVVLVMAPFNMRCNDVRENTSTRGRNSMLGSETVCRTSVYLGLPIFRFYIKCTAAAWQTITFNEDPENTDYTMDAWMPQLEFPVLEKLLWVSDVTKRVHEGCGEGLSELNNPMTWCWMNLDQWTPMLEMEVLENLQELKDLNQLAGARGLRGYAECSHRLSEEERRRQQHEEDEQETRPV

SEQ ID NO: 960291 - protein, 233 aa, Homo sapiens
RQGANSSCTAVGRVARAGLKWHMPTPCVAPDEIPYLLDLALFLGRSLTLALTPQWSPQCVCLVWMCMLGVCVCQHDVCVGLMEDMCVLHEHPGCASLDATVWPVPALLITAHAAVCALTPCAPSPESIKKCAKEMDLVGAGPAPPLQLAFMSDGVSQHAVLSAWKDSIKNYRSRADIFSERRWAWKAAAVRTQQGMPRRLEWTEARQREQEFYIPYLAKDLESEAGLSIQRGQ

SEQ ID NO: 960292 - protein, 280 aa, Homo sapiens
REHRSITRSMLGFIFVTMEEDEAVYGPGYGELGEQEEEKKKKKKKKRKKKKEEEEEEEGAEKSSSPFAACDVVEDDCLLLRVLGSEGGSPDPVVQTQLGSCRTLAPTWSCHNLRASHRRGLCACVFVCAPVGGICVAGSLDASALLLRSSLCCVRLELRGLSCHCHVLPDCVCPSSAFLEAAVLCNCGGPPCDLALCCNLPLHVLGDLLCKPCCAVVGGWPSPGGTTVRAHALPVVERGCWDACVDAVGLQLRLCRATLKPACTTILMLTAFIGELHLLR

SEQ ID NO: 960293 - protein, 102 aa, Homo sapiens
MQFMKYMVYPHDLLLLNCLTAVYQYFTNDLCSIVWVLPACPPAGCPDGPGALKALNLEPCCLGPRWAACCCWSALLTLPCLHVERLRTLLVPHVWCCCTVYD

SEQ ID NO: 960294 - protein, 195 aa, Homo sapiens
  misc_feature (109)..(109): Xaa can be any naturally occurring amino acid
MSCNTHREGLQLHSKPARPGTHQEEQTTPDMPPLRAVTLTAKVCGFTPKVSETTNPTKETPDTSEYLKEQTPDTPSLRTVTLTARVCSFILEVSETKNPPEGTNSGHIXVTTKGLLPITKRIKAIKLQMVLQTETQMSSTNNFYRGPLDRPTGPFTGLESSPLEDTTTAGPLFAPVQQEVARAVIAQFQQQMGCP

SEQ ID NO: 960295 - protein, 105 aa, Homo sapiens
WKKIKQFNGWVFLEFTPQSPKTRRTNIFLSHASGHNECSGTKRQPQVYRWRGGCLRLHASALEFSVFPTRRVVGSSDVVAHGGEREGRAQNPFKLQVEWDLASRS

SEQ ID NO: 960296 - protein, 168 aa, Homo sapiens
MKARYEAGWESAMTHQAVGDSAYKGVKREQEKWLWSAKKDWYDVKAPGYVQYKKYWKTLVNRTKNKIDLMVSRAVVCLKESGDLQNDEVRLRKFKLITEDGQEKLLTKTFHGVDLTRDKMWSMVDKWRTMIEAHALELGSDYRWLLASSVLCWFTKKRNNPSIYPGRL

SEQ ID NO: 960297 - protein, 169 aa, Homo sapiens
RSGIPKCFTERKILGYIQLRKGPNVVGPYGATSNPSLTPEKLFTKEPRKTRHEVYHHRSIIYSLPDQLALTHRSFVRMKPPLVRAYGQHHSESKSSRRRAVLIVAVYAEAMLRLRPLTGNAFWMQGGTSCKSQIYRLLYTRRQRDRARSRPNSKFYMIERSTPKAEAVC

SEQ ID NO: 960298 - protein, 244 aa, Homo sapiens
  misc_feature (209)..(209): Xaa can be any naturally occurring amino acid
ASVLARRVSDDRAFLWPQRQEEPLPGWGVPAGEGNTTSVVVILPTHRWGEGPTQGRGFTRAFLTPPSPPQAGTCPSCRFVRATDIEFLLWDHALTCGGDRSPLYKQSRTDHNTVGDHGALRRRRCGSHIYLQGRPTTLGRQHSYKEFFLSERACFIHTPRLLSSFFYIRIVRDQPTRGCVVRQHPPRCYRMWGAGVGVSKRLVSRTHGXAPPLGFFFHIGVGEGCVVTNCVWCGESERVLFDDG

SEQ ID NO: 960299 - protein, 168 aa, Homo sapiens
MSHPRLCSRERVLSGHLGVVAKLTHKSYKHPVEKQNKKKKKNTNNNNKQNNKQTQNNKNTQTDGLTTSQIYVREGERKTQTERENKHEGERASDELRTNKRDQDDSKPPRTAHTCCEDKSRDEEDKQSSARATHPPKKDGRAEQYNNHNQNQHAELPLVFIICWLSAT

SEQ ID NO: 960300 - protein, 168 aa, Homo sapiens
  misc_feature (27)..(27): Xaa can be any naturally occurring amino acid
MCVLVQMCPVPKEGKFDSRGMPFAVSXTGGFRGSAEGQFSIPGTSVCNVAAESEAKSTIVVLVRDSLVAYGWAAGSLFQRGRASLWWDGPLGVLAIETTTRCGQGAHAQSGPCVGTPLQAVRSGDVSLRDQEGVPKCAAAEALGSKRPPVGPRGCPRPENKRDVQAPR

SEQ ID NO: 960301 - protein, 134 aa, Homo sapiens
MAMSTLPTRTDPRSDETPGVFIGRSQSLYVVERMSDVEAIFSKYGEQLVGCSVQYMGFAFVQYVNERNARAAVAGEDGRMTCWPGVVDDYTWAAEPKVNRGEAGVKRFCSWRCTAPLLTGTMTFNVDYYDRMYT

SEQ ID NO: 960302 - protein, 105 aa, Homo sapiens
MNELGSAAGAHLSGHRRTVVRGHLDDSCDAAADDPACVASPYPASSPDHNDRNYDSGSGCICVYIDLGMLLDSSQKLAELKIVADQLCAKYEQRNYGNASVATNH

SEQ ID NO: 960303 - protein, 127 aa, Homo sapiens
YTISLLGILVYRSHLMSSLLCRRKDYVLSLFIIATLITLNTHSLFSQSLVPIAITESLPAVREQRVGLALLSRQSSHAVWPRLRTICYAYSIARSNRPNNYITTTDMTFPKTSSIVGHSRQQTTRQP

SEQ ID NO: 960304 - protein, 70 aa, Homo sapiens
GRGEAALALPWRRAARRGRRLHVGRLVDDRCVVDALSAPVETCDQSTPLMNVPGVLAFVQWMLLHYCNLA

SEQ ID NO: 960305 - protein, 172 aa, Homo sapiens
  misc_feature (144)..(144): Xaa can be any naturally occurring amino acid
MAAPSPASSPGGSVLQWWPCMALQGPYLVPVKKCVHGQQAHEGQGIDAPHRELMSREEKPPSQHLQPLASGPVQRRASMLALRDVEHAAWSCWPTRLDLQMGPRWRFVLRPLDFMPAIAGPLLSQLAPSATCPERMAPGCIPLXAHAMSLSEAPWAWLQLLRPGVQLQGSRR

SEQ ID NO: 960306 - protein, 233 aa, Homo sapiens
GAPLFCFLKRDIKKTHTTGSKKLLPNSLLIWNTLVGKYFLALRNPLSSPLCAEGKRSFFPSFLLLPCVPSSRVATVFSLFFIEFLTLWVLNISTQVGVFLREVIRACVLWCKNIKYTRRCVYFSLSKYTLERVFPPRCVSEVSLCVCSSRGVSISLPQRFIERVCAFLVCVCTISHTHSLTERGYLISLVERGAPGVHPLSCGWVQKHGTHTEISLCLKSGKNSGGGECGEDV

SEQ ID NO: 960307 - protein, 181 aa, Homo sapiens
MALQWPLILCLVNVCVYIAAMQGPMNGQRNMMPHNRELIVQVMRMPPSHAPDSHWRSEPPVAASGRVHCMAHPGEWSDTCLACGCLAGTTAAVDPSQKWDPQYGGILCSRTPGESHAQDNGEAPLVVLQTLATKVAHLGPKARLGFPVPPIPLFERLLHSCCLQGCATLEPWVARHLECQR

SEQ ID NO: 960308 - protein, 213 aa, Homo sapiens
  misc_feature (58)..(58): Xaa can be any naturally occurring amino acid
MAFLRLDRTNKFQAIYNYAIGPNVVGALRGYSQPLRCTPRRDYFSQWMPHKTSAQSTXHRSIITRPRPSSSQLIRSFYVLKRPRPRSTRTPHSWVRQLVTDLGAVPDVKCHIARALPRPLERRSDVQVPLESRVDALRISNLMTPAYARTTWPRPRHAPYSKFYNGSIPSTPLRPSAVAYRSSHHLTYTTVGLTFETCCHRRVHKHKNLLWLT

SEQ ID NO: 960309 - protein, 270 aa, Homo sapiens
MDSAYIRLYRECYTEQTLHATITKADRQTCTMEPCAQDECPTEQLAAHIYVHTKSVEIEGTECNKAREPRPILDRMQRNAIETLNAVTLRHIIAHPKPYIISNDRAGKTDTSEAHIIANAVTNSRANPTLDNTHPADNQPYRHNLNNTIDTPRKNKHRTKEINKYKNQNDLYENNNKENSTNTQTRTKGKQRNCTKQQIETHRTQANPGSIHTTSQQKANKTARSVVENNKRAQLNYKADTKRNLVKSTPTAEQSNNKNKEAKEKQRQQK

SEQ ID NO: 960310 - protein, 219 aa, Homo sapiens
PDVEEEEGGGQVEEEEEEEEDEECLRSERLALEWALCALDDVTSCCEHIRILKVLCGFLIHVHGHVSCHVLPALRLLLHLIFCAICMSSDDPCHLGCLCGHACHATFLFSPLLLLSFLSSLHCADSHLMFCAFLIACDAVSCVLNGTCISDELLLFYYLWTACQSLHEFHAGPALMLCTPCTWPCLCSPILYVQPQPCLQEFLRQLLTFYNGGWLAAGA

SEQ ID NO: 960311 - protein, 86 aa, Homo sapiens
GLAYCHHRKDPVPGPEAPRTCYIIDEGAELNAGRLLDKVRSLVHVPTKTYLQLMCVLTHVGTFAPLILVLAGESIIKYIHPHSFDY

SEQ ID NO: 960312 - protein, 135 aa, Homo sapiens
MISARIIALGKIAFPLWLRFVATARGFNVMPFFGTNTTVTGVNAIGYRTQSRSVGRQSFPPYTDHGLETATRAWSAFATLISNGVETQIYPPRLKTTRGNVKPLRLYWHRIIQHHVGAREPVGGTKKSQDPDVFP

SEQ ID NO: 960313 - protein, 242 aa, Homo sapiens
MPFSNRHNALKLRFPGEDEFPDLAAHNNHMANVLTPELYAELAAANEHARAVLHAVTTVIQTWLWTRRATLYIIDQWAAVAVAELSESYEVFNGSHSEPHHRGTWHWLATMPRLMMHTDRPQPRRTLQGGERPCDPNYCAEARVVAHGAEAYRWRYLTSPPDLQACGEDAEPIEEASRWESPCPALELAITGGSEYYRAYGALTEAGADSRLIERSATSSTKPVVAPTAGLGHCPRQADARV

SEQ ID NO: 960314 - protein, 163 aa, Homo sapiens
MREYKRGEAVAPVAGAPGHGQENITGQHSMAGEQRVAPICHAWPTPREKTAGDREDSHAWWPRGAGGHMRRANTREEPGAPEGGEASIENPYSQPAIHGHGAVGPTLQGHRETWNQGRERRSTAVDTLGARCHPRGCPSQGRRNNIPGIKKQNGKPKQEKLPE

SEQ ID NO: 960315 - protein, 102 aa, Homo sapiens
RSEPTLPMLLPETQSPAALDVPAAPGALMHPGKSLMPRCPCDVPWACCLPAPWIPLLSPADACLMCLPCLPAPAGHVPAFLPVCPAAHGLPPDLVSTNLHVM

SEQ ID NO: 960316 - protein, 85 aa, Homo sapiens
AMVWSPGYNLAQRLYESSVWTRWVDAVGAPCGTVLEPEQALAMCASAHRLYAILMDTPGFWVNCCGTSLLEDILTAVNHEWHVPS

SEQ ID NO: 960317 - protein, 213 aa, Homo sapiens
APRWQQEQLVPILEKFCFTPHTEEGCLSERAALQEELQLCKAAGGMALQTKGDPACGLKTGGARTGWGPESPVDPSQHGTAPACCRLPARLQLNGNLHAGAGAGAGPGEAQRCHDGPSAQRPPGLPGTQGLPGHCRGRNMPSLKMKVGGGAGWHWSPVFPTSQCLLSPILLLQLSYTAPTAPQALEAAQAELQQHDVVQAKWDPQTLPSALGG

SEQ ID NO: 960318 - protein, 224 aa, Homo sapiens
PSRTSTARACPCASNISVTAVQLHPVDLIGTCWPRSPAWWHASGSGPALPFSMCVLLQYHKQCATWDVPGQWQLGLPCCELLLMCHGGSSSDVMKKTQWCTTMSACHHQLPGPLVSPCVALLVAFVLFLAGSGASWCLAETSSTGTSSPAFILLQLPPGSVVQLTMSPEVHQSNCGLVLQVGDSLPTTTSIVTELLLDVGEGWYLHTAIVAHIIHDRLRKWMSI

SEQ ID NO: 960319 - protein, 199 aa, Homo sapiens
RVQFGIGHSWWVPGASLQLTTSGLCLTCRHRVQIWDVRALQQRDTAYAPDALDCQRYAAHLSSSGQCTSKQLAWSQRAHLALLTCLRAAIHDDDVCRRICSCRCVQGCLASVACWGRPTARHGSWLRSSGGPRSRWCAIRAACTGKRTLLGHWIRHPTGSLTCSHPRAAHRVVQARCCQRIDVLWARDLVSATQSAAPA

SEQ ID NO: 960320 - protein, 71 aa, Homo sapiens
WIPERKGGRPDCELLVPILRPVLVDTEPSVVPWGLDWMPVTSLPPLPLPLPLPALATPCSLPQWSRPVCVC

SEQ ID NO: 960321 - protein, 87 aa, Homo sapiens
MTHKPGPAESTPYLLIQGHSLTDSTDNNRNLLKGATNPHKSFDLQHDANRGLQPHTERTKHSPDATHKLGATHSATTLQSHYPVGPT

SEQ ID NO: 960322 - protein, 153 aa, Homo sapiens
MSSQETLARHQDRGPGKRSRLQAGWGIEDYTDESSKSAKILTPPLTPVDPSIWSPESMQYSSAVPELPSGIPNALERSRLNSSHRPWPLNEHRGLPCPRHIERSHYSRGQLPTTHSFLTTISSPRAARPKHRTTYRYHDTHPRGILHSPTDPT

SEQ ID NO: 960323 - protein, 209 aa, Homo sapiens
SILKCRCHNTLPLSSSHLNVYSSDPQVTASLDGLTSSSCPADLTQKRELTDAESRALAQIERQKKDNHNLIDFERRFNINDRIKEMGMHDPQGPDDLDVRWNKGTILKASVDYIRRMQKDHAKVQGDWRTLSPPGDDQTRQTLDSDIQELEMQARVHGLPTNIPEYGMNNGWAWTSKVVKQEHARRRGPEEAMMQAAEVQDHEHCKQPD

SEQ ID NO: 960324 - protein, 89 aa, Homo sapiens
RHEETTQCRGAVNDARSGRRDRLHLRRTDENSTYQRGSPESNAEGRPHGATKSVSGTRGVSAAAKYRVVDFQAEREVRHFCILRHQEGG

SEQ ID NO: 960325 - protein, 140 aa, Homo sapiens
MEYKSSYYISRGRKSKSTKNPNYVPNSPIDQFPHLQPVWLCPLRESRVFSLWGSLSLQPQATCGLWPPAESLYVLFLRGALYSLASRPPKLSPIIKVYKRPRRQTPHSPIAVCVSSRGVPERSPHPNCDGGALLCFPEKA

SEQ ID NO: 960326 - protein, 240 aa, Homo sapiens
GGKWGLMTLPRRVSNSWLKQSSHLGLLKHGDYMSEAPHRAKKFPFKALLKVDEPFISCGGRILGGCRSGLKVREQGDLLYSSTSGFPFYTPALKLSGGEHSWSVAEVEGVGKEELTLGGENFSKDLWLCKVVWGLVHLVYYTSAEYHRECASLWCCLGTGGQGTEYAHKEKRTHTVLALCHSQLVHRSGKEEEGLQGVLKVPRGQWCPPQTNDHLCGVQHARGLNSILLTEPSAAQDERA

SEQ ID NO: 960327 - protein, 253 aa, Homo sapiens
MARYEAGCEIAVPVAMEPAGPCGFCPAGELLRLQRSSQPPSNAPYAVLRQQRRDRVTSLGEAVPHAPGPGCPCWPIWDSCVMLAWLPVADKMLPSDAGLLDAAGDVPVAVLAASMCCACGVLEPAGAWTCMLLDGCWIMPRVVTLRMLDARPCDGPLPDSCERCLLPLDALLCRLMLGSLDDVPVGPALPVVPTRIPAIVSLSRGQSRRSCASSCPMCCSAYAHTLALYHGGDDALSLTSVPHCSAFPEPGVP

SEQ ID NO: 960328 - protein, 212 aa, Homo sapiens
LPRGRPGPGLAELGMCGLAALGAGPLTVLLPPAAGACLTPAYDAAAENDTGARRGSVLLDFCDFYGGAGRRLAQRAELLWPAWRGGFGVDHGRWLEQSCRRAPSCAKQHAWECWLVLCLHVAEAPWLLLLRLCCQRISACLFRPHSGNAWTVLAVALPWCMLAGPDLAWRRLHVPLKPGWMGGPDRPGQLTWVLLEHGIALRNWFSSGFLKP

SEQ ID NO: 960329 - protein, 234 aa, Homo sapiens
AGASLRCALALAPCPRWCAMLPVWPAGMMPCDPELVFLAHMCTLCLCPGAWHDPCGCGICCVLCAVPMMLCCAISAPCDVPTVVMCHEVMDLCLSVLNALYCAWGLPVCVLADGFLTVAGHCVQLTLCQQCQAACDLSACPCIGSLPCPGPEGVAFHVLHSVVPWLLHGSCDNVATFIWLVASVGALVVPGGLLMFETEDLVLRKNEKSVVLCLLECGCGVGHAWGLLAHASCS

SEQ ID NO: 960330 - protein, 243 aa, Homo sapiens
GVIPVGPESTPSHITWCVPWCGPGACLTNGAASPKCQPQPQACGKPNNEPSQQPHQCSLPMSPTNGGASTWWLLLVTKDVPQCLTNVEVALPVAAVCSTTAQSTPLVPGPTDPMSWALMGAGPTLSHRWRMVMKGFEENCACVLHVAMERAPGADGQCSRNTSSIASWFGLKKSKLPALNLPHRGPPRTMEGAGGGSPLRREVKMEARKLEAESLNISKLMAKGEDLRRALEEEKPTKQRAGK

SEQ ID NO: 960331 - protein, 221 aa, Homo sapiens
MSLSEEQARSFLDQNPDFARQYFGKKLSPENVAAACEDGCPPDCDSLRDLCQVEESTALLELVQDMQESINMERVVFKVLRRLCTLLQADRCSLFMYRQRNGVAELATRLFSVQPDSVLEDCLVPPDSEIVFPLDIGVVGHVAQTKKMVNVEDVAECPHFSSFADELTDYKTKNMLATPIMNGKDVVAVIMAVNKLTAHSSPAKTKMCSGDPEFARCPKII

SEQ ID NO: 960332 - protein, 110 aa, Homo sapiens
TARYEAGWRMYTYLKTGGPSRLSSLLSTAGLSVLRALRTTPLPFWPNQPAPLNFSANFLPGKVPAFDVCDDGFLCVLRATAIAYYCDAHDVMLLGNVLHECMHAQCGAVG

SEQ ID NO: 960333 - protein, 125 aa, Homo sapiens
MAASSGAGNSLLMSGYGAVWGLRAECRLRAFPERLAACGGRGRGVRQCAVHVPPLAPGLACLSNGLLRCWEFEALRSCFACCGSVGCWAPSPLPMPFPSKMPAGPRLSFAFPVWFNGLSCLPAVL

SEQ ID NO: 960334 - protein, 289 aa, Homo sapiens
HADTGPRPRQLNLRHEAAHRPSTPPAARARIPHLPRLRRQPAPPPPPLQDHLQPPYPTPKPRRTPPASPSPPPSTLPPFPLSTRLAPPRSPPPTPPPPASSAPRSPPPCLTPPSPPPAPPPPAPPSPLGPPPPPPAPPPPPAPPSPPPPPPPPPPPPPPPPPPSPPPPPPPSPPPPPPPPPPPPPPPPPPPPPPPPPPPAPPPPPPPPPPPPPPPPPPPPPPPPPPPPPPPPPPPRPPPPPPPPPPPPPPPPPPPPPPPPPPPPPPPPPPPPPPPPPPPPPPPPPPPPP

SEQ ID NO: 960335 - protein, 104 aa, Homo sapiens
MGVMEKTCNTQKKGAPVAGNGFPQGWVSGDLPQYRQGTPFGLAHLVGLGTQEAWSRTLWALNDVPDWDSVGGLSEPVWSSDWVLGAPIPRVCWGGGKHLLLFKA

SEQ ID NO: 960336 - protein, 125 aa, Homo sapiens
MGECRSMVSSPGWGNIARPVSIYKKKTKKTRPILEGGNNRVHTRGVQIINTIKGAGSPKGNVGQHTQHNKKTTSGGSTMAGAGHTGNMGIGHTWSRNRFWAPGEQRARHKRRQTQNTGTEGDSEK

SEQ ID NO: 960337 - protein, 137 aa, Homo sapiens
  misc_feature (133)..(133): Xaa can be any naturally occurring amino acid
LYVLGTDGMVLLTLCTDGLCAGVGPSACWGCVLGLCCGCLAADQPVDMTEHQMPLLLVYCMCERVAADVADNGAAVKHMMLLLDVLRAVDLYCGAPTDLLLSTTSCCDVMRAMLPACGQPLFTATKHACMMTXCGFR

SEQ ID NO: 960338 - protein, 189 aa, Homo sapiens
SLVPLETVLDMLRDAMVAKVNTSKGFLIDGYPRECACNGEEFGATGFVTCPHLLLYVGLQALETMNQLALETVDEDQAGAVLTTHEETIKKRLDDLLQGHRNRHLPSMRNWWAFVAHRSTLRAPWTVGFFPGSCTTLECPKVSNCWMPRFPRVQSARATPVADEEGFLHWVPRKLQENVTKPYSLSLFT

SEQ ID NO: 960339 - protein, 53 aa, Homo sapiens
MKIRLHKNKNKREEDNNNMKKNKQTQNTKTNTSTHTIVVTQKKDKHTQTDNTP

SEQ ID NO: 960340 - protein, 110 aa, Homo sapiens
APFSAPCDWQMVFLQKYPPPLIPPRGEVNAADAFDIGSFDEEDTRRNQVTWTCDQDALPATSPSTDLSYAVCACMDGGMRLSSDTDQLLRHDLAGWLARNAKNNACLGHE

SEQ ID NO: 960341 - protein, 120 aa, Homo sapiens
MERKKPGLVNPFRRHVVQAEAGGMHTVCLSKKWQVYTFGCTDEGALGKGHISGGLERWSLGRRGARNEKVVQAVSRRQVEKQPSQMMAVSSLGHLPGQKRWDRTGGPMKKTWCWAGELKC

SEQ ID NO: 960342 - protein, 271 aa, Homo sapiens
VPVPRGGAGTVLWLPGADQPVDMMSIKAFTACLCCVSGGAADVVLTRMAVNIECCGVLLAVDLYVGTNCCFVYHFLLDVRGHVPAGPDHVHCLTKAAVVRHLGFKKPVKRAACCPQHSTVLLGACVTTPYSLVNMLEPRASAFGGPHQGWHATFALNENPVSWGPLLCRTFASSSVKRRTIQMFLFVRGTVLQIVKEVSIAEQSLAVAFDGHFLCLGLTRQSIIRITCHVVSMTVPYCSEEGGDRRRWGGVCAAGGCFFRRVPGRGSVVGV

SEQ ID NO: 960343 - protein, 47 aa, Homo sapiens
MGNDIQDGPQLGSTQSHCRLRVPQQETLSDHHARFNRTLRPAYNSTN

SEQ ID NO: 960344 - protein, 112 aa, Homo sapiens
MPAMALFTSYQSHCGWRTNWSFSSGSGGGMSLSPGAKCEGGGHTGYDRAHVANDRFPRVPLFSWSRVGELADPQKGRQKIPMGPVHLYVVHHTQMKAPCGKTHRQDCFTKGG

SEQ ID NO: 960345 - protein, 353 aa, Homo sapiens
RLLISVIVDLSLSLVQSILTGRRLHLLPSRPAEAIAHLLKMAKFMTPVIQDNPYRLEVPERFPRQFRDMPYQPYQQRRSATERLADWTASPHNHRLTRYTQVKLILLSLRLAAQRSNMLYFPMHAERLENATPYPSPELGTYQPAANNHHNPPAPLPNAAHTSATPAPPLWPPTPPRTPLPRPRNETTTSNSSSRENPLCLGNGSPKPTSRRKNRLDAVITHASPPKQPLHHKRNASQPTTIPNFTRTLGPTQPPQRLPPNANHPKPPRRRGFKHATVETLAAQLPTTKNVQTSHTATPPANVNPTAHPRHPTARIPAQALNTRRQNSWNTRPSSKKHGGAYLTSILKTLAHF

SEQ ID NO: 960346 - protein, 223 aa, Homo sapiens
EEDDAEGQDQDKKSPKPKKKKHRKEKEERTKGKKKSKKQPPGSEDGMLCGEPVCMKWLLPDVMDAAPCRDVHANSHPTLERFLMYNIDLVSILWGMSCSELTCHVSLVCHLLLVRTVMHACISTRACELSCARTTLKCHVMAPACRGYLLSTIGVPCAFPACPRRLQLKPSIVFTIQSIVMAQKLKGTLSFIAKNDEGANHEKLDFRAALQLQLLLDHQSLLQ

SEQ ID NO: 960347 - protein, 234 aa, Homo sapiens
  misc_feature (78)..(78): Xaa can be any naturally occurring amino acid
AGLLGSMDGRLLSLHSPAAEVMAGLSAVRVSELCQWVIGVCLYYLQFSLTPVWATWSVVPECMCCCMPAVNVSPCEHXPMMELEEMPHPQSLHVSSDVTATWMLGNCSVLACVVRPLVAIGVLCAQWPLDSLSLCGLSPCDVHAQWTLVVTCDVPWLGLDVQRMGTVMWAAVLVPNAPVQGPSAVPTVEGTSLGWVALWLHTRRAMARLPLPCPDVWRRFRHAPFLALHLQVHA

SEQ ID NO: 960348 - protein, 266 aa, Homo sapiens
MACSLMDELLCSIWLSIYQDPVSLGCEHYFCRRCIIGALGAGMDWRMGRPRSAPSAVAHVRRSPRWRPDPPSLAETIDVSAYQSSIARWHANPSTATPQLCADPCSRRTIKGQRLFCSHGIRRQLPLASFLLYRSRLPNSRSQPNVYTLRQALGLIWNLTDLSVADVLGPVGEALNVGSETVSAPCKGSRTRQGNERPRESARTTGSRVELTWREAPSTSIEEPADRLSGEARSEPAGDPVLAGVDTAEHEAMLEELAGWTLARHA

SEQ ID NO: 960349 - protein, 195 aa, Homo sapiens
  misc_feature (121)..(121): Xaa can be any naturally occurring amino acid
HTDALAFTSSSPSLSSPSRTPPPILARNGIKQAPRNHLPLPIKIHRSHPLHTESQTTPCGITSRSFVCRVNGHQTHIRQRETYLADPRRSMTHSRSHLKQRHHPTIKSRSEYVAPECSLVXTISRGSWPVTKAEEASCAPITSRMPQSKQLDTPPPKISRSSNRGKSRTQRMTEVKTEASKNESDNHTTTAKGRS

SEQ ID NO: 960350 - protein, 114 aa, Homo sapiens
WSPEIQKLIAMAQCSEVLWVLNEPALMAELLQSDELGLAAGCPAPVPDGCLLWMQLVMLCDEDDVLLCAMHVMLLNCALCSCVPCSTLDACDACWCAACMQLAAVLYSDVCGLM

SEQ ID NO: 960351 - protein, 179 aa, Homo sapiens
SPLPPLNHIPLGRRYPGQGQSGLITPGNTKDTRRHRRHKRKKQEKRQERNTSTKTARGEKKNQKTGTTQKNKQQEKHRTNTKSTKRRQTKEATHKNKGTQNENKKTKRQNNTNTNKHHKKHKHRNNTKETHKTKEQANKTTKNKRTQTSPDSTQTQQRNKAETNIHNHTQRQHRQHENP

SEQ ID NO: 960352 - protein, 172 aa, Homo sapiens
MNRLGDVCQNPCGSKACLRLFVPSVTAEQLSLDCDAANVLWLHPVRPCELDVNFDFVTETPLEGDFAWELCAGGLGPCPSSTFPLGAPGWVPGIDVWCCDVHVLDLWHLTLLLLACGDMHDVNDPCCDLVTLSLYPMCARISGEHVLERGPQCVTLGDSSGVRKTAVARPCN

SEQ ID NO: 960353 - protein, 107 aa, Homo sapiens
MKPHASMDNASFPKNPCTSMHATECDAWMSTMPAPWPRLCCTLVYSSDMMRTMHVSPKSYSAGKSKCKTKCSVLLPYISIFKTRNSSSPNLVYGESGWMSSEDHCCS

SEQ ID NO: 960354 - protein, 121 aa, Homo sapiens
MYTRVSAGSKPWVEQHNEGANNIRGSRVDIRTAAVQQGGNSPGSQRVCLWYPPIKHNAFTTGLSSDERGGTTTQLREGSGGNHPQTKTYDITGRNCTTPLLTKKYNAESSMHQQEQTTHNT

SEQ ID NO: 960355 - protein, 98 aa, Homo sapiens
GLASLAGRREALDGSSRCVVWCSPSLSSPSAPAPAPGPPWRRLMLIQNGQCWPDAWPELLTDDMATCMNGSDLSRAPELSNEERNLLSCGLQERGLGA

SEQ ID NO: 960356 - protein, 267 aa, Homo sapiens
MAPSSVLPALSSLPSACCSCTCLCYTWAAWECFLCVVSGPHVPCVSSLCALVLGCGVSCLLCLFQLVVMLCLECPSAILCVVCVCLFNPHVPHYVAQVVEGSHLLSVAGADVAGDCSVDPMLEPTPKRAWQSSINFTLQLKVKDVPPSVGINMPQPVSPAVKRRDVAQAGVAQAGQSLEPGGSYPVSLRIQACSPVFLCLAWGSSVAPMQRHRWIRGVHLWLLALHLRESISSPVSLCRWVPRVGDPCRLPAGSAAGVVLLLTPWCC

SEQ ID NO: 960357 - protein, 68 aa, Homo sapiens
QANNAVLAPAGLAGALLTLLCMGLLVSAVYHLNLSPQRVQGTPELSQPNPGPPESYSYTDVLHLQLND

SEQ ID NO: 960358 - protein, 264 aa, Homo sapiens
MSRACGAACWPAALSPWDSPPSLADPCCLVAVSVLLAVLWHVVLLVHVVMMWLCSVLWVYACLLLHALPGCLWMPCDLPPAFFLHAVLPSLPPCASVLPCLPSCLPAAPWLCFAICACDLVDVCCPACCLSLPCSVLCALCPGPGDVLLHCPLLALLAAQPLHALLIVSRSWLISCACGAVLIACAVLKLSESITVSTVQPVESCCRGAIFLPANMLPNPAKPLPCGPGWSSCACAPLCSSILLAGGGSLCFVAKNSMVTLSAS

SEQ ID NO: 960359 - protein, 143 aa, Homo sapiens
AFRLPTNNIVVKTSGVGPTNLRIEYQERENSEWGLLSYVVVTIHSLTQLWTGGGSHRGSTLLVCSEVCAEGISAEQGPRKPPREAGTWFTFYLDHNRPLPAFQPPIFCGEHLRGEGSPINKSGPGCHSWGRALPTRLKDYWEN

SEQ ID NO: 960360 - protein, 242 aa, Homo sapiens
RLERPGVNQAEGLPYNLANNCQVRMLAVLSLVGCYNLSFIPEGNAGAQLLLESCHEEPAVGMAFFGLTCVPAAMTAVPVLSGLFNLNVHPGPSCSTIARGLGVLWSVDEDTILCCILSVMLNLTLDSAAVLTTPMDLFQHALPCTMLCNVWRLQGSSCLDEPLSDSVLLAPVANGRQLAMQRDGLPDLSLGRVPNLMDLHDATSFEKLVVARGGPTEQGSMGGSCGGITPVTDDRVNRQDCQ

SEQ ID NO: 960361 - protein, 154 aa, Homo sapiens
MEQECNPSTCGLCVFRSTAQPRVSCSNLTVWLSDLCDTGGEEWTAQTPQVQCDGGPGMQMYAWALHAPCCENVHRGDMQKHHASRCTLKDPCWCLMGVPMLSHHDACPQGLELVAGCMRQLGCVEMWSVVIKNHMQNSDPHAELLGAIAIPPRH

SEQ ID NO: 960362 - protein, 112 aa, Homo sapiens
  misc_feature (82)..(82): Xaa can be any naturally occurring amino acid
AEPHLVVLFRPPCQLPVQTSSLVGAPPRQPAPSRSALPRGGAFFSPPRKVPSEFFGIFPAGGKFFPQVGGRQRETPYPIRAXIAFPRCRYPQRFKVFPCARPFNPSCEPFPD

SEQ ID NO: 960363 - protein, 240 aa, Homo sapiens
MVRIPPSDLHCQVPTLALGAHSTVLVPSVSCTMVTVLACGEIFEWERLCMTVCVPTASSAISTKISYKDGLDELSVLGFFCSFMGCDLGCCLIPCLINDVQVMDAHMPQLRSRYIYPYRMLPVLTGFWDSGTPPACRSGPLCFAPLRSVVHLSRSHLGLGTPVPPSPRSPVLFTLSLSCACFTSSGSHFSPGDSVCPGVVVWLGACTWCLCVAGCLCVCGEISAGGLLGLFSLPPCGRPS

SEQ ID NO: 960364 - protein, 120 aa, Homo sapiens
MACFNCADVGAAASVEGVLLLLIWVCLLRQSQSLQPEGSLGPGALSPEPDAWSPELSWRETCAPCLVPLLPPAVAMCPVQWMWSELPEVAPHINMNATSHPAVATVGATWCVPRSLHAVF

SEQ ID NO: 960365 - protein, 121 aa, Homo sapiens
MNQGVEKGRGQKNNRGTGSGGLEKHMVVGPQNAGQTRYIQRRTSHTSPQRKNENVPGKYEAEKPRVTLSSEQGCGSLEKPGNGNTRGTGANQRTPGGLVGPTSKWPHTNLHPKVTGRHSRV

SEQ ID NO: 960366 - protein, 73 aa, Homo sapiens
QDVLYLHLGWPAWGGMSHTGPAASKMSSTFICGTCTGHPCELFNAASPSMFTAMFLCARPSCTGYTVLSGACD

SEQ ID NO: 960367 - protein, 219 aa, Homo sapiens
MASDVLVCPVCCVPCAWAWCHVVMCVPVLCMWCCGAFMLKCAAGCTLAADDAAGVELAPCSREVGGLRSAACPSPALRASALLLAALTPACALAMCCDLCCAMHAPCVLDVPAPLANALCVSPVRLTAHWMNFLKCCCILNDVLTMLCVAVVPECDVLAPGAPGPFCRPGCRGAVHMRVKEVQQMIRNLMAFCHLPSIAHASHCGAICLQLACWLGPPP

SEQ ID NO: 960368 - protein, 212 aa, Homo sapiens
MDDEEETYRLWKIRRTIMQLCQLNCGYLVTQDELDQTLEEFKAQFGDKPSDGVLSAGALDLTCAGGPQLMTPTDTDVCCSIPEEPKVVHQDTIKVYCQRMQEENITRGSHRWMQQGMTHLLPSSPMVRHGTPSTITWSSICSSELLINITEHELSLSNVVMTKAGGDTRLLALIYCVREHQAAQDPVREDTVSRYYGNKRVQVVKSIGPVKR

SEQ ID NO: 960369 - protein, 126 aa, Homo sapiens
MGVTCMQHVGCNPNLANRPLGNYCGQPSEDSENADVPSVIINALLTGLSDRCPLVEHLAWFDLGPIEAERAARLLDAIVQPAVVFGLAPPLCALQVCESSCHIHSMGFTLVPPEEIRSVYLNARTL

SEQ ID NO: 960370 - protein, 193 aa, Homo sapiens
FKEARQNVAEVESSTAMLQQAIILSNTLYSTCIMEVIYSVKQLSSVQAHTSPKQTQTYWRKQTQYIIPKAQNIAQAWQHGPQSSDYCKFSPQSPSAKGFCSYPCSTRKTPADPNTENSKSTPKKTKDLIAHSLVTVMAEKQFRAQQAAQALFCMHSTASKGFYKPVFHCLTDSDSGDDFFMGTVSTDTHSTAK

SEQ ID NO: 960371 - protein, 148 aa, Homo sapiens
MVTQQVLKMVCALDWIGAQIPLVPLTAGTAPVVVGCLQASAQREPCSWSWRRCWPRRGPSCQRTPLLRRLLDSPALKGLPGHLPWRTCPALKDDGGGRCWLATVTCIPCIPGLSAPHRLLEAELNGHDRHPRPVGCQCELKKHDVARQ

SEQ ID NO: 960372 - protein, 198 aa, Homo sapiens
KGINCHINVNDCRWCSVSMWGTCKDLVNWVPDVCCPRVASVRPGIAELELMTECASSPCHMLLASAEDLADWLPLPLPPVASPWPLCEVDVLTFVSQCPCRNGARCYNLEGDYYCACLMTLVARTCSVPREPCPGWGLQSDLMAAGHDAVAWDAWHSSLLACVAPMDAASCQPGGNFSCICDSGFTGTYCMENIDDLP

SEQ ID NO: 960373 - protein, 154 aa, Homo sapiens
MTPDLLNFKKGWMSILDEPGDASLPLDSPTSLYFAVEETLDDVLDRFKVVKYYEETPLLRRQMSWMVRIDSAYRAQECHCSTAVQRNLWLPDPHRMDAVYTLSCHDLMASGRNWIESSDERTVRPNFSPSIVTKLSDSNKENALNSYSTQKGPP

SEQ ID NO: 960374 - protein, 138 aa, Homo sapiens
MEVSRVSPMSMKEGEPRIWVLGSEVMRACRPSAGLCTLPAPGPSEGPRAVRRPSFQLQHFSIGLQQIKPLRIAEDRPLQKSLAGWDPKLRKANSSSCPFAGRITVPCPTPSMSSKLNLVISSEQLMSLLHPPLLLDER

SEQ ID NO: 960375 - protein, 50 aa, Homo sapiens
MQTGIRLWIAWCQLGRGQGRELIIGDRQTGKLNAMTQIINQKRSMMDLMK

SEQ ID NO: 960376 - protein, 71 aa, Homo sapiens
QVVARQMREEEEEEEEEAECLESECCPRRKNGPTVVLEPPPEPCATRRSWKWLRVGRRLWLWMDAGKAWVA

SEQ ID NO: 960377 - protein, 66 aa, Homo sapiens
GRFSARKKLTKRLSDRLTSCGRGIRQRVVLCMDVGFTMSNSIPGIVIPIEQAKKVITMYVQRQSDR

SEQ ID NO: 960378 - protein, 206 aa, Homo sapiens
MTLAVDSGCLPVCYSPKCHHHVTSSIAPVWQDLVSGGLWPPPPESNLDLHVELPPCSWPWRPSDINKDPYFMKNHLGSYECKLCLTLHNNEGDYLAHTQGEEAPDQPVPCADVMPNVMCQWMCPLPMPCQPDECVNGVSVKKFVNDLAALGYKVTKQRDSEMGQQSLLFQIDYPEIAEGIMPRHRFMSAYEQRIEPPDRRWQYLLM

SEQ ID NO: 960379 - protein, 190 aa, Homo sapiens
  misc_feature (104)..(104): Xaa can be any naturally occurring amino acid
  misc_feature (147)..(147): Xaa can be any naturally occurring amino acid
ARYEAGCWREACFPSVCRPDAALQRLGAVLAGYGVELRQVTPEQLSTLRDPGCSYVSQGLAGKNIPGRVFVQVLLEALEYLTETHRSEHGRHVVGRASSTASEXSSHCPACILSYDFWNNAPIVPDAAYQRLTLKVSMAAVAYDAHXSSSCSRSAIGWPGSRLDDIHVPARREQDRLADWASKESMSRNW

SEQ ID NO: 960380 - protein, 79 aa, Homo sapiens
LLSAVIGEGWGERCRSCLAARAASPRSPMPGAACSILGSWAPVCDGSADQSEKAAGRLPPGIMSAKDELGQGDPEGLQT

SEQ ID NO: 960381 - protein, 176 aa, Homo sapiens
ELVPTCAAKAGRLLRPAALPDAAAGGGCAPCACVFALICVLLHLCVSGYSNAHESKQMYFVFNRNEDACRYVQCHRGAGLPVPRLSSWLVDAYFPQISNATDLQYLVIGDLLFSVVVLGLPVPTSCYNGWLLDELHPELRLTPLRDPKTCYCLLPSVHLVDNYQQPAYHRRTAETT

SEQ ID NO: 960382 - protein, 235 aa, Homo sapiens
RCCELRCLLALCALCCGHGLKLIIPNKQPKAMVAYPTQPWAGLFPAEQSCPTGQQMLHVCYMPCPRNTSVLCAMMQLFFLCARARTCYVNSVKLPQGICARLCCEYVHVANECLPNRLYWCMPCPHYPWTNWHSKAMHHTCMQPLGEVTGVCMYLHDAACYWSKATMMLGDAYSTCSLSYWMGQAAQCYGHDKRKAIHPPSGGYGTRMKQVQNGEMVVEGGGVEVEVTMAKINPP

SEQ ID NO: 960383 - protein, 279 aa, Homo sapiens
MREIVHMQCLGQCGNQIGAKFWEVINDETRQSTPRDTYHGDSDLQLERIKRCTTMSATGGKYVPRAVDLVDLETRTTMDSVSARGPYGQIFRPDNFVYRSEWCMGTTGPRGTNTEGAELAWTRMHGCEVRKEAESCDLPDSGYQLTQLTLGMEGTGYRGWNTLLHTSKDTGSEVHTDEDQSSTYRVGRLRPKDVRTQGEEALHRQRASKHQHSEKNNDETYGSEKKDFANERRTKSDNAHYGDWNLRWMHKRGNPGGPKRQEEERRKTKRENRRTRKGK

SEQ ID NO: 960384 - protein, 218 aa, Homo sapiens
CSGGARGALVALVIGNRGGVRGVFRQWHPGPWVAGLWTGPGPRPRSSRECKAEDKGVDARHQVGACLVKDMNDQVPGGDLSSSRLPIKESEIIDFIPGGLSHRIEVFGEINSAVQEADPVPGPVCIHVFKAFCLLICEVLTIGTRRYQECEKCSNGGGHLHTVVAIILAKLSIVPVRRGYLVVNKIGKPHTVPCKVTGRCGSVLVRLIPAPRCTWNRL

SEQ ID NO: 960385 - protein, 220 aa, Homo sapiens
CPHCTECTSVFSSGAADSELAHGIAWVVPFLVLRAPVTLRSLRTLEDGPRTSSSEFPWEPRLRCIITSIAQNDSWTLTARMPPLTKATLHACFPGPPRALLQPLRETEACELVYPGALQWSSAHGMTVSGRASPRPAQPQDVSHQQLCLVWSAVPVVCVLCSCETGAAGLSSHPCCLPVPLAARVNTDKRERKDFCSPQVTPVPPEPWVAVIWVKLGECP

SEQ ID NO: 960386 - protein, 42 aa, Homo sapiens
MRSRHNRGMKPDNWIPPAQGNLGQIWVAGRRAVSKYSAGNEL

SEQ ID NO: 960387 - protein, 208 aa, Homo sapiens
LSLFYSTVFGQYPQTRWDTAPVHTSIPGLPSQGSLKEASFRGQGSGRLLLSLSPFPFGPSLNVTRGVVGGWWRAPLGSPSPTVASTNTPNEEARGGLSLSVAHSLLLPCLSEGARVPLRLCPVNSSSSLHGEGGRNSRGVMKPGGTTMGLGGWDKQAQGGNEEAAAAEECTPVGHRPCNRGAGPGWPAWVRVLHLLNRCFHQPEEPIY

SEQ ID NO: 960388 - protein, 96 aa, Homo sapiens
MANNKPALTGNSQPQHHGRMACMLAHAISMHVAVFVLDVLLAKAGLVSCAKHVADVCSLLMGQLRRHMNASSSHDPRPTILSVALLQMYSSTSSRP

SEQ ID NO: 960389 - protein, 219 aa, Homo sapiens
MLSHDVWMLMVCCRVLLWLLCPEWRRAAVELLVVWLLLRCVMDDVSCAWPAWPRSFFTCMELGSILQSFTTCQLCDYNEVSFTKVTGYHSPAQDSTDVDFSIPEFFHGQKANGYPPDKSSVIQEAETISAGFWKEKPQQHNFTHQTPGLQLLNDATVLWNIYFALDFSSNGKYLATLLHDDLTIQHLEHQGLPSMLMITCMHDSQLLELDNATLVRFIP

SEQ ID NO: 960390 - protein, 211 aa, Homo sapiens
PRNFPTVVYRASSGLGPLDLRATARLGRRCSPPSPVSLKAVKCLPAPPRALGSPPSVNRASPSGTPVTAERDAEPASKNAPWWDLVVNIDNLCALGGEVSCGGRSSAGDGRTERRSRMVRRRRLAATFPHLRRNNGPRAMPWPGASRRPRLPARRAAGACSFPHGLLPPGPSFPTLGTRSDLHRADPTEPPRPGLPGPDDPARQSGQAPGP

SEQ ID NO: 960391 - protein, 241 aa, Homo sapiens
EGTPVNGCSSPERLALPDYEYLGSGDIVLTYMERCSVPAGYQKQVRILSHTMAIRQASLTASIFNYAVMTQRSDDDQFSYVVANSRLSIAEADRPDEIGVSIMLTWPLLGDAFRNVWGQRTLCRYLLDACTENSQLLLSRKLLCPDFPLELTHNSTQDSAHGTMPLELLDVVFQDCLFAFQCPVLLLETVPGTVLAAIYEDLLSGMNPDTVIVPTSSSGQWRDSDCLGLGPARWRAWGVLS

SEQ ID NO: 960392 - protein, 69 aa, Homo sapiens
RTSTTYPLGNKVSMQRMTVSGDKQGQSQWPVSTNTVGQLSKERGTGKFTKQVARKFRNIYCNSDTQLLI

SEQ ID NO: 960393 - protein, 251 aa, Homo sapiens
VHGLLPHAPIHSASLCTSARRRLATRETVRGHLRRREDFLKTVEGRELQSVKAPGGLPQGNSIIPFVSRIGHIDTAKITSTVIAHGPHPSRLAGVIGWMGWCSQALLNGAHRGDPQKVSGKRERMRVSTPRSLSPMIREGMHPQRGAGHDSESLGKRELPEEANFMSAVPVDGPMGWHAAGHGLETVRRCIVRACNQVVKPRGQLTEAQGVRAGLLAERGPGLDRNGPPDARPDDGSKERDSSGGLRAGAA

SEQ ID NO: 960394 - protein, 258 aa, Homo sapiens
RERQEAPLENGGGGDSGSRSLELGCGAHYSVNTSPPRETVSPIPGSQRAGEDLPGKPEVGDPGCAMSWLMPDGEADPDCDGWTDGVTGHDGVRQQSHGEQLHDSEEGPGDKNKGLAHVKPNETTDKNMCCCPIPNPVSGLHKSNLLVIACLLSATTWGCMNCETQKTGTSLGPRHSVQTRDLRTGGPTGVTMHASMWDHHEAQREQNPGCRRRRGTSGTRPRYKRKGLEKGLQQQDEKQRGQLERASRPAPVQQAKPV

SEQ ID NO: 960395 - protein, 176 aa, Homo sapiens
MGADSKETPVVTIDTQTGRIEDITMKRLDRGDTTIKLMDYNPQITTQRSIDTEHAKTAQKTKRELTMVSRLSLEDDGEYSPYMRSLTKPEQQQRLEKDVNTHRVSTKTPFREARMQTRQGPLKTVEKERDHRRNTHGNKKNKIPMAGQATGNTPKGRVAQDADRIETVENNHRKPI

SEQ ID NO: 960396 - protein, 34 aa, Homo sapiens
MPYHLAGLACGTALDGGNTHEEGKRAVGNNTMGD

SEQ ID NO: 960397 - protein, 130 aa, Homo sapiens
NFSDKLGRQVIRHQKDLPAVGLLDQRYARAPVLGKLPAWIRARVEVKATLGPAIAAVRKFHRGESRALADGQPQHCPGAVPFLCRCPLETVFVVGVVCWGSCYGTVNSQEESVESSSRWQVPRAQALRSA

SEQ ID NO: 960398 - protein, 132 aa, Homo sapiens
IPRQDEAWFKSGRGPPRPILGEPPYYSALSFLPSPSLGARYDACPGSTYTIATYIPTLNIADQYTSRQSTVIRQNETKRYPPGKKHDAHTDMMSDDMRDYVISVHCFLLDGHEGRLMQHAATTDHALMIMEC

SEQ ID NO: 960399 - protein, 143 aa, Homo sapiens
FVYFLLLPRRAAAIMREIVHLQCRAVLATKYVRQVLGGDQQIEHGIDPTGTYHGGQLTCSWNCITVYYNDVPPGGKYVPLLAVLVDLEPCAPWTPCCSVGPSGQIFRPVTTSYCGQSGAVEQLCANGVHYTEGAELVDSCAGC

SEQ ID NO: 960400 - protein, 131 aa, Homo sapiens
MAISCGRLAAIVARECTAGGLEGGGLYAVNVINISGNFYRNNVECTCAFLRRMLDEDQPLPGGPYHFRGPQPASSGLDLCDGMLPHKTKRWPGLLCDRLNGCFDCASHLPYDNEKCWIVCVPCCPQVSVAV

SEQ ID NO: 960401 - protein, 155 aa, Homo sapiens
LCGLWTKREYQYAEIAKDDSGAPPWGMNMISGLSYGALNASYQCRPGRDAAFPLLNSPGMLEPWLRQQPAAPQPLMTWVPLVEPVAQQQDSERAAPLALPAPSISRPCVQVTWRIQQMAEEDMACPVPPLGATYRQRLVGLREDERSLEEELAGE

SEQ ID NO: 960402 - protein, 267 aa, Homo sapiens
SLSLLSFDLVGCVRSPTPRRGVFFSLVGWRVCLGCVFSSLFFFSLSSRGVVCAARGGWVSPTPPSLRRCGCAPPESVRTILLVCCVVASHPHTHLVCVCCAVVLCMHPTTTRFFCVVEGCVWCVWRRARPHTHARVLARLAPFHVCVLVLPLCVLCVLVCVGVYDLLSLFCVVCGAHSHTLHYFVVVCVCAPPCRVCVTCVSSLSRRDCGGCVVCVPPLPVWVGEIYAHAAGGSHSLVWVVFDEHSFWPAPHIHWCLVSPPSPMVVD

SEQ ID NO: 960403 - protein, 256 aa, Homo sapiens
RGSDARLIAIFKENKRPSKEMQVTIRSSVGLELNTVSNFFMNARRRCMNRWAEEPSTAPGGPAGSHGHFLQRPEAPLATAALTHDYNGLGAVPPQSPPQHPARPGDHDHQGGKLKRGAIQETRHNNQRGKAAKASHNDASMDHNTLHPNKRGPGNYITHQLLTELLPYKRNTDNSTIKQNPHNPAIRKQPSKRDTTPSTPHTNERSDQTRTRNKKTRGQHGRERTARAQQPPHLNTINSDINNVDMNTRTTPKNTI

SEQ ID NO: 960404 - protein, 169 aa, Homo sapiens
PTARYEAWFADWEAPGCPSKRRKIESPDVDQASFSSDSPRDDTLTEHLQSAIDSILNLQQAPGRTPAPSYPHAASAGTPASPPPLHRPEASPPFQSQRWTRRQDVDQITPGRLPIPRSPSSTKTPGPARVVRPQTPGDLEPGIPRDGITCLSNKSHKGLLPCRLLQLGC

SEQ ID NO: 960405 - protein, 175 aa, Homo sapiens
MVDLFPQAPESEVEAMRCQPPRMLEHATMCGLNTICHPERRGISLNKLHQSGRPQVEESYRALRNQRRILETILTECCLTVALPMKTATQGTRSGGTEYNPGWWQLEERKSNTKEWHSDRLPEELRPRGGPRTPVSKACKEKLTKRVRGSRRTEEERTEKAREWKKVQETGSEKR

SEQ ID NO: 960406 - protein, 169 aa, Homo sapiens
MRERRERAPRRRGGAPLGGGRCRSGLSPPALSVCRRAVSSLSPRLVGLLGRAAAVVRLYLLLLQLCARLRCAGPSARCPASSFPVKAGAADSSLRRSASHLCPHLLPRGQRVPPRHLHLLPRSLQDVPPSVFSARSFIPHSPTLEEVDGRTDATQQPAPTREAASSFIL

SEQ ID NO: 960407 - protein, 181 aa, Homo sapiens
GKKRKGLILKRLRVSKRGLFGFKKGQGDTGGLRRGPWVWGAGPSHPQAPCPPGPPSAGSRGMAGDEGGGLGRGWEAGETPPGSPLNTEGGWGLGGHTLNKTENKVNLKIKPGSPASGLCWARGTSHEPSGNRRGPQGLDAGRKGPGLWDPHRGNPLAPVKGGQGGKKKVASLPGGGEKMTL

SEQ ID NO: 960408 - protein, 262 aa, Homo sapiens
HSASTEAACESGRGSAREQEPRLCLIRRPYTPCRSSPWMMISACARLSTTGSVHVQWPASAGDDAPRADFPSICGVLPQCTSGVMVWHVVMNVIPYVVLTEAQSNEDGILTLNVPHRARHLYTQLGRHGENLGTTTFYKELRVAPEEQPLCMRDLRPPLNPKGNRENDDPDHVLKSFKTPPDSVQYAIHGLCISLYSLLVTYHWTYVMDSGDGVTHTVPILRGGIAITPCHPASDLAGLGLLTTHEDLTSAVRSQHGDGMSY

SEQ ID NO: 960409 - protein, 142 aa, Homo sapiens
KLLYSSVLALFDACRCYAADTWAVVVHESVVSVNTLMMALNEQQDQKIQQISYGKLIRDTHLLKLLKTEEGHAYGVSYMHGVQMTTILVLVAQMTALSFGYGIVTNRRTKDKNESQIYMKTSNDKCGLESRWEALYVTGGPA

SEQ ID NO: 960410 - protein, 86 aa, Homo sapiens
MTPWATESSCGAVEYLCRVLDEDPAVGAVSMLAEPNDRKLELTVDASKHVGADDLVSQLYKIANADLSSTVSADCETWPRNRSRTH

SEQ ID NO: 960411 - protein, 104 aa, Homo sapiens
MPSASRVCCCLGRCWNCLHGLSFGGAAASRTPVSLEGMRAFTAVLTVDSEEPTLQGGCLWSEDLWRLFVPALAQYRRIADLSHPSGPLRWSFICVRLRAEGRAV

SEQ ID NO: 960412 - protein, 227 aa, Homo sapiens
  misc_feature (107)..(107): Xaa can be any naturally occurring amino acid
MKIALYLYSLWFGYFWQQKPPGSKVSDVIPERVQTWKSGPGVVGAPRGPLSLLWARRPHPQGNRGSPGGPALTVHAWPPPLIPIYRLTHSLCSSRGVYTVPTCVCRXLHTVPCEMWAPELSTPLCDSPVTERDNSVTTSAKIARTELSVTVKRGFCGAQTKSVIYLSPEMCSLCASTVDPEETSAATKEAGQGGALLLSQKRCESPSERRHSLDGNTVGISSPTLSL

SEQ ID NO: 960413 - protein, 209 aa, Homo sapiens
GSDIVFKPCVAFPERTAVMPREDRATWECSIYFLKIIQLLDDYPKCFIVGARQVWAPSTCCTSACPFAVNGCVCCMGKNTMHALMAILRAPGNSNPCSVHEICLPQYRGECAASVLHQGSDLTEIRVHVAWPIRCQLLPVLVPIAPCEVTCASPEHLVSGPRRPLLFPGLGITTENLQGHHCKSCSDVQLIKTGDKVGSQRSHAAESCS

SEQ ID NO: 960414 - protein, 175 aa, Homo sapiens
AGVIGRGPDLEVCHCWRLTCERSWIRWSCSCLGTWRSWMGKRTVLNARVEEGWLSLAKARYSDGLPMSCSVPLQYASTHGCPSVCLHSQLRPSEGLQKFNGGESWCPQTQEEVRASLKQVCVRRKGPTKDPMNTGCPLSAPQDPLNWLWNPSSSQSTVSAQCKTSGIGLKLARRH

SEQ ID NO: 960415 - protein, 220 aa, Homo sapiens
GGPGSLVALGIGNRGGFLRRFLAVASGAVVAAVDGAWGRWPRMLAGGKAEDKEWIALSPSWACLCQGHEDQCPWMEIYRRSPCPLMEQEIIDSLPVGPLLKDEVWKIIAMCRNAYPCRTAAARFNGIVLLSGTTMATVGRGCNVLQGGVATDIRGAIILAKLSIVPCAEATVGNKIGSPTLVPCKVTGQWDLCWYASSLHQGHCIVSAPVPKKLLMMLYR

SEQ ID NO: 960416 - protein, 228 aa, Homo sapiens
RSRCEAGLNSAEGDGCWSLAALGADPAWVPGWGDVGMPANAPTECLRCLGLPSPPWLGCHAWVMPWATAELAGMRWGRLFEELDSNNGWPAWTVHDVAPWVLAMAVAGGNPDPGAQQGISSEGDADPDGGLDLEEFSRYLQELEQRLLLMFHSLDRNQDGHIDVSEIQQSFRALGISISLEQAEKILHSMDRDGTMTIDWQEWRDTSCCIRWKMWRTCCISGSIHALF

SEQ ID NO: 960417 - protein, 69 aa, Homo sapiens
YRQLLGVVFEFTLTGRRFTEDSSPDDQFFLTAIRLLWERQCQPPRGSGEHSEGPAVMASWLKVFNCHLL

SEQ ID NO: 960418 - protein, 31 aa, Homo sapiens
MVLDIIGAIPKSDAGPARGRVHRARNSEVCP

SEQ ID NO: 960419 - protein, 228 aa, Homo sapiens
MAAAVASLRRGSVGPAVARGSRAARARGLLCSARPGQLPLLTPQAVAFSVEVWLPFPVGRTGDACLAAGACLGRQGVAGLDCGVCIFGVLRCHVRLEQCNPTHDYLVVSPWPPSRSFVIAHAASWRGSPRYISKACAASCHSHCDFDWAYQHSMVGCVLHWMDDRRQRMLAAGSVDWFKNRALSDSIGEIVHSGSGEGCIDLFSRKAYRPRVDGCVEAADHTERWPLS

SEQ ID NO: 960420 - protein, 68 aa, Homo sapiens
GTLYTYPENWRAFKATHTLLSTAGTQVRVLLRHTPHYTISVQTNRTPRNYTTDKLSYRQGTQTYMTGR

SEQ ID NO: 960421 - protein, 321 aa, Homo sapiens
VCAIPWGLDLENSRNLGHRWPGLRVRAEAFSLNETFSELDVLGQRVIQVDGACSRTLGPRSASPLLASRNEGYQIAVACLSFIGGIRRLLQQLTIAQYAHRRAQERDVKILHELNAAKWHEGLSTCDLRRVGLATTQPCSPSSTMIDLASAWGAWGRGGVECPAMGFGSAVQGLWGSPCGEEHWHCHIGLALCSPSTMRSSHCACDRESIVVAGGPPTVGVPPWVYGDAMLAQYFLEGLYTLQVRGSVLGRTLLELTGTPPIPRAAISFNLAPRQGRDPSLVGVVALAGVRWGKSEADALFRWTPGPFERQDGEGHAAGGL

SEQ ID NO: 960422 - protein, 288 aa, Homo sapiens
WLHKAAAGSGHRDAAGGVLSRVMPGSGKLRHLTGLSLLLAGHGGFGAKYCTGLLGVYETLGHYGGLLTIWTGGAGRNVRVDSASRDLSAETNVRNGGRSPDSEMLNPKCTWPRCSRAGVWTCFMALCVAPRSAHEEGVGRTYSFAWSAKARGWGRVRLGMAEVVASGMCIPWKEAHGLMGAGAPSPQCRALSPRAVGDLCAARIVLVRGSCCPTSDTCFGAAETPHLRECRLYGPRRLRELLSREGGQDRALRGLDPGKRPPNIKRESATWNWVPVQEPGLGLTEESR

SEQ ID NO: 960423 - protein, 209 aa, Homo sapiens
EENGGRVGAVPDSGPDGGGGGRLVKTRTATIRVSRKVEDELGDEEEWRCVLTDELWHWCDAASLQPACADCMHATARTSACSAGDWVCCLPCAVLMAWGHASQCCVMWGAGKKHRQRCTHWAVHGITTMMCGVVTTKEHHRMHTNSIGPFVDLLLLDALATIATDGTPMVINANWQAEKSPVQGHPLVWRRQGNALTATVSDLNQQVVY

SEQ ID NO: 960424 - protein, 154 aa, Homo sapiens
MEPLERNLRKGRACMRTVESGRPVNVYAWDLEIIPANHERWNGGYHRFWNTPPLAGQVMMSPGNVTHDDLVQCDCRPGTTVVALSQKTMTLQGNNPQRLILVYCILEVCSGSRLGSAGAHIVEMPWLIISQLTLGLRTPRRTPLRPYRVALYSD

SEQ ID NO: 960425 - protein, 257 aa, Homo sapiens
MTLSAPVSVLLLPFLLPCPATMTEQAISFTPKTYLCRRHQPPPSPQTVPVCSRSELWSMLLLQCPCTASNADLPADNAVQWCIVDLHLSCIPKCCMWLCLSFWSVCNLANLSFCYFPINALNFCLQCDNVQRMIFLWCVRGQCTLQFLGVYYCCGKPWPPVPGAGTGLQKLTYCYRCTLLGFLPETRTGSVTVWKCSCAHELLMFLQAWSRLAWMKITKVPTGICGLYPWPPVSPCMWHHHLPGGYFGVYIRHGMYP

SEQ ID NO: 960426 - protein, 252 aa, Homo sapiens
MARYEAGFQIGAGDARCYAAGLPAVLKTRRAVRLALWLLRQQIHSVEPWDPEHAPDSPCWPWRAGCLPVPAIGPLTLVCLPETCGYRDLPLRYLSPVDEVCPAAQGASERWLVIDRKEYNISDVHPAWHPWGLPGSSATTPGHVMPLGSHFVAFHINNGPCEEVYELSPDLENCLQSSPALSPPRIKELQIEYLGASGATVERMGLMKCQPCLLPCCTCLPSCCWMVLPGSPFGSWDGLLPFLVLCGAVSAV

SEQ ID NO: 960427 - protein, 204 aa, Homo sapiens
MARYEPAVNSAEGFASKDQSLLIRRKMDVLCLTIIFQDSQLNLLTLVLILLGSGKHQMADDCRVHAGWALVGPVCALGMGEPAVCFRCECFWQCASWVPGGRWPVCLGPGGLSACSELAVRCKVHDGIMDVGFALITNVVGRICVKWNIERYNVPCDVDESILYSPLPQLTGNQADTFEFSIPVRGPSYSNWHRRVFMTALSTM

SEQ ID NO: 960428 - protein, 198 aa, Homo sapiens
MREIVHIQAWSDVATRSDCQVLGGDQMMNMAVDPTGHLTTGTEELQTGPHHLMYYNEATGGKYVSSMTILVDLEPGTMDSVRSGPLDQIFRHRTTLVFRSSHGAGNNMGQKATTQRAPSMDDSVLDVVRKEAEEQVTCLQGFQADPHHMGRRAQETLDMGTHHYIQQDPRKEITLITLMTYLQCGCHTHKSCMTRVEP

SEQ ID NO: 960429 - protein, 166 aa, Homo sapiens
MCSVTCHWHSNVSQCAADFAITPLAELLLQPRGERLLARTTIYIKVVLPAPRTYVYHLHLLCLRIVCKLAKLATGRKKFYLMEDSLASLLQWLDYETCQADDEAESYLAKRACTTITAKQLETLKSANNTSPSRAHVRNSSRPRRLNRVCSWYQTRASEELNDRED

SEQ ID NO: 960430 - protein, 75 aa, Homo sapiens
MVGRGSLVSEGDTVVWRACVRHSCSPPAELTLLAAVVVNDVENVVAEDVVCAPGGWVVAYTPVVVQLIHPTYRWG

SEQ ID NO: 960431 - protein, 212 aa, Homo sapiens
GAQPITRTCCRMDAHGRTFFIAFFLRKFIEQTVLSMAEIRRVIGDFGVPIDTSSSWCYVDYSIEDTYTQKLSVPSGFVGDCPRKEGLGHQPPWEEKSPFPVWMMVCQPAAPHILVFILIFMETQITHSSSSTKKERMLQKGSGFHLDLMTHRGHGLDICALFGLPWLDDATCPLCHSRTTRSLVMSRLWHLGTKPQDSGSQGAGVKVLWVAC

SEQ ID NO: 960432 - protein, 96 aa, Homo sapiens
MPMRATGRYKYRTQLLYLRTGRTGTECNTQQERQRAANKTPHTYPVLTQTKKTNCTTPWYQRVTSPLRGTRRISTEGKESMATWHLKGGRKRDRHL

SEQ ID NO: 960433 - protein, 239 aa, Homo sapiens
ACSDGADSLPCHAAGWCHKMPHACRELACRMEAALLQKYVTPVEVCRPSGGEPSLMCQRPAVRLLESPRTPAACQSVDVGSAACVVSRAMLRTCPVLATPWPSRFPSRVVSWADNDGSAERLAASVALTCSPSGLRNGMPLVDHGLMASLKDRIRSGRVAHRTSSPGGGRSLGAQTGRSTSQGEVWTFSLIPLPSTIVAVRAGCALGIPHTAHHAAPLAPCMLRNILAVSHGSPWDCAL

SEQ ID NO: 960434 - protein, 267 aa, Homo sapiens
MQLCMADSANNLTLTEIAQHALLVMGGKNITCRQLRGNEENGATINESRPETSTKLEMETANGTRETQTEEKTRDHHKNQQEAEENRQERHNNTKEEIARKHNKQDNKTDKQRQISENTQRKKQETGDFGHTQQNRKENQSKNMRTHKRGRSQLQQRKLRTNESKRNTGQEPHAPPNQKGQHLVRRDKTAQDNPGEKERTTAPQQKDTRARDSYQDTEKPVRGTAQHTASVQTEEHRKHKRQGPGRPQGRQQTRGRNQQPEPAPRTQ

SEQ ID NO: 960435 - protein, 115 aa, Homo sapiens
MSLLEAQIRRYRLSLVSEVDRQLEILLHSRNSKQTYVCGYPSQLLPDMELVGTFEMAQVLWKYSLFTVGSISTIASFSGESLLARILTVLSIWLQLRHRLFCLEQLEQIWNYAQV

SEQ ID NO: 960436 - protein, 221 aa, Homo sapiens
  misc_feature (71)..(71): Xaa can be any naturally occurring amino acid
MVRRGAVVLLCVAVLYEVQSCRGIAAGSRVFTPVFDGDVAQTCVCPFQPVTPPFLVLIFSGGALSLLPQPXRLFWRWVVDGGFTVNTEVFFLIEACYNVLMYRLSRYVTKPNSDDEDDGDEKEDDEEDKDDGPWALNVGGSLRDPVAKKTGWGPALRVHEQVCPVPPGTIAFGTISVGPKWNNARQVVHPANVTSMGQRRTPPEKVMPANCIVGPHKTYIT

SEQ ID NO: 960437 - protein, 146 aa, Homo sapiens
PPASLPPCSLISDCCASNQRDSVGVGPSEPHAGYNLPVCRFLSPLEKRSIRVGVTRFSRCRLSPLSLTRKGNSLTPCASRVRQCLALLQLVHGALHPLSCAPCLALPSEMNPQMEMQKSPVFCVAHAGSCRPELFLLGHLGSTTLR

SEQ ID NO: 960438 - protein, 139 aa, Homo sapiens
MYLQVRVYEVADLVYTYVVHRKPVGKVWTIQVCDYYTLLLRKSDRILEAIQKKLGMKVGETTPDKLFTLIEVECLGACVKHHVVQINDNYYEDVTAKDIEEIIDELQAGNPKQGQSGRSLVTAEFTFGWTPGLVGSAAK

SEQ ID NO: 960439 - protein, 57 aa, Homo sapiens
MLGTAPEFPGYDDGNHLGGSLQEDNSCELRTESERLYLDQIPIFFRTIGSKCSSLGA

SEQ ID NO: 960440 - protein, 156 aa, Homo sapiens
MGFFFFVFPSPPPPGFPFFCEKIFFWACCSPSFFFYSLILPPPRRGGAGGVMRRTTSSPRNIKYRASLFSWDHQERGAQTRRWGVVSHTPTKHSEEKKTGGRSSSIIYTPPSTYSLHTSPPKRESVAPHLCCVDGSASEAPTEIVRSSHRQRERVV

SEQ ID NO: 960441 - protein, 242 aa, Homo sapiens
GSALVPVRGVNCEAPVPRVPVTSAVTPGAMKQWGLVCGACGCWTKAETCLPWLEENNEPPPGLPGPQDVEMKEEAADVCGGSTWGGHDGKTACVQRLSSSQRELDTVTLEDIKEMHVKQLEKAVSGKEPRFVLRALRDCCLPHHAASTTIVLYKAVQGLLHFKIIAHSMTFCSPSLEEAHVHRGLIYQFRPPREKAAVRHPSLLDVGSYYQSSWSSSLINSSATSMPEDSYDLIAQISTRTR

SEQ ID NO: 960442 - protein, 179 aa, Homo sapiens
MENTKWTLFSSRFPAWAVRPSVSESSSCRAGLSCRMTRDRVSGAVTGSSSPGGLDSGPASFSNYPGPSVRPRRWRLSPSCAADRSFSGLTGLAGFKVSLHDGCCSRLHGCGFVDCGAWYCAGPRVGRGPAGVAMAYVLSRWNAGLAVPAEPVPQVAQLYYSSRSWRRYGRIVQRTLLFE

SEQ ID NO: 960443 - protein, 117 aa, Homo sapiens
MPRPPRGCGDNGAVSHQCRAEKPTLITEGADSWLDSGALEVVPEVLGVGDNPGGVPGGSVCTGGLSESRLPSLGDHASGSPISASPGLSLFPPGEANFIGIEYLNGELLIINLGGFD

SEQ ID NO: 960444 - protein, 261 aa, Homo sapiens
AEILRSEFPEIDGQVFDYVTGVLHSGSADFESVDDLVEAVGELYAMRFPGGHAMDDCWASCGLCAMRMYNTLLSGLSHYSQGNSQCATCDCPYPVVKDNWRTTTCGTKLPVLLNDGNMSSTVNAKKLEKAEARLNGKAGMQRSEKDTLKTSEPSSLRRGISPAKAGSTTTESPVGTHLGRTHNPMHVRILLDLLTVSFGRYEYLLAWSWIVTPVLCARPLQGWLGRHWVWAIQLVLKIVGPRSLGVQPTFLVAVDPRSGMT

SEQ ID NO: 960445 - protein, 137 aa, Homo sapiens
HHLLPSRPGRGHCRFWKMCTVHRHPVIQRQPLRLEVPVRFPEHVSVDMPYHACSCKCDDLCYVKCVSMTCDSDATIPDDTDVYQQINVTPSHAFVCVVNDHILLYISDRRDVTENATPYQDLCVITSGSHSDERTVP

SEQ ID NO: 960446 - protein, 191 aa, Homo sapiens
WVKVRVRGHGPATVARMDDKDNDNRNMNLLLPTTMWRKKNEENKGTRMLPSENCHLVYDRHTQFRYNTLREGYERDLKTIVSRWRREFHYHRSGTNGTPLVTKMLQTEDTGSKVDDLRGTPMYSRNLEEIIDDNHAIVSTICGLRTLRQHSFDYEDEDLLEPGCSVLLNHKVHAVIGVLMDDTDPLVTVMK

SEQ ID NO: 960447 - protein, 80 aa, Homo sapiens
PALRSTSVYCSTLRFLLLGDESQWLKFTMSILKIHAREIFDSRWGIPLLEVGSLSPQKVSLQSIAVPSLVAINLVSMSAL

SEQ ID NO: 960448 - protein, 272 aa, Homo sapiens
MVVTLPDPARETAPYHPEPAVSVLEGEKLKEILNVSVELKIYLVRTGNHCGQDQHVCYDILLPYVKTLCMTFIKCASGCDVYTDSLYLQDTPTHYHVIDMKCPDGKLLRTSDVQLLLRHVIRSKCCESNWIGALGRKLKVTPPSRQLINQTTEEEYNTRLCTRHLTHVAHTESEFPRQGMEHAGWDKRPVGSHPVMHEMSSYTPDMQALELKEYTHNVRMRNEAALNQEKDNSAIAEKYYHAHWLYKTGPSDNPIDQDHQAGNRHQRGSTEP

SEQ ID NO: 960449 - protein, 245 aa, Homo sapiens
DCTTPHPGEIAVISLDSFALLSRCAGTSPMTVFWLFGSPETMPHLCVEPAPASEISPPARVLCAQQVPSMDVESRELSTVVKRLFNDPEPQVAMHLSCTVLIGCASLACLPSDMPMTLLLGSRLTLCHCPPGLLSLTHEARDTPRKGEGALGPMAPTHTHSHTAGALAGNFPWDPPVALLPGGLGAATRPPTPGSRNAANCLSDNPPGRAPKTRLGPPEGPPPEPNPERGKLTPMSDPRSPATSI

SEQ ID NO: 960450 - protein, 115 aa, Homo sapiens
MAALLLAAPLLLLLPLLLAEDYTSGLQVALASWLDLAFCWCELLCLQNVALRCICCPLALTDLPDWTTENGSPDGRGKQGPWTHERHRWETLAPCMTAHLVKNRFLTITGFAGWL

SEQ ID NO: 960451 - protein, 116 aa, Homo sapiens
VFRRFVEVGRVAYVSFGPLVPENWSLIVDVIDHAHQGFGRWTLLSTCGALAMPFKLPCSSRDSHPSKFPALVPTQKYVLIEAWRDRQDDQYKMGSPHVWAKERFEGLRREGAKPTD

SEQ ID NO: 960452 - protein, 83 aa, Homo sapiens
MRLIPHVDGIGLLISLPPLTTGTPGQSYKLSLRTSGPVMVPFLPSRLPQNKATRRRMPCPIYRPPCPGLGGSCGAPLCVPPIG

SEQ ID NO: 960453 - protein, 120 aa, Homo sapiens
MRAAGAGAWPVAAAVTETLWDVAVCALAVDGPSSVICGETEKYQTASIATASSILPKAMGIIVVTAPRVARTGRWPPVGPLSGPVAWFPRVPQCYLELLTPKGLLAKARFSVSRGRRLGR

SEQ ID NO: 960454 - protein, 200 aa, Homo sapiens
MFRVRVQRAGVVLVRPAGVRTLALLSVSDAGIVQVKDCEAALWRLSTLCGAVYALGIRAAAEQRWGRHCVGAGLTPRVRQPELSRSGRILDPLGEPGWGSWDYPALLLGTCQPRQGVGAMLLSTFPRLRFGRNPHFVPAPGFTQKLTHTLTSNVANILGLQSRALAPYSLVHLITIFDPRLPRPATFALFPTYFWRAQLD

SEQ ID NO: 960455 - protein, 233 aa, Homo sapiens
TACSSSSLAAALDIPDRNTLSLMVPSSSNGSDGVGGADCGLAVCGLWVTMQCPDGFWLLIMPENVDLWAAGSILGMPVGPSVKGESSADRVNDISGEAHLGPKSSPGSPNGLPILKLPIDPPCFLPGALGAPIPQQNSLGPQSSIPYALMSRPLPTYRALSGYAAQQFQCPLDRFHLAGLQRQTHGYTPPLSLPSPAMSSPQVVRNTPNSSAQCQDRLPRFAPADPSALTTVT

SEQ ID NO: 960456 - protein, 234 aa, Homo sapiens
CCSVAQRPGLALNYYKELDYGVTALRICKDYVPSQLEALQEEYELGSYKNGGHGRVGGIRGHNARTLREHVLDDVHACACGLATSNVRDSVKQLAWRENVLWMKAAELSIKFLPPQRNMECRSGCRTPADLEFGKHMAAAELYLNLDLVKECNDAFIEGEDVEQGEAVVAKELDPRYDDYVDQASKEFLKNQGNVDSLVGVAVDSCMGPVCGAGPWDMCLEQLTSRLPDSAQYV

SEQ ID NO: 960457 - protein, 126 aa, Homo sapiens
MCARGGQNKRINVKRGPQRAHTHETQDTQPYSGLPRRTTHSGARPTHTNARQGGHIQLPAKKTAQAAPPPGTITQDNPGDQHRTPQAATTPPHRQSTPHTHAPAPVATAHNSHPHHNRTRTATPAA

SEQ ID NO: 960458 - protein, 125 aa, Homo sapiens
MNRGWGCPSEPMRVSRTCGAGALLAPVGTARQLERADLVYWRYIVLLDLPSMVGARWSRIGTRSTFWSHEDYHVAMRVERSVPFGRAQVDCWGVTLGPLCPKGVLIPITHTRVGRARALKGTRGD

SEQ ID NO: 960459 - protein, 284 aa, Homo sapiens
GGRVYLDSCLVPRCGCCICVGTSLGLPTCSPTCWCASCCGPLWPGCCSMADVSCLCCAACLCAMNYNHAAMWSSSWEGTMLQQNDHVPLVACQPVLTCITQCVSTVLACELHEMHPPVGWSPPGEPYLWSSLKSDTTMCLSPCLQFHHGLDNASHFNLMVWQLDLPVVLGFGVPLACCCLLCLNPLPIAVSCAAHVQASCVSSTTAFTTNYNVKPWHFGGLLVGGPTLGAPDVWHTPSILGGNHEVVKAPWAGTPSDRTGCCSLDPNLAVVTIGVTHDLLSALF

SEQ ID NO: 960460 - protein, 249 aa, Homo sapiens
NVPGRVELLGRAYGKAKMQLCDKNGVPRFYIRILAEPRGLYLMSYWEDKEGKNEDEKGGNGQGSDASCVMKITESKSDDIQSHQYHKAKMREGHETVCWDEDAMRKMMEDIRMASFDHAVMSDECREIKDDRENIHIEERKSRRAYHFQEEKPAKDENINKTMVMKNEKKRQSRKNSEGTEVTRNMGHTRVHTKSHDEEIPQKPSQMKANMTSGNKNTRQPWTYSKQFPGKHRHPQPKTTEERKKGKDT

SEQ ID NO: 960461 - protein, 254 aa, Homo sapiens
SVGRNGFQAGGSSRSRGSPPRLGLADSRGSRSVPGGHVAVNQWGQGMLRWTAAPGGRAPSRAETMLQLAVGQSGYTSFGGYGVLVRDYEHDCARAVECAQFSMQVSVWLLDNSCPPVKSAMRGQSSAVVPLHALWTLIRASSTTSVLLWGGRNDRRRGLRMCSMSFDVKYAQCGSAPPMCQGQFLGPGDGHSGCVLWQSPVACLGATEHAGGAVCSTDVSQARYQSHWHASYLFRGACGWGTSFGHGGGLVVGA

SEQ ID NO: 960462 - protein, 174 aa, Homo sapiens
MAPPPRGGRRMIVKMMEMSERGKIDDSSGEEVVIPLEERSRRLLKPQEMKVCRLPQAKYRLHVGSRPANESKLSLQANDVQHCNTCLEKDSILQANAVTYTCARRGATPWQSIGSNSVVRRVLASQAKGGKEWQECQKDDSDEEEDDDQLREDEEDDEDEDEDEMNWTSRMKAE

SEQ ID NO: 960463 - protein, 232 aa, Homo sapiens
SSYPGFPVSGPTDHAAGGLNAACSSGPVQASCGCLHGDSGHSCVHASGAAGHHEGHHDLNMLDCSGVAASAWAIPTIWVYVPVDPELIQKANWSPLASLNLASSSANWTAGWFPGLVSAWLSTVLRLTVRQGCPDFLQSTRTDVQSGGTHCMKHLGGKSSEQESTTCWLGALVTSIIASLRLTVGLDNVHVALVCHVVRVQCHCTRSNPAWAGPRCTCKSHQACRNKQEPPS

SEQ ID NO: 960464 - protein, 194 aa, Homo sapiens
GPGEVEMCEVGRRTDVVPCATLQLQYIGEGAYGMVSSVPMTTVRKTRVAIKKISPFNIMTYCQRTLPGDPDPAAASCHENVIWHPDDILRASTLEAMRDVYISASDLMETRHQYKYAEKPAAEQIEHICYNPLTRSMRGPQVHPLPPNRATKQRILERPYPNLDTYNKQHANHIKNIGEYHALARGYGRTRMSS

SEQ ID NO: 960465 - protein, 69 aa, Homo sapiens
GLCIESVADFVFLVSAAAVICLRVSVFGYVCAMVMPEYQTSSAGSSHQDLSQKIAVICLVPGARQRVCD

SEQ ID NO: 960466 - protein, 262 aa, Homo sapiens
SVGPQIGLPPPPPALRALPTVFHTQLAHGSPLACIECDITNVKELYGKICRSAYPAMHNCLMCDVLAPWTPTNVDDGQAPGVGPESVLGVTSSSPTVNWACSNGRAASCCSKCRERSHSAAHHSLDTLGTLSYAFITAHSQATWPALTRPPVHLHSAVGSRAIDSGGAQLKLGAMMPLAFGLSPVHLSSWFGPWAMASKRSPAPHQRPVTLFTARNPSTGEPSPHVHIRQTDSTPDVLQLGFGLPLALGPRAWPLAEETLRL

SEQ ID NO: 960467 - protein, 218 aa, Homo sapiens
PREQAGWQNSIRHNLSLNKLLSGRCRATYCLTLGNGATYCDAGPCLMLTDVFIWRATRGKHAVLPAPPPRGPMLAIQALVLRLNLTGLTFMDRARLHSTRPMSPFLSLHTPHCAKKHFEVTTDTTSGLTQDTTNALKIRVDSELACGKKQLPFSNRQRHLSRWTRLFKRGETDMTRNQLNGRRRYDRHRMPLTDRNGALRQGPKTLNHGSATLNSGTT

SEQ ID NO: 960468 - protein, 216 aa, Homo sapiens
PDTRLGWGSSVVVENRHPKAYLHLCIVVTAPTCFNVCVHTRQPAVPKWLRCATPCTWHVSCVILSHARRCNCLGFSITHLPVHICNGIAHVPILQRLGHASNVVTHMSPPLHCHDVSACVLPLCAPDLTCDTHNCTSVWHGGGLIDSKKLVDSRTQLTRKHTDTLLQLDWVQQPPTSHDVTGRMQYTSKIHQVEPPETHIGKLEQDPKVGVNPFTI

SEQ ID NO: 960469 - protein, 253 aa, Homo sapiens
RLESDVQVGGEPSLLPPLMFYSSLTVRAAWHMLRAGWGSCSSPRAPGPDTCAVVPRWTLQACTVRVPLAFLWLCSVPPVLRTSAGVGAVGGRACCVGRDMPVVLHLWPPWPWRRMVDLSTSTDCEVMAKSFLEGPEDKQREEHYFCKDFVRLKKIPTWKEMAKGVAVKVEEPRVITTDMQLNEKNLPAPQATSPKAGVWTPFVNACNSSCSECGGVGRLNSSGRVPCYRRLLDLRAVDLQARSRRFGPASTSH

SEQ ID NO: 960470 - protein, 248 aa, Homo sapiens
MLCGCAHVMRGWHAWIDVTCGGACGVCGKMRVRPCFTCHLVAELYYDEKCVTKQMANACYGRHILANSRTMDDEGEPDTFGVSEPRATEVSTLIHCTLHFTSKTKGSRPPDPHVALFSNTKVVFPTRNATGSDCAYTSTAPWMNAYPPQTSLIAKTQLSHDLGPLWRNTEHGHDPVTPNVTTGTAMIPLIMAGVTFIPGAEPPPPSAPTTHKTRPPCNRELDQRKNARRKETQREAHSNPTPPDKQNQ

SEQ ID NO: 960471 - protein, 138 aa, Homo sapiens
GQGQQAMCHEACHEYLGTRLELERWLLYTFIATGFDVYEFQLQSSHPEEHLNVSAGPIVYTDVEKDRYISLSGLPRSISFLFCSIPSKQAGALTVIDVFRNNIITVECSQFYAEICLSAGRFNKVEFPQAQLLVKKCV

SEQ ID NO: 960472 - protein, 186 aa, Homo sapiens
GRGPNFIKNQTGRLPCPRSSAMALGEERDKLGPFCQARGARGGTPWLGDCPGCGPPSSSSWAVVPGARCESLGSAWWPHSVVASRCRWDNLRGSASASHSRGVRMGQQFGSLGATLANKEANAFDLSASGPRREKQSFVGIRMGNVVSGRFSTKGGVRPRGWIRWLWGKIFLLALSQIFPKSGQGG

SEQ ID NO: 960473 - protein, 280 aa, Homo sapiens
PVTAGFLGRAGSAVVTVMWLQWAWDMVLPCQPRLLAGLMSAALGQPPLPLLLPLLLLLLRAAALPSVEPGLVCDAPVLLLPDVPLCGLAQVCAWTYAVCCLNHFPGDHAHLCLLVNQTHMRSRLLVSCGTRMRCSLRSLADKIDSPVMLAGLCTVVRRHVLQQGPIPIGMRQVAGRCSLVMLCKLMHTTHQPTRVCSPSCLPACVNFVSEGPAWCLKAAGFFAPSELHLTTSDEFNPLRAFRAAQEACSSQGLILHVLGASLTCGSDGPGCGRFAALKDP

SEQ ID NO: 960474 - protein, 219 aa, Homo sapiens
MVQPRPMTTDNADEVEKYSSGMPDSASKTQTNISASLYLTPSEVLEMRNKIRRTKPDKMEVHDVWPQYPATCASVNCREEPEAQSTDDAMLMSNGETDVIPKDDIHDEMTVCPITLSAKLTDQGVWRSTNKECWTYVNEHKNLTGDGHMKLPQEEPGYTLQRSSKPDIYYTAVTTTPKILKRTQTQRGPILETHPIQKSYRTGQDTREDLKTTQSPSHM

SEQ ID NO: 960475 - protein, 138 aa, Homo sapiens
GLGLREPHLAGFQWRRLASCRWPCSVELILSPFAPHAPHALTARSSCLAQGLLLGHHHPLAMTLPCEHPLPCNCATMLLPPLLADWGLLSVAFLLLPLPGRTLCMPCCLNVLHCLPGTKCWLACLLSCGLLTMVFLRT

SEQ ID NO: 960476 - protein, 70 aa, Homo sapiens
MAGKKVGNTRIVGPSSRPPVIPRIATGRRAGLVAPVATEAEGNPYYPRTWEQSILAHVLWAILLEKPGEA

SEQ ID NO: 960477 - protein, 74 aa, Homo sapiens
MLPPDSGNITYTHTNTDHHRTLTWNKKLKRNEQAEDQNNNQTQDDTSHKQRRQATQEVNSKTQSTMKPEKEDRQ

SEQ ID NO: 960478 - protein, 71 aa, Homo sapiens
AGLGCMGWPLLALRAAVVLRCVPCGPRGPSLLVLPLARGGGPPVTLVSWTLCGCVNALTVLETTVLCICLL

SEQ ID NO: 960479 - protein, 212 aa, Homo sapiens
ELLRSQLILKLRQHYRELCQQREGIEPPRESFNRWMLERKVVDKGSDPLLPSNCEPVVSPSMFREIMNDIPIRLSRIKFRAGTPSACSLNYARAPPGGSSSSSELHPLTARERWLKLECGSTPLAGFGRTTQPPRQRLHCALAWHHLRQRTLWPPRLAPHAKALRWHTASAAKIYHISLELRQTDSERQHLAILKAANISEEVPAPEVAPPL

SEQ ID NO: 960480 - protein, 106 aa, Homo sapiens
MQLRMLAVEVLHDGMHAQCGCSGGALLDSDICAPSQYLGVPHLVAIMHHNKQCHRECKCEEVSANSGVLLDAYLKTRTFLCGAELSDIWLTSQFVCTLLWLYNAWF

SEQ ID NO: 960481 - protein, 205 aa, Homo sapiens
QASAALSVPPRFYLLRSHPDGLCFSEWSGAAILQCPVVAPVTVRLRAPRVELRVVGMQRPRGVPEAVLQPQLLPGQPPCLLVVSRLTMMPVTCGVYRGASLASNVPVSAGGMWPPRSLPRMAEAHADSSGHVGCAAAAPQPTSAVAMPWPLRLDMGCVRLAPGGLGESQYCHSSGHLSAIHGGWVLSCLCLVCLTGHVPQSPKVP

SEQ ID NO: 960482 - protein, 215 aa, Homo sapiens
MLQLQNGPAEMMPEADVAELCTDPCCLNADSLRVQCLWSVLGCCAAAADHPGPVMHLLWTMQLLLTVPLHTWDDACASCLVLQLWSTTMSNYVFVFLGLILYCVVTVPYVAWCALCCLFRVPVTFSILRTLESKLVLFGLRGDAQLHQYALGLDGISFPFFLAGWLRALAVFWVLGSHPGGHLAPTLAFHQIEAVDGEELAMDPCEVSSGTCVLR

SEQ ID NO: 960483 - protein, 222 aa, Homo sapiens
EKGELNVVGRQQDAKGAGPSRVRHLVPWSWPSKRKTRECAEPGKQVLLAQGGLRIAGNSYFVSVVAEWLPIVSVHKAEGLGTHRKCGPEVLAQPECAARSPASRVPPCVRSLSLPESVGLWDCCGPRRKIEAPSTHNPGAVGADRFISTSLHNVRLRVPPSSPCLVRVCPGGCGCPPRPPKSWAGCVFQSPILQPPQYLLVCRHHHVAKVNVPAEVIRARAR

SEQ ID NO: 960484 - protein, 224 aa, Homo sapiens
NHQSSLDLLVDDGWYCQCRCVPIAKLRATVVLALPVLACLAGRSHLHLTWNAALWVIAIMCHCLDVSAQSPAHPVTVMCVWDVSLKGNDESRNCAPCLPLQNCVLHFQSLHVHWPMCSQLSPIVMSSIPMSFYLQECERRIHLGGQIVMVLGCLPHNVPTVNVAMTPGLTVPSSWLDRRPGTSNRSTGFPCVHILRLDWAGGCLVDLSCSCSLGSAGWVNPLCS

SEQ ID NO: 960485 - protein, 226 aa, Homo sapiens
AGGGPGALVALGWGTAGGSAGGFGSGILGPGSAACGLCGLGPDGRGARGGNGLMDKELDALSPSWACLVKDMKIKSLEEIYLFSLPIKESEIIDFFLGGLSQGCRVVTDYAIAEADPVPDMAPGSRHFVAIGDYNWPRRSWVVSAPMEVCTCILWGPSSVGQALHRPRAAEGYWGGTKIVQSPEVSLCKVNRPVGSVLVRLIPETGALGIVSGLWLEGVMMVVSIM

SEQ ID NO: 960486 - protein, 208 aa, Homo sapiens
EGTCAATVALGCSLHAEPGGYSCGLDGHYAMDNITSAEPILRYPMSSNKKTESWLRDVRPLCNGACSMCLSVHEMKTEMNAMEHPPASSLPEASQLNARQACNSRVERGLMKKTWWTGCTLSTERIGGAALLSLLLKRMTMTLMIPLLLLTPINLRPSTIKGWTRGSRVSGYHAQPIEWLCIPCGQERPWPSYWGQNGAVYASRMTLH

SEQ ID NO: 960487 - protein, 204 aa, Homo sapiens
EEGRSSNSPACATGLPPNSQTLWRSSCCRLAHEMFPATAEYADGLLRSTGLRCCGCCMCAMVLHTQEERKCSRTSRPEQHVTLNGWKLQRLHRKIALQHWPWFPSALMPLSCVRASAYDVLWMKYTYWPMFDYKELVLQIDDNVTSAVEGINRIDQSSLDSLGPELVPEDLPSIPLVPVSCSEEVEFLGFGEPQRDGKSRSKEP

SEQ ID NO: 960488 - protein, 229 aa, Homo sapiens
FLNDLCAVMWFTYLLLYLHSCARLHAPAVRWWLLLLLGQVALTGLVHTCSVVLLMCLTCCLPCLLRPATGPAAMAWHLVWHLSAVLLSFPFIFSPCLGQCVVLATALSGLALLYYCALFICDLPVCAGPPHMISHLSLIPGALSPTDHDEMVDAHWHSVYAVTVSWPTITCLRLPPGSCLHLAGGSSRVDAHPRHQHQRPAGGPVTCPVFLEPVPAGGGCRRRVSTVFT

SEQ ID NO: 960489 - protein, 197 aa, Homo sapiens
MTSWSELQWMPFGVNVIHARSAVETQNTDQPTYDYATTLLTNVNVVSNTLARQTSSLKKNVKPTDHWILTNYLLYSTAAHRLDAPARNITRHQHSRPHGQLLPSNGKHTHSDCLPLLLQLVPWAIATTLPNATSLGAYTPNSNLPRRNTSGAVLAPSATQSTHQPNGGIHTRYRADQQPNKTGSQHHSNTPRAQGNP

SEQ ID NO: 960490 - protein, 126 aa, Homo sapiens
AERNKDPILHVLRQYLDPARGGVRVLEVASGSGQHAAHFARAFPPVPDVCMPVWTVGPAAAMDMWALQMQQEGLAQTQVALAHHRTWPYAITWGMISPQRQRGYFDLIAQMQEPRNGGFGTQRLLV

SEQ ID NO: 960491 - protein, 188 aa, Homo sapiens
QCRPAGMQWACWPGWWAVVPACCSCAVAAGADPVSVWLWLGTQSFVFQREEDMLHVFGCCACTACVEAVCMMWHVDVWMLCCVCGDAVDAKWVPEVLAIPCDLVTWCAMPMTPGLPLLPPALAWTTSLAFSLVLICWSLLGWACTHVAQPVLAQTKELAVGVVLVNCGVGIGIGLPLLPSCNASLSRV

SEQ ID NO: 960492 - protein, 133 aa, Homo sapiens
MAGITTIDGGEAARSSVLHAAVQMMQRSSAELPPAEKYEGEMCGPCGKQWLRLSVASLNRRIQLVEEELDLCQERLATALQKLEEAEKAADESERGMKVIENRALKDEEKMELQEIQLREAKHICRRVQIGRY

SEQ ID NO: 960493 - protein, 111 aa, Homo sapiens
MVSKLKKPRRIILLVKAGQCCRMIIIDEIGTIVDTGDIIIDVRKLLNIGTPQDGCRDLKDQGEFHLCGELESVVESDGARYGPSLMPVRDKEAWPHIKSIFQGIAAKVGTC

SEQ ID NO: 960494 - protein, 171 aa, Homo sapiens
QLTGMDTGTVIRKLVFPAVGMSGIVITPHTIISNLPDVIALGSFLALISSPPAMVADRKSRIEFTNATRWVQVEMYIIVVVVDSNIMSCTCVLTLTLQLQSRTDINIMTLYSYVTFKTKKHSSNAARANLLRVVAGRGTDSRYRRELETAIGIEITIWVLIWTIASDMYVS

SEQ ID NO: 960495 - protein, 106 aa, Homo sapiens
ASKLPVLLAVLYSCSLVLPPQCELMAMESTATACLSACWSWFLPDKIEDVPAPSTSADKVESLGCVIVKLRNYWVYGQKHLVMGGYSSSCQCIPWKQLVFYGKNGM

SEQ ID NO: 960496 - protein, 86 aa, Homo sapiens
MRKEYITHACHLSRTVAHTGVDETGLQSDAPHLLNIYCLTRLPTDWCLRADFTYMRNCFGATLPRIVPEPGAVTCSLYASPLISRA

SEQ ID NO: 960497 - protein, 265 aa, Homo sapiens
MGKVKVGVNGFGRIGRLVTRAAFEASGKVDIVAINDPFIEPQSTMVYMFQYDSTQWRNSMAADQGMKNGKLVMQWKSPSPIFQERDPSKIKWGDAGAEYGRWRSSWRRSGQRMEEGWGSFARGDARNGSSSLPPLRDAPMFVMGVSHETYDNQTQDHRVMGSVQRSNWLSTPWPRSSHGQTLEYRGRDLIEATSSMAIYLPPHERLWDWPLRGQSVGVIGPAGLSQKLMPWLLLGAARWWQGLLKEGRHWMTTGPLASARGLDAL

SEQ ID NO: 960498 - protein, 177 aa, Homo sapiens
RVCGRNDAEAREKCSQGVRSVPCTMIMSPAMMSDVFGYLVLALDLLPHYPFLGWPNQSEDLSVFYTLWTQLERPVSMTILFFLVCALDGHACGLNAHWAGCPIRDVSPPCHLLRDAHWPGRMSKSLGNVIDPLDVIYVISLQGLHTSLLNSNLDPSEVEKAQEGQKADSQRGFLMCH

SEQ ID NO: 960499 - protein, 215 aa, Homo sapiens
PQPPLPCDLQVLDWSLAEDTVDAPEAAEMDGSSMILKESHYVDAQDQLPPWSEQACIEARIGYEELGNGTIFEAMGEGDEPSITHVLEWVTCLDDPVHERRMPGERGHVRKAEPSRELWAEDEAKPWSTDTHQHRSHHSGILDFSVEILVPEIETLTRYWVYPSRYDGAWQIHQLVHGTTEYPLSPPSLLTEPGWQHNWTTSQKLRSMAWLKAGK

SEQ ID NO: 960500 - protein, 174 aa, Homo sapiens
MRYLITLEKICFLLQDCILSLFTHSQPSSPTLSNVWQGYRGALKQAIERSRLNSPVRRSQLRETASDDDSLQELFMSPELTIVYLESDLKRKVDVGHLLMTTSYWVSNLSLVEASEYSRVSRSSHGRRRFYGSAFVVAAGSDGLHVIMGQFTHYLLHPASNISPSSKHQWVSKR

SEQ ID NO: 960501 - protein, 225 aa, Homo sapiens
EAADGRAGVAGPGCWLRLRCFLAPTASPMRCCGALAGPGRRRGGEAPLQWSRMTMHCPWGPYPPSHVMIRHRMCLLTPCPACGKYINEEMGDFKLVMIGSTSSDTTSKQLLSARAQLESYTRPPSDSDCISWRGGPGKALMGVEGRSARCISAGSSKANDQASGILRVLDQIVGLTIRYSRGSRLPGAGVVGHHASEPKEYLANQRHEITIIDLVGSGRLVKGRL

SEQ ID NO: 960502 - protein, 198 aa, Homo sapiens
MLLQWWRQPVAVPELECMEDVILISMGMCHADVCCHVEMLWHGCLGYGVHLHSCCVSTMSIYPSPLRLCSNVVAANTSPVEAVDLSDHFATCATVPYHEVLATSPYSSMSTRTASGYMPFPGHPSALIYVIQGPRPCTFHVGPQILGKLPECAPYDIVGYGVSIQKEELRLRSVKAELSLQGRKETGLHLASSETGSL

SEQ ID NO: 960503 - protein, 105 aa, Homo sapiens
MDQSNACDAFVRTTAPQVEVMIDHVPSQCYPVTHAISLSTGESISIPILFGYYDLYSLSSCISISILLADDPFRVLLRQSGDGGRLRMSVSPSIGLRSLAGPLDP

SEQ ID NO: 960504 - protein, 172 aa, Homo sapiens
MILSVNYLQIFKRTQWVTCIQVVCCTASPWSREIADLLSCGGQLTYTTKELEQAFEEVFQNANFRSFMIQSSGSIVETYNDESRIKGPRVSVTLKPVDYREYGRRWFMSIRSKCVECERQRADRPEVCTGLTESISSHSVTILFSYQARFWWGLNLLPVVLDLVQGSRGGSR

SEQ ID NO: 960505 - protein, 222 aa, Homo sapiens
MENTEDGGRGRGTGQIAVPFRILSQLTGTEFMQDPDEEHLKKSSQVPQDEKPQPQPHLHAQLSPVPGPSGPQHLPARRQRLGCGALRMPEQHMPPDKNEDKQMLIPGIKYADLDALPHCIAARSHESITFGAGQRAVSGGMHQGKGVYVITDGRSDLNLMFFNPDVNHMDQYRGALHYNGYVRNDDQQQDNLSRCRRIMKMKTQVLVEGSLGKREEDKYENN

SEQ ID NO: 960506 - protein, 75 aa, Homo sapiens
DPVRSLSQTMPEETQTQDQPMDRGGGGDVCAFQRMKLPRLMSLESSILYYSNKEICLRELISQFHSECYLDKIRL

SEQ ID NO: 960507 - protein, 149 aa, Homo sapiens
DEYDYLFKVVLIWWTQCVGKSNLLSPLHPATSSTWRCNDAPSVLWMFIATLQHPCVDCAMTIMAADLGDTCCASDALPAAITILLYYQWLHVWQPHDMVVLTICTRHLDLLKEQCELLGLNGSLPGDPLPETGKHSVIHCIGVGASNGS

SEQ ID NO: 960508 - protein, 145 aa, Homo sapiens
MCLSHVLPLVPRVPVLVSPQPPHYACRPALPTFSACLLGLHVGPNLVPLVRLLLAKSWESCLSPTTPLLAQHHYMGSDCLGGLNTRTWSGVAKPRGRAGPTLEPQHAPSGKHPRPTCVLNGSLPPSPHALQRVPDLPIQTNDNLL

SEQ ID NO: 960509 - protein, 107 aa, Homo sapiens
MGDELIDSIRSHLVGRRRAFDPTRKNNRGGDHLGKSKRRVRLTERLKGHVHPPKLGSVLGVLDSDIIVQKIQPYTEAEHRNGIIYVQNEASPPDLQKAIEVAAMLNE

SEQ ID NO: 960510 - protein, 111 aa, Homo sapiens
RASLPPQLQDDLARRRSTPFSPPAPPGSDTPPAPSRRPGDLAVAGVCLRKAEMLAGASQPRNGPVLGRSEPGTACPPRRCVPEQLDRIQMEQWPACLLRLAARNVPVGFGR

SEQ ID NO: 960511 - protein, 134 aa, Homo sapiens
PPWARRATVGKSRRDKFYHLAKETGYRSRSAFKLIQLNRRFQFLQKARALLDLCAAPGGWLQVAAKFMHCIQPLYVGVDLVPIKPLPNVVTLHAGHHNQNRMYGMALQATDADRPWKGRLSDASTDWVPPHVWG

SEQ ID NO: 960512 - protein, 132 aa, Homo sapiens
MRASQGTSHAACVGQGHGQGSLQHQSSIVGDTFLGPKASSGVNHRQQAVQISGYSSSSTQDPHRDIRGSYNNPSGEPTPEYNGTSRATEDTPQYKHAAKTKQRTWQQPRTNKTTQPEGPARTATRITRAITH

SEQ ID NO: 960513 - protein, 96 aa, Homo sapiens
LRENQLNADEEINPEMLNKCAVPGWVVACASGSFVDSAGVLLKMAVSCVLCVPAACLLLLLLHVSPHWPSMMNFSEKCMIEDAECVTMKLVLKCTS

SEQ ID NO: 960514 - protein, 151 aa, Homo sapiens
FLPLRLSRISAGRNGRRDLPLLVIDNGSSACANAGFAGDWLLPEPCFLPSVCGCPRHHVAVMCVCICAMNGLLLCVLTMAHDAMRVHPDPECTPLMLASVTNWRLTCENDLAPHLLQLMLRCGPGVMHPVLLTRGPPEPQWPDRDEDDSGL

SEQ ID NO: 960515 - protein, 104 aa, Homo sapiens
AFWCRRNALAQWAALTREPGYMCCMEWFPVNGSAPAGGAVPAVLKHSSTVACPEMHPCVLCGYDFNLLVELPAALAVMCLLATTCASNAHHTSGLLLYMQCQLP

SEQ ID NO: 960516 - protein, 110 aa, Homo sapiens
MELFYQAICWGLGQLLPPPDTLLPLYLGILDLWVWDHGVGMEMDVSINMQWWACWGLGGCNPTNAVVCGAAQEWLASFWAPVPCYTYYTQLAKDSVESADMLVVGGATFP

SEQ ID NO: 960517 - protein, 79 aa, Homo sapiens
RDAGILQLKGSRVVMEDLRASVETLKRGGGPVQLRGNVLGETLVVAAPDHHWTTCCDANCVCVMLDVMLDSCMMMWHVM

SEQ ID NO: 960518 - protein, 218 aa, Homo sapiens
RFRVRAAAAPGLRARSCAAEAVLAPMDFQQLLAELEQEVDAAAAGWWQDVMQLCEMPSSAEFLPPWHWPECLLTHCMDAALCPRVPGLVTEYMRVPRLQTSMGLLQRLDDMYLDGEAASTWVPVFTAPFCQALLEELEHFDAMDMPKGRPNTMNNYGVLLPELGLDEPADDTTAGMRFLQPADGPAVTLTVAVGRLDSTGPLWSNTAPGHDLELGCTM

SEQ ID NO: 960519 - protein, 131 aa, Homo sapiens
MLLHACMTCLTTCFLLPLTVAAVLAAAPDACASCATQLVHVPAPVQWLAFLLTCWGPVTWLPVCVAHAGTAQWLGKCHQCVCAMDDALLLWSMMLAPSVCACSAGLLRRNCVHAPGYGPVFANQDEEDLTG

SEQ ID NO: 960520 - protein, 202 aa, Homo sapiens
MCCSATGALTTAIHRPSAGSEIFIPWRRARPESSMTAKPFLGQVHTDCISINGGEEIIERGVCVEIQIDLTSNSDGLQGGQTCPIKNTEMEDPSYDLGHQNDLKFPEQIDERVHGRWTVINTYEQVRVAKESPKLGPAPLTAPPASNEQAIGLPETTYVQVTSGGAHETHGVVTTMSLRRDRGINSNRDHETTRYTGAVNRT

SEQ ID NO: 960521 - protein, 233 aa, Homo sapiens
MSGPLARLAAMARANGQCRARLRAWPPVPSGPCTPVLLLCMVPLLPDAAVVLPVLLPCCTLCCAVAWMYLDLLMILGWLAVAHAGPLTDNEGREIIPTASLQLGRSCELSDGSSDNACCGWLLTDLPSGGCPAQHPGLCCCPMKTSCHRWGPKAPSGWQERPAKASQWKYKKGPLCPVAVPAMGFRHCQPQKALLRVQQLASLTICGGPSDSWELAVSPFPLVATMATSDVRT

SEQ ID NO: 960522 - protein, 172 aa, Homo sapiens
MLAARGAVALVALLLRGSLLASGLLLLAVPPLDCPETPVVLYVPAAWMCLGGGAEVWPDSTWILEPGLRTYLITCSKDLDPICAESTRKYVINCAYEQFGCDSTTIVTLQIDEESLKPERIIGPLQGKLRCGRDPEYSLTPSQTQTSHEIRARKLSMDKDFRDRESLNSQTL

SEQ ID NO: 960523 - protein, 108 aa, Homo sapiens
MGGITVNAGPSTRELAPYDENWFYTRSCFLSRGTCTSGVALVVGSMYHGSMGDVRVERRHAQSTSAVGSKTCWSRRVPSNVPGGAEIWWTNGSIVWRFANLIILSGSI

SEQ ID NO: 960524 - protein, 128 aa, Homo sapiens
NNRLVRWLGLKFGRGAPEHFFCAQCGAFLGPEGFHEKDGKDVHVRKDYFDMFAPKCGRLHPEPYLENYIISPQHAVASMSALVCRECIHAISMNGKHSFRARRAAPTVRVHYHERLQDSLMIHGLANQ

SEQ ID NO: 960525 - protein, 233 aa, Homo sapiens
MARYECLWFKSCRGSGPVAGAAVSAAGREPWCVAVLCPRSGGPSSGIRVGDEKLPDGQHCHCQCILPRPGIMWTAQCADWRPPVPVSVQPRPSTTYPGSAAFLRRVEAMVIRELNKNWQSHAFDGFEVSCTVYPGLPARPKTQGLHCDQHLLLNSTGSCGCACVLTAGWDHGDWEHCLSPSVCAWNLVTARELVSQQNVGRVWMVPTRCPVYWLPPHAASHVAVRAVTGEGMG

SEQ ID NO: 960526 - protein, 82 aa, Homo sapiens
PQSVPCGAGTGLLIRLRHLSALRGGAMSEPGWWMSCQNPCWQQGLPLPLLAHVCHAEHAEPLTVMLHNGWAASRRPCERWNF

SEQ ID NO: 960527 - protein, 106 aa, Homo sapiens
MRLNWQRLACTLATDYWAELTDALLAHTQRALTDSAFGEPTGARRLAEVYVLVNVEVRWVIFCLLHWLHVNLPVTEYLALDVLFPLAIVHKDMRSYDREFLFVDAN

SEQ ID NO: 960528 - protein, 225 aa, Homo sapiens
MRKPSPYYTHTRTQRTARTQHAQTQAHTQRHLLHRQLPPRQPPSRQLRTLQHPTLRTRQPHNRARTHHTPNSAQIGRTRAHRPTTHRSTQTYAPATPRNTLTRRSATAAQLPPTPTARKRHSARTSARTHLRLHHASIQTRKRLRETPHLQPPARHAHSDYLTTSTKRKLPTPQPSPPPLGLHHTALLAHHPATTERISSHSSRTHNTTPPRLHAATPHALHYTT

SEQ ID NO: 960529 - protein, 197 aa, Homo sapiens
MAVRLVRLLSPSNEDGMNSKEMKNQPGKYSQLVCGGPSVVLGERNGSSLAKIYTEAKKVPWFDHAECGCTYLNVTLINGCWCMNDLLLQVNGHRLPTGSFKLNLQEAGGRRGTQCRGSPVRRHTAPDPTWHKAKNGMPRGAAGSRRADKKPARGPRNRKKRSHKEGRCRPEGPRRQASIRRPPGPDATNAATQGPKS

SEQ ID NO: 960530 - protein, 243 aa, Homo sapiens
KLQCLRHASGPEGLSRLGQKPVMENDGWPRAICENAFMWYIWDPGGGPHATECGSTTLASLPLCPGFLLYNPLTGVINLNDNTLSLRSGAVGHVTETLKTLLAMVEWIKLWGQPGDATKCVQVAICKHAHPAAGLTKASQADRGKQEEARSTQEEEDEEAGGTKQEAGKRKQAAVTGEILGPSNTEGDATSPRSMYLTQTYHGRTSQNTTLSDNPSFQEGGCLALKRPKKPPSVRSVQYKLPR

SEQ ID NO: 960531 - protein, 111 aa, Homo sapiens
DPPPYLLRNLSSLALALPSLVLVWCADAVPGVATALLPPAAPPYPCVWDVVLHPFYPRSASVPCPSAGCPPPSVLQLLRVLSWCDVMCGAWSHAGCLHSICPAPGAKAGVC

SEQ ID NO: 960532 - protein, 108 aa, Homo sapiens
LRLGTEALGVTSGTEALSAPCCTDASPLPDPAALSTPCRQLTMDDDICRARLSTTCSVHVQCACVFCCGLTDAPLCACLPLHLCVCCPMCNLCGCDWLCALCVMNVIP

SEQ ID NO: 960533 - protein, 154 aa, Homo sapiens
MVTGHVLAFNSIWLPSCIMRPHWLSPRMLHVLVKWLCKCDSMQQMCVPNVKPVLLAVWLVAWCDTQMDAECANQQPCSGVECTSVLCTIKVLTLCALAISCLVVLVLVCADASGCRAGLCLLANSSVLVPCLPGPSPSRCRMLLLRLVVVLGLR

SEQ ID NO: 960534 - protein, 222 aa, Homo sapiens
MSLGWLLLVVLCWACPSPVAAARKGSPAGVARVMLAVLLGPGGDALWACTTRLRCCTCAPSDLICMMRSCLRMLSLSMPALQLDPVPVQDVSLLQQRSEPSSTSIALHYQVVEVNPVRRAEDQVLLLQTVPILLAQEGRRLANNYMNPPVDRSAPQDLPGVGDGTLLNASLTYYPAHEGCARAAPASDRASALGSGSSHGHEPSQFAAAPEPASCPFATLSP

SEQ ID NO: 960535 - protein, 264 aa, Homo sapiens
MADHRQHSAAGPVYIVELPQDFLRITPTQQQLVHVSMLGRPVRAQQTACTVMAAGLEHLWDRLEHHVLVHVQMFGQRTLLCIDPGIGTTRTLRGRAALWLTAVDVTDGLPSSVLPQNVWLVQIENYPPRIGENEWVNPNIATECPQVLLETLYQLILQEAVVSESRNDALSSQWGNMSPVIFALVKPLEIQAIPPGECYPCECGKERQMIGECDKNVGGTEPFEDEGKVPSGGTDARGMCAFDANTVLVNGPLTASVGSQGLPM

SEQ ID NO: 960536 - protein, 273 aa, Homo sapiens
MLLSVVAKSAALIQQATTVKNKDDQEIVLDGIYVSEEMEMTSELVANSARLDLSKPEQFKNKDHQDNFGMVSMSLKEGKVFSRLMNKIYELPGYRKKMPDDIKTYLWIYNRTASNQTVMTIGTFSLKQEKKSRTGNTKNKSRKNQKQENKTTTQRNPKQTERNQREKEHKAQAQETQQSEHTTPNNRPSKHPNPDKEAHTRKTNHRSAHKTRPKSTNRNEKKEKKTEKQTRAKNNEASNQDPHKTKEKDRAQYTTSTTKRTIRPTTHHQRTTT

SEQ ID NO: 960537 - protein, 252 aa, Homo sapiens
KAECVNQDEATNGGVNLKLVCVSLQRQGFHTVGSRCKNRTGAEHLWLTHISGTHIVKAAKVESYLVSEAAFNAPGGELRGTRYTADLAYGMYETVGQLLGPWSQVADAEGQRLQGTRSPASPVGLRCYGVDLLTHIPPWKEQLYCAHADVTDPRTSQRILEVLPWQESRCDTRADMWTQCHRVPGTSIMTGYIRTVHRTYISVTPDILEPGEDIQGQTWAGSQSQRYRGDWQQESRLAGQQLKQRKKNRRIR

SEQ ID NO: 960538 - protein, 69 aa, Homo sapiens
GTRTGPGVITAPLTDRADLALTIAALDVCPRADAVTGVLRLVWLPALLLLLIPGGRRACDASRELPCDS

SEQ ID NO: 960539 - protein, 104 aa, Homo sapiens
GLQVATRISSGILRVPYYLYIRIRKHGLRCWLYLLMVYTQGVQRHEWCVMSSTPEEVKKRKNGGALSSLEKKDKKNIHTMEEGKEIPWMGDSRARLVDDTLTTT

SEQ ID NO: 960540 - protein, 195 aa, Homo sapiens
MRGLLAGPWARIRNISRIRRVNNSTRRGASGDYADSQYWKQVLGHMVIEEELLGERDTAISPKAIPTRADPGHVKPAPLKIEPSWVTTTGTERAYTTGKEPPPDIGHRRGEPQKSPLPGPGVIGAHTVPHPVGTHLGKPPCKPTRAPHKNNRTECTPEDPLHGQPLLPRGAKHLHTNGTHPSATNPTTKQHTSNK

SEQ ID NO: 960541 - protein, 108 aa, Homo sapiens
MKCHQIEDNSCGVTWSQEPKMDELQFVPGGEQSVCLKGTGREEKRVCNQYLSDDTLVLMKHDSGGIDVVRNKPSMYGLWGLSSDITPCPDCEGTANVSNVLPNVMIML

SEQ ID NO: 960542 - protein, 245 aa, Homo sapiens
PCPGLPALPALPCPSPTATRRLKLRFPGPDWTDVPPDLSCPQQPHVPMGAGPPELYCCELLRQEHCRAGFTAGLTVIQTVLWTTLCATLYIMTCGAAVGWADRGVLLKCSRISSTPSSEDRHGLATSPAMSTRPTSNPDNLQGGRRPGPQYCAELAGCARVHAASVASASPELSLRGAPSQSENARLVARPLSMPATWTLVVADTTAGSNECIETGQREQSSKLPLELNTVIPPIDKCPVLSHAS

SEQ ID NO: 960543 - protein, 260 aa, Homo sapiens
LGSLLYRRFCRVPPATGYPATSIALAMMGHRPVLDASARTQSVNPEEKFNTGNINAAKTIARYHPNNVMGTKDHMTEDAILGANWDGHCDVTQMMAHAQYYQKRIQVQDIQKGQDHIESANIDVKTPGMKTRVGKTEEPQITINFIQLTRSNLHNIRNMTNLYTCEHKRNITTNTGEVNTQVDNTQKKTRERTKNNNKKKPLNKHKNKRNNANSNITKRTRKQIKINGENPTKQKGNKFTITTKDNKKHRTTQKSNQDNS

SEQ ID NO: 960544 - protein, 67 aa, Homo sapiens
EQETSDVKTLRNTFENQKHPESIIKVSIEKRHMEAGNTYRDYIQVYAPFKTKEHIPTTRIGQDTSKH

SEQ ID NO: 960545 - protein, 110 aa, Homo sapiens
WLLPPYSRRCMLRIMTGNRALAVPVHVRQPNRRQVLGGDQQMSTGIDPTGTYHWGQRPCRLERINVYYNECHLAGKYCAPRRARGSGARTPWTPVRYGALSGRSSGRTTS

SEQ ID NO: 960546 - protein, 80 aa, Homo sapiens
ASNALTEEEEPEREQYAGVGTMVCGSPAIDGVVTRKIQVLQQQARCCYEDAVADLPPGEKLSGERRAREQAEAECGLLEP

SEQ ID NO: 960547 - protein, 85 aa, Homo sapiens
DPRLCADRLGLRAMSVDCAVGWAGRSCEELTADPKPDRSSSDAGLTILYINKNADSEQAPRKVEPRRSEPGTSGEAYKRSALIPP

SEQ ID NO: 960548 - protein, 280 aa, Homo sapiens
NRRLLARRGRCNPWMEARRRATIMPGRLTGRLRLRGHQPIRARLFDRRIGPLRGLLKAAENKKKEAVRVAGRCVGPVGARRRRHVSGLRDQSNSNAAGRIMLRNGVSREDRKNPAGPPALAWLTEKEETARRSVGALNGKNGVRRRWNDDLIYNLQGEGDTIPGLEDQEKGDRRSLKRLIGEKAHFGQGNSGVKGKANILQVGLRPGFNWDAERYSQRVQKRGSFGTEVVAGGAREDSGERGPGGKNGKSESYVAEAVTIDIGHTWEIRSNSGHEQEDQT

SEQ ID NO: 960549 - protein, 108 aa, Homo sapiens
MTRVLWVNRHRGDAGPGISSRGLKIEHERSQRERMRNLRGRGGAQRCSMIAGTCDQVFHTSGPVPNTRLARAPYLGPTVPRNAAAVIMGNIFGNLLKSLIGKKEMQHP

SEQ ID NO: 960550 - protein, 190 aa, Homo sapiens
AGVSAEETRESGVLMHVHIDGRFTTTNKKVKKQMQSDPHKQDVWTETEFLSRPHRPQIYLEPSTTPMTLDTDYKRKIIMSDMDACTPNMGPPYKGTPINVITEKIYFKPDKRQHRDHINRNDIKYQQGPRPEKRMENAFERRHGENPFRLQHQTSNVRATKDENPDGARTIKTRHSRQHWKNVMHTKALR

SEQ ID NO: 960551 - protein, 115 aa, Homo sapiens
MSWGRRAAAQRRGGSTRTSTPPWQRSGTDGTTSLAPRTASGAPCSSQHTRRCGIALSLPLSPLLGLPLFRLALPCSGPDWTGTMRLVVSYPLVPGDRVLCGNVPHHPWHVQAYRD

SEQ ID NO: 960552 - protein, 221 aa, Homo sapiens
RTEACGEVLQRQQPRMVQWVSISRFRYSAPSQYLGVPHLWASCTTTNRPHENAKEEVRRISGGCWMLTWRRGLYLVGERVTLADITDCLHPCSGSDKQVLEPSLPPGHYPIPTDGYLTMAYNQTPVTGLSMGEDETDVRRWTRNDAKKYAEPKTKKDTHNVKETRRSQGRQTAERPTRAERERQEQKGGLAQMLTEATTQWDTLVNKETQRRINHKYPENQ

SEQ ID NO: 960553 - protein, 69 aa, Homo sapiens
RHEGSPAVISTLWNRSWERIQTRHRGTQRRLPCQNLAGDVLSEPMRQQMAMPDASSVPMCDMLMHADAC

SEQ ID NO: 960554 - protein, 262 aa, Homo sapiens
MSFLGCLICSDVGHAGTIETVTSVICLLTVQLLVTAHPGSPDLSMHCCVPACDHLQCSMLATTMICCCHYLHVRCCGHVSSCACFCFPCCACVLCCDVIDLVMCCAPVTFFLMYFSVCHPILLLEVPDPFPCVLLSLCHCDIDATCANVSMELVVSCHACAFDACFYLHLTYYPVVPGGLCLLFVPDVSSCAWSLVKTQSCGPKGGLFLANVIFVSCCAVAWKSWLLQCWSCVPLHLPAPLSDFSHGDLTDPFFVALQIGCC

SEQ ID NO: 960555 - protein, 349 aa, Homo sapiens
MGLHKSHTQAVYYTTGPQHINAPKAWWRYHTRGDKKPRQRASLFVAPPPDGVGGGLHTGVNRRTCWTPPKTKGGVPPRRGGGGKNKAGPMGDPIRHKREYITSPPQPEVLLLENPAEKRGGGAYTNTESAPGGGPPHNQQQSPSLPAERAGGPPFFSLLPAGARAAGNITTSTSSSLKREEATIFYAESADTTPFFYNHHPHPRGGGVIHPRGAPAASLVVVVHPPTPPNVVVVFLWGRSPPGSVARNRKPPLCFLTPISLLYARSMTLHNPPFGGRILITAELTHERRTHIIPPLLDENPDMSRQLPAGRNTQPLVSRRDNPAGGEKTSLVGRKKYSPPSCHHKRDTP

SEQ ID NO: 960556 - protein, 153 aa, Homo sapiens
MIRGCAGMTDGCDVLCMPAVLMFHCVPCTNVMDACLNVLCYGMPSCWCTAALLGATCFACLFLALCLCSVHCIAWCLCVSISCADAACLDVRRCYSVLTEVCWTHSETCPYYPASGDLQCLPCGPSCCWCQTLCCGLDMWCVYDLTLMLYCIG

SEQ ID NO: 960557 - protein, 97 aa, Homo sapiens
TFCGLNTTPTIEDSYRKQVVIAGETCLLDILVYRRPVRSTVPMPEQYMRTAAGLPCACVLPSNIEPSLHDWTFQTSTRGITDWSTGLAKVNFWGLDG

SEQ ID NO: 960558 - protein, 142 aa, Homo sapiens
RLVYEACVVRAECRAAELESCCAGAELPPWPWNTLSSRFLPVWTSDEFDDEQICGQSSDGGWLCVLAVRSQAWTRAEVDGLLLARWTCFVAFHAALLGTLPVNTKNQAVNGAEPSGVVLKVLTNFKSSEIEQAVQSLDMKRR

SEQ ID NO: 960559 - protein, 289 aa, Homo sapiens
  misc_feature (57)..(57): Xaa can be any naturally occurring amino acid
SSVSSGALLFIKSPPKKKKKNISGPPGLAPQTEINPTNIAGPEVVLLFYPRDQTYSXLGAEEPMTPRKSGFEEWPQKLRRGAAPITALRRLVVHTNSASHRNTHRARAARGGALDKISACLAPSRVEPHSVEGEATKEAAVTSTKNPRRWHGSNSRRPTHDYKTVTTRGEKPNHRRGTLTFSRRRGHLHTDPPSWEQDGSTTTRPAHITTGGENEKGSPNSLSTRSSPPASETNNGEKRVPQHKKYTQKGDTHLTGAREWRPITGESAGPNTPRKITPTFTPSIIKYFV

SEQ ID NO: 960560 - protein, 90 aa, Homo sapiens
MALLIIRQLCLLLTAENIFHSHGMTSCCAEEAPHSSPRSMVHCPQTSILLTSTELFQLRNQAEGPADLESRTCLLPVPLLVPKPVPTGVP

SEQ ID NO: 960561 - protein, 234 aa, Homo sapiens
MELLKCLDYLGADQRMTTEDEKDDKPIRCSVLSGDIALLENLMVSSTYSRAGSSKLEEMTFTRNIRQEEFNRSSLGINTKSDTGLVPDQHSGHLAAMDSSTTPEVNTRFTRVARVYHSMSQMLIREDPIIHYSERKMQVFAESFDGGACSWISVAAYQTLECTGMTSGACEYEYYTYQDSTIPLGLLKIDPTVTMIDELGEKLMSHTVMLAGCQEPIEETAEKYFEPIYFIQRG

SEQ ID NO: 960562 - protein, 226 aa, Homo sapiens
DHHPNTQRRDRCIPVSTCGFIYPMLPGVAMCGPVCLSDVACVDAAPSAYTSLPWMCPVCPDTVMNMEECVCALVVVLISENVETAVLCCSCPVVCSASSLCLCAVDHNVLHVDDPCGHAQLALCMCPVAHAELTTCLCVICDLCCCHVMVHAEISFFFLEPYLLVVLHLLFFLPGACLADQGCGWCLTMCHLATLRQGCEPIAGGLTGAWCGPCLGAWLPTLLPLC

SEQ ID NO: 960563 - protein, 209 aa, Homo sapiens
  misc_feature (58)..(58): Xaa can be any naturally occurring amino acid
  misc_feature (126)..(126): Xaa can be any naturally occurring amino acid
  misc_feature (207)..(207): Xaa can be any naturally occurring amino acid
MGMMFEMVEGKISPQYKYSKISPPFSPPGPRGRGRTLGVFLLRLQGCGERDARGGAKXGEEGNTRCANKCAWAERVLLCRVCPLCPVFPVEAVPCVALLCVPSLSPGVPPPVCVWRPKPPQLCVLXALCAPVRERLSRAHHECCALSSISLYSLLSHRAALSRECCESRLSVCPPSLCVGISVSSTVARTCGYSLCERYCGHSPLYXTL

SEQ ID NO: 960564 - protein, 134 aa, Homo sapiens
SQGMSFKCEAKSVHNTKSKNHTHFPHRAPGEGGSVGVPLALQGCGEDGRGGPIKGRRNTEATEAWLEVSCCPRARVLELPLALLCVPLLPGVHACVGGAQAPNLCRGSWPLKKASGHRACSHFLFSFFQAPFEC

SEQ ID NO: 960565 - protein, 254 aa, Homo sapiens
HPEVPFSPSACNCEVYARGRLDVPGPDEAAALGLSQPSRMLVLPSRLSLKPLASLSSDGDRWMGPSPSELAGSPDDLDLPSSSLSSSAHGFIVLQRPHSTTCVIGRLRVSPYDRCVVDEESQREPGASGAPGAEKVLQNATVCSRVFEYMSYLQCHSITHSEVKPFECDICGKAFKRASHLALEHSIHLAGGGRPTAARSALAASGMRVSWPSHSRFALVGERQFRVHTASPFWSRHLLTNAVELLSRLPVAQY

SEQ ID NO: 960566 - protein, 246 aa, Homo sapiens
WLETAGDFCPVVHCEPRDDSAGTASMLKCASRGCGPDGALLAHADADAAGSGCAGCLAACLACQRWLLCLWPAGVPSDSPGCPGSRLRVHWHCPQRRVHCRLPCCPLMPMQGVLLQSPEEELRGRGAAAARDRSCSRRRTLGAQREAIRELTGKLARCGGACGRQGRCGAGGHGQKDTMGDLRWDPGTSWSTLSRSLQTLKDRLRASSPAQSKRFNAGCGDFARCQSGGELERVLQVKLETESPVQ

SEQ ID NO: 960567 - protein, 109 aa, Homo sapiens
LQPSALHPGLRHVWVFVVVCVCACCSCASCVALAVMTHPLHAVCCPHAHALTCCVPAPDCAVSIPVMWTMLAANHLLLPKCMCCLPPGCCICCAVSFVLHVVLVTVHCS

SEQ ID NO: 960568 - protein, 239 aa, Homo sapiens
LTLEGGGPACCQLFWEKKLSGLNAFDIAEELVKTMDLPKVPAVVVVTWSARSDDAAVWPSPVALHTSTMPITGTCSRACLWMNEPLAVIGSYTTAAPSANAFMCDLTEVTLSECRKSLVQQCAEMRLDVRLLMADMLLHVDVSWPVTGMAPLDKACADGLTTSEELSEEEELSEPDPGPGDGARLGQCAAVATVGAALDVGVLAVGDCLVNTDVLGMTGAPNSFLSLEEPSVPSRGVAK

SEQ ID NO: 960569 - protein, 369 aa, Homo sapiens
PALNLGIAPTLPAPQNPLPSPGASRELAAQDGRTQAHAAADILLPLLLLLIAQEWDAGPGRVLVPEGPLYRGGWHSLSSISLQLLTGYLRALAQGDEPFGRGFHVVVPRRPPRYWHMGSLVRYQKGIPPGFIRIACHSEVPEVGGEGVDALQGCSTALQSADLPVVMAPKGHLAPALAVGPHAQLPRSDFNLSFAQRSPRSTLDLPRALTPCGTKSLTTAWDQGDEEPLARSFTFHQELPTIPPEACSVSLGSRCHTYVCPPTQLGPMHTTGTHVENTHSPTPRHNMAVFAPRVRPILPRAAAQRRHHHLVPPRGIAHSPLVRARATKSATRAKEHDAPTTRPFGQVVAPIWVRANYWLTHEEVSTPRV

SEQ ID NO: 960570 - protein, 151 aa, Homo sapiens
MCARVLSLSPDVITTRVVGVCVYHALPPVSLVVLHLYVSRCAHNISSFIYLSLRPLYTYFFYYLCVYSTILCGTCVDATPFLVCGPPLYLPLFFLCSPPTHYLRNSVYCKRGFVVLSPLWKTVWGFSSANARGGHIPPGLPRCRFMKTTPL

SEQ ID NO: 960571 - protein, 322 aa, Homo sapiens
PSSPPAAAGYVTITPREEPQLPQPVPVTITSNHEQLRPRPSMLMCPHHGVTHDPHPWLSSYPLVPRRQTASDEINYVYTAALSYLSTNSRLCTTGVNRTVLSRLRRHRNDDYVATTRTLHIPVGSQTLLIDLLTRPIDDLADAYSTSTPGPHAPHTTSGIINASNSGYRPSQSTPTTNTGNHSNIYHEIAQKLKREHATLTANFHRLSRHTYRYQQQWSRTLSAEASKSFTNDRAPRSQRISQDFFPHIDTTRRIHIQTLRQRDLEPDSRASSKRTFNAEEDLLYDEALTQLLNSQPRFPRQYTLQRLTDTGDRLASTIYKS

SEQ ID NO: 960572 - protein, 138 aa, Homo sapiens
MGGPPLVFPSLWGARGGGPRGSGKTQRPPPCVYPRGEPSTSLITYISHKIFAPGRLGAQAAALLTPRHLGTGLGARKMGIDPGQGGALACGRRNMGPIVLPKPGVATTARPLLKKRGGQRTPPGNLVACQWAPFALEL

SEQ ID NO: 960573 - protein, 237 aa, Homo sapiens
LVEPGSPARRRGVAGDRLVEVNGENVEKETHQQVVSLQSCAALNACAACCVCLTPDDWTEQCCMKLWLSSVLMMDACLRCPGMRLGHGLMPAWPACRVCMGGLATKMSLAEADKSHPGAARASASALYHEEGPQWLWLQTCTADKSKPGQFIRSVDPDSPAEASGAPGPRIALWQVNGVLHWRATAAIGGRWCAAIRAGRGRDHAAGGGQGHLTESSECECPSHEPLMVLPVPSPWG

SEQ ID NO: 960574 - protein, 103 aa, Homo sapiens
MEARIPPPEKSLVGGPPTGGAGYADRRYYPHSPDELRYISYQRIIRNNPKLLSCAARARPPTRRGAPSLLIEIVTPPVGTDGAVYADTSYGWALLPGEIPPSL

SEQ ID NO: 960575 - protein, 126 aa, Homo sapiens
MWCVPLSCRRFVFFTNARRAEEELSFHHPPGSEQPGGAAPPVPRKVWSPHECFPPATPEGGDLYKEGASPHSEAGATHISWAAPRGCLFPPPPIVLPPHQTGVGGGGLITKEVNSPPLDVGQHSFF

SEQ ID NO: 960576 - protein, 156 aa, Homo sapiens
LQTMPGWHLHAAGNKLEALHGHLPSFGYPCLHLPGLSPPHGMDPKARRFLWNLILDLIKTGPFQLVRCLSPRAVERCARALCTRLAIMVNWSPAGAWAASSTRRTGFGDGYMITVRTKSSQSVKDVVRFFNRNFPEAMLKERHHTKVQYQLKSEHI

SEQ ID NO: 960577 - protein, 108 aa, Homo sapiens
TSSDSCLTHLHQPTQLSINLAMAIPYERAQLIKGFRSKIKNALAHCLTTRAHRTPLIPILVSYRTPVRPYVIQPSSPGPYALEPLNIWCRRTYVMHLIRKRHPSNINH

SEQ ID NO: 960578 - protein, 158 aa, Homo sapiens
MWGPLKCRGAVCGPPITRWGKSCGPAQTPTPWWGTPPTCFSPRSSLSAPQRIHVVRPPSIRSGGTPPGEVSPPERSDGRTTIGARPPRVPIPLGWFVPHPFCVAAARLVVSFPRRSLSINERGGKLIYLPSRPARGPHTQREFTPRFDQTRAAHYFYT

SEQ ID NO: 960579 - protein, 115 aa, Homo sapiens
ELAAPELTDTLRSWNGERADGRVRGASMITSAAGNYFSSVIDMIEPTALRTLHYTKLNAVVIDFWADIAESVTTIIEVLYKYKVPGVVHVAALVASKGFYHLGSLPEESLNYSPL

SEQ ID NO: 960580 - protein, 374 aa, Homo sapiens
LPPPPNLGAWHPPAWGIPVEPACPSWDPALGPSTNELRMSATVVLCCSLECDVVVHGGVCHTPAMRGQWLQCMLWSPLLGVDPHAVSGAGWLCLLATPPTPGPAGCAVYCLTCGPHPRLGRVVSPLFQMVAHVDPHVLDPLDACDLHLAQSASPALVGMPVQHIPAQCQPWSLQLTHASVSLSDVGLWGSPSPQDIAPTISWLLASGDAACVPEFSVGGTQPMWPKVQCLLDPGECVRVGEPDTPASLGAGRWTQAALAAGAASVLTLVTCPPGLWALRPLWSVSCVRGEFTGFDTQTEERGEKSRDTCKGDTLVDSFPQKPFSERQVRQTHAQSSKGTRRANSGVHTPTMNDRDADMSWTHKEEMNSQTTENS

SEQ ID NO: 960581 - protein, 67 aa, Homo sapiens
GSGGAIGDVGIWWATIEPTDRSVSGRCPRAGVCLGVLGPLLTAPWSDSCAAESAAMDGRGDRWAGPR

SEQ ID NO: 960582 - protein, 47 aa, Homo sapiens
MGLPLWTRPLSAAAVRAFTGASGDNRDWNTDRSVYMASVSSPEKPIP

SEQ ID NO: 960583 - protein, 280 aa, Homo sapiens
MGRLNTRLYREDRRARTHQACGLKFSQSPCSGLHGRIPRLLVSTRFTVHLVVPLMELDVSVFMTQHGHSLGLPCVLVVHAALRVPPSCNPSVGADPGGDSSYSLPRVNLPPLSLWNGVFGLRPTRGCLPECTASGWRPSRAHFWRYSNHFACAFNSRFHQKTRSRGPPVANVVRTYPRWERRGPISLNVGITGCLGNIVLCAKGGPTICVGGTPIITFSFCGRQVYYWLLLWTSDETKRPLLRESGPSASTQRADSWRRALYPPRGALSENGAVRALTGV

SEQ ID NO: 960584 - protein, 103 aa, Homo sapiens
FFFLFVGSPGTLGQNMQGPEQGAFVHESLHGHSSPHAPPFLHVGKGCLLISASRVRWRAGKECGAQVIETHREGQISLQGQRAEHQRRPKPSVGKVSGAHYPY

SEQ ID NO: 960585 - protein, 123 aa, Homo sapiens
MPARIPAGRRHCPPSSSSPRETYEEDREYESQAKASQDRGGGDRLLRPRKARTGREATPRGGRGCAAVGGRSFSQPEAGGSHHKVFCSPVVHVEDSVNLVVEADLVGSAGKIWDNMLCDDDAI

SEQ ID NO: 960586 - protein, 68 aa, Homo sapiens
AFKMIFFAGCCPQKYQSYMPVSGFINKPKPMKPLTLSLARVDRGTRCRGFPVLAKGIHSARRKLFVQR

SEQ ID NO: 960587 - protein, 274 aa, Homo sapiens
HAAVSASWACLCGAALLDAATHLLLSCCRSSLVLTPAANGPRAGDAGSLGCPELAPNFGLKFACCLSPPPLLALPVLCLLDGMLCPLGMRLPGVPRGCALLLLLLLPLLCAAAGEQGCCLAELRVLRAACLDEHGVPEDEPAWRTADADSISLELRKPDWHPRLLHRRLQEEDVKGSYRALILGELEKGAEVNSRPSALSPRLQAQVEIIPKWIAMAKLRQKNPRAVAEGRTEVGSGASAHECRCNYQPGGHVSPISNVFPSRNRLPRRRFDLL

SEQ ID NO: 960588 - protein, 340 aa, Homo sapiens
EKFMEAMGFGLKPAWGGSIPSFLVKNLMYTGFSRSVWLGVGGTPYSSPPGYMEGPLYYIGTFSLSKAEGVLKSVKIYYNYYTVRVLARTCECDPYQQCTSDVFHTCVACMCISEECLQRINVRGHIPREIVPEETRVLCVGRDTESLDTFYAPPHCHYCLDTEVCHNSLAISGGTANAVTVEGTHHKARQCIHPVVAKPQIKRREQNTTRDETLSEQRHLRTEDRAIARATTTLSTDRLTTYNLLEKMQATTTNNGGGEHNDEQSTPKTKQRRYQATRTATREAHTNDDKVESTASVGTRESIHRNTHKTQAPKGTTDQTDKKHATSPQNQRESEHKQHE

SEQ ID NO: 960589 - protein, 113 aa, Homo sapiens
MSQHVNTMIKTIRNAQEQTQTEQVRKSYIESQCKTEFNPTLPSLEPRALLLPQASPRAQAQPSPSMVGHQQPTPVYTQPVCFAPNMMYPVPVSPGVHLYTHTYYAHASESATT

SEQ ID NO: 960590 - protein, 253 aa, Homo sapiens
MIHTMHLTYTFNLLRRAYRDVRTIRRGSPIRTIRAVNYHLIPFIRLPNLEFGPFYIGPLWGTLGPPTTAAYIYTRKSNPSTDAPWHHYSLCGRMTAHKQRRRTAQRYKATNRRKSTGTCIGQGKGQNAIAKGNDPTPEGPTPKRQRGEGKDRGPKPNAQDTPTVTMTEAQGGMHTGQGAKHKEPSSHGDMETKALEPRPRDCTKDQGSNDPEKPRYGPTDVTIKAKAIDGLEDAAAIGQRERRNGGTETHKTP

SEQ ID NO: 960591 - protein, 348 aa, Homo sapiens
RIVVLDMAESSESCHHGHPARGWRRRGNDPLTYQPCAEAPGVLMPSPPALCRDLPPFEDESEGLLGTDGAPGTEQEDGEDAPFGDGSGEGTTAPVPELDAYAVPGGTGRLADEDVEESERLSSREGVARLSGPCGSRVAWEVGRGLGRCARALLLTAADRVRVTRSARWRWRGGRARGGRRGVWRRRMFAPVEVLAGSQWATSCPRDGWSMSGRRWAILPPVFLTAWAHQPEGTTAGNFSGSRLAGLFLGITRESLVVEQLRMGSKERIAGHIVLALASNGTWYRSLRGWAYAKIRRTLNADPPPEKEPLCSHSSNTCGIETHIEYSEEMAMPLRHKKRKKRHKTEGQ

SEQ ID NO: 960592 - protein, 221 aa, Homo sapiens
ITLTPSAETDVSLALPCASSTQCCLGGPGGPGAEDVAVWTRAQIAYTSWSRMARGPDTENMEEVGRWVGSSGARRRWRLHAALGLLASSLCPGRDPPVCDVEIHGPRSIRHRPALGLAVAKLVLWDRTGVPREAAEISFFFLEPYRSSSCTSYSSCLGCLGGSRAVAVCLTSGTCHLCQGGAHCGDDGAGGSLLVLVPTLCPLCEEHRELAIACTQDPFCE

SEQ ID NO: 960593 - protein, 227 aa, Homo sapiens
KEKQFHESDHTNTWMPKSQAKQRQAEPVAAMETFELMMQTEFGRTVRKGGDLGLAPSARSRQSLFLCREGVFNSKPQRGVVIGSSFASVCGNVSWGGIGAAGWGPRRLSGGRPLSSVDDGHCYPQSLAVGYIWRLVGLFEKRKGPQIRNASIRDYVLVGREYSEKPRLAACWHLPLSQSALVPVSLSQLVDYVHCRIRSMLDLPVVFASFALGQPICIEGREGAQVT

SEQ ID NO: 960594 - protein, 249 aa, Homo sapiens
EADGRGRKLDCSRELLEAAGWRLAAEPGNLCRLSGTIILVLSVKGGRCGKCTISTGAGPVHCCHAGKKCVESCDVVTLCGPMYTPACSGAAWAGLCTSADLQAGAPCLPGPGAEHLAHVCVCFLLLRMPDEAVDVERPQEKRADTAVLCPTWPWGELDYLGGVTLPPGGPPDAALWPPIRSPCVPTSPCGAHAGHHGPKAVTVGEREARDGPTEEEGCRLTGNRENMAGDQPTCRGHSDSQGAARLPLQ

SEQ ID NO: 960595 - protein, 289 aa, Homo sapiens
WSLRSSLGHMALPETMVDALRLSCEAGGGEAPCAHPNLLLLPCILPGPLEMAASTWDELASLGKYQRLALVLLRSVPELVCPNLGFDFCMTLCLSSSDGFFYGTRHEQKLDLTEHFNLSSCHAPPGVLLATVLGAALLVQLFILTVRDCFGLLAPPGLSRDFYTLTSICAIGILNQMSQEYLQTKLDKRGRELTYHYFEEAFPAANVSRCRLSWDANPLGPWVGAHQSVTWGAGSWVSVKSSRVVPRNSGYYRNVPHVRWEQSISGTDERYEYDLVQVASDSMADTGRR

SEQ ID NO: 960596 - protein, 208 aa, Homo sapiens
LKTEARAGSGGSHSSLSDLSNYGLLPSSDNSWVLAGSESLPVETLGPASRMDPESERALQAPHSPSKTDGKELAGTMDWRTGRSSRLKALSLAALLHSRRLRLNGHPGTGCCSDGAASLLAQADTATLHGQTCRRPPLRDTACATRHTGPGRPEPSTEPAFNPQSTLATQRTEGRLLQQLTMTPTVAPARALRETAGPRGRTHSSRAS

SEQ ID NO: 960597 - protein, 150 aa, Homo sapiens
MDPAAEPAECWCGVTTCGTSAASSSTQQSALCLAAVMTVPPPPAAAPPLPRALAKPCLSSSPVNLLPWKCMDVNWLNAPNSLRRTSNHVSAVCLSTPSSSVCGETWQLEDHTVCLQFLYEAWLQQLNDMHHTVSLDAPAYVCRLLCHVRI

SEQ ID NO: 960598 - protein, 108 aa, Homo sapiens
GSPSIFIWKRSKGASMKQGRGAGRKQRLNSQELCRQHKQAQRGHHVLHTPHTSQARRAFGELARLHFRQSGPLPTQTHRTPNKASPGKTRESQTHSCDPGTEKPLGPT

SEQ ID NO: 960599 - protein, 163 aa, Homo sapiens
MRQFIKPSWVGAYRASGGQLATGPAILVQISWSLRGQLGAAIWCPFPPFSAPPGLGGPWGATLWEPRLKWLGMTPYSLTSPINLGHGANPSATPGGTGAALWKQLRVEPVLIVGSKLLVLGQLEGIHPFGDFQLPGLLEEGCQSSDELRVVHVFTVTPGYRAG

SEQ ID NO: 960600 - protein, 146 aa, Homo sapiens
MVCALCSEATGWSIAGGSSGGAQCQLSCLSKAAMRAKVFQRGAPWQQAAVSISRVSVCQMPRKDWLVKCCENRYQGHVLRGPGSSRLQGHVDAQRRVAPSAATVTSSAWSRSPTAGARPDAIEAGPGEADIYCLKPDRDSKPWCKS

SEQ ID NO: 960601 - protein, 264 aa, Homo sapiens
ILAAVAWSESRGGTRRAPQESRDRRVPKSRACVREIPDPVMGDTSEDCARSIDLEGTVILDLSGLGGLIFASPNSAVMRRSMSSEAPASPLLLLSRSVDLVAFPENGESETEKDDGEDEEDIPKSPPTRTGKRARMTRRMLRNAGLVTRLVKISGTYDRHYRSARVETPSHPGGVSERVGERSRQRERERREHGVYCLVQRMKWLAEENSRDETIDRERDRDEGDRTFAQQRSEREWGAERSPGRNEPRAMNYQDGQPEVRKRD

SEQ ID NO: 960602 - protein, 62 aa, Homo sapiens
MLVWWVPVRRRPMEEETQLDAAPWADWGLRPQQLELECWPSLRLPSPAGWLTEAGAPRLSSC

SEQ ID NO: 960603 - protein, 124 aa, Homo sapiens
TEKNWANSMNAILRECGHGRFQVDTGYIVLGLALMADGCGGSVGGGGFGAAQRLRTDMCRVRHPNKGMLGPRVVLPWDMMVGAITSGEVWLTGLGRRQCLLILASQLNERLYALSYYILNRTRG

SEQ ID NO: 960604 - protein, 227 aa, Homo sapiens
  misc_feature (162)..(162): Xaa can be any naturally occurring amino acid
MAASGPGCRICVLVSRGAIRQPSSLRCSRCWFPGLVLFPAAACPLAPSGLTLESPRPFADWHRSYQAGKPYIFVLSDESQSPVPAALLSHLGSFGWVAFLSSNRGHASAYCFFYRVDLTAASCYSLSHSIPRPVPYALCSLDLLNTASRGQVDVELPGGFYXPTLVLFAHCLGSHHQSVLLDEGGPLVSRHGFVRLQSWFRGSCWVASWVIPQNFFLSNVCGLSLRA

SEQ ID NO: 960605 - protein, 184 aa, Homo sapiens
  misc_feature (7)..(7): Xaa can be any naturally occurring amino acid
KPLDLAXGAEMKHILVGNKVIYKALKRYEGPLWKSSRFFGWRLFWVVLELESFPGFRKQPDAVHNIYRQGCKHLNPAVCPGKSHGWLAFFLFLMCLVDTSLLASGVPLRISLSSSLNDEDLAWKQEKNILAYSTHYCSQDQLTDEEEEDTVSAADLKKSLEKAQSCQQRLDREISNFLKMIKEC

SEQ ID NO: 960606 - protein, 109 aa, Homo sapiens
TIHSGMSLCPSAGGRGFWVHPTRRELHFPISFIPGAHPDSSDLGTDSPTTLCSFFPRMSNLSAGQTRGMELVRPVVYVVEPENGQMMMGEGIVGAGHARLRPPTPPSRT

SEQ ID NO: 960607 - protein, 247 aa, Homo sapiens
GQNGGRRQGRWWEAQFEKRCRFWVPGGRRPIFGGPSAEAAAERPKKIKSGAWRRLASGPAGAWRFAQFPWKTVRLQERTERGLVAQRPQCENTLSPGTGGPRGKQGRDKERDTKVQKKKFSVLLKKPPLRVVTLNPSRTLPRVPCPQETSFAHRGPPSAKKSQAEGAVYGRSWAKQGQVCPGMVRQGPGPGSSTFLQHGPSPGPRNTVKGPSKPVGLRNPWKAVVGQIISWATRKGGMQNLHNASPR

SEQ ID NO: 960608 - protein, 157 aa, Homo sapiens
LAVCQYMDLISASADLAGKRLMQVSHRHLDFLPPGLLLSAIPGSSTADGGPCGDPACQPRPEPSSPPYTFRHKISFILYQNLYLGNLYRLGWSLSLCPLLTQLLRSRIETLLAGAAHAIPAPSFPLRDSVSGWGRPDLGMFLSLHRVSFSGPVVKLK

SEQ ID NO: 960609 - protein, 136 aa, Homo sapiens
MIGGLMYLLGNDHIYETFLVTAHALVIIFFIVDTHHNGGSRQHELDSPYSNSVPRDYGVSAAYNDISFCLLPPIVSVAPARICYSGGRSRNGLNSSTLPCSRELQSRNPKKYQRGNNKNGYLRYNNLKEDGRRGFG

SEQ ID NO: 960610 - protein, 250 aa, Homo sapiens
EAGRGLVVGVMWELFQPVMPPLLLPAWASPGGSGKRWRSSSFRVQPAWRAWAPSPDDTSEESCSFPELLWTCGRWSRCALSARCVVVRLRTCWQCPSPSGCDGASDGSGMSLSLSDTPCSQTSYNSKGVAHCGRGERSSMLLYPEFHDLGVGMTCVQDELVSSRGRWKVVGARGRAVWQECPLLRLCCTSGASAPGRMMGSSRYNDGEGDRPPICAPLGPQEFYCDFIEFSYVRVSCEDWMCPARRGGQI

SEQ ID NO: 960611 - protein, 63 aa, Homo sapiens
MVAGLLAPECAADKGEHWLRMLTPESKGIGYNGKDKGVRKHVSPVQVTRDSKGEEQHKRMKQP

SEQ ID NO: 960612 - protein, 157 aa, Homo sapiens
SPSSFFFAPKNQINPPPLLNGGGGREKRQEPDQTPRGRPPTVPAPPRIYIRAPRVWEITGDTHMLCATEAAGEERGEGGERALLGGGEIVAHTERAPPLWERDIPQRGWRVWRERARTIVARARAGVLSWGRQRVGACAPPQKTTIERGACEREGGV

SEQ ID NO: 960613 - protein, 72 aa, Homo sapiens
ADAVLWNQRKRAEEPTFGWSPRNISSPSQSRKKCKDVRTDAEGIDCASPAHLIQSLGSRSCIQEPNFVAIES

SEQ ID NO: 960614 - protein, 130 aa, Homo sapiens
MSSETTVTEGAAKIAFPSANEVFYNPVQEFKSGPDMCCDHRDLLRIQLGAKGVQIKVPGEKDTQEMWSWTCHEHEADEVELKDSENLVLTWDQPRDSGRWGTSVRKACCVLEVPGASGLRSIRLALDVLG

SEQ ID NO: 960615 - protein, 104 aa, Homo sapiens
LEGNCTISAHYNLHLPGSGNSPASASRVAGTIGACHHAQLIFFFFLVFLVEAEFPPCGPGCSRSPDLVIRPPRPPKSAGIHRCELPHPAIINYSLSLSGHMQSL

SEQ ID NO: 960616 - protein, 101 aa, Homo sapiens
MCEGNVLAHITGGATSWRGLTVGGACPEYVSLGGRVAKSVRDTGFAPISALSYGATRVGPAFYAKCSAPRIPPFGPQFGRKGVPPLLPHRGATPVGGFLPG

SEQ ID NO: 960617 - protein, 215 aa, Homo sapiens
SLTHRRDAQEDRRPGSPTTSLRSSNYLDDYPKCFICGEQTNCGAPRQNAADPHVPFAGKGCGWLMGQRTPMRQGHPRPLENNPKLLGETGWLIFRGELLGFGWFPQGGNFHLEDSRGTIVCCGPLSVGRLVGPWLGCHCPHCEVPCASPRTLVSGPRRPPFSKALGITTKILQGAPFEILSDVQLIKTGDQVGASEATLLNIAHISPFSFGLVIQ

SEQ ID NO: 960618 - protein, 353 aa, Homo sapiens
MVQDEMTDVTGRVLQTTSILYGGRNKAIATPCPGTSGTCGTSSSTRDIEIKGVGHCSAYDPPDSQMQEVHTEVLTQSSYRKISRDARHAHTRVTDSDFLAKYSDRECWTTEEAPRYPDNLKEQRNAEPDKLRRVVNPQHQGKDNPDVQHEGHSRSGEKQRIAYGDWANTRCVAEEKRTGYKKGTTRPKRTPWDKTAMTLKEYKQHKQRKGTMKKKIQERNTKDNGQTERNQKEQDKTKKKTKTTKKTQQQNREKAKERQTKAGRRKRKQKKNNTKQKQTQTKTKKRTQKKTQKQEQEKNKRHQTPKNQERDNTENQKKITKQKKIRKDKIRTKETTKDDENEKHTEKEYNKHT

SEQ ID NO: 960619 - protein, 74 aa, Homo sapiens
RARGLTQDDMGHPEIGDAIARLKEVLEYFCQYGGKYNRGLTGWIEHYRELVEPRKQDADRSPSGDLDMMRLDDV

SEQ ID NO: 960620 - protein, 132 aa, Homo sapiens
MSCDVVYCSRVLVIYRGLAARHPACSCEFMWIPTYDVMKLVHVLGKLLTMIECQWLDVEIIKLDLVTYLNTALLLDGNEQLITQSNAIYALHRYASTTCVVDDLKKKMIDVDIIENQVMDFRTQLIMALLQL

SEQ ID NO: 960621 - protein, 99 aa, Homo sapiens
MCCACPPSWPIVPLSGPVWPFPTAFFSQVDVLLCLRVQCGPYVPVGGLGAASRGMFPPRALLFPPAPYPLGLASCVTLVQPSPLGRGPPLVSSGAPLFV

SEQ ID NO: 960622 - protein, 81 aa, Homo sapiens
RHEAVQRGHAVPRGIQRELYCLQKHVLSLLDQYPVAQCWDLYQTLYVCRCDEDVRSSMYCWWCTLHAQCSMLLSLLPPPAQ

SEQ ID NO: 960623 - protein, 257 aa, Homo sapiens
MLEEAGEVLENMLKCVLFCLSGFIVFLPAVLLLVCGRLLSCLRDVLLHDVHLCTCECSTYGPAEGHALSGNTELQLLTQRRLLHRWRAGSVLEPAACVLMRATGLLATSSTRMALRQSCRAAVVIILPRAMCRLCPSDVCPVQFMEIEPGDAEAMETCPSPCTFAVEDEALLSIYKQTQGCLRLPVAPPSAAEVLLLHWHCHGFQMVTSGVQSEAVSDWLIAAWRAVTGWLVGLPIVCGPRCLRAPGVWAARPASCS

SEQ ID NO: 960624 - protein, 250 aa, Homo sapiens
LGTRPGVNRPRGSLFFAINLATAYSLGPHCFYEAITLTAKVCSYTPEASETMSPLGGKNNSRRAALRAVTLTAKVCSFTPEPGRPRTQQKEESPEHIRNIRRNKLQCATLRAGTLTHGGSAGVHFLEVTWRTTEPDTFHEHVVGIATMGPVSPSRASWWLTNRRASESTVLRVICCTPRIVASQSGLQDSVLYIVDIPTCDQFNLGTLYYRGSRLDRTRRGLFALCLEEFASGGYLDYEGPVLRVYARGK

SEQ ID NO: 960625 - protein, 101 aa, Homo sapiens
WPLMHFPPACLPGAYVTITPLWDGCLHVCLHAWPQSPSPATMMHADVPDDPMHAWPCLPPLVPPPSAPPPSWFLSCAAYGCLVLALVLVYLHLCSAAIAQR

SEQ ID NO: 960626 - protein, 241 aa, Homo sapiens
RDEARQEVVSKHVMPGRAGADQAVTRGTELRHQSPCEPKVPRSVMDGGPALSVNANQCQPGTGAYRVCVVLVLCRSLSRGLLSVSLVLIGVPTAAGPGNNGPDSGPSGPEPHPIWKLDPFTMGHRPVTRPGLGLPSGPDSDEAPGRPLAYQTTFTQAWQPPGRCNVPMPGARQHLGAILASASVVVEGSVCWRYYSSLLSFAVDTGCLAVTRGYLFPPKLLDPGPVHHGLLEQHLWDVASG

SEQ ID NO: 960627 - protein, 206 aa, Homo sapiens
MGLLSDPGSPARALPGLVLRLNCAVCAVLSYVAGHQPGTWLLVLPCLLTQLHLHCRRTPWAPPWWSDAVMRAGDRARAFALWTSPPTARMSVGSASVPGLNVTMRVIKGWEVYTQRLSPGNCPSQNETHELLYGVVAPNVYGNPAGPGDAASTESLVHNRCPVALTLPTARLWGCCWHWLTTSGGRYIGPKDIVFHGNRHHDRTGH

SEQ ID NO: 960628 - protein, 304 aa, Homo sapiens
  misc_feature (262)..(262): Xaa can be any naturally occurring amino acid
RAGFNSVTDGMVSEFSSRLGRSVASMTVYCLPHIILAGRRLAHQCGQKRSVNTMRPLGVPPGSAGERRHPAAQVPRCPACLRTSALAPSSTPWCPCPALGAGRHLRLGSEFGKLCCHVACLEYSRGWPGALGWALVAGGLPLLRPQLPTPCNGPWAASGLVLSLGPCSPSGLPGREPPFDSQEGLGSLPPPEGLAFLPCCAFLARQGPLEAAAGWPFDGWRPGAMPAALYLAHPLAWFFEFGQGPPDSHPAGCAGRTTIFGXRRELVRSRRGGWGLFKPRGRGTRLFLAPVCAGGVSYRVTRLS

SEQ ID NO: 960629 - protein, 212 aa, Homo sapiens
  misc_feature (163)..(163): Xaa can be any naturally occurring amino acid
MAASLVHQALIDLKGDYRRVMKLHSVEGSSSDQQRFPRSHAHMLPCSSQGNCLSEEATSRECSHLTSGSSRLSQVSMEVASSRTQCATRGTRVVFTKRKRIRAFTYARLGARSRKRGNSTDGVQSKFEGRLQQLDDNASRTDWWLLFGNTATLKKPFVPRTAXFPFCHVKSPQGVMCLTCRQCGGTPRVQWARLVAQSQYVQRGWALSWCIM

SEQ ID NO: 960630 - protein, 261 aa, Homo sapiens
  misc_feature (59)..(59): Xaa can be any naturally occurring amino acid
  misc_feature (172)..(172): Xaa can be any naturally occurring amino acid
VGRRVVVCRGAGGRPGRHVWPAAVRKRGGEGEQGPELTFAQVCAPSVSSSPGHTDAHLXPWPPSTPFLLNGCVHRTALQLPRAVQVAGLRALLVEAQAQSEAPVARLVPVLGAQQVLVEVGQRQAGPEVCAQHADGRHRMAALVTGPLRATVRMHCLHCTSQRRTVSSWEPXSSTLPSVDTDRQVTWFLYPLKTFPASCSGWKLLSLCAGQVKRSTWKKEPSLPPQNKWSSARAMGTAMMDTSKRTESSSPPEETSHSFTV

SEQ ID NO: 960631 - protein, 400 aa, Homo sapiens
ACRGLGFRCGPRSGRPRTPARGETLAGLLPPEWEAGRGRACPSCSPAFKERVADGEHAPDWRHAMMGYLGAARLCCLMPHAACPGVCVLPAVCCGLAREAFPAHMWDASLLCGLCHRLLACDHAAVLTAGRLPAGEVRTFNGLQCQTGMPWNLTWCRVILCGHSRALTRPYYKRLRRLHMLNPCLGNDKLTVFSQARRDGYPMARLGCDALDIDTGPTWDYDVDGSVLRSLYSTENLRPPTSLTYHLHDWIRRSVPTIEIHSKPLRDTRHQLSLGWPLQRLAWTPRMKLQRHRGTRSPLPHLALMIYSPLAAASRAAPSTCWSRTDSMSGGYPHTALLPESPNLSPGYTPCVGVYSDNTGTFAVLYTRRQSVVPPPGKRCGTPHVLCAPPTGGNHLDTTQ

SEQ ID NO: 960632 - protein, 334 aa, Homo sapiens
AGRWRRRRRWMLPPGRRAWAGPSPGRCGVRLDPALRLGLVCLGAPRRLLMPQAMVPSRQDVEPGSHALAAGPVDELVPVPRESSMPGGVCVDRALLSSPVSDRGPRSRRFRNTSVPRGGLEEPGQMGKRDIHEICVVDVRDSELPVEVRASAQLPYAQIAVSLNRRWDVGSWAPVKDRPRWGTSLGMNTLTRAREPAVTGEDTRQFKRKGPPRERGTAGNVAEIRGDRWLREATLCAIWERTDTPGERMALNRDRRRKLGAGNVGQGQGKALARARHMNISGHRNPCEKARLGDHPKSARKGVTHGTQGQMPGSPSQGSEGEGKDEPNKGNFRE

SEQ ID NO: 960633 - protein, 108 aa, Homo sapiens
MRGVGTLHVRQCGTLPRGKARWVSQVQQERIHSEAHFSQALVRAPVGLSVCERRLTEVSPELCSLSKSVVCVKSHTCGKEQLLSPPPCGVQSLYLHTTLLCGARARSI

SEQ ID NO: 960634 - protein, 105 aa, Homo sapiens
MDEDTLTMNPDNPEACWTSLSEINNAHAILTDCHKKEHLRQCTGYCCVSLREAEQFWVNDELGTPTSVLVQSRVVAKASSICTSCCVYLHCVCLTSVFSYFLISY

SEQ ID NO: 960635 - protein, 227 aa, Homo sapiens
WLPARGAAFCKPPERTLAVGSLVDRDHRPLSPAVFPKMSLSNKLTLDKLDVIGKRVVMNVDLQCSYEEQTRVQTSQRIKGCCPNASNFVLGQLDAKSVVLIDATYGRPDGVPYASTEYVLSSHVCCTYTQESLLGRGCCCVFDRTVYGPSRVDVHMPVPGPVLLRSCSVPAGTIPPTFIVRGSNGKWQLDCFWEPGLKPSQPYIEASPSFTFHARGLSMSMMLFGTA

SEQ ID NO: 960636 - protein, 264 aa, Homo sapiens
MKKSPTSLKGRHTTCQTAPCWGPLCVSRRSWAPPRPCPARGAQASPHPVAEASVSAHALPRESCTVHAAKSGSGLRGSPGATLLLARAASVRGKEASLGLRRKPRNEIQVSFQDKKSPGEKESQRIVSLTNLPGAVTCAGRGATWPGKGAIPCSNTWGLKEDPVKKQPGLTAISQGSPPQGWLDTGNQMAVPSQEWKLIQGFGGSCKRSGLSNRKWTMAPMLAISQAWDPAPRRFNGDSTLNPQTKKDKKEIKKRRHQNKRNKT

SEQ ID NO: 960637 - protein, 81 aa, Homo sapiens
LGCRSGVNRRGERLQAARHLWPALCPLAGLARMAADAASGRECSSSLPNAHGTLLAPYCALSPTPDSLPAPGTSFAGSAQL

SEQ ID NO: 960638 - protein, 334 aa, Homo sapiens
MYEPVVNRPRVLCSSSFAPSGLASSDGMSSVPSSDAEAPELKAFTCSRPALSPPPLSMTRPKAGNRPPQSRLSSKAPRLFFCDFQKLGQPCVFIVSVSDPVLPSPPGCPMKFPIIPCEKAVFPPVILRIFAQFPGHEISGGPDLGTIGESSEDGDEPGSEYTTFMTPGPSPALRPAAGPSVVLSCGTSSRVLGPAHSLALRAAIVQNPDIAKRRGDCWVAPVAPALFFFPFPSPGPRCPRVGSPPACSCCQAPLVAMMCLPWGPADWLCRGWVVLVLHEKHRSTGLFVSFAGLARAPGRSQVAEPGSPPIVLSCPGRTLDGASTRSHHWSSPDT

SEQ ID NO: 960639 - protein, 148 aa, Homo sapiens
GHVHPWRRTAKQLLMLLKLAQQCTDQRQSKRRSRDCWPGSEKKAAGKGDVPTNETTCPSSMDVNTVTTLVDEHTKAQLLVIAHDVDSHRSWLSSCLRLLSYRMEWIPLAAIHQREEGKTWRPFYVHSEDPCIHLIDRSAQDANIRARR

SEQ ID NO: 960640 - protein, 338 aa, Homo sapiens
APMPYTIHSGMSFCHRWRKGLHWSPPRRSCLPHQLHPWGPSCTPLPGDDSPTTTVLLLPPDEQPEAGQPGLGGRPGSKRRMPGRAADDGEGDRMGACHCQTQCPLPLLQDMKQAEWSAGGGAVTRVEGGPACVDRGSGPYNRELCQIMPTAGGHWLQSQRQSHWDPGVSYIGFGTWVCVEVPPVNACPGTSTPGTQVTMGVTSVLVLLRACARVGQGVQHRREKSPESSPNQLLSLGNGYTSTYASELPSTLNATQDATSLNGRRLAYTESVAKHSTGKHISYASDADPAHRRDIVPSCPRACDQRRHILRAQGWPDAYDQCRAIELLNMHLIDRVYP

SEQ ID NO: 960641 - protein, 176 aa, Homo sapiens
MSSKQQVDSETHNTGNTDNTQLEPKDRKTTTRKKQTTDDTTRKAPRTPITGDTATHTLKMLDTKEQKKHPLAQINRTQNKMTQLNKHIQNEENTHKYTLIIPHKRETAPADKGNNTQHTQHHSKNPPNHNEHHNAQKHHNQQEPNTNTNEYHRHPVPTRPYNHNKIKQPQPHNQET

SEQ ID NO: 960642 - protein, 115 aa, Homo sapiens
MGILSHDVFQETGPILHFGIGMTLSIVSSSHILQDKSRLWLNAIALAQKHMTRTIYTSPIEGPVATRSSGDFRNTFVDVGLLTGDVQLHPEASCLIMTTEILRSMLYSGSYVIRD

SEQ ID NO: 960643 - protein, 97 aa, Homo sapiens
GPAPLGAASKCECQRLSWLTEPVPRPPRAQGASMAPVTTWTEHPVNGPSLASGQSCAAHLTPQVNCLLWPARRRLQDPLKKRETGLQGPWSPLAAGM

SEQ ID NO: 960644 - protein, 225 aa, Homo sapiens
TSSSREYLEESENHAQRMTSHMRCPGTASITLVERMDEELPKECKILTLTPKSTWSTMKDEAQECAIIERDAAHTMEEKGNYEEALPKSYRDMRSPDTHIHTSSIQGPLSRQHDPDLRAPQKSEQDQAENEGEDSAEMMERHVQDNIYTKDRKRPGSEKCAIHRTTSYTTLPDTSRWYQDRKHHGSSDHIDRTTISMTEPNKADPIKTATMVQRGNHVHITTGQN

SEQ ID NO: 960645 - protein, 445 aa, Homo sapiens
  misc_feature (105)..(105): Xaa can be any naturally occurring amino acid
MESGSVAQGEECRGAISAHGKLGLPGFTPLAISLRGPRASPKYSVGHTGRPPPAPRYNFRVVFFYSIENGGFTSVWAEGVVFSKPRCETLRVCTSRAHTMRCPPXRGGVGNFTSGCESLSVAPGGPRGDTIFIVREHKERTRAASGAGTLSRECVSRARGENRERRKRGVCGGVVTKREALEGGEERGVRVAGRVASVCARPRERAPVWALCGVLITRESGPLQEGTRGAQKHPVAHCGAERHTDDSPPVGVCVWVGTPRVGAGRVKEKAPVGKRGALCGALPPWGEAHHLGGGRPINTQGGEGRRTSIYLGALVGAPVGPPCVAPPNFYSPRRGAEVLLVVPNMWYPLWAPFKRGHAEKCPPPPEGAWWCPPHTGGEHITGGGPIVVRPKQAPWGAQRGPSPGGGAPIRNRALSKGHPPGEHIPPEAVVAPTKCPPRGGSSPGD

SEQ ID NO: 960646 - protein, 243 aa, Homo sapiens
MDEDLWLVWHRGTSGGLKTPYPSEWQPCGPFAARSLPDMEDVDGAASAHLLQPILDLTNELVSVDCGGPAGAEYLDVMLDHDLHFFLTECAKTTMNFIEAALLIQWLCLLYSKNVWNTSTHSVYHVPLIYISREMMAGQCMLLFVLHVMDRANGGCQLRGPPVRHENDVPVLLDDFPDSRTNCGISRMIMTPSEVLIIPLLPMAPVWPLMTCEKEQQIPCTDEQGEVLASQEGFRMNTCVTQP

SEQ ID NO: 960647 - protein, 97 aa, Homo sapiens
MDLEGKGGTVDLVGNVKDRRRDGKGNKRHEGMKGLAQRIAPQGVHITRKRSEEVVSIKAKHLVWQRVSRTKGPTATRDAQIRANGSHRGATRQGEKR

SEQ ID NO: 960648 - protein, 87 aa, Homo sapiens
MDLAVLHIPLDGACLCKSINPDQLSTSCSAYIPSIFSKTLMKATKVSASTPRKDVTVSVAHEVAEMGYVFYPETRYAFELRSSVSDP

SEQ ID NO: 960649 - protein, 235 aa, Homo sapiens
AAAASAPATPPQPPFPPRAAVAPSPEQLKVSVTSEGSAGGGEEAGDAAEGTVGEPGRCVPGDAARWLVGTGASIHARPPSPSVPPSRRRRGKSLRKREGGLAEVYTFLFVRVRWGRTRVLVWGRGIGGSPSEREQEAATKDGPAGGHSLRGPTLRRGALRPWGAARMQAKNPGVRGLGRGAASGPQVAQAPESPDPRRENPDIHGKKARRQSTDKGNRPSPGKHTETRETHAKTT

SEQ ID NO: 960650 - protein, 146 aa, Homo sapiens
EQREGEEVGERGRERSRSRSSKQAGERTPSPVPPVRRFPRRRPASMPGVARLPLLLGLLLLPRPGRPLDLADYTYYLAEEDEFGGPLQLTKEPLCQGGWAFPCARTFCPLGPERKGTLEWGPSPGFQAKGLGWEFFKEPGQPTRLR

SEQ ID NO: 960651 - protein, 221 aa, Homo sapiens
  misc_feature (144)..(144): Xaa can be any naturally occurring amino acid
CVFFFTKIHCKTIVLVTEKGGGGDGAWHGYQSPSPRQTSELPSSCSGETASQERLPFLLRDMDPRRVSPVAVRHMLTHGEGGTAQGMPRCSQVACRIPWDRLYYGARHAQNRDAEEEPGPNPKRKRWRLHSGPVLCSRAQVVAXIGAAGPPYSGTSANVTDPGGLLGGAARISVPQLLQRGEGLHGAPQRQGVTPPGLCCMSTTSRLTARWYPCGLVPTHC

SEQ ID NO: 960652 - protein, 126 aa, Homo sapiens
LSEFDVEISIREDVYPRIVWLPEKVQKDSLRPEAARYLVAANQAGAGEMGFNLPQRGLSENIKRIMKKREPSVPSTSIKNLNEDTTFLPFTRPVSYGRAPRGTFLNSAGRRWRHGKLNGHPSSTPD

SEQ ID NO: 960653 - protein, 276 aa, Homo sapiens
KVFLLRHKQLQSSWMAEDYMIVYLNGASPVRSDAWNRLELKKCYQMIDRGVLQEKPEVLDHRPPLDGSFGLCWPSLDPFISDQVHQTRSSTVHSYGRPGATHPIWNTIQIPDCVLQYRRGKTEGQEGELQRPQTGVRACTRTEEKPEVDTSWKTGLLWSQEDQEPKPFQPLTQIKLMHTEETNETQTTKGHDNVHRSAKKRHNKRTWANTCKKPRRTRRQNGRWGPQNHNPAPTEDPTTRGEDQPNTLKTQNTNKGEQQEENNKTNKNQKGPTKRK

SEQ ID NO: 960654 - protein, 224 aa, Homo sapiens
  misc_feature (197)..(197): Xaa can be any naturally occurring amino acid
MDMIHIAVRLTGRPASFMAEFLSVRSESSNSCDGRINSEPLNEDWDSSTLMQVHTAVQEPCFRLYYTRADTLFLGVPVYNRFIPTHSCHQALSDSSYNQRLMVTRERGFQMLDSRAYRGQSFLGTCPRRIYRHTDLETNTYISPPGGWLLYILFRGGGGSIQDRCSERSRVAPLCLPYGGYLCPGHSGGCSRLCVSXLQVFRERSRPAGVLPPLLYWGELARNS

SEQ ID NO: 960655 - protein, 107 aa, Homo sapiens
MASTLPGCLIGRCGEWLECSWLGCAVLRCAVLCVQCRAVTRDQFWLHVLDNECRSGGEWWNAGETHSECNHTSLDLLVTPLLCCSCLLCDLVCCAVKTCAAPSQWEN

SEQ ID NO: 960656 - protein, 151 aa, Homo sapiens
MYEDVVLREHAQWRWPMWSVTYTVQRNILDLPPACFPLQWTSGQPAQMADKKLSEFDVEMSMREDVYQRIVGSSEKVQKDSLEARGHARYLELAESSWAGEMGFTSPRETQEHIKRIKKKLSLLCLIHKNLRGTELLPLAPELEGPEEYGL

SEQ ID NO: 960657 - protein, 248 aa, Homo sapiens
WRATGSRLQAARWTLRPRPRSRPGMIAEAAGRAGVWHVAVTSVPSGMLLVDSATWTVRGPRRADTHALLAGLSVHSWGIPPFARVDLLLVQGAMDDDVLVTSTQLCHRVSLRVARLVSLAVWTKMLASPCDSLLIPCGGKGVLLVYPYHLRLDGHLRGLSLYLYRTQVPTFWRAEGRILTTSKGGPCQTGSSLLHFLDLYKYGEQVGFDEPLDVVRVAQGSVGARGIGIISGLVLLSATIHWYIVFGG

SEQ ID NO: 960658 - protein, 232 aa, Homo sapiens
ARYEAWVIGRGPPPDVDLNHLVSATMSGESPPACASQASSSADLRKLAVNMVPFSPSLPFFMPGFAPLYQPGRASSYRALTVPELSPEQMFDATETLMCLPATPAVAAYLVAGLARPLIQGGLTIVLLECEVRTDDKQLDIVPYTLDKSGIYLVEWIPNNVTYVLSCDIPTFWGSMKMSCHLSVVPSAACQSSELFQAQSPEARSRRTVPGCKAFLSLVHVASAIVHDMEST

SEQ ID NO: 960659 - protein, 132 aa, Homo sapiens
RVVAAAVERGDMPARNNRYREREELQRLKDRYGDQRQQQRLQIPSRTQDDERVELDPQPGAGLYTKQLSIVEEEGPPHLSERCHHSITEQTSVIRQCRRTQKPWRSRRTVRPMYLTDIREEGYSWRRQAKIC

SEQ ID NO: 960660 - protein, 189 aa, Homo sapiens
  misc_feature (140)..(140): Xaa can be any naturally occurring amino acid
MGCVASPLWIIHTISFLAAGYFVDLRYVCGCYPKAVEVSWGGLRFPCAAMCFRVQLITLCARKSHLWTSQGFVPISCGHTLFSVRTQKNKHKRTCGCDISRWREETLERPCGYSAQRKPHKHCWSKWYNIYPYSSQLCVXTSNKSGVVHSRGLHSRVGPYIEAPVEPGCAAPQKRPYYVWYIVRKCAPS

SEQ ID NO: 960661 - protein, 42 aa, Homo sapiens
MSDNGGFKRPYRPQAGLHWKAGQAIGGLLTRCSGPIRGNPTL

SEQ ID NO: 960662 - protein, 264 aa, Homo sapiens
RLVRGRVLIGRGSNWLRLSTRTRVEAQHRAHEGGEGLHHYSQNANSLLQEKECLYVATPGGPAEMDEATSAESPEREAQYFLFYTLVGSLPLLIATDLHVTSIRAQKERAEQERGVMLSSYTCNSLDKDLYVAEASIHSGSPGGAATTKVYKKQGDLELEIIVLNDRVTDLKTNNKTLEEKMREDRDSLVEDYTVQTAEYCRIQAWRNERLKASLCSNGGQTQPGTPRGPAAEGSVKNYEEVIAIIRVGDETDWCDEYCQKKRE

SEQ ID NO: 960663 - protein, 220 aa, Homo sapiens
RRRVGSHGAQPEWHGLEAPLPQVDWQRRVATWFNQPARKIRRRKARQAKARRIASAPRVGSHPAHRALPPRFGYHTKVARPARGFQPWRELRVAGISQERWPGTHRHFCGLRGGGPMSTESPCRPTCQAALKELPLQTHPSFPRKAPSAPQEAENSFCLKNETGPPKFDRDRFMPVRERSIKQGESSESSLEEKRKIFKAFARSPVWPVPTAGLFGIRGK

SEQ ID NO: 960664 - protein, 143 aa, Homo sapiens
  misc_feature (35)..(35): Xaa can be any naturally occurring amino acid
MWRHTLRARRRQWVNGRRPKICGAEPQMCAPRNPXRRRTAARRRRGRPGYRRGDKPARKNLQDRKNKEEPGQKGGRNLRGGEKTPPGGPPPTKIYARPFVPFFMRTYNNYPSGALRSRGTSVSPTKGWAQKCPAKKSFEKGAP

SEQ ID NO: 960665 - protein, 242 aa, Homo sapiens
TPSPCSRRCRCQTQSLPLSVLCPVCWPPVLASLAVTAGQPMLRLAAQLHRLRAPVCYLANDDEACLQILSPVGANTHRAIVGLPGCHSARTLRGPCLLPVLAVGFAIPCACTFIWSDGSMLLLAVCSTFDATLNPSRHSIPSLVQTPCDCDRAPRGTGLCRAKTTWDVIRSEPSPYNADVSMQARPLGECPCVLVRGVNCPIRSGASRPTNSVWLSGCPAWRIFTAPATSLALRLDMTSEPP

SEQ ID NO: 960666 - protein, 249 aa, Homo sapiens
SAPAPAPPSTCAHTLQPCPMVWPWVADGCPVWVSPHWPGSSAASGSCVCACPSDVTASALACQPLCPHRERVANREENEILPPDHLNWGECWRWTGTSIAASTQECLPRQVTWVALIEDAEPAAETGVKLMCRSLYPRMDVNTDLEDQCQGDAAAGSWRKTDEHFQGGHGRRAKTHFRAVDLTGTLHVVWDEYKCAQYKASKGHSEKEVDDAISVKSNQLYEEHRSPGKLKTVYQGQPWTEEEEDLIPP

SEQ ID NO: 960667 - protein, 105 aa, Homo sapiens
SQQSWTLTSDLEKKRRGVNVELGVLAACARWEPATPVSPDLHFPVSASAAADLECCLRCHIMNVLIAVHSCLLCFCVCCAVCTCLCIVRAIHVCMSVIYLHYSPS

SEQ ID NO: 960668 - protein, 127 aa, Homo sapiens
MCSLLLSLWRCLLPRSSRVGRRWAVGGLVASHALSSVARHGACVVRTATTRPGVNRPARAHHSRAVVLESGPLSLLVRVGRPSSRAPLGGGATGRELFTRGGGKAPFRGGALFAGALSSRVRRGALL

SEQ ID NO: 960669 - protein, 244 aa, Homo sapiens
GLRPSLPMAASSLRLSRRPRPTGLLLVGVGLVRLGEPRRWTGAFLTEGMNAMSPGPLTFSYPVFCQSQLLQSPPRPPRDPPVHPSASPRSFLVLLLAAAFGGGAAIPPDPLDDPEWPFRSEGMLLEELLLCWRLEADDSWVGVGGWMTRLPGQAGLAVSWVELLASAVIHLPAVPGGRLAPVPLREVTSEPEAMSKHGALGDGLGIPRSSEDRRCYRETLVEVKRWRRILQEAGPDEGKNKRKK

SEQ ID NO: 960670 - protein, 111 aa, Homo sapiens
GLGTKFNKGSLKSTYPNLQNTCRPRKPGICWGDVAVGHVAGRLSVLPHPSRDLVKCGGVGGQISPHSCGVLHNVPHRVCSRQGALYGGPNSYHRCGVSQGGHRRSDLFTPC

SEQ ID NO: 960671 - protein, 121 aa, Homo sapiens
RGVKADTQQHACSSPGGGSNSGWLAYVPEPAGLPYQPYADPLVTLSYPTTIGIPPRYPDRYRAGETSILVAILYYWIYYQQHYRHLDGRRTSTQPGQHNSELDGALQHTVDTTYITPRTKD

SEQ ID NO: 960672 - protein, 106 aa, Homo sapiens
MDDDICRARLVDNGSVHVQWPGFAGATDAPRGLSSPPSVVAAPWHHVDCDVCGYGVKNVIPYCVADRWPMSKRGILTLKYPTEHGIVTNWDDMEKIWHHTFYNDAA

SEQ ID NO: 960673 - protein, 258 aa, Homo sapiens
GDSRGCDAAGACGGSVRCRTGACGVASCPRSGGPSRVILRGMTKMLPDGQHCHCQCILPSARNHVELPNVCMTGCAPWLPVSCACPCPSTTYPVLAAFLRRVEAMVIRELNKNWQSHAYDGFEVELDRAAADGVLSVYPGLTLAAKRRVLHVTSISWNSTWLCGGLCPTCGWTMGTGALLKSFVCAWNLDRRDCVPATVGVWRSQRCTVSGFTPAGIHVAEGDSGECGVELPFEDVMWEGLRITKTFQCCPLTDVQLM

SEQ ID NO: 960674 - protein, 174 aa, Homo sapiens
MWSCGCPAPGNKGSTPAGVACCGGARVGVCGRGPVVVPCCEGLPSSPLEGTVAPANPPTLSRRAVKPKVPVARKEERVAPRQATVASGLLESESMCARGRPPREGGGAHSSWGRTQCAGAAHRVCRREPPNNSAVAPEEREESLMRAKAGVGNKSALMGGGDSSIPQKRKRGET

SEQ ID NO: 960675 - protein, 257 aa, Homo sapiens
  misc_feature (173)..(173): Xaa can be any naturally occurring amino acid
  misc_feature (228)..(228): Xaa can be any naturally occurring amino acid
  misc_feature (234)..(234): Xaa can be any naturally occurring amino acid
  misc_feature (236)..(236): Xaa can be any naturally occurring amino acid
  misc_feature (238)..(238): Xaa can be any naturally occurring amino acid
MTARQIRSQLTAGLISTTTALAGRSTWHAFLYSCQQQLTPCLPCLAYLACWHLAPELAHVIIVSMQRGHLLAAVALALLHAPLSHCPGTAAPCCAPAARTSTRHASLSCPGARTLRVHAAYSLNSHIAHGQPLLHCALQLKPTLSCPAVTPVPLAYICLHHTHTLLDNTPLAXRPDHVYLASLSLPSLSFFSLHVSTSAYRARTHPQTLSHMIRTWLTPMAENHQESXDSAQTXAXSXNTHKGAQQPRDTRHISSRA

SEQ ID NO: 960676 - protein, 228 aa, Homo sapiens
DVLVFSPPVSARPCARDAGAALRAPAGSGLLSCPCCLLMPACCTPQRAQLLCKQWCSCADPVLFLLLRGTLLDVPWTVDCQTCVNACSVPAVVLLVSLNVQMSSQKTCLRTSEPCALGENVCFGYKVLHLSTVVIPSFMLPCAVRLHQPINVHMCVEVHLLWSRFPDENFTLKHVGPGVLSMCNAGPNTNGSQFFICTIKTELVGMGKHVVYGHVKEGIDVVKKIESI

SEQ ID NO: 960677 - protein, 212 aa, Homo sapiens
MPRVVIWNSTPRLPWQQQCALGKMVETISLLPGNVVEDTSQREATRLSVAQWQDRQVEGVSHQSNIAIDGKGSLGWPICSATSPRRARTHANDGHLDQSLVPLINYYQPPPETGGVRRSTLNPRGYSRAWLPAGTPRVSLLHSLDREASARVHYAILWPSSQRDLRTPSHSPFIAPPSRLLFCALVARSFHAQPGTSDQHTALRGNRKLNHA

SEQ ID NO: 960678 - protein, 38 aa, Homo sapiens
MRRPKLIKQLGYYKFILGSLILALPYKASEVTSRSPFT

SEQ ID NO: 960679 - protein, 83 aa, Homo sapiens
MVGIARPSTYQVKLEALWPHIRRPETSKHQDSKSARMRTPEEHDPTSTIGPPFVTTRKRSGTSSQEATLQADTKIDSDGQQPW

SEQ ID NO: 960680 - protein, 217 aa, Homo sapiens
  misc_feature (95)..(95): Xaa can be any naturally occurring amino acid
  misc_feature (207)..(207): Xaa can be any naturally occurring amino acid
MGLVLNPVLGGVRSLPFFGLRFLLLFRVSLECVCVVGVGGSPFLLPSEGLVEESSLLFRHFSALEAGRLSQPSLGRQRPKLLLLKVCLLLWSHEXLRVCKPQLLGGVISLSYTPRVCFVGFCSKSPIIHNSLSALERGKCLVTPLCKTATFKNPRGCVASEGLPHCVPTHICGTPHRREQLCAPRETPGIYIAPFAPIPQEEEAPQXRGTLGVFPRP

SEQ ID NO: 960681 - protein, 238 aa, Homo sapiens
  misc_feature (70)..(70): Xaa can be any naturally occurring amino acid
WGALTKRLLIFKTEKPLSHSYWLLSPFKVTQEEGKKRKRVCGKRRGSVGQLCVPPVLLLPSFCGLYRPPXGVWLGTCCASGARWKAGGQCSGRSGDTCWRQCVPRVGAGARGEGELPRCSPVRTTQYRRLLDSTQCGRLGLPGQCGVTSASVLQPEASGLQVQDYASGVRVPHTPACLGAPGQLREGPKWGLNLELPGGELSGKGDPLLGGSVLTLGPCVRTRNGVHGKGIHYYGKAR

SEQ ID NO: 960682 - protein, 303 aa, Homo sapiens
PQACRLHGAQPEWHGLEAPLPQGLCSGAWPGGSTSLARKIRRRKARQAMARGSARRPASGPFAAHRALPQGFGTTGGVRRWAGGFSLEGAPGVAPENYDKGRVLARAPHSGIFRVAIPGGKGLKTMLRTGKLPCVMGPNSCSHDGELKGRCTRHSRKLTNCIFPPQGKAPLWGAPPKRNGCDRTDVYQMAMKKQNLLEKLWGTNPHKGIEKPGNAGVYKFAHQVPGGNHWLLNYDERAGSKQGSREVFNFQAWTRKSGRNKTFFLQSGPLFRRIRLPPRDNLAPGSPKAGRRRIHTRGKYGGP

SEQ ID NO: 960683 - protein, 218 aa, Homo sapiens
MMLRAEDRAYMLVPWTTAVKDNHPEEVQLVELTSDTIFPNAVDFNIKTLEHRGFKLNILWMWVDRSPLVDPTGGTTLRAPDGLIWCQWTMQQTCTAACSDLTPWMLQEPAGGGAACAWSKPSYNTLHTKQAPACEPLSSYTPIPTRPMDARHSHPATTTTMGLQSNGHWQLDRSTVGKKDIDCTDELDLVLLVMNIIPSTAIYTTHELTPTSTIGPPT

SEQ ID NO: 960684 - protein, 46 aa, Homo sapiens
MGWDQLKLEREKTQGTSFDFSEEGDLRSRTNYRYERGSRGRHMPGH

SEQ ID NO: 960685 - protein, 56 aa, Homo sapiens
MWGATYGGAPFEDDWFPPVVTPGGLVPVLVPTEGGTQETLLGGGRPPRGLSVVEDS

SEQ ID NO: 960686 - protein, 113 aa, Homo sapiens
  misc_feature (81)..(81): Xaa can be any naturally occurring amino acid
GSPNRFNLKNRDKGQLCEKKPKAGAIVGRCYIHLPLLLILLLGNSKYFVDFLSCKPPRQVRGVAFLYSEPSSFLRGNVGAXECFSGGTHIIISVGISFARKYICVSLYMSDLL

SEQ ID NO: 960687 - protein, 171 aa, Homo sapiens
MFSGFGSGEAGERGWGAGGGSPFSPLGPEETGWVEHLVHTTPWGPGDRIRGPKERSPRSPHLPGSSWPGLWKPGPSLGGSVWSRWRRRLGVDGDPEHRGGGECPEEYPGPEAPLAGKVTHSPVAAGTAAWHRIRPDGAAGRTGWRELSAESRAGPWGTTGLQGISRGPRAA

SEQ ID NO: 960688 - protein, 97 aa, Homo sapiens
QEGAVANMSGWESYYKTEGRLREAEEEQEEKHCQSKWRRIEIIAGTQTRFDFCLVDASKGYCVESSELRDECDTCFDSERSRCTRKSCCYNRGERTL

SEQ ID NO: 960689 - protein, 106 aa, Homo sapiens
SDPESTDDGSLSEETRRTEHPTLTQGPTAQPYTHSRYAEIRMNCVCARSGAFKEKRTEARTSDEENGPTSIARPGPHRGEHAARMDACREAEDTQDHRGPATDTRH

SEQ ID NO: 960690 - protein, 103 aa, Homo sapiens
MINEQQVEDITIELHSTGPQCHRPCVRFTIVSLMYFAFTRDDSVPEDNIWRGSPLVYMNFFLYHQCVSFPQWSVHVDLIQPYGEWFEGLSVLYFRVPGIPYSS

SEQ ID NO: 960691 - protein, 114 aa, Homo sapiens
YSEHKEAIPWRAQHMETSNMDQTASSPPSQASTQTKKKRKQNTQKTTGKRKRQTRRETKREHETNTDTNEKENKTTKKKMNNNKQTQKKQKEKTKRQEQKKSKTQVMCKDEKEK

SEQ ID NO: 960692 - protein, 168 aa, Homo sapiens
MAILPASPPKSVGLQAPATTPSVIFVVFFIVENGVSPGWARRGLELRDLKVIRPPEASQRGVGLRGVRSRAPRPQVTYLVRNKETRQWRDLSEGYSRGEEGERVLGGSKQPQGSWCCGVHVRARKRGYGVYQMPSGKRARTCTGTAQSLCVVWDPVSAERPGGVLPPL

SEQ ID NO: 960693 - protein, 185 aa, Homo sapiens
APRDTEEHLYVNTQVWTAPEPEDSPKKDLFDMRPFEDALKLHECSVAAGCDMHAPLPLDGPVAQPPYPAGAPVAPTGVEHAAVRSPGTTAWMMPAWCGRDGCFELTGTSLCETASPTPVASMSSPGMHCLWTCPSTCCSLDPLKGVVRDERNVLVLRASANSSTKHLEELGSHIVGRREVSLNLR

SEQ ID NO: 960694 - protein, 207 aa, Homo sapiens
THKVDMDNAPGGGQIGLEDFIFAHVKGQRKECGVCSSRRMHSCAHHHGQRVAGYAFIKLHQGGQLVSDHIHLISCGLNDLRPYNGAEPAGLPGTTEVALAAQMELPRGRTFTLKAHGASQGHIDMISQSISGWTDLALAHNMGSGRGTLRRPDARGPDKVEDLPLPLNEKAIAAKVDDLLESNMGIRDTELAGTHGGSWDKGEKETG

SEQ ID NO: 960695 - protein, 201 aa, Homo sapiens
MCPFIMGHQILNLIDTAITAHRMPPTRGLTMEAPSSSGPCSLDADAQDHRGIMAEILTTTEDKDDIQGSCTHISGKNSACQDIGTHHRIGATHSENAGGGLQCIPRIDQTQNTYQKCNTKKHNTGKRANAQRRHNEMATHIHTQARKIGQDTGKRKSQTKKRGQNATRNKNNDDNQPSHKEDKPQRPRTQSHTEAKKTRAQ

SEQ ID NO: 960696 - protein, 80 aa, Homo sapiens
EALGTVAVPFDDDDQIVGGYTCEEQFSPLPSVPAILDSQLLRVAPFIQSKQWGWIIQPGSRCYHDPASQCGKLGRATTVT

SEQ ID NO: 960697 - protein, 74 aa, Homo sapiens
YGLVRGWVLIGRGWGRGWDRWRGEVWALQRLGLRPARGGASVGGRCCEELTAVPTPARYVSSASLVERVFIQPQ

SEQ ID NO: 960698 - protein, 33 aa, Homo sapiens
MLQTQPKITDVGQMQEDDSGKDYQEDKLRRSRG

SEQ ID NO: 960699 - protein, 130 aa, Homo sapiens
MMLGRSRNRGYAGPEFIKTRGVLKCKVSWVDTNYCWCVDVHGEDVASLLLVPSGSIGNVGWRCVLIIYINACGGYPGLMKEIRGEGGLAGVNPMVGNPGELSSELPPSDRGLPRGGSRGGLLGPSGGGKI

SEQ ID NO: 960700 - protein, 113 aa, Homo sapiens
RGAPGYPVRRRFGGAWVDQPGQRGKPEQFCARYGGHGVLAANWLSGVNVVLVMAYGSLVFVLLFIFVKSASSLRFAMKSRRGPHGPCWDTMPPRDLKEEIDIRSLQGSWIFKL

SEQ ID NO: 960701 - protein, 235 aa, Homo sapiens
WLLGPERLSAFVFPGELLLLLLRMIILPAGGVQLDRLAPAMPGPLARSAVLVLPVALLFFLCQPLLALLSVLLCDVWLVRCARAACVLPPPACSSDCSPVGDACVACCLKSAPSNGGARFVPVILLRNIFPSNLGVMQPFAHTLPPMKRWNITWNQGEGALWGRSVEGDDILGAWYVFAIVFGVGACGMLGAWIGSLLILLLQTPSIDATMVLVSWESVLVRHCGASVFLVAWQG

SEQ ID NO: 960702 - protein, 112 aa, Homo sapiens
MIMPSRSQCQMNVEPQKMVVMLWPKPDTVQTLYSPTQHPPTSPRAIARQNIGSGWSKALQWPQRACVTNHCPWSTQESAASMDSSGSPGPAPTGPIGRHRAGAAERDQSLNT

SEQ ID NO: 960703 - protein, 135 aa, Homo sapiens
MKCRTLIIYALANIIVRPSALTSVNTLFLEYKGRGAYSKTSKTERPHEDTAGEHWQKAEGEERRYKAHGASHDCKGFTPERNRMCYLTQLGRYLKMRAVLSLSDPVIDRGEGDHPLDGRPDSVDAAIAGHDVWQW

SEQ ID NO: 960704 - protein, 211 aa, Homo sapiens
MPWPCALPACCCSVLLLLLLSLCLACWTCADYTYDLAGVRTDSEPLNYKDPCKAGCLSWGHCPGRRGPDGPSRYSRLWISDGTHARKSSIKCCSSRKHFYPQLPEHQRAASEGSLWEDGEVDPVAGGRRRPTRACVARWVSSPFCHLGGNFTVEPEVQSSAQGHEALGRRHHLVVTFPGSGTDEDSYIVFPIDLRSGPPLDWPASVAAYVV

SEQ ID NO: 960705 - protein, 139 aa, Homo sapiens
RARGWRWATGVPGSSGVALAVLRSSCVEGCPGASGSSAWAVGDFLCDPLAADVLNVCMWTFACAFPLLPVPHLAGGSIFLMTYLLCCDMCCLWVSLWPPVPVLLPMLAPGNAVFPVFWTAFHPAAGDDASLWNGSTVLA

SEQ ID NO: 960706 - protein, 203 aa, Homo sapiens
SLTYLVVGGSGNQALREVAAGPSIFPSATIPHNPVCSVDLCRAGAAAQKTLYPVRVLKTVAVKVVCVLEGVYKRTPSRGSRGEPPPRPWIYKSLSIYSVSYVPRDYVCVFTTRAWSTIYQKSPRHDVETQADVKMERLYYLSSEKKWEEELWCKEVVVEYSSEKNYSAVWTKSTQISINYAVMFPHKTTVVGHTQPLFKKFSQ

SEQ ID NO: 960707 - protein, 187 aa, Homo sapiens
MTPSSSISHGTSSPFLEKDRRFPEYTDTCGGAPVRMTSPWLKGNKRGDPGISGSHVVLKYHRVGCSRSWTTFPIHSDRRRSLKVGVASANTVLWITKGRPQKGQKCAPKAFPPAGQWVAHIRSTFGPVPEASRFVSPLFTRPCCAHRHRVAHEVWLPFLSKDPARVPTSNLTRGPCGWGAPHLWPPC

SEQ ID NO: 960708 - protein, 71 aa, Homo sapiens
ALPQPPEPPAPGGPAPASQLLHSRMPPRPPPGTWTLTLAPPLPPGGILPQLQEAQERGRLQQITAPIVYGL

SEQ ID NO: 960709 - protein, 247 aa, Homo sapiens
IPQAAAGFSLRWLVKQRCQKRRTTFPATAQVHPCEGPASTRTSPTRSPVDAPGLHGARRIYAGVECLTCATRRRRSSLPAWPGGSCGLLGGPMFGLGLRVAASCSRLAATLCWFSACLQRPSEPTSSFRFHGVLSASSEPRFVHDRSVQADWLLRLGRVRAGCRPLDSSSYSPGAAGVMLLPATMFSRVWLHDGHRDHDWCPDLPRALAGSFRTAHTGWHTGLGGTPRDGGPVNIFRRSLPSTPLCP

SEQ ID NO: 960710 - protein, 194 aa, Homo sapiens
  misc_feature (48)..(48): Xaa can be any naturally occurring amino acid
ALIIIFLICFLVLYALVLTLTTKLTNTNISDAQEIETVCTILPAIIRXSSSPSHPLRIPLHNQTRSTESLPLPLNIKLGHQLGTEPYDVHRSTVGTEIFNRPSIAYATIIPENPGDHVRTALTVDKSSKYSRLEAPNSYKYFTTHKDVCALHELSPTLRLKNTMRVPQDDHKTKTTYHPLIDEPGGYTYGSNAS

SEQ ID NO: 960711 - protein, 241 aa, Homo sapiens
NGDGEWLVPIGRCMCKAGLRGALRMAPVCRGCPSGTFNGQPMGDDGLYPHCPINMTGPLLKGATNCVLPAIGVLQMQTCDPTVTCPAQPSPPAPQACDFQCQLMTLHSLTRRLDPYPDDITWMCRQSDLDLTNIILAKTLGVLRAVWVALTPWQCRANQIGNIVTTPNAQAEGTDPGGHRPFLPSRRTLARGPHQPNDYTHFDEFQELVNARNMTQSPLYRPSSRALENITTKPGRTIGAA

SEQ ID NO: 960712 - protein, 299 aa, Homo sapiens
GGCVPVARPGLVHRVSVGVPGPLAACGLGLAVLRPEVAGNATALAWHVVNCASRSPNPEMPQCCWSLCVLAPAPASVLFFYGQWCRSTCPGFVMQWCDHGLTCSLAPPWAERDLPASGLHELTCGTSSARPACAFFFSSYSHTAAPATRRRPPSATPRPPPPHNSRRPQPNTHRATPPHKSKSAPTPRAKYTQTKNESKNKQKKGTQNRHKTAANTTTQQEKHNGNDQTVEKYKLATPPYTTTHNNNPNNHTSKRKPPSIKNPPTKTHSTHNEQAAGPPQEVVKNQKQTDEAKKKNDQH

SEQ ID NO: 960713 - protein, 213 aa, Homo sapiens
RSIPARENALSVQERHTGILPLVPLRNPPSVCRCCCCYLLTRRARLVPPGSEVAAQQGRRPLRLSSPDYRPVLPPVPTSEVIAMSWQHVMGHNPATTKPSPAAHMPAGTILIQTGTCLQPAAGCALSGPGPVPLLLRVPYPHTPFGHRTLPPAAPSARGWSPRALAPPSPSASARASRSHCCRARLPRHPSSCSRALGIPPCPSPPWPSPGHR

SEQ ID NO: 960714 - protein, 198 aa, Homo sapiens
MTICSYRPGLLVHTVDPLRSQTLVACRHHQSTFNTSSTVNVGLARLRNDKDPASSSRALRIPLTWPASSLEVLTILLLKLPACSQLLHAGHAEPAQEESLDTPAAYSLGLALLGSGRRARALQLSLALGFAGIFTKVDYFGILKEARVTVYPFNILDNPCTGEAQPTTWAGHQARQPTVLLLTELWPHYIMVSIREPT

SEQ ID NO: 960715 - protein, 244 aa, Homo sapiens
SVSSDMVQDKEGSWAVGMGSPVKVPPELAWRVTCRGDELTRQPGVNAPAAFCCAPSCCMCPRSLLPDAWHCCPLPSLHMGSADVTLAVADAPVLCMELACMKQPLTSPRVSCEPLPMIPVCLALPPASVAKIGQSVCLGYKDLAAIPKDNGHPGHLSGPDLMIYEPHFTYSLLEHVELPRSLRAARCHPNPHHQPNIPEVWRTAVAWTHLSGLRPQSIGTTDRLTHTTPELPQISSQKLHIEKS

SEQ ID NO: 960716 - protein, 82 aa, Homo sapiens
RLRARAWRAAAQQMYQSLAELGTLPPDELVSWAWCPPLFSLCGTAPTLLHPHCATWVQSECPPERQTCGTRECHVPPVRRAL

SEQ ID NO: 960717 - protein, 252 aa, Homo sapiens
KGQKLTFLNGKGDEDNGEPPVTPVWKKKNRQRGGWSGGPRRAQVDSQEQGHCVALPKFSLGIIFWISYTTHSVFLIRELGRHQQHVLETSNSFNYSKKGPISVYPQGEVKELVGHSAWWAPLPVVAPLGYLITLTKNSWSCNGPCQRAQELVIRTEWWIANTEEVTLTFPLKGQIFTQLIFLEVSLEQNEVEHRPEAQPTLIIQSSSNGGLKDPAPFTPDRGRHPQGKGTVNLRGALKEAPDQVRLAAECQV

SEQ ID NO: 960718 - protein, 253 aa, Homo sapiens
QHKHTYNYTYFYDEPCVNWPEGPRTNMATSRPRCPEYSVLGALGPSAAGWAFSGEVLTPRACSCLSLQDCIVKLLTVPLIGPADVCECQHLISTDNGFLNEPLKHSDFFNCQWNCFPVRMPLRCPSPSGTQMLCCLCTWFIVSRTFFGDACLDHDIIDLEQTATAPPAGLNFTAHMAYRKGIILFISLHRQFSVPDLRTWPVTVAEYCPHICYFRGACIADQRCASSLAPGPDLPDLIIFLHTLNNIFEPHVA

SEQ ID NO: 960719 - protein, 69 aa, Homo sapiens
MREYRETLRDRYRKSAPETRCNPIACTLPLAARIWTAGNNNKRPPKASYTQKTYGVGYPGKSSRGLDYY

SEQ ID NO: 960720 - protein, 107 aa, Homo sapiens
MGGVLAGSCEKKRNFLSVLRCHSWVTLRMEGFCLLAAVLVYLLCLGVPAGYPVWLCLLPTGVFCCWPWRRGLSSVAVLKAGPEAPLIVCACCCFPCCILLFYRCTRW

SEQ ID NO: 960721 - protein, 225 aa, Homo sapiens
MTTVSRGHWLHHDCRWPRCSVGGHGERLTQCREVVLTTSKDHPGAGGCAMPLQCYACLTASCICPAATMATMVQNANAGWMLPPPCTVLTMLAWCHDACLLQSMVMSRHACTDYECPALLTMEQLNGGLCACWALVCGPSETCDQSSAVPDIDDDYHALDALMCAWSQCPLTCQKLSPKWCFLDAITASRFYSDRPEPSEHLNYVTEIAQDEIYILDPELLGASA

SEQ ID NO: 960722 - protein, 240 aa, Homo sapiens
MPMWLISHDCHNPDSDSTPAHAAADCVHGYMLLTLRTPAVTPGVLGLEPWRALLETGFPQLKLSGQTMDDSQRAVPMEPGLLADLAHIHGQWALVSEQTPRDCCCMNILLTAPESSILMPDVGSEMPCAMHLHGWSNPPDKMKHVAVQPWMQQLPDARCPPQILDSSVCCAPVPGCETDGLTTVSCFMHGMCDQELSPPKSLKGMLDASSLTRSLNLTFATPLQPQSVQRPGFGPQTPAR

SEQ ID NO: 960723 - protein, 172 aa, Homo sapiens
QRRQWKLRRRCSLFGGISLRSGGGELALEPRWPPPPRPPPCTKRRSAAPWLRPGSLAALDKKPCQGARSLEQLLCTMNGAAVLPMNVTNVLCNGQERLAVPAWWANEGVKNGLAKPSCPQMCPKVPAKVRRVWPGQMLAWRGLFGVFWFFYPNVTVDFVRAHAWPGPAMAWS

SEQ ID NO: 960724 - protein, 253 aa, Homo sapiens
MRPLLLALPGLALSEPDEVDKFNAKVPDMPGTTVNVRLGWLKCRTSFSNDLHASTSVAAATVSRARVTYSVSKRDFVSRLWLTYRRDFPPLPGGCLTSDLWLGGMLRQRPDDAGTCAFCCISCPEESRGELLRRPRLVVYRFSGLAVYKADLAPLLPGQTQSDWKSGASWFPFDWVAETLSPVFFALGYWPLRCDCPVGHGVGSRALLVPQCVPGASCGPGPYYVSPCVFAGGVPGDPWPLRIVLNARLVLLL

SEQ ID NO: 960725 - protein, 245 aa, Homo sapiens
MYPHEPLKRGTKSPRSSIRVQQPILLTCAMSSMQVWINGAVGARTRRDSPQGVDFVLSVQFVRGGLNFVLCAVPSHFPLTTPRYVTGLVHYATASWLISGKGVTRVDVALSSPLVHLVAADNVSPLFAPSRLLCPFVNSPLFVGLIWIDSSDTCVYAAKPLDRLRIDARWMVPGRPLRVGALGGPWYRRVKTLDLCGRFLAHIFPLFYSTVRQGNGGNLLDKGWAFGYEAFDLKPTTLFFATWFA

SEQ ID NO: 960726 - protein, 178 aa, Homo sapiens
PVTEWRNWCRLQGLDGQNTRDTRENEIWHLREQVSRLASENAVSWVLQLWPDLRDVRLLACGCAALPVRPMALLRAGARAGAGAAAWSCGLGHRVGLAVCGQDCLPVWPMELGGGEWASERSLRRPGLKTLPGELALVQEGDGGTPDVCRPAPDAGEGPGALIGPGELLRRRCWAVVP

SEQ ID NO: 960727 - protein, 222 aa, Homo sapiens
YGGKEARTEGDEVAARGADEHGHGCTRSPPTVYRTPTEALASFDLPLVRAGGIGSGMPVCMRCRMSPNDTLVGSSRSPSVSITQANARLTAAGALGRPSDTRCCGGTICSEGLPDEVWRWLAMMGERHLGPVSLAGAMRASNLLISEISRARAWMVAVCDAASMYTGDGRVYGMCNVSELYPSDLSTPTAGKQIANDTLVGYPSARVAADRQGARHQTREGA

SEQ ID NO: 960728 - protein, 178 aa, Homo sapiens
MREIVHIQAGQLGNQIGAKFWEVISDEHGIDPSGNYVGDSGLAAWSVHQSSYYSEASSHKYVPRAYSGCDLEARKPWHMLSVSRGLLEHLFSAVTNFILGVMSWGAGRRKLGARGGSHNCGYGGPGGLGRRFPGSPWAFGPVGGEPGPWVEEIGADFGLAGGLSQAWSPTFRWGGGRA

SEQ ID NO: 960729 - protein, 152 aa, Homo sapiens
MKQANTSAQRHPHTRIRERALSTPQDTINERPQTNKTTQAYTPQTIRANTPRTQHTRETPTQRHGKKHNKTHITTDNKRQKPRTTNTRHHTPDIPTDNTNVPTTNNEDNNTPPPGDSLKARNQTTKTHKKRNHTDHDTNKQPQGEHIKKKDN

SEQ ID NO: 960730 - protein, 102 aa, Homo sapiens
MCGYCVFRRVLPQEKGASRSPNVGRLPHTRLAAVLLGERGCAGGPHPVGGPWVGVRTPFLLANVGYVPYALSVRPGPDGPSKASGGTHAMGERWDATIVGRQ

SEQ ID NO: 960731 - protein, 117 aa, Homo sapiens
SLPPSRSMRPPAHPVPPADRLLGQGRRGPAMESYDIIANQPVCHRQLCSGVIKAGFEETMIPKYLFPKTNVVCWPEVTCWVMAVSPGVGDLFIWTKSRWSTGLLLTIRYPMEHGVVR

SEQ ID NO: 960732 - protein, 69 aa, Homo sapiens
SSWGARANKELELLWSLGRCSREACLEGGGQLLRWRGSPCSCALRGFLRRAAAVPWYLDMPVQGSCCVA

SEQ ID NO: 960733 - protein, 209 aa, Homo sapiens
MGKVKVGVNGVRIAIGAPGSPGSSFELWIEVDISCHQVTPFIDLKLALVYRVCRIMSSTLVANSMAPSRRENGKLCRQLEIPVTICQERDPSKNQVAAMLAAEYVEESTWRRSPTMEEGMGLIMQGGSQEGSSSLSPIWLNAPMIPQWDAEPVRSYDNERSRSSEQCHPGTSQACGMHPMSQGQATDNSGYRGRTHDHRPCHHCTQKTW

SEQ ID NO: 960734 - protein, 298 aa, Homo sapiens
VLKALPASASRAAISFRLYHELVGLAQIVRRRVGARQETADNGDDTGQRKERIEKTREESDLIEGLKGDRLHEGAADMTETGTYSGTNTWKRTHIPQGNHRRVGDRAHSKNEAPGDTVSAIRKMTRATLTAGMNELHGPTQREPHDRGDHIRRITLSRKEYHQYRGQRSNSGRNVLPIRIHTSNRAPGRINDSGATREEDRKRPSGAQRPKLHHSILDRPRKTHETAKRQAQPRMELWPYIGKEPTGGQRRQAAGRTASTRRQNVRTAGTHVSTEPHQRRHRLHTQSKTKSRACEDPP

SEQ ID NO: 960735 - protein, 150 aa, Homo sapiens
  misc_feature (5)..(5): Xaa can be any naturally occurring amino acid
MGWAXRVTRRGPAGLCSPGLRQARLAGAGEGETEAAAEKSCVELHTPGSESEESERMEHLAQLRKKVRGGQLQRIELLLGPAQIPTVLSCEKPQDEWLEVQGQEEAMAVACKRSSEEAEHHGQLGPRLKANESNSPIRVHKARREGPGPP

SEQ ID NO: 960736 - protein, 232 aa, Homo sapiens
WQVCVWGRDLHEVELLSQRSNHELPCAIPRPQVCYPPAAPGGGPWVSVLPTLLLPSMPPIWCWITGATYAGGSSTSDYLSVECACQHVLGHLEEPTCPTCTLVAPVGWLPTSAPMAGILGSPTSAQQNCYLPMGCIHPPVRKHTPYQDAHISAIPKEPLCRASPATTTDSSPQGPTTGQAHSELHLVSLQMTIPGQAEANAGIPWIPGVRDSNHACTQQEEPEHTETRKTIK

SEQ ID NO: 960737 - protein, 127 aa, Homo sapiens
MTTHHPSLVLELHRTIMAIPAKVPSSLYYTAATWQFSYLIENIGPVTVAEYAHTRYFRVRLLTNAAPPLCAPRSACRDLIIFLHTLNNIFEPHCGRERRSQMNIPTVGIVDTIEAPAIPTLYRHDNP

SEQ ID NO: 960738 - protein, 72 aa, Homo sapiens
QAPLESIYQMDPLKLVATFMTNTSRREKSCYGIMFRHLPMPFHWNAGRTQGFKTGLLEAGTSPEVGEIHLLR

SEQ ID NO: 960739 - protein, 214 aa, Homo sapiens
PRPLPQAPPQTLNLGYQVRRYMQKVKKPPDEELHASAWSDWSQSSGYSRACFGDIGQCRPRDSVAADMGRVMADDWYHTAMCTSNEHNGTYQIDNHNGNEHAPATLPPTHDNKDPLITRETTRTGDEPPRTDTERNELSTNITTHQIPPQPSDTDPREIIPPENTPRQTTHRTSPQPYMDKSPQTRSTNHQVGDPSARQTPTKTPPERTRTRIQ

SEQ ID NO: 960740 - protein, 265 aa, Homo sapiens
MAGVCSPLRLCVPCRWDVGAAMQRRWPGLMTAAVPDMRCRDTDPEEERICGYAPGVCVVLACAAGAPRLPAPCCCSAACEAACPELLVEIFCCLLACGTGPTQLGPGLHEAGLRCVCWPGSGPPCDVTMPMPCPAQGMMCGQQWAQMGHLVSDWWLMPGVIACAAVPEQACPVCVHGACLFCACPVGVSSRNEDYPRTCSDVFLCAQASSLGHVLHQPWTQPRGLHPSSDEDRFGYVLAGAESFSLYRRVKPLPGRQICVPKASM

SEQ ID NO: 960741 - protein, 227 aa, Homo sapiens
TEAEKRDPQELVASFSERVRNMSPDEIKIPPEPPGRCSNHLQDKIQKLYERKIKEGMDYELHYPKEERIWNPSIYEKLIQFCAIDELAPTTQRICLIPMAGSEDSYYEALAKDPDNLLTMDKLAHGQTSEANKQLTYRDGAPPKRHHDQRPRPPPYHCQTQLLPDAQKRKSKLGQRLLPSDQTIAQPTIQHHHTPTLPSLSKQDTTHAHGLKTPYLVSATAKTAHAT

SEQ ID NO: 960742 - protein, 253 aa, Homo sapiens
MAIPERTAVMPRKTGRPGSPTYFLKIIQLLDDYPKCFTCGMHDELVERPTASCSSNPASVPVRRGRLMAADWCIVITNVCAMAIRWVTWKTTQLLEKLLAIDLVPARVIVGASLVLPTHEGMGTSHSYGSVESLALALRHNRRVPDLAARWLVATCPSVHGQLGRQRPKETTWLSRARRQRPSRFFRSGSIRVVQPIVTLVRWGLLLQESLKMHCRQPDSEHWADNRGGSSRSPRLLHHCSTLCPFSFGLASC

SEQ ID NO: 960743 - protein, 118 aa, Homo sapiens
  misc_feature (25)..(25): Xaa can be any naturally occurring amino acid
  misc_feature (79)..(79): Xaa can be any naturally occurring amino acid
  misc_feature (106)..(106): Xaa can be any naturally occurring amino acid
MRSQLACAISDGVVLFIDAAEGVMXEQQNAPGPLGTFQKGQIAGARKSAGSHCVHNRLTADPGAEACLQLMRYYKLRHXCGMKVIIGKFLKRKRPIGNFQRDENLXPFPTPGYVASPV

SEQ ID NO: 960744 - protein, 86 aa, Homo sapiens
TEFLYNLYSSEGRASSTCRTNVLGHLQQGGATNPFERNYGTSCGEGQLWLSENLAEVPEGGGCQAPNRRNSLKKGGYRLHKTFYLR

SEQ ID NO: 960745 - protein, 268 aa, Homo sapiens
  misc_feature (159)..(159): Xaa can be any naturally occurring amino acid
PGVNRPRLCPGLWASSSAIGLALQPTRDVDGPLLLRRQRSGRCPGSSALAWTAQSGGFWGVSALVVVLLLLPWGPGLSLCSPLVLHACMWPVVHAMAAQPGDGMVLKPHFHNGLCMRAAVATWFNHAWPCNDPADCNGPGNANGCCLHLPRAPAVCGPXPVPNLLLLAPLVLCTTRMVRAWPAGFSLEELRVAGIHKNGVPWTIGISVDPRRRNKSTGVPCRSNCAAAEGSTCSKTHPLPQEALGPKKETVLLKKLKLAPLTDGMPSE

SEQ ID NO: 960746 - protein, 254 aa, Homo sapiens
GWVCGSRRVEAAPYRARVRLGWGSCRLCLPAQPWWPEVLCVWTCGVGETCAWRPMDKWSNFDPTGLELLPPRLAAAELDALCCYANGCPESWHMIACDAWLLQFVSNMSNAQMMYRCACLWMQLNDAEHDPGAACACCDDVRRMTLELMDDPGHAPCASGPVSRQAGPGHAATDGPTECSSNFSMSENLREAVRSPVQEAGSHAASHRGAEEMDAAGTMNEMLRVEAEALVLLRQGLSGRMQTSSCEQIPPEGG

SEQ ID NO: 960747 - protein, 278 aa, Homo sapiens
LGVRTLQACVAVLPWLGSDVVPGAGGRGPSRGTTPAGLLPPEWEEDEERMSFLFSAFKRSLRGEQHRLVTAMMVLLGCLLCADATACLPWVCVVLPAVCCGLAVRPFMRKEELSLLVAWPPCCFAVTCLLSMCGAAAVDVRLHGQCRQQLDLLGVFGVFLLKPLKWTLSNMLGDNNVPAEEVLVAVELLKENAEEVYRLYQNSPLSSHPVVGPVRAQHPTVLTPAQMRRTFYLVLLQLQKEKMVQSSSKRGEDWEVAKGTCQVLQSLNLFGVSVFNEI

SEQ ID NO: 960748 - protein, 185 aa, Homo sapiens
MLHEDLPPDDLEVDKWTCDRWGLWCHLCFIRTWTALGISDAPVTGMVSGQNCCEEKRNPSSSTLPGGGVQNPSCRQEFAGYSISDTDSSDALMNYVFDRKVSPRKCHQVLSPSPGWSWEAWPDGSLHTHLHRIHTHGSRCNDPFGDLIKPSRLADISIVIDRKWIQEIMLHIHPKTGSPWDTQRV

SEQ ID NO: 960749 - protein, 261 aa, Homo sapiens
RQYELGGERVRGAVGLGGEQSTDVGRNHQPGKLDLVDPGRLFWKRSLTPPEAYMPQPHVSPGVGAKGRVTCEWAVWFCKKCGAGGHGPRRMLALEGDFRMLRGLADHYWDLTPLRPGLHPHLPSIPNYSNLLLSGHHTLACLIVDTIRGVSGIGVRPVTYGLYDYEGSKLRMTSPSPEGEKFHYVLNDTDGDWWEARSLQLRRKLAAFPATTWPLCDFYSMLEEWYFGKIVEMDAGEAAAFGMQSPGGLTHRESENSKGGY

SEQ ID NO: 960750 - protein, 178 aa, Homo sapiens
MPLVTSCICHCCDCHGPLLGTLPSRNDLSCTLDTIWTSSPSCRTGLHRVLLRHPVIDVAHSDLILHVRDVSHPAGGAPAICSCSVHAAWPAAALPAPVTPWWRFTTTVDLVPGVQPHWNRPVVPCVCPAGPTALQDPDSLSSTAGGLRRLTGATDPHSPCDAPVAQLSGCLLRPPSEV

SEQ ID NO: 960751 - protein, 78 aa, Homo sapiens
SPPPLHHSPRRRFPGRGSRSHPTATHQETKQEQMQTREDDTKKHENKKRRRNNQHKQTQDTQKRQKNPHEQNKKNTNN

SEQ ID NO: 960752 - protein, 218 aa, Homo sapiens
  misc_feature (57)..(57): Xaa can be any naturally occurring amino acid
MDRTSSQMHAPGTTPPLLHEPVFCGRSCAPWTPPVCPPLCVLSDCLSLCMPACIAIXPVLPCVCMCCDVCVIPAVWCCPVCLCPATACLPPAAAALGHGSRRDSGLGQRRPLLLSPPTATASVKMEPENKFLPELMAEKDSLDPSFLTAMQLLDGSTLCDDSRKETQKRMMRRITWIIPHKNMKLKELSADTCQAVSQVNSVGQDSWTTMEYHQRLLK

SEQ ID NO: 960753 - protein, 106 aa, Homo sapiens
MRSATLDYILTCTLNPMQIGVDDCLCSMQLVVGALVSARVVGGCVICVEPAERAYQQRSGFWASMAILCVPGESTAETECEQCVAWVGTMKMQGRRASAVESANLP

SEQ ID NO: 960754 - protein, 308 aa, Homo sapiens
MYEAWCNAAPRLRRAPYAVPSMYPCATTTPILRPAAYPGVPMEVMEVTPQPGSSTEQTSRPVYYCRQHYERVLLSCHTNGCSILFLEHATARLTTTLTTQAHLSPVPLQHGNSHLLHTPRSSSSNDDDWTQRAHARLDPTHRLDNRPTPRHHHDHTDRPACPPPPHPLLTTHPPPAPPDCPTGNDVPIPHDTLHAHLPTRRHTAPGLDDISGATLSDPADSPTTPLTIHLYPSANNTTVNAQTNATAYYGIATTPPPPTDLTPTTTRDAAPTHALATPPTACRALPARRHRQTTRPTLTTTATRPPLT

SEQ ID NO: 960755 - protein, 119 aa, Homo sapiens
MYEARVCMNPMGDRVEPWLDGMKMSNAPRGGVRLAAVLCCAVWQLTCPVALGDGVSCDVVPGEAPAPDCVVDELYLPVCSQMIYSYMSPEQMLWNAVSPFSEENSCYTSRMSNASGETI

SEQ ID NO: 960756 - protein, 116 aa, Homo sapiens
MSKLAGESESNLRKPNEEAEKNAPAIIFIDELDAICSQKRYNYIGDGGAVRIVYTSMLTLHGWPKAEGTCDRHWQQTNKNQQPLTQLYGDTAALTGQVDIGQPEATDAKKSSDPYQ

SEQ ID NO: 960757 - protein, 91 aa, Homo sapiens
MSLTLNYSRVMRTRSAHPCVCPPYVSDTWRQCVLFATLGMWSFPHTCPASFTDLEPDLPGRHWWAAQTPHAGWCLTVCWLYYPCVLYSPPH

SEQ ID NO: 960758 - protein, 95 aa, Homo sapiens
NIRHRCEAWDYDAQLRPPGSIVRRWDGWIKCLVSSDLTSAVTTGAFLSTILHLTILMNDDSVLLTCYYPTPPCSHACVPTTVVLVTVWPDCGMCA

SEQ ID NO: 960759 - protein, 99 aa, Homo sapiens
EMAETGPGAYDDGKIAVKTQTRGSWMAYHKERRQSVSVMCEDDGKLIRLPNVSVMLTQMCENDSTYRLREQQLFQLLILLLLTIVLILLCPLHTSESSY

SEQ ID NO: 960760 - protein, 132 aa, Homo sapiens
MARTARLIIRYGPPCADLTDLDCRTMDAPRQVVNFVAWSQPSCLHSVLLDDTKGIIMTTKELAKVVLEIDVTVSSRFLPRLLTIHDESLCCVNLLCLFQNNYNVLIFLANGMCVVLCHVHVVLSLLTLSFVL

SEQ ID NO: 960761 - protein, 243 aa, Homo sapiens
MYEAGFLARAAETRPVRFRGQAEGLCKQWLQRAWCKSGAVLLREPRYTLLVAACLCLAGVWCITFIGSFTWVVHTHEIDLECAYIEPDGKNVLSVNVSTIMTYYPYLLWAVLPGPLCVPSFGFRSIIHITRARFVPYIAIPMSLIGYLCTLPALCPLSTSTHFSPYGTILYPLVSLTSYALCFLLSFIFDSLFYLYGTHCHKALTPSHLLWFLISLPFRFVCLLPGPSYYPSLFPTFPNSFLV

SEQ ID NO: 960762 - protein, 210 aa, Homo sapiens
MSQPEAEVLRVTSCRGPRELRLCCGRYCRTDASSCPARVPTGVLPGRPGTHTLTHAARGALAEEHGPTRLASTHLLPSLLLTQRATRAPHTHTRRTRTAPTRTDTHSRALRFHSPHHPGDLRIAPPGCGPGSLATPSGTPGDPHPGPPHTSPFAFLPLPPQPPPALPHRSHCCHRLLATAPPRSPPYTRFFCAPPPFFLSPLAPASSLAP

SEQ ID NO: 960763 - protein, 114 aa, Homo sapiens
KLGLIRGGFARAPQRLRIALRRCCLGPSSFTAPSPPLHVLGLLSWRRSYSRSPFVGPGRSQLVDGGEGRGTGSGEEAEETSQASARGQKMGRILGTSREQESPIQPGASMDFPG

SEQ ID NO: 960764 - protein, 95 aa, Homo sapiens
RKKLGREAEMALSSELEPSYPQQTMLASNRLWPSLVAVNGSVTCTSESHPRTQSLGFPKTPSGTPSSIRPTQHRIRDPKRDQQTRPSEIMTTHNY

SEQ ID NO: 960765 - protein, 218 aa, Homo sapiens
TARCEAWVALVDENRGTGGLALLPPVIWTGGGQWWHLDPGLSWVLLTLCVTAGDPGGVGSSSDGGQRCSRPSASVVGSWGSGSTLPGDCVAGGVPSGCWGDHAGCVAPSNVAIRQMWPLLCQVPLGNPEEDLSHPGRALGPAGPAPTPASAASLRPSLRAPGRPVGALVAQIEIQGSLVAVDTLRPFCWAELGRDLGGLGSPPLLGLCLPPFIVLGRA

SEQ ID NO: 960766 - protein, 238 aa, Homo sapiens
MTPVQPGGAGGLVALVLGTAVASRRFGSGIRGRGRGVDGAGAEAAELAGGKAEDKEWMPVTKYGPLVVNDMKIKSLEEIYLFSLSIKEIKIIDFFLGGSLKDEVFEDYCQVAESMTLCLGQRNQCSSAILLAIWGTTTVPRLVWVLSAPRSVAPAIRWGHHPGQALHPSPVRQEATLGVNTDLWSPHLVLFMVDKGRCGSCCLVRPHSLDPSGALASSSDLSCLRKACHIMVGSRLNW

SEQ ID NO: 960767 - protein, 175 aa, Homo sapiens
MTQKTGEGGRGGHLAGVLGRRMHVTHAVPACSSLEEQLPSGTGQLLLPLPIPRSRASFPQGPKRSVDAAVVGPASPRCRSNLGAPFYLQGVSLGDQAGARASGLGFFEVGGGATRVTRLWTGQGSGRGIRRRAQPRVISHRFCPVRCTPVLNVFPAVYACAIFCAMRCLVAATSP

SEQ ID NO: 960768 - protein, 189 aa, Homo sapiens
RIWPSPRGLLQRDTVLYLACWRPATGADRWNPDGHVTMKRCSFVLSLGTTYPSLPSPGYPVGGPQANPLPHLSAQPPIPLVGPVTHRHRAYSRGPRPTEQGTMPHGRIPAHKSDAERPRESPHKEGENNAAAGELSHNAQQRGANQATPTRRTHTKHPTAARGARAPNKGSPRKNGPQKEGGASTAQRR

SEQ ID NO: 960769 - protein, 116 aa, Homo sapiens
PLTLRRVEHDEAQEGDQWMCLAPVSHEECCKDVLLSPTLRNGANAWVTVACCLRCEPLTMARFPLLAKAVSDVMHVLVHAAALWDALWQQLVPPNDPLDKGCAVLCFGDVNVMGPQ

SEQ ID NO: 960770 - protein, 256 aa, Homo sapiens
RGLCVVRLGILRTSGRVQCSRVLRSCGWEPLFWVSLGGCQMLQCHTDYVPSCLLFPCKMAVMTACVHAGGCALCGPLGEPRGTGRTCCVGIPAVRVSVHVGIAVRPGWVGMCLVVNCGCPVGARDGPGGEASCGAGAKCALACGISWERWGFRTRSTQKDMEAPPPMWGVQRGDPLRRRFQQGFPPLVPRRQGKIHLKSPSDITSTAVGPITLKRRQHFDRERQFQMLENVTLYPVGGDGPPNRSVERGGEIDHGY

SEQ ID NO: 960771 - protein, 160 aa, Homo sapiens
PAWPWDSDPRLPFPAPLAWPRASVSLAVFPLSLSGAQGLQCICALCHSNAFWCCWAAVLVILCALVSAASPSVLPWLPSQGNMLNLERCCLREFGLSANESSWLHWVCPQCPVSCPPWNGSGVPIGPITVGWLCAREVGLAGPWEEHTHCPPCWVALCAR

SEQ ID NO: 960772 - protein, 70 aa, Homo sapiens
GPASSVPLRRQVLMRDGNRGRLVVRGECAGPAREPLTFPGGDLRCETSGYPGLPEAHEDGCGPTAWGLEH

SEQ ID NO: 960773 - protein, 305 aa, Homo sapiens
APRTSSCYSRGALALTQTWAGSHSMSVFLHILCPWPGRVGAPLHRRGPNVGRPRQLRCGFGQADCLLKARRIGACWAPVDSSSEGPGGIGGPGETTGIVKGPRSRDYDRVWNLGEPLQLALTNKRKTREGRGYLTTIPMNTLLLRLHERVVGSGTGAASPITRRVRHTAGDMWTSPINSNCAYRRHLRISGPPWKNCSRTLCGAFIFEAPRGGARCNNSLATVSIQEDVKPRKRRRQTALARLAAYGPPNMNEGGRRARDSSGGKRPINRWGNFGHRDCDCIERDRAHPGQEIYPFGEATWAETV

SEQ ID NO: 960774 - protein, 208 aa, Homo sapiens
LPPVSPALPGRAPTSPDWWPWGLIWAGCAGASPHPRAPSLHPVPWDLTLGGVKKKTFTPNIIMSGRSMEDAQWKQCNLSRKDEAVKVDRDLTTERGMDGLARPSMNVIQSHSIFEHGPMPKMIEEKMGTGIRPVGCVRLGTFSYHQAFKEREERDQTKKLNQILRYAGRSDDFLMTPGLEERTLENIACCSLPAGITQGWRFKGKNND

SEQ ID NO: 960775 - protein, 234 aa, Homo sapiens
TSTVDAHGTACLDMMCSIRLLQCSRLSRRGLLWARFLLSGVAGSIRSWRGVGDQGRCHLLYRSMRGEPGIPGPLRRPWSSGGSLRCSGPLCTCRTSPMSPVRVAIVVGTMHHMWSAASGQSLVGPMCVGPARVVPVGWPLVGSGGSRSDCPVGGPDWAASRQVLGGARGTRCPELSHKGSPGGASWRCVSSPRDPLVDMGGPCAAGENPWEQEGAFQALGGPPGGVSLVARGVK

SEQ ID NO: 960776 - protein, 101 aa, Homo sapiens
NYGRYEAGFRIQEQVEKSAYEFAETESMLKIAELSVQDRMYRDMYDLLFLPPSFPYGGMENPCLTLCNSVLYWQATRVNSSNVDCNMIISHILDRQSHVTN

SEQ ID NO: 960777 - protein, 156 aa, Homo sapiens
MLKRDSGDEMRCRLSTSWLVLRHHCSKGSRATQVAPAASAPTPALNRYELGIPIDTAKGLCTLMYYRSRSMTRGGEPSVVLLAGPWVACSLVPWSGWNRDSPWEYLAEFGVPEYQREGNASFPSLGLLDTWSLGASLAPVGNPLGGRSQRLPHGIR

SEQ ID NO: 960778 - protein, 112 aa, Homo sapiens
GYRRLKWKRFGGRGPDSGRGAPAPGQFYRIPPTPDPFMVPASALYRGPITRTQNPSGDRNLSSSAKVPRAELVIAADMLELLRPPWLVPATSLALCEFNNMSHGWVCASGKI

SEQ ID NO: 960779 - protein, 39 aa, Homo sapiens
VFLGGGGEAPEPGLFLALALAPEKAVRSLLPPQKGGAPG

SEQ ID NO: 960780 - protein, 104 aa, Homo sapiens
SSGQMTLNGNGFPWGLTGRGFPQPPRWSVSLEVECSVRKWGPINIYSPRDVGSPPRNSSYKWSPEEVSSWHKGTRVRALVLEPMWCDQSLSSQERCDIFSHRGV

SEQ ID NO: 960781 - protein, 126 aa, Homo sapiens
MEMKKKEKNRERSKERRKKTKRKDNNKKQKPIEQKTNKNKKKRKSRKYKKKHNKQRTKRKRSNTRTHGTKRTHKKTKRTRTDGEIKTHQKKEEKDKTKENEGKQREKKENTQHKKEKKRTTTEQKK

SEQ ID NO: 960782 - protein, 74 aa, Homo sapiens
LVTRVAPCAAMVGLTVRSPDEPLPVVRIQWLYMLAVVNMLAEHAVLLNLPDVPGAGSDPVTCCLVSVLLCWPGC

SEQ ID NO: 960783 - protein, 96 aa, Homo sapiens
MYAVPRKVTEYQTATVNLSPCQVTHQKAHKTTCFRKGLTVAIQVANSRLAYGNDRTWQRHLKIHTGDKAHKCDVCGMCFTRARQAETHMRCHRGVK

SEQ ID NO: 960784 - protein, 252 aa, Homo sapiens
MLGKNQQGSCQVQSMHRPRPKGGGMCWGRGWFQVHPTAWSSGISLVARRGCGGFSLSVGFSSSSRIGVVQESSCLACVGGQRTWVEWGGVEAAHSASTRGPWSCLQETISDMWSQEWKKPQWVSRIVILSVIRVGHLLTRGTFYKGFHILPRSGLVTLLAGWVHRQSTRVKADAVGPSGTMDGSNQPSSSHRQKHGPAVTSWVSNRDAVTRMDGGLNSRGNSTTHRGDDALWAGVRQGAERTQRVGDQWRQK

SEQ ID NO: 960785 - protein, 78 aa, Homo sapiens
VGGGTTPKKFFFNPPARGGQINPPGGGGKKMILVSRRRTKQASVEENGNGDAGGIEREGANEVLVVCIPPTSFEHIIN

SEQ ID NO: 960786 - protein, 66 aa, Homo sapiens
SVGARGAAGLPGLLRALGSAVQLLLALGSSRYCDTSVHVALSVECSRPFPDGLEMWLLVMLSVCIC

SEQ ID NO: 960787 - protein, 174 aa, Homo sapiens
RSALPEKEGEELGEGDAARWMDAACAGAFVGRWRWSVEDGYLSDVPVQSCINAAAGLLAAWTTSRMAFSKEKMEKTKVRTRENLDEDCASRPMENLEKTLATLEKRMNKLVHCCLCARRAGCEKHEWLSAGTMLRKSFTPDHVVYCALQGPAVYKVPPFTFHVKKIREGQCGSA

SEQ ID NO: 960788 - protein, 78 aa, Homo sapiens
MYTVQDPMTDSDVTVYLTESEPVLELVQHHLYLVPACLLRPPSAECVCAHMCCPHLLMWPTLCANVCDAMDECGVPMM

SEQ ID NO: 960789 - protein, 317 aa, Homo sapiens
LVSGDNYPPPNPGYPGGGPQPPCPPMLSTTTNTEGPLTQHATLTRTHNEYETRKVLHNERNTREQKDKAQRRTTEEKAEAKRKRDNKHTTKEQNKEEHETAQTRRKKRKGERKEKQEREQRTSRKNRGKRRNRRKRTASRRRRETTDNRDRKQQNQKAHRRKTSVERQPNERRREGRTSARDRTETDSRQRRQRQQKQHGAKAQKRNKAEGKPETGRRQRRQRKTSKHSDTAAAKTGEPQTRTSAPHRHKREQTRQAQRNERATDQRRAGKPDNNEEGRPPKQTKQQKSSRQERQTRSNSTKAAEARHTTTDRQQTR

SEQ ID NO: 960790 - protein, 103 aa, Homo sapiens
ACSDRRQPWRPAWNGMVLKPHFHNGLAAGAVATWFNHACALYMILQTSVPWQCQLLLPASAPAAPAVCGPILAHLLLLAPLCSGTYTECVLLPVPAVLHALVM

SEQ ID NO: 960791 - protein, 263 aa, Homo sapiens
CRPCSQPDGFLNLLSIKWPAPDPAPAAPAALPGHPCVLHADAGLHDCVPDVAVAALWLLHVDLMVTCCAPHELHCVAWAGPASPGLDAAAMVCSAVCLQGVLCLVCCSDYNDLEKYCHLPMNNECVGPACTWLACMASILAVPWSYGLFLDKEGVTNDCLTPPLQMCCHHQMSICAWPSPTPRILGSGSGIVADYVIPAQERTSFLLVTNLIVTPTSWQNCLCAENEGIPDGACSNDSDCHAGEAVQLKTEWMTGAAAERNFG

SEQ ID NO: 960792 - protein, 69 aa, Homo sapiens
SSSLDLRNNQWVSEDYTSAEGFLVPGDMPSYSKHRETRSVGSVEDWVLNLVGWVSDDPHDLEQQEKVCV

SEQ ID NO: 960793 - protein, 261 aa, Homo sapiens
GLSRAVKKFRSKPQLARYLGGSMDLSTFDFRTLAMMLMSNHEQGGLRMRVTLQIPPNPGQRCNARPDTLALPCAARRLSIFKQPCVTEDYLDHPRAIQVSYERTLHKCVAVISLLPRSSLARYECLSGLEAPSTSAECGLVVGPMDLLAMVALHAVVGTFGFASGLSTAASQAIWRSSPVTLGIHALRLGICSRLAVDDYTPGRMAQLHAAPVPWPSWLTDEGVREQEDAVAEVSVAAGGGSYGGHASARVELAYGEAAVK

SEQ ID NO: 960794 - protein, 84 aa, Homo sapiens
PPTPDPGTDAAYQLVMKGPGWSLKRGAGGHPVRTILRGAGHQTLTRVSWISDEDVMEYHECGSVMLTLSLPSQPKCAQMGESDT

SEQ ID NO: 960795 - protein, 147 aa, Homo sapiens
MWDSDEPIPAKELERGVAVGPTGLLCLLSDHVDKSDPGCCSGPISQCHQHHVLCGIDHLALDEIKKRGDPEFGYTPDVLTDTTCRTRSLPATYHLPPGCREAIEEVKNGGWTSVGSPSWLCGYVTHAEHCRHHRGWGSIGQAIASCV

SEQ ID NO: 960796 - protein, 178 aa, Homo sapiens
MVEARGYRPRQSMTGMYDAGVAGAARAALSAPQLLTSWLRVRFGTWNWIWLAAAACAASACGPSAALCFTAPAMPPVQSGMWTCLSPPGTLLLGWSVPGSLHTTCDCCCAAAVTVSVPWRSCLCIWACVITEVDAGTQLLGHQRAYVVWCMAVGISYISVYDHQGIFKRNNSRLMDEI

SEQ ID NO: 960797 - protein, 136 aa, Homo sapiens
RNGFQRCRQREDPRTRPGSAWQIAEAAGRPGGHVAVTSGPGRCYGVDSCTLEGVAPHGRDTMLAVGLLGHQWIILPLVGVTASWVERPSGRHLALETRNVARVYQLARLVLWLFWDRYMTGPPAELEGRALYLLRV

SEQ ID NO: 960798 - protein, 309 aa, Homo sapiens
MYSLCGQSALRKGLSAPFAKLSHNNCHALESPAANSFFGRRLHHQLVAEARQAAVCGVLLVVCVLAVCAGYYCPLAVVSTCLPCLPDAALTVAVHELAVATFPTACVLCITLLIECMLSAWCSCVCWVVLWGVLVSLVAALCYCGPRPDRPVGYELLPLVLPVLCCCSNLWGAWPCSPGCMPPGVLLVSILPALSQPPVLWPDAGPRAKEAEPIDFADAPPTAGLRRKRRGGSAGVDEEGRHAFDLGAGRGASPPAPSREQQSLSRSKGSLWAFPKGENGGRNWRMAKSGRDNACPYMNDKPWAEKGQA

SEQ ID NO: 960799 - protein, 129 aa, Homo sapiens
  misc_feature (15)..(15): Xaa can be any naturally occurring amino acid
  misc_feature (66)..(66): Xaa can be any naturally occurring amino acid
MSDHTSQIGPVHGGXPSAAPAVCVRASQLGMALQDGPSELSSVPCPEHVIQLRALCLILLKRVQEXKGSHRKKDTPPSIDTSLSAKSGVPEENSSTRGYWFGTFIGVSHAGLCTKGACVPSLAIGDYSH

SEQ ID NO: 960800 - protein, 227 aa, Homo sapiens
MRPPNTPPPVMLEEIITPVYCTGGVSPMCMKQLWPCGAVSLCACHENAINVPECQDYEHAAVCAMPAEWLTLFLDDVPSPRVPQSLGLQGPECTQYHSKDLMSINVVNAVPLGTCLSNPQYIVGMELPAQTSSHVEHWWDCWLLAGHRLPHSQTTPSCTRSGSARHELSRIGYAGNLPFPAVATLGSGWTWSWMTAALQDGSYCRASARQESGRPLRGFQEWRKAVG

SEQ ID NO: 960801 - protein, 281 aa, Homo sapiens
SDEERAICSFANIHNNVMLWRAPRELFFGRLAHQLVAECEAGWRCVVAACGGCAVLCVLCYYLPTCCVSLPCLPCLPDLATTVCLHDACVCSFPTAWAVQCCRLMCSCLPVCMLCWRVVLWGVLCVPVCAGTVLLCALLLHYDSCCAYGLLAPGVLMPCAVQLAMQTLWVLVPCFPRCMPPVVLLGFESPCPALPPGSVPMLALEWMLEPSILPAAPHCLCFACKQAGVLDRATRRAHSVVPRAGGVSSSPAPFPEMQQSLAGRMIPWAIPQVETQQLAHG

SEQ ID NO: 960802 - protein, 80 aa, Homo sapiens
GDEICMAAGMRASLLTGVSLATVNGQPNVSSGLCGTAVSGLCLQDTMNATASLGTCDDNAHVKCNIGTPLTCPCVTAPVL

SEQ ID NO: 960803 - protein, 218 aa, Homo sapiens
DEGGSGRFWAPDAGARCTCPSPAAVAGAVDICRCERELELHLLSVTLLDGLLVMLSGAHAMLAAVRCLLAMDAVWPRELGSSLVLRAGPCGRMAVTCMVLCAVPESVLLRGGAIVVPMKLLCCPDGLKVVNDWSWPGDGPVLGWLPLLPCARAYVSPRAPFYLASVLLLSCVARQLELGCRALRCLLDCCWPGVLLVAGAGMDSWAMGPWMAEAGATG

SEQ ID NO: 960804 - protein, 243 aa, Homo sapiens
MAAVDLEKLRASGAGKAIGVLTSGWLTRKAMNAAVLGCDAHGHLCWCAKVFLIYEVLMSVPLWSVSVMNINACANCAELSPTYIHAVCWHYHLAALCCNGLYHQWRWLPWQRAYNLAKHGITNLCVMAGDVQPYMCANIFLQRCGAACWSELVAGRKDLRDYMPWTYSHLNILLGLVGSIDNDFCGTDMTHRCTDSALHRIMEVIDAIITTAQSHQRTFVLEVMGRLRYLRWICLAHGGGVIP

SEQ ID NO: 960805 - protein, 215 aa, Homo sapiens
MWPWNIGRGVPGWLSCRYPALVCLASPLTFQRTRTPQRTLQNVPGPAAVCLHATGDPGSPSSFPSVVEQTGSAASAAYDIYSRLLLGAHRVRQWARYDDSVSQPCYRTAPLPAIQSNKKPIHMYINSPGGVVTLGLAIYDTMQYIPQTDLATWCVVPGPTAMGSLHSLPDGTPGHAPTRSPNSRIMIHQPSGGARGQATDIAIQAEEIMRLRSAL

SEQ ID NO: 960806 - protein, 32 aa, Homo sapiens
MTAGTLVAEHQLSAQTTESLTHICLKSFNLTY

SEQ ID NO: 960807 - protein, 165 aa, Homo sapiens
MCLSDVARALCFAWDTVASRCLCLRGFLAVNLNACVPSDLVGCLVEPETGVPPAWWLILGLGHFGCCSWCLLACLFSMHSELTELWARLGNGRPGRPLQKKREERPCPTTKAGGGDGLGLGPVAWAWAAPTERPWGIGWKKIYREGEGNKKRKQGTGKDNLAEKV

SEQ ID NO: 960808 - protein, 172 aa, Homo sapiens
MWEAGLSPPTMIHQAGVEVHAVHATDGPVSSKCPCCQDGTYSKTIPSHTYYYIMRGTQGRGAPMHNDMTSHVNFRDPFLVHILPRQMDNIRLTLHKKHMGGPTLETPQFTGIHWQFPNESDAKRVIPLALFGNHHNDPCCGKPVAGNTTSDGLLPDKKGPPRINTPTAHQEP

SEQ ID NO: 960809 - protein, 97 aa, Homo sapiens
MPELGLTSEYLEGSFTCRILAVMDAGWSVTTDDLLPVPCSGDSVSPAARGRMCSGSPYWKGLRQGSMGSYEQLWAGRCGCLVDLTVLRKYGTRGRKD

SEQ ID NO: 960810 - protein, 120 aa, Homo sapiens
RALLRRFRPAAVSLFSVLVSGDSGDLMQRIQSVYPSSQCKLLLCAAMHVDWCQCSWVSSWTTRPSSRAVVGAGVSSCKELDCHCLTSSFPHMILCQNCLPQTPGMCACVLMPGTMWLCCG

SEQ ID NO: 960811 - protein, 133 aa, Homo sapiens
MDICGDRDVALHNRELVCWIQSSYESPMKLPCFSVDCVTDQYGQTESSGPDDFQCTSTCSGNKAENGQVSKEQGPSTKGMGAAPAETEMWSGNHRHEGLETQGREFDTAVQTDIETPNQLTERSELQPTNTNH

SEQ ID NO: 960812 - protein, 219 aa, Homo sapiens
AHACGRGACVCASARVSWSFCHHACTVHRQHTYTCPAPPLPDGFLSWSSPSSWQQATGKPPQYIADATLVPDQLMAFGGSSEPVRASCQCCTASGKIWRRAEPHPTASCLCGLLAERPAHRVRTRVYITLLRSLNAANVGWNQSPPSPKEPTRDPSSARALAPARVNRRAHACASRARSHPEASGVREIHKTGCTTTYHNHDLPSTEENNCDGGLKDDR

SEQ ID NO: 960813 - protein, 173 aa, Homo sapiens
GDLAPGVQMRSLLESDSAPCFQCPREPRLWGAGGPLLPIDYLHPELSCAVLVCSRRQCWHILRSRKCDRTSYVLAVGSWCMACLFVEFRYVLYVSTNPGPGMPLLLISCLLTSFECGSGPVRVRGLPLLLLGDLKSQESLATFSHKTLFTCGCETPGNYIGMGEAQAPVVTET

SEQ ID NO: 960814 - protein, 138 aa, Homo sapiens
  misc_feature (52)..(52): Xaa can be any naturally occurring amino acid
QFLEAPSGTSGTAAATVAPAGWVEEDLGQAIYNCRFCYSAIFCPKRNTVHYXDFLVCYFQYTKWLVGFYGYLDVGSQRIRVKLLTWVVALRASCGTWHVPDLAAAFNYTRTRGMSYTLAIRGLVPPLRVETPHTTSRT

SEQ ID NO: 960815 - protein, 236 aa, Homo sapiens
RSLQCLLLRRPPKLVGRDGAWRGPVKDAPILDAGAAASTMLHVLSCCACGFLPDLDVMLMLWCALDVCASVVLVPLPCSWCCVAVFSVLCACLDVSELGPCVAAGVRLWAGDFWGTVVLTFTKKAPQHVPTTLTTHSSWLLSPPQEHGVGLSRVPLRGVSEASFLTYQSSPLVSWVTLPVGPFRWFGAVCRGLERPGGARPQGPHIALQEATASTCGSRALNYDFAAYRSTVPRGD

SEQ ID NO: 960816 - protein, 46 aa, Homo sapiens
MRLYELGGPRCCSTQGYSGVPGGSFKIGIRRSTCGLGREPTFTTRV

SEQ ID NO: 960817 - protein, 110 aa, Homo sapiens
LQAPFPAVARDPCMASFPLMCDESHWHMCAVSFPMAWWPLWCAMCPGPGPTLNPSDRVLCQCPGPLSNPRLGWSPSDQVLCPTQGAGGLLGAGPDPRGGRSHGALDLDLT

SEQ ID NO: 960818 - protein, 178 aa, Homo sapiens
PGGPPFFFPTKKNPGLKPIFKKYPARGEDKKSCAPPPPPPPPPIFFVSSSLARREYHLLFVVAPPSLQKTSSEQVGCVLPPPCESKGVIKQSPARVRVRVPPEMVSTHTPPESWFSEKHTPLITPERERGRRARSPPHPLMMHVCGGSLYIHPPELVRVKERVTSNVTGGVLNKDRES

SEQ ID NO: 960819 - protein, 165 aa, Homo sapiens
QQQHDFTLTQTADGRSSFDWLTGSSTDPLVDHTSPSSDSLLFAHKRSERLQRAPLKSVGPDFGKKRLGLPGDEVDNKVKGAAGRTDLLRLRRRFMRDQEKLSLMYARKGVAEQKREKEIKSELKMKQDAQVVLYRSYRHGDLPDIQIKHSSLITPLQAVAQRDPI

SEQ ID NO: 960820 - protein, 196 aa, Homo sapiens
  misc_feature (67)..(68): Xaa can be any naturally occurring amino acid
MNPEYDYLFKAAFDWRLRRGLVMPAPAVGWMTSYTDERTIERPIGVRLRTSPTAIAGSGMATETTRXXVESRGTTGAAQGDGFQRTIDYAMRYVTGEGPQWHIIYGGNGDCTISVNHGEVPSGTSDERQLELTGDDCTCILAMAGCTPVEVKAIRVRGAKHTYANRLTIADDTDELGPKHPTSLERNGYGYIVVLG

SEQ ID NO: 960821 - protein, 263 aa, Homo sapiens
IAERSAGAGPRERSAGEQPEADTASRPALPQSSRAPLARATAPLRATQDYSRLAPGAEKARWAPVAAAPAPPPPCCSCSLVASAQPLSPALRLPEPSPPAAPMRCGWVMGTAALAFLAPKECSVRHHAVRAVLCWLDGVSAGWVHDSCPCDHAAAPTGQFSVLCPLPMALSPGLACTNAFLCTACAPLLTPLRQANRLPIKVLKMLTARTGHILHPEYLQPLPSTPVSPIELDAKKSPLALLANMFAIGKAGPLALLDGHHFT

SEQ ID NO: 960822 - protein, 110 aa, Homo sapiens
LPQPSPQEPPQSQAPHPALPAWDHQWQPQQCARMPLPHQLPPNAPVVPSPVLQSPSEGLRDGGSAQGCPLTSHWHGAEAFHFTPDPEQGPRHCSGASASLGCLRGLASPY

SEQ ID NO: 960823 - protein, 306 aa, Homo sapiens
  misc_feature (26)..(26): Xaa can be any naturally occurring amino acid
MKARCPRVGVDNPKGGSHTSSSEKKXPVVVVTINPNTVLQTTCCHCCKTSSSILCCENQHPFLPRGGRSCLPYIKTEGNIVVGGPLSTKCCVGNIVWFLQGHFVGTPPPNFTNVLFVFPPNDYSPKEVPETPVGENIIFTPVSKEKVQLCGREIPPKSSVDKKATNGIHVFVALESRGPPYWEEHPFPGVSHCGRVHKDNLIVRRADKIRCVSLVEDQRWSKRVIFKGPQEELFIIPPAIGSREQNPGKTFVCTPSVVPSDGYGWSTILCDATCEHIHGRSDSTYVIIPIDDEDSTRRRSDRLHVP

SEQ ID NO: 960824 - protein, 139 aa, Homo sapiens
MPERGLWRADTATSPRLLVEYHVRGVAHCAREGVLEPPYTNRGRGGENRRSHGVSLLVNGVVHPEGAPDQDTPQVLGKVGNGVSLRGAHRHVKRAYNKRGARVYKAPERGRVYNPTADLENPTEKSYTLRNFVAKPHVT

SEQ ID NO: 960825 - protein, 131 aa, Homo sapiens
MPHIPRSIPQGQRPYNPVYPAVLSYNCGKPVQALLSSHQVSPVRVRLNRISISWQATVLMHLIRKRHPSSITIDLPSTTYQSSQFVIATDICLESRCRPNPSLRLHDCLVSLYLRDRLMTHQSHAYHIVNP

SEQ ID NO: 960826 - protein, 575 aa, Homo sapiens
IFNFRGAHSLLENFFFLWKGRGLLIMCSPRTIEGAGAIFSRGPALYRTIQPYKPPGPQAISSVPSALGEVTVGIITGVPRPHPRRVVSVPQYTFSISRASCSSVFQCGLFSSPYHKKSSILTLSLECGGLRSPCVTPSSLCVSRALCESVLCVCLSPAVIDTESVCARCVLSLTLFSVATSAILEGLSRLSYEPECFSLYIFYLRSRALLAPERERCGAWGQFSQCVPRVTPPPLYEAPEGVVREPLRCPPLGEFPPEESTLFSRRNLGGETLCLGGVCTKTPAGSPESLSFLRGVSSWPEYNTLGGGGGTTQNPRGGDKTPSLVGETVSDAVNRCVPPRVGAPPYNRRGGAHPGVSYNASCETKKTLVVHDTTCLAQPTDTFWGWLRHQTTTHNEGAPYIRLSPQGGRPRKSFLIEGKTPQSLFPPEEGNLPFNTSGRQPPKLGDGRHDWEAPLYTKEREKSPAGKGGGEPTITEERTSGKSRPRVYNTHLRGDHMSLTRGGPRNKSPPPKGEPLQKRAPGGTTSTTPGEGHSPTRGLYIDRDPAGYSEAHRKEHHGHILVDRRQHSGVILHTR

SEQ ID NO: 960827 - protein, 145 aa, Homo sapiens
GLGTKILLKGFFRKATSKSPKYRCQGKPVYVRGGTWGGDMWQGALCGFPPLLVFREMCGVWVGRYLSHSCGVLHQGASGCAQGEGDFFIGRHISLPRVGVSQGDKHVDFLTLVDAPQDNTLCVLEAQTRVWAHTRHVCLKASREV

SEQ ID NO: 960828 - protein, 125 aa, Homo sapiens
LPKKKTVGNRTPTRYSIPQQRPTLASVSGLSWGNGAARIHLDGGVAGFGGQNNRRWSSKWLRGSSIPGSGLTKSEGGVLRFLVFILAFILKGPGDLIKAMVVYLNREVGWGSGYHLHLKEEQIDF

SEQ ID NO: 960829 - protein, 103 aa, Homo sapiens
MSTYQSSLSYRHYKRERSNTAPSHNSNLFHTTFLILSLRNLLRAGPSRLLIRNHCRRARTNTRTKAGYIPAKPAIAKVVSTSSHIVGCYTNALIMPINLGHTH

SEQ ID NO: 960830 - protein, 233 aa, Homo sapiens
HPAPSAWRFSQRGSGWAPSSSQTCVRPAALGSRLRPDGPVWMGSGAVSALGVVLLLPCGSWPLTLLPSRPQPQGRRQPWLPSLEWHGLEAPLPQGLAAGCVATVVQPCRALYMILQTVMCPGNANGCCLHTPLPPLRRVPSWPICAAAPRFGTTLNGALPAAASAWMELRVCRHSQEGGPDHRHFCVILRRRNKSTESLQTNLCSWLKEYLLQTHPLPRKPSAPKKETVLLKN

SEQ ID NO: 960831 - protein, 89 aa, Homo sapiens
MSTLVAHTVLTPIHSHQRWLGALSFDPSNLAFGLMHLTPVQDTPSIGALDSLEPMSESRELLASLRGSLCIPCPLRKQQVSFPSTHPCM

SEQ ID NO: 960832 - protein, 72 aa, Homo sapiens
EECGLLDSLLMDPVLCWPVGEDAVPDVLCVLCWLCRVVRHVRDVSSDLRECGAEPLVVLCDVMPLLAVYPCV

SEQ ID NO: 960833 - protein, 211 aa, Homo sapiens
MARRPRNSSGLAFVLSACPAETQMPGACGSSSAPLTGVLQTHDWACTCDSGLRPLSTPAAAIHPHVLVPCDLAESFCDLCLVHELMASFCSSLHSGPPGQCDCLLCVSMKLSISDWVWDDLNKSSRHPADAVTTVRSCFHMDVHAAVHMLAILVAPSELVGWASTSVEIKMTSPVYVHRMMVGIGTSDVDLDKYLPQFCSLLCRDEDSWGL

SEQ ID NO: 960834 - protein, 200 aa, Homo sapiens
  misc_feature (117)..(117): Xaa can be any naturally occurring amino acid
QPLPSSASSPADWASAEMWAAGQDGHSGSWHSNCMPMTHDIGVNANMGLDRPWRACRTVILRCGSCCRGSKDSACVVCLELIDRQMIAIGWTTECGWHEDLMHDLLPMQSRVAVCGXTRIWTQLCIPGRHDWSAVHIVHEADYYQWYPKTNLAVYTSPYCNLTDRIMELDLPDGGHLTHGYMSDVKRISGTIHLLRVYAL

SEQ ID NO: 960835 - protein, 71 aa, Homo sapiens
RCGGDCATSLAGGCAAEPRPWPWPSLCLPVLLHPLIACCCGAVMPCFGLVTDVLNVYSLCAMMLCSCDVPV

SEQ ID NO: 960836 - protein, 112 aa, Homo sapiens
MCTSGNVCLKVVPEKVHALTDAAWCNKHAKIVPVCLIIVRSVGETTSPNMPLSCSYNSAPVMRAATIFCVLVAIAPLTRGEQPTLCLRYRLVRVYKHSGTRANSGCHTSALG

SEQ ID NO: 960837 - protein, 67 aa, Homo sapiens
ILTPKYVLKMEHVSTSLVWSQVAAALRHYCLAKQKPDCLLAMMALSSFLQMVTIHLSLGWVVVRGLA

SEQ ID NO: 960838 - protein, 121 aa, Homo sapiens
MALSLLLLAWARGPRWVRSCFTGRARPLSGSLCLVIERAASPAAAGSTVLLPLDLEAGYVGCPLIDPGPGLCALPCLESVSSRFYGLRGAGSTNVLWFLPCLHGLLSGALQAWAIAVHHLA

SEQ ID NO: 960839 - protein, 179 aa, Homo sapiens
FKMKLKHLLPSHWLAAMSSGRGAMNADRSYLSTEKRSGHMKLLLTLWVKNGRVMWSESWGGNDRNRGCPMNLRVSLIHGRVPHWLLRYRVGFLLTRPRRTGEGTQEISAVAALSFARHARSERSATLVIVTKEGREGYFLGTGLILQCLAERGPQKSYDRIRMTFQVSLEEDECPPDML

SEQ ID NO: 960840 - protein, 89 aa, Homo sapiens
  misc_feature (71)..(71): Xaa can be any naturally occurring amino acid
GYRELKWKRFGGRGPNLGGGVSWPQESLTCIPSTPDSFRDSVAVCTLHDVSNHCWTQNPMVCPGTSVLVRXMFRGLEWVDVPADMLGLL

SEQ ID NO: 960841 - protein, 227 aa, Homo sapiens
APGNFLPRSAPPALRLPSPRPGMAQMGGTPVLVACPVTDVQLCWTVACDVNGSDVMGTWLCSDVGALVCVDCVVPWMQMWVCGAQTLMHELPCDGPGHLSTLLACLENNFCLDLNGNDVLVWNELIALLHQRLRTVGMTLNSENMVSMSHPGFLALKGNQGEIHVQCLNVTMCFQMDNGFPDNGNHVLCPAHLRAFSAGQTWVPLVLMASELFQFCVWMDLGPPGNV

SEQ ID NO: 960842 - protein, 72 aa, Homo sapiens
LAGLPGRAELGLPVRMTWGAERSAAAFVAAELVCLSCALHPGPRPPVAPSGCQIRLRGPALRRSSLDGWWFS

SEQ ID NO: 960843 - protein, 95 aa, Homo sapiens
KNRSGALYSWTVGLPEEVTIAEAYQMLKKQGIVKSDPKLPDDTTFPFLLHGQPERIVIFEDEEKSSDAGPPAEKRAPIPKTSAQPISSFKEMVQE

SEQ ID NO: 960844 - protein, 158 aa, Homo sapiens
NLRWHPNAYRTKTTSAIYNYAKAPTYVGPYGLLQPFADAIYTRSPKSPYNPATSTITLYITCPVPIATHHLLFYYEPHTYPIPKPTVTTTEAKAYLYNIIDHLVALARTLIQVRNQNTRGVKRIEKLQKHTIANKHEDEGEHNDGKEQTHKQRNHTLV

SEQ ID NO: 960845 - protein, 233 aa, Homo sapiens
TLSRLGNQTRVLLEEQCSAPAELSSEHCHHGLLPVMSTVAVQRLCVMCPRHGPVQMLLNTHCQCSHSSLSVRVHHFPARPRTASDHLVLECCDDLMSSGEAAGHDPPCAPCVCCGDTYSMVSYSDTVFIHSACHVHLHHLSCSVPVNTLDLEWNLASAVHGQYQLPSQMCPVDDVMIHPPWVCVLRLPCLRAVATSDSRVPHRGGSSSLGLPRDVGGRRTSTPVCMPAALPCS

SEQ ID NO: 960846 - protein, 154 aa, Homo sapiens
MLSGRSGELTKLCRVDSCDLIDGHSRHGVSRRSSERACHDAWLRIEKAVCSSMLTEWARLLEAACVRNGPQYWDLEKAWMGFMSEAERVSELHLEVKASLMNDDFEEDQDTWQNEKPFTSKMMGGLQGDQGSLRTAPERHRKTWGKKRDRGRSS

SEQ ID NO: 960847 - protein, 248 aa, Homo sapiens
HRPVLIYNEHRGLRPESPFNPGGGGCMGAETAPLPSSLGKKSETPSHKKKKQGRNQEAARVAPGAPSSPGLCSGRFPFRGAPGSRKRRRGRDVPGPELRGPGGRSGSPAIARGGRFDLRAIPAKGPQRRRQAAALENPQKNAGRAETRSTPARERLPQRHAFPQPKATSLRVMQPQEVPGGEAQGLSNELFAPAVRTRGTAWREAAARTWFIWISLPLPSSAWGISAWVSPPSRRLSLRGFPFTFRTQ

SEQ ID NO: 960848 - protein, 249 aa, Homo sapiens
GVSFSVNSGKNERVPINKGHEPFLHDHVVPLTRGQGQEGAVDGELLVWGRPGTGETLGFKQGTKTEVGWAQGEKRALKGRPLTPLGGPQGWRGVTQGVRGERGTREACPRNSTLSRGVRWREKALTSRGVTLQAPTRVCPSQTNNRDSAGMCVALTVRARGHKKGECGNTCAPQRRRGGPHPNKRGEHLHLQGEVKAVWAQWDKSGATWENDQREVCSTQKISLYTVPEMYFPEAARQQPPQRDPYHQY

SEQ ID NO: 960849 - protein, 103 aa, Homo sapiens
KRDVHRSSLVVNAELRVTVAAVCATRRKLCECRAGELAVLLGNLKRGVGAKTLLLPDPFLFWPCLEVNKAKSTCSCPDLQPNGQDLGREQPGFALSSERMNLE

SEQ ID NO: 960850 - protein, 384 aa, Homo sapiens
MRRAVSARGGGWGGEKGGGRGLKRVKAGSPRRGEGLQLITPQETCGGVCRKLYKWDTSNREGVTRRKGVGVSERGEISERTLREESVVGSQRGISESALGPPTGGRGVYRGVGGHEGSSALVKKRGTVSPEEGRGGVSQPYINPENTLNEGLTREGANRGGELTRGGGGHKRVSTGGCTAPEKSPRGRVHTGTRGLRGHRGVQNEGGAGGGIPPPRKDAAHTPAVGVNKRRGGGELPHYAAGAKTLAPTRRVVRANTRRAPQERGGGAPQQRTSYKPLKGGGAATNRGGGEAPQRGGLPRTQTMLKQGLSPPTTKGGRKTRQERRRLPQQTRAGLHPSVTQAGGIPRGGGGESINTPPLCRGTGWATTAAGGEHTHKEGAFTTQ

SEQ ID NO: 960851 - protein, 216 aa, Homo sapiens
KDSGSVLTRPWLRLRPPALPLSHSVLPARAGRHLGQVFHFLRTSPRLRRGPRRWAWIFGGPWRLARGRRADGCAGGACAGADMAEWSWTYRMVELSPVGSEEPRCLSPGRRALARGPTAGRVAGSWYCEPRAEAQGGRLGQSVKWKEQARIGWKAGTDEARLHTVMNSERGGQRRVLQRELENVKARWPIGQVPRENGAMKKQSRKVIGHEKAFME

SEQ ID NO: 960852 - protein, 77 aa, Homo sapiens
MSVHHGSQKAGYENTGGTNERTHTTKETQTGAAKKERDDKKEEEPDAQTTVENERQKHHESPPKIQKTEKKGKPGKP

SEQ ID NO: 960853 - protein, 69 aa, Homo sapiens
RAILGSGGPPLGPPRGWLAGGRALWCHLALGQFPGGGLGAPYNLMSRRIYWGGFLQIWAKLLEQTKNMF

SEQ ID NO: 960854 - protein, 40 aa, Homo sapiens
PGAGSCGPVGTVGPFKSGAATGARPVSRGPSESLVFLARL

SEQ ID NO: 960855 - protein, 105 aa, Homo sapiens
  misc_feature (105)..(105): Xaa can be any naturally occurring amino acid
NKERIRQVRGWVGATLALCTSAAPPSRILLARDRQNCGTGNAGIPARRSWVSFLEPNVGAYPGAIGLAKNGLVVFIGVRGGGNLETGPLPTPVEGPLGLVFFPFX

SEQ ID NO: 960856 - protein, 217 aa, Homo sapiens
  misc_feature (178)..(178): Xaa can be any naturally occurring amino acid
CGGCAAAKEAAAVAEEEEWRQRRRGPVRGWLEVPLGLQTPPTTSTSGPGGGRAPLSLPGGGRPRLLQQRTEEGQTKSTKAGGHAESPELGCESRETCGAGQVGIRCLLLPSACRVSSSSSTDLISPELRHLRDDDSHQEQGPERSRGGETTDNPEGGTQEESDEQKRMPGYTSTGEKXTPTHHPLVVNAKEKCEDTQETAGKARREDKAESKKRAEK

SEQ ID NO: 960857 - protein, 127 aa, Homo sapiens
KKVCGPPNFNPRAPRGTPGVGPLGGPLSLCVFFFLSLEEPGGVGGRAPPLSYKKCGRNRPLPPPLVCGGHTHGGGAVCRPSLSLSHYSSLCVCVTPHTHSLSVWGCSLSSLAALSRDESLHNYISLS

SEQ ID NO: 960858 - protein, 54 aa, Homo sapiens
MWDRRSLAFYSDSFGGDGPGRTRGQGPQNRKLQKGGLGWVGGVGDGVGVCWCVR

SEQ ID NO: 960859 - protein, 150 aa, Homo sapiens
MYKVGSVIRECGFILLRCSLGFSISDEQTLRLFQDEELWTGEGSREWFELICKALFDTTNQLFTRFSDNNLLYCSQPIAPSSGLNVEFAGRLVGKCLYESSLGGAYKQLVRDSLQPLFPGQIIGLRMHYKYFETDDQNSTNLQLFILNND

SEQ ID NO: 960860 - protein, 241 aa, Homo sapiens
  misc_feature (130)..(130): Xaa can be any naturally occurring amino acid
  misc_feature (182)..(182): Xaa can be any naturally occurring amino acid
MGGSSFYPTIKWPPPVVGDLSHIKGTYSGGPQEGEYRSSLVSYIIRRRRLSPSIGGGGSLHERVCVCGLLKRGPPQIFSTLGGGEPPIFHERHHFKCRAAPYPLYRSCFPPPQWCGFRVSPPSGERRAVXSHFRSALMVVETTHPRGVCRHNISNPPVNIEAIFPSVLRPTTFSCVFLPPPXVSPRLLVVVSHQYQPWFLAARNKTLLPDKNRVRGLNFWGVAGEPSVVITYSCSGFNSCL

SEQ ID NO: 960861 - protein, 221 aa, Homo sapiens
ALREPALTSDSVALCLIEIATVAVDNTPSFPHARALDAHPKTPTHCRHTSEYHDTAQHIHAGAKQRRNKTQIAKEPEPILSHTHTPQTTHTPNTTNTITHSTLTPTAPSSLTPRTHTTTPPPKQTPPHTSQRTPDALRPRPPRHHNNNTRHDHTTRPHHRAPHTPPTSLCYTPTAASYTHATSHASTRIHKPTAPPHTHHRTTPDKTRQPPTPPNELQSSH

SEQ ID NO: 960862 - protein, 106 aa, Homo sapiens
MTQDTAAQGAFVKQENAEDDGKNGSGWRKTGMSSGQSQRPRRDKTAAKKNDKEAKQERAQTPDIERPPQGSRKNITHKMANSDTHQESDLENSGWSYEPWNKEGKA

SEQ ID NO: 960863 - protein, 275 aa, Homo sapiens
ARSRLVLIGRGERDSCIPELDAYRPVGLALDYEDVSELTASQREAAERAMRQRDLGELAGAWAACAVGSCMTVDEEDDGAALPAYAASLGGAGHWRTARRTMEMIESIENLEDLKRPLCARVVGALAGPRLDDPPTCFKNFLRTHVDKSLATTSSRSASATCAKMNRESLVVNYEDLAAREHCAGLLPALRHRRSCCEIFDEACPGGGTGHVPQYDRSQPHHVRSPPALVEELARWAVHLTSDRQWVCRCLGLPVSWRYWTGVAGLWANTGTFFR

SEQ ID NO: 960864 - protein, 103 aa, Homo sapiens
EHNKSGDGMRLAVDPSVASGGDLRRRAGGPGCLTLMCMPDPALLLLLLPFRLEPVCPHFCTGVLTTSAFVDRVLMRRSWWMCLVAWQLLFANFNQDNTVPSCW

SEQ ID NO: 960865 - protein, 104 aa, Homo sapiens
RLKNAFIFKMVGLTTCKVLEPVWESTRVFRVKTWTKGSVKFRASGLWSPPLQQPQFYRAFLQRVFVVTVVGESRLGIPSVVVTQNKAPNLWRKERGYPHVLSCI

SEQ ID NO: 960866 - protein, 167 aa, Homo sapiens
MSFMLIFGMEGECLPRGTGDVQHRRCPRNVVCLGLITKPGSNCSPAPVRVLYRIALVCQANGMEQELAVEADIDDGPLLPAAVCVGAMSAMKRLQTIQCPVYQACGACVVEIAKNIILEEVVKDCYHYMTKGMHKMGLNTYPPKLLAAYNDRIQKTHEDKRHHIHSI

SEQ ID NO: 960867 - protein, 231 aa, Homo sapiens
MPWALRGRLRLRGHQPIRPVIMTTNRTPSEVLKAAENKKKEAGGGGVWGPMGPKSAASGRGPDTTPTRQAKQLRKESQKDRKNPLTPSVGVVDKQQRRRSRPWRFRQKEEDAVEEDLINNFRVQGHTSMIRRQKGDHLVNEHSRSHIDRTRVQAANNNKIDRLWHRTSITATRQVWQQGRRGPEHVAKGPRTWHTNHEGNSGTCTALEALTHIPTTHRGLRHRHTSSAKTH

SEQ ID NO: 960868 - protein, 497 aa, Homo sapiens
  misc_feature (206)..(206): Xaa can be any naturally occurring amino acid
SPPPFFPLGGPGTPFSRGGACLPSPLVMCSPLVGTPPHIRVCVAPLFPIFYKLRACSPRAGRGVCGKESPSSQKRDETSPLCVCRLCLSLSLSRERVSPCVGAPRDTPPALWWSLSLERERVSLSLSLIYLSLARERASLATRVALCASLMMGENTHSLSQARWRERYHSSRCVSLPLSLHDECAALSLSRESRSRDGVCEMFSLXPRARARENTRAVSLYISARVVSPHPRAAVCLSLDKYVARRAHETREKHRLLWRRERSLSYRESACVERTHRGGLPPQRTGDNKKLSRGEPAVENTPCGSRNHNTRTLVQATQKRERRHPPWCFPPKRNIYNSRRGGKNKCQHTTRRGGERPLHNTTPQIKMCGPRTYEEEKSPHPSINEGEEEPTNFGSSKREERKTLCSSPFKKQTQQGAAHAGRSWLGTCGGASLRVWGAPPTTNIVGGPPRTVFTHTRALRRTIVWWLFACCPPSSCLCCWRHSCSKKRSRTLWGARP

SEQ ID NO: 960869 - protein, 280 aa, Homo sapiens
RLGRGRVLEDSCLLELQAPCAPWTTFSFAPSSAAVPATASAWTVACGAPSRKAPCHGAPHGLPAPIPALPLKLHPHWVPPQLPAAATGWRAGRPGWDPASPSCGGGSPGEGAASRSRRNAEPRHEQVSDSTGAHQAPPGAAAIHHHGIPNKQKQEDTGPDKQTQGINEHPEDNARHTGEANYQKSKTEKGKQKKNIQADTETLHMKTEALRNQNKTQDKTHTQNKRRQEIARTTQRKRRTSAQTRKNRTPARAMDMTKTEKQQEKAKRDRNKKQKQKHKQ

SEQ ID NO: 960870 - protein, 133 aa, Homo sapiens
MSRHSRLQSAGSEPVPRSCLLRRCAVGECLCAALMCVAGILAVCHGWFPCACHLPGAFGPVGLVVPWGNPWGFGPFWPWPKVSMWGQRGVYKPARCIVRFKAPSRETAIGTLRLVRALGVVAVAALLRSFCGT

SEQ ID NO: 960871 - protein, 281 aa, Homo sapiens
  misc_feature (84)..(84): Xaa can be any naturally occurring amino acid
WGGEAVMLRGELGLHEGDVVEAEQAESVENWYEGMLDRPGRGFFPLSYVDGCVVPPALRGDSRACPRSRPRPSTLAVVLTSGVXLAFHGCAHACEVLVSGRPAGATWAPALEVLPEQDPTLVVGGLIWVGGDACLHYARDSQRVTASHSATPWRQAVLPRIPQASRPQAWPTAGVQPHRGALRKHVMFLWGQDPNSVLTPTGGPGHCLTLESRRHITRIGIEGPPMRGGSEHRSLGIKITSQTGSRVNGAKDQKSRPKGTPAVKQALRTPSQTGQRAHRHP

SEQ ID NO: 960872 - protein, 248 aa, Homo sapiens
  misc_feature (16)..(16): Xaa can be any naturally occurring amino acid
TPVQRGGPCVWPPFVXCALVLGNRRVWAFIPPQGPRGGQKGGRTLIHPPVGFAPKPRGFVWDAGAPKDVFSTRPKVGGESGRTACGWEGNPHRTTCGPDAQGRAGAVGENISPRSGRPIWGGLCGVPQPPHRRRMLGAGEKTPCVCVWRPLCGRVVWPPCGTGVWGPDPQRAGEKLGRPPFSHPRGAPAVSRKTALRAPKKTEVGGPLRGENGGGATFITNGRGQPRTLGGGNLVAPPPRSFQNRQKK

SEQ ID NO: 960873 - protein, 139 aa, Homo sapiens
MPTQLIIPRNTGLCGTLQTSPINVPRENIDVKQSGFGDSHPCGCGWLGGKLEGFMRTKLEPLLLTRAPYIPKHVKLVVTPQNKEKHQYRGKPSQTHNILCTQTHCVSPELGRASQPVVWPQLWTERQKGGCSKSYTVAL

SEQ ID NO: 960874 - protein, 214 aa, Homo sapiens
MLLAWRPACACEYLYRKAREEAQRSAQESEGAAAALRWKKTCLIPTELRREALALQGSLEFDRLLEVKCVTSHVDDEYLMGRSLIDPNGYDHYLPETPVTRLKMFANVSWMLVFPVSRMRMNLRSTLNVGGTSCQSLAKANGLNRSCLVVSQSIGATPCGAHRQAPCPLVLLPTFTLCRVVLRLASQTGPHVGGQPTLPHGSLRLAGGLCSRPF

SEQ ID NO: 960875 - protein, 199 aa, Homo sapiens
PVDPAPEAAGGATCQSHALCPHSSALGWLMGLGAVEQGAALGEAQAAQEPTEFGEAQAWRAAGPEPCPVGRQLRPCEKLSTAAAGPGAKSPSLLRRWGQLAAPSAGSAEPTPTRNSHWPASTVRSPGSRPCLSLHTFSTPPRKLSVSPAPPWPAEKGAPTVQRRAEVAPQSAAKVEAQAEEVLRVSEGCEGCQCAVTSH

SEQ ID NO: 960876 - protein, 121 aa, Homo sapiens
VRKILPSILMNRCMQIFFTSVSCQDILKYAPSREQCLGVALSHRLRCAGCHGPSHGSPVHVIDRSPDERLADVLAQAVCFLHAILLWTAWCLLRLSGPSQRRQPAVTGLINACSAHSPINC

SEQ ID NO: 960877 - protein, 104 aa, Homo sapiens
MDTSLSVESGTEAMSSFGAGKTKEVSSVWLLGHHPDMVTIATGQVAGTTKEGKPLPPHVRIWDTSVTLKWPDHLSEDGCDVRFLIAGDQVENYHLILDGESRPG

SEQ ID NO: 960878 - protein, 186 aa, Homo sapiens
MLLILGLLCQHTNHIPMMDARVTERERHTKATTHHLVQKGLRIRDNPEFITVRQLSWSSTGVFLSLLYRLADRRPQYPTQASAGDNMATPNQGSSHTDYKITHRKIPNITYNAPNTDKHIAYGHVNGKLTPHLTPMEDVHATHRSAHHRHNNDKPDKPQHTYTFLTDNRAHLIITQLTTKLRGTPP

SEQ ID NO: 960879 - protein, 99 aa, Homo sapiens
ASSSLVLIGRGREVYCVPSRPGARYWALFPPSSAPRSQVRLLQGSPVAPAPGRAGPTRWRFMENFQKVEKIGEGTSGVCTSQKQVDGRGWRLEIAYPPG

SEQ ID NO: 960880 - protein, 125 aa, Homo sapiens
WPPYVQHLPSDIICHALLDPDNGNNGWKLCLDFPDDLASDNEEIQGSRVTSHNLLLLICVLVFVVLDMPGLHGMCCQSGCCVCPCGIGFVLLLQLIPSGVDCWLSNHIEHLCYHDLLTLQDKKPR

SEQ ID NO: 960881 - protein, 161 aa, Homo sapiens
NVNKQPLLLTQQPVKVVFYTDTRDTQEFETSLGSNTEGKKKPSFLGKVHGRPRSKAGPVMSPGCPANGWLRLACCMRSAAVTSLEEPRELCVLLCCEGDSEVTQWLGVSLAMDQAVLWGTWDRSNPWCETSRRTLSWDVAAAAYCGHAAYSTRRYLGKPGA

SEQ ID NO: 960882 - protein, 217 aa, Homo sapiens
  misc_feature (217)..(217): Xaa can be any naturally occurring amino acid
WSRYEAGLIGRGCRRLVWAVGCGLRPRCLPALHGCVALRLPWCSATLRRGVHGITRPWCCRDRLRSDEGVVGPGGACWPVPLLAAYLHIPPPQLSPALSLMEVFSAMFITYKGLRIFYQDSVGVGWKSRDIIGFYTVYPTSSYDWYKIMGSVLTYEVLHRGRLPLIYYEGYGLTVEQSLRASSQLFPSKFLKTSGQAIRLESAIFAGISEAPGTGRX

SEQ ID NO: 960883 - protein, 241 aa, Homo sapiens
KPCVASLTHRRDAHGRQVDLDTSNYFLKIIQTIWMIIRICLHGVEQTSVGSKQSAADSAVPFAGSAVVLMGKNTMMRKAQSEGSLEETNPVSGETAASYPGECGLSGSPKEDLTEIHGTCLLANEGASMLAGVLVPLPHVKSLCQHQEHWSRAREDLLFSRLEVITTKTRPGSTIEILSDVQLIETGDKVGASEARLLNMLKSPPSPWAVIQQVFNNGSFYTLEVVDITEATLVLAYGGVR

SEQ ID NO: 960884 - protein, 234 aa, Homo sapiens
AAWPFPVSPRGRQLPDDGCWRRTCPELSECLAASSAGLRAATQSYELRAAPLPMWMGMTSLKVDNLTYLHPPDTLRRVFEKYGRVGDVYIPRDRYTKESLRLRLLFAIHDNAATLSDCYGCHVTGCLCWTVPAMLRVQMCAATAAPPVNHTTCLPVWTCHTLQVRVGRLCYWTAWMPACASGWLSACEVESRHFAQPFPLSRSRSRYSRSKVSGPGTSFSISVDLHVQIRTTVQ

SEQ ID NO: 960885 - protein, 144 aa, Homo sapiens
MLVGARLPLNAEVDQVMRSHAVNKSKPLTCVSSSSRELSEENGLASHVSQNPAAPVQLNDYAVRIMYIDYASARMSSAVTADGASAKPVFTELIVRVQAVSLDLNNVCDKRDLEGSYSASGLVLHGRQQKCDCSPDMTLEITDV

SEQ ID NO: 960886 - protein, 67 aa, Homo sapiens
TFGYVRGPVVHDVDMPDIRLRHVCVLQQPVTRLTVQKIFSRQTLPENVRAAKAGEKTISVVLQLEKE

SEQ ID NO: 960887 - protein, 243 aa, Homo sapiens
TPVAEPPSTEPTQPDGPTTLGPLDLLPSEELLTDTSNSSSSTWGGRLGCPASRPLRPPPHHALSSMWALSGSSRLLFSDRRPFLQGFLQQCKCTDVTLSPWTWGLRVPPSAWLLTYSHPPSSNATVAPGSASWWCDDYSTLFRRVPQAWRRVWCDSEVLAQWHPLPGLLLQLPTVIGFLVSGPDHGAGRVSSEIRYRCCRGACEVAHWERLVRRLWDYVPLLEREFPRLGRGPGGGASSRAGS

SEQ ID NO: 960888 - protein, 253 aa, Homo sapiens
MSCWDRAQRNPLADVGRGGPGPGLLCAQTSGECCERLLVPAANEPWQCCTSGAMCLPLPPGVESCPSPPVAVGPGVLACFLPCPVLACSCISVRGELVWSMCVLCPACLDMPCSAVSLMPPDCVFTVPSPCSCWKADCWVQSCSGPSMEKFWDEFLVGVPDAKKDLLETIETQKKQLLQYQAQAKDVVRAYKSLLKEKEALEASIQGAVGIPRGQMWARRLSSFQDHLTDSVDDGCPLKRGLTGTHNWIWAVT

SEQ ID NO: 960889 - protein, 225 aa, Homo sapiens
KPNTQILFMHKYTSQPNNRSDLKPHNSRGQLVPVYFDSEGGKWCQGAGLTGLRHKKLPNKDASVAKETRGRDGLKRWKRMGREHFEGKAGGSLRERGAWPSNSVCAGVTMPECSPGPPVWFQTWAVPPEGRSLHRKEGVMWECTPGPGTLCMKRRPMFGSWLLHSTLHTMGPRVCPHRWGVLHRCPARTRLPDVRSETPYSSWASEVLACPLTIFGPMPLLQESP

SEQ ID NO: 960890 - protein, 83 aa, Homo sapiens
LSSRQHPRPDGRLFLVLCPGERSTPCLILPEDGALVADVYHVDPRCPSSFACLLSACGTHAVSVPPFMLAHLWCQAMLASEPL

SEQ ID NO: 960891 - protein, 156 aa, Homo sapiens
MQGWRVYHGGCSQLVYPELDSETAMYSCTTMDIGGEEVCLVTVPNILPDNHTKDQKAYKEGKATERLSAQNAFLGYWTAKMDPTASTLITRAWQQHWHGQNPNMDGHASIAPRTQRTPGLNSTAAGTQDGGWHRLHRRRQPDLLTTLQERPTGPNR

SEQ ID NO: 960892 - protein, 252 aa, Homo sapiens
VGTLIITSPEEVKYTCPIATQQARWPVQDVILVGLTAGAPTLTFQVCCDVGVMEQMVMDYWNAVMPHGTGMCVLGEIMWCAWCVPWTLNMGVSPVPCVPGRKCDAEIDMCCDVLQVCACFGCMLVMGCGVSCVEMCVSLMRCVLYTPWEPVVLLWGACSVCLLNALCMTKNICGVVHSEQVSQQRGTEVTMCVVSPKSQQGGQDAWISTHVCAPVYVSTGGRTPGLNVGLAMFGTMGQQHKMPGWVNQHRKL

SEQ ID NO: 960893 - protein, 74 aa, Homo sapiens
YKHKIRDPGASGQTSPSGEHVQERPEDLNLPNAEITRIIKEALPVTGVNISKGGPGAAISLLPPAVFVLYATSM

SEQ ID NO: 960894 - protein, 57 aa, Homo sapiens
MYGCDVWAGLWRLLRGHNQYAYDGKDYIALNEDLSSWTLADTAAQITQRKWEAAREA

SEQ ID NO: 960895 - protein, 272 aa, Homo sapiens
QQGDQEGVSTRKSVSELEKAMGGPLSYVFHLIFWEGRVVQAKLEEIPETYKGRSYKQQTLSHFYFTTETHFNTDGTRRDKRPTHTTKHTTKPTRQNRPDDTKTNQRQNTKPKEKPQERSNQAKASRQNKRQHRQRQYNEKQQGPRSQRPKDRAERAKSQAREEQQTKQQEQSKPNIRKKLKARDPQPRREEKQNRTKPRQKKRKARKKREEDARESEVQQEPEIGKMVKAGCQAEQWQGQGKKQSEPRGEGTKKQSPKKEQQGRAEEQTKVR

SEQ ID NO: 960896 - protein, 66 aa, Homo sapiens
MAEQIIRGDLQPDPGAKEKILDKPSTGGRTRGDIANIRMPQIWPSYYRGGQRASRKAYGQALAKLG

SEQ ID NO: 960897 - protein, 231 aa, Homo sapiens
YLSKVPLEAPGWVPASERPAGCHGCVKQHEEQVGPCAPASCTLCGPWLVAGAPGWAGWDAQEVRSDLTTTMLSKQVLVPGCELAKCWSASIWRTGQKCALKLLYDMPQWPWQDGRPSLAGFWLAPILSCILDVYENMHHGKLLLLIIMECMEGGELFSSDSGAVADQAFTEREAAEIMRGYWHCHPVSCTAITLPTEMSRPENLLYTSNGRKTQCLSSPILALLKENTQIA

SEQ ID NO: 960898 - protein, 33 aa, Homo sapiens
EQRNNTVNHLEQKPEVDDTQETTEAPNDSHETL

SEQ ID NO: 960899 - protein, 399 aa, Homo sapiens
  misc_feature (94)..(94): Xaa can be any naturally occurring amino acid
MPYSYALVSWPTWVGTRKVDNLGYNCLFANALVVLIYPSSPIAISTRGVCRQSSVVIICFWGFPWGLAAKMQPAKLCYVFPESVILTPNGCNPXCTSCYGRFCVVFMVMLSRGLLKPTRVDIANGNYPSRYLPFSVVSTGFGSPLLLNGPKTRPRRVRKRCFMCGYNAKLGASAGGCQPLGDMKAVSNPLALMNILGPLWGRFRPRKSTRHRNQRLTSRAWRNLCSRSESALRPLPWPPPCHAPVPIFHRASLHRAARATEEETVSAPVTFALRHLGGSGGTVWKGGTTATPAAEGGGFWNMKGDFGIHEYGTGVSMHSRGTLGVPEERDIQELRGTTGFLSTRGRGGQSNLREEMMTWRPSPYKGHGPDSEGAERGDRPNPRQSNLPRRLAIMPRYKS

SEQ ID NO: 960900 - protein, 330 aa, Homo sapiens
YQEFLPGARTPKTEEDGRGGSEEILVPAPRRWLCADAVVCEAGSVVLLCWGPGPARCSGTTAEACRDASADVLGALACGLLPASCNCCVYLLGAVLLCCALLSLLVLPHAMVLPICCDVLLACDVLSVGPYLACLAACATLATAESCSLPLQDGLLWLAVGRGRLRYCQPWGSALLGVLRLPFDGPGQPLPGAVCRLPAAPLDLTSPGLGPGLWASWVAGWVLGAWMRDCDINDDEFLHLPGHLRVVGPQQLHSETNERLFDEKYTCLSCSPTIRWDQALWEEQVLQKADEGRLARSHATLLVQAEALDETLSPPSPGTACWVVRTELPP

SEQ ID NO: 960901 - protein, 73 aa, Homo sapiens
LSRREQPPTEPGPQSASECGEDRSEIGVWCALSQGSLSDGGPSEVGAGHVTLCVVHVHALPAIPLCDASGVPD

SEQ ID NO: 960902 - protein, 104 aa, Homo sapiens
MANTLLMDRHLVGSELQRIYVSCTYDVSVMSLANNNARPGPLRVKKPGPAGRRISLEPLLCLCRPSVSPEVPSERLFNVPWPGVALLLRLVVPHSYRPAGAGGA

SEQ ID NO: 960903 - protein, 176 aa, Homo sapiens
VFFGDGEFGRVSFGVVCWCLGPGPAGSVLLVLWLAELRWCSAELACTRAVGTANAVLGRDALAMLCRVDLQANELACGDARHPCKLVGERPDSQGCTPGAVWSMYDNLRGLEEMEDTAAGPWRRSKPCPEGHLLRLFLLLLYLDDLAYEATLGPTSACHALTMHILGLKRYTQMAY

SEQ ID NO: 960904 - protein, 109 aa, Homo sapiens
WPQMLQPVVWTVPFNIMTVIKRMMWHETLIPTRIGLAAQEERVRKVCDLYPISSPKDSNFMLVTWSGSLEGSHTQHVSKELLDLSMQNVAGFVKSRFTGGRGKKLNIGV

SEQ ID NO: 960905 - protein, 107 aa, Homo sapiens
WEPRGGPITTVREKGARVRAAARNPIGSSSQHEVPERNREMSERENINGGECDQTRRDDPVTEKTNTSREQLQKSLAEPFYEKVRRSCLLNARSLDGSQVICRKCFG

SEQ ID NO: 960906 - protein, 65 aa, Homo sapiens
MLLEIDNSELRHMLESPESLRSKVDEAVSVLQAHQAKEAAQKQVNSATRCSILFIILTQGPWHDT

SEQ ID NO: 960907 - protein, 132 aa, Homo sapiens
MVKVGSCGVLCNCGLVRAIGACAYVVGCLLAMCVESMGPCVIVASWGFRVGCMSRLALLNGGCRYNGDGDHYGSMCVFDASYGTYGLDYLLDCKSSRTLRLRGSQSSSLLHLLEPSQISRLSQASLTLMGQD

SEQ ID NO: 960908 - protein, 140 aa, Homo sapiens
VFLCFFCLFIWAFLLSVSYFVFVLCLSFGVFDLPLFSCPSCICVFSIFSLLCPLSMLYADLRLLAVYWVPFPRLHFFMPWLCPSHQSVVVQQYRALTVPVLTQQVFDAKYLMAACDPRHGRYLSVAAVFRGRMSMKVGRM

SEQ ID NO: 960909 - protein, 127 aa, Homo sapiens
MQPKTLTPTQEDSNRTEHQTRHPLTHKRTNTQGNIQVKTRNMNIQNLKIIIKRQKRTKKHKQRQITEWTYTIKTKTGASQRIYGEEGIPKHIKQQHEIQRQSPHMHKTTRREKKVIIVRNRNIIHIE

SEQ ID NO: 960910 - protein, 146 aa, Homo sapiens
PLCDVCAVAQCPGSSTLLQQWAKPWAPVTPVELALLRPLVPQTTPCDRPVGVASDEFFLEQTNEEMWVKLCHARLHTKPVPVLPCRGGGACLSFLNPSFEDHQTLLSSGPRGGEQRQKECGEAERSWPCPPRSMRTRSPLRTVEGV

SEQ ID NO: 960911 - protein, 209 aa, Homo sapiens
MPPVEELDVMFSELVDELDLTDKHREAMFALPAEKKWQIYCSKKKDQEENNGSYNLCALQFYIDSAQFHGMPRHNSSDCALAARKKTAQTALQTTRAALKTRTRGQTPMRYIVTRFIDLDGLSCILNFLKTMDYETSELSNTYFSHWLYTHAFLNNSHRPRLTSWLILQSINCTLLSSLSTEQHLLRSVAVLDILGAAVPGSRGATRTV

SEQ ID NO: 960912 - protein, 192 aa, Homo sapiens
EEEGGSCCARTPFKQNSEREFLQQLTDQAPEKEVLPKMMLRTVQGVNAYLINTSKCTITHGNYNGTMLQELNIDMARIVHRKAGNFYVPAEPKFGVLSSESEVSTGCDAQRFERCCKLLLPSHKSSTGTFVEAQQWLRLTLLDGLVSSHIICMGVPQSEGQVYIELNLTSVALCANTQITGSRNLLRQRLTA

SEQ ID NO: 960913 - protein, 139 aa, Homo sapiens
  misc_feature (61)..(61): Xaa can be any naturally occurring amino acid
MLPETLSWDVLRAFSGMRPEARLETSGKLGRRSCAMTAVLHTAPAFDMDNISEAKAQCTWXVTFLAETMYVPGLGELRQNVAEKFPKQRGSGTLLDPAQRNLYRDVMLENSRNLGIHRLVQLHVKPKRQTLSGYISKRT

SEQ ID NO: 960914 - protein, 71 aa, Homo sapiens
MTTCPDWIIPRSSFGGLSGHPVGSPSGALGGSRGLKSEMGGVHKRHPRKIHIYDPEKKMVEINSCVVPKGG

SEQ ID NO: 960915 - protein, 200 aa, Homo sapiens
MCQWMMQLHVIYGELTCLSTSSEAMEWRAMNNILRARCDHLIKRTSSSSSVLDELSISTWNLAGQKLTVPLATTLTVARTTNQGLRPDENLNRMTPMEPPMGKVLGIVDPDNWTPACGNHAAGNKSHPSCQETLSWLEPGEAEGRYPWSGSLHKRPWMTTMNLRWNRYTSVPLGEIRTILSQVTLCEQGEQAEPTPGRYS

SEQ ID NO: 960916 - protein, 118 aa, Homo sapiens
LSAEPCMYPAVLGSEDVTPRPCARQSPGCLCCPVPMVLVSVQPSLAGSVLLLPVLPASVSPFGKAFDWCVCWTGFCWTEPCGSDCLRCVYLAMHPRPLNVDVACDLGSSGGSLKCAPK

SEQ ID NO: 960917 - protein, 203 aa, Homo sapiens
MNLFASRDGSMEIQKAIELFSVGQGPAKTMECWLASECYQFWDTQPVPKLGEVVNTHVPLEPDKDNIRQEPYTLPQGFTGDAWDLGDRGVLKELYTLLIETFMWKMMHTLSRLDYPPEFFGGLSGHPAGPPSGPVGSTWSQVGNGWRFISAYPRNIHFYAQRAHGESLPCCPRVASRGLPICPKSRGPGGSQRTAGVTAVPVV

SEQ ID NO: 960918 - protein, 100 aa, Homo sapiens
AAAAIMSGNRALAVPGQCRQPNLAPSFGDGDQLMSTGICPHVAPTTGTADLQLEQHQTVYYNECHLCCAMYCAPAACASVDSWSPGTSETPVLLCLGAHY

SEQ ID NO: 960919 - protein, 104 aa, Homo sapiens
MGQVHETGEGGAGPGLGRYSRTQSLSIVKNYCMYGPPQIAPTAMLGWLGIGPLPPQSDSCLRGKKKIAKRSKIKSLVKVYNYNHLMPTRYSWGLPPLGTKRGRQ

SEQ ID NO: 960920 - protein, 265 aa, Homo sapiens
LLGSEAGLLCRLRQPRRSLLLHCPGSEQLMATWACALPASARDAGFCALQMGSVALDCGSDAVAHVTGAVLACPVAARTNKFEQGSPVNPDGKIMVRRCLVTLDPFGFFVLGIGFFTLCFLMTSLCECQFSVPWLPGGTLPFTILHMNVMWGPLSPCWLSCAMMSDLLELMVNAHGLHLCHVLENMHVMLHLGLLADLHFPCRHVMPPGAVPHGSGSSAICPELSPDIAVKCGPDPCATVCSCTRRCQKCWWDQLLRHPVTQVPD

SEQ ID NO: 960921 - protein, 66 aa, Homo sapiens
MTARDKAALVENTLDTLERRSGDEKTRTLPIGGPDPDPVHQHKDRWGSPVENPVSVTGPLCAPQIG

SEQ ID NO: 960922 - protein, 113 aa, Homo sapiens
SKLLDLYPSVTTHAGLCPVNACCSCVPACMSVLCVVDVCMCMCAVSLHCLMGEPPAVSLCPDAWTMMPLLHETPCCPATVPMCMGHTPPGTGGEGVCRERIERQRGGKGATDL

SEQ ID NO: 960923 - protein, 287 aa, Homo sapiens
RSRYEAGWRGVGSAHQPPARPRPPLHQPRGPRQGPGRPDSDPAAAVTSAPPGAPHPPRKQRGPYHTPPQAGGPPLRRGKSRALGPGLSRAQCPGWCPKWLGKMPGRAEARWPARALKYAWQAYPEAACYRARLVEPRCGCRQHHPPLPPSEHHQGPPGPGGPGGRSEEKISDLGRGLRAHICLFLREAWHHAKVFTTDECSDCKGSGKLYLVWISRRDECQADVFATIMEKPRENVVDRPKGDREFASLVKGLRSTELLGWNMGPEGRDWVDTPIERYTSIRVRLSA

SEQ ID NO: 960924 - protein, 245 aa, Homo sapiens
PNSPRLLLLDALSIAPSFASFLPSFFLPPLCSLPSLSSVCPPGARLSLCAPAPWPCSPAHQISSPCSFHRYHALACQPVCRHLPAVDATDATEPQDALNATRPLDPSIHKHASKAQQGSTSTQTGDSPRDKHTGENTETREDRGVQQAGATQNQITRTERPAQRNSDTLVFFGRTVMKCHPRDTAVAHHDNGAGAQKDQEPKVESNGRPRTIRERPRTYRETGEGTEDTCEPLELEDRAGPKHNQ

SEQ ID NO: 960925 - protein, 63 aa, Homo sapiens
MGVSGTYWPQLCLWLDTNSLAVVRSQLIIAWSRKQAFGQGPLIVGILLVLMAVVYASLNIKGA

SEQ ID NO: 960926 - protein, 282 aa, Homo sapiens
LSRAPRGSLAGRRFLVTPACLCPVLAAQCFSAALPVLLDGKNGLVPVPVPVPIWNPNVCCLLTLLQWLMIDAAVTAAVPVWCCPLPLARACHVMKGPELCYWCFHLHCGRMGKFGARYILCWCEPCARLCRECAVACLAVGDLGLVDVVELAKTWRMDDPPAGGDACILRLHSTAVRLAWLVTPETDRASCMKARLSRSDEELLAAPSEELPGQAEPAGRLPDVHGWLGNGKMSLAEADKSHRSSASFGLALYHEEGPVGMVQLHRTVKPAVTGSDKTGEIG

SEQ ID NO: 960927 - protein, 84 aa, Homo sapiens
PPNWVEHDPVMDVAGGVLACDRVIHVFTILAPGMTPQFPSVMIGGDAGVPLCDDACSYHANACVAYCGLPTMLCLHACCCGNCA

SEQ ID NO: 960928 - protein, 108 aa, Homo sapiens
ASCHAPCADASPHDVPLAEEMRCSCPVEDWHVSWVALLCGTPSVNVFLSSTLFCWPCLIAVCFFVRYLCACMLMRALCVTVAADWARSLSGDQQVCDEKTLCSATIAN

SEQ ID NO: 960929 - protein, 134 aa, Homo sapiens
AGFDRPRLSLGWCAPLPVATLSGHAQCLHGSCPLRVHVLLRCVLCCLLCCCCCLPRALSPTLAPAPAVSLMLLASCPPDLLALPACLPGAACDCAAGGADVMVLGTSDVLACAAMQWRSCAENSNEDKCTPSRL

SEQ ID NO: 960930 - protein, 113 aa, Homo sapiens
EERAAKVPSTPPPKDSSTTPLPSLRTRRTWTAAARHLRSPIHARGGHCREARGPRMGRSEEDGGTKRRTEEAGSRTEEQPALAYHQRTTQHMHAAQTTQATAATKRAGSTTHG

SEQ ID NO: 960931 - protein, 70 aa, Homo sapiens
VLASSESWVLIRPMGVPPRPAGWLLRDRDAEFAWPVLPMCGHPETALRTVPVPAAARALAMAVPPCPSPR

SEQ ID NO: 960932 - protein, 152 aa, Homo sapiens
  misc_feature (80)..(80): Xaa can be any naturally occurring amino acid
IGPVALVAQAGVQGCNLSSRHSVTSVCAQAILPPQPPKSLWDLQEHATMCPGIIFLYIFCVVEMWGFGACVCAQAVGSQXVISSPAPSSLSQESVVWRQFTRVCVEPTETHRRVCASILLISLRHTSRAVWGTHSSVSLYPPFRVCAPQKEC

SEQ ID NO: 960933 - protein, 192 aa, Homo sapiens
MAERLAVGSLGCVSPVMEPGPTAAQRRCSLPAVAAAGAAAVVGAGPGRAPLLAAVLHMWSSTTSCLEHACLLDGWSDLSLSLLQLVDVAGASVCLPPVTLPGSWILSAWELLLDFCQQHAQMLDSGVLVAACARPVLPLSDLLTPSSNMVVSKMDNISLSRGEYFRESEFVARRSLNVQIELQIVCDSLRIF

SEQ ID NO: 960934 - protein, 70 aa, Homo sapiens
SMATQIYGEKDLAERGYQLVPEPPSRYYRLDQLQSRGRRGLGLLVKMWVVVAVCSGWLHNDMELYVAARG

SEQ ID NO: 960935 - protein, 161 aa, Homo sapiens
MPDLRFLVVPDLLALLLLAGDVPCAVLTSFCGGWFCVRDTLCTFVPGHCGDSSVGFRCLYSASARLPCGWLPGVLLTEETNRSPSEQAEGRATWTDRRSKHQLAEKPRPNLLRVHSEGELTHWPWEINGVSPRNSWEKLGLAHGRPNVRNSVGTKGPGHPS

SEQ ID NO: 960936 - protein, 220 aa, Homo sapiens
GSHPLTLGPKTEEKEPKNRKKKKAVRQISAQDSRRVEVDPLLPRREDSRKLQKAIELSLRGLRDLPKPVEEASRANAYQFWDYSSPSPSWAKLVNTHVAPLEPDKDNYPPGALHPAPGLSPWDACGLGDPWCANKKLYTLLIETYVEDDDNLSDWINPPEFLWGALRPPGWLPQWPCGVRVVSSRNMGGVHSAIPANIHIYDPEKTMVEINSCVVPQKLR

SEQ ID NO: 960937 - protein, 114 aa, Homo sapiens
GTRLRAWPYKPVRRQALWPSGSVTPPFPRPASVRRAWWAGASRPGMLPLGRCVTDAQIADHFWSCSCAAQQLRLPDGPHGGQLPGGWLAKCWGDDQQFPVSGPSLLGAIGAPER

SEQ ID NO: 960938 - protein, 191 aa, Homo sapiens
QGSSTPPPIAAHHPSLTPDSQPVDMSCKDPECLLPARWSALSECWWSEVGRRRRRSEEEEEERRRKMEDVSIHACYHHWPPALLQPAPSTAPSGGVHMAGDFVGLDDWASLPCVSQLPTLTRAHALEICQLDVDCTISGVLALIALLFKMEEANLESRANCHELIEATNQCHHRSHLKSGMSPLLSHTWYA

SEQ ID NO: 960939 - protein, 132 aa, Homo sapiens
EDMQLIWPLAQDIDDILVSLIAASGLLQPVSGPCPAGCPRSLCGMNSKTAGEVKASPGVAPRESATAIEKRSGGDTGKTREETYNFWKISEDWHWSGDGFLEEETSEQMPCNVDKLRIRAATFGEHTLVSGS

SEQ ID NO: 960940 - protein, 232 aa, Homo sapiens
WVLKKSETCEAKKRKAGAGGMGWGSGGPGSANLSSFVCKSGVCFVGGHFPVASGKFEFVEQRGERGVGWVPSRQVWVGGALLCGPFAVAQAVPVDKGNMWGFGPVRLWERPLEGDLSDAKRKKTCGCGGVRHSPGPCGKETGLWCVVEKYPLGPSLVGVNKTATTLFYHYYYHPENQKAVCVPQMFSHNLVFCGGRQVLLAGRGERNSLGTLGGGPQERQWPFTLYSLVEAA

SEQ ID NO: 960941 - protein, 153 aa, Homo sapiens
MALGCVSRICGMICYVHSQCVIWVHTWSSLSCCLLTAMSYGPPFQLGSSVGAQRLGVGDSYPMADNVCLPFTLVHLVKFYACVLPHLCPSQVVGIVVKPISCSCDFMSQTKFERLVSAMMVESDAFPCPLWCLPTLTGHWFLDPFPSSFLCAA

SEQ ID NO: 960942 - protein, 75 aa, Homo sapiens
MVVAEQPIVADSCGGRVGRRGHRGGPSPNSVCRGETHRVLCKRGVCGPPRKVSNSLSARGHFAPGRGLKNCPREG

SEQ ID NO: 960943 - protein, 239 aa, Homo sapiens
SRVGRGEECGLGTPAPLYCLVAAACGGDSVLLAEPSSGGPGVVAGQHRYSCMMRLLSLPDGAPLCMPVPCWHWSAYMMCGAANVVPACLLHTATGECHVTAVETLALVLEGDYRGLWLLATQMAYTHGCLIHQLEPVAAALSPFPPACHVTGAADVAFHLLPGPFLVSVGCTQRMCPASTHLACGLLKLHQESCMPNCELGSPDWRVQPCRLQRSSGVSYDSKPGVVDLDLHQGIMDAA

SEQ ID NO: 960944 - protein, 207 aa, Homo sapiens
LPFSWPTLARGTLDHSSMRALGCALEDSEGGSSGIRTLELRAALEACRKHYSRPVQWDWIAVACRGTAVSCSQTIIQGATPGLSVASGHHRSGCLSVFPGGLLVALLRGLHRSNYRLMITFAIFLSLIMLVEVAAVHLRGLCVQTKGDVRMFRYIITFRQQMENYPKNNQICFDLDRMQADFKCCGAANYSDGTNDPFHVNNRVPDS

SEQ ID NO: 960945 - protein, 117 aa, Homo sapiens
  misc_feature (45)..(45): Xaa can be any naturally occurring amino acid
VLCRKRTGVLRLRCPAGVEVTMLRCRVEDAEFDSGPCGCYPCVLXTLVLPGLVGAAKFPFNHVWCLHASKSPPPVPRAGYVVLETSPCLGLDDDPPPSTLLKDYQNCPCELRRLMMS

SEQ ID NO: 960946 - protein, 141 aa, Homo sapiens
MRGLLAASVGSFSETFFLRQYSGESQTNEYQWRGVPSGADITAVISQLFEASFLGPDVGDVSEELSGERDTANSSIEAYHITGRDRGQCTAGAEDDPLGGTPVVIGGYADGRELPRFMWNCCGVAYDAPSLGHGFLGHTWA

SEQ ID NO: 960947 - protein, 355 aa, Homo sapiens
  misc_feature (331)..(331): Xaa can be any naturally occurring amino acid
VGTSLLACLCALCAVHGLQNDLIPNYQPKAMGPSPLQLAVPGYFPAGVDVQRLAWTARILHGGLIAQDPSDSVPESQWPTEQVLMSFLSGSSTAQYTDRRIGTVHAHIPTRVIIGIGTLSSAYMSREEALDRPRHNTDTLAVGSQRESPFPLTPWGINEPPRLEAQRLAPKPKADTFRWGHQCSTRGKCPTLYAFHRNGLAAMPLIGGGNRSLTYGRLERPRPLAKGSPEDPTKRRISISINHWSWLGRPFAEVHKPSLQKQARLNFVSRPPHEALYEHHSRSRRHAYCVTMFAPPPAIYDGGGAINPVGNPYLVTNGNYRWRKAFQSQIXLYGRPQLGPQSLGGGIEQHFWRET

SEQ ID NO: 960948 - protein, 306 aa, Homo sapiens
MRNRFSETWSLQARSYLNQDEEWWVQVGLLAVPLLAATCTSHPLSSPLPFTHGSLQAQFSLTRDCVSSTKTLCACGWNSRDSMCFYTVFQHPATTGTQIWEGLTLRFHRVMPLTPYRYAFSDKPRPHHYSILEQRQHSVISRFSAASGAPRNRQDTTFLSHDYGEIVAQEPTLQVQARHRSWSAYHKELSVCQMEVSFLRLTVHSFLPRAYFKHGRCASLPVLTRLFTSLWHSSRRSHPQSFGPVYLWPPEQLACWALYADRIRTTLLTFCFDALTSPPEPPPTPRVASPALPTSSLARLDPYPFA

SEQ ID NO: 960949 - protein, 204 aa, Homo sapiens
MTKAGKSPPQQTIYWRQESLSLPALSHEARDKAKRHVEPVGPATEHKRVYFQSPLSGSEPEGMLNAPCLLGEGAPPESVLSAGSADACMNVGGHMFSLGRSEGTEPKCLTSHQEARVPWSQGELQQLWLRPGDEIPQSLIEHRVVQQKLSRIPKAKGRQSIEVWKSKTNGDLDSLAVAQHKRAAAIMEAYKTQGTGEGARVRAD

SEQ ID NO: 960950 - protein, 47 aa, Homo sapiens
AGLAPEGVLSWLAAGTAAAHCYRSSARQRANVLAHFYGVKLDGQGAH

SEQ ID NO: 960951 - protein, 243 aa, Homo sapiens
  misc_feature (181)..(181): Xaa can be any naturally occurring amino acid
PNSSFIIIKGAFLAKDTQIKESLWLRTQGREVARPVVPLSVGEKEASGQSVGKGAWEGLSGRGHKSSRVGNTCVGGVSVGVGPHVGTLACITLLVWVGGVSPIGACHRGRATLLGSRGRGPTQGDTRNQEKAQGCGLGATSRGCEGAQGRNRWGASVQVWPGYMAPRRLRGPEARFSRVYXVCGERFSLLSVRLSVSQDATLLSVDLYGAPRGHVACDITSLSSQGALSHVGGLFCLPRQIRV

SEQ ID NO: 960952 - protein, 105 aa, Homo sapiens
MREPEGSAHRRDRVILGRLLACLPRAPALECRDPKVWREEEECRGRRKDAWSDDPSRVCMVGYSVITWGIAYVWILVDSNYIPLHCQYAPDTKRASKLLLEDVLG

SEQ ID NO: 960953 - protein, 315 aa, Homo sapiens
QDTMPSTCQEPLEYLQWMDDEGDLVAGYESLKKNEILHLKLPLRLSVKENKGLFPERDFKVAMEGFAGQGHILRSKACATYQIAGHQMAFQVVICKVWQVAEDSDVMERLSATMAVHEKEESLWPRVAVFSTLAPGVLHGAMAPQSAGRRSGRPGRPCTVSDVSESDELSSLQVLDADAFASAVLRAGWGFVRLPASVGTVGESQPGLGLVEREGVLTCWELGGRALVPMYGQAGSDGRLVFLTRGDLWHPVSSVQWPVSVPSPDRAAAVIGPSLRMGGPRVRRSARSCAPWVCRAQTGPNSTRGTLEEELVAVL

SEQ ID NO: 960954 - protein, 236 aa, Homo sapiens
CFHLSRERVFSEDRARFYGAEIVSALDYLDSDEERGCTGTSSWMNLMLDKDGHIKITDFGLCKEGIKDGATYEDLCGTELSTWPPRCVEDNDYGAVEWTGGGWAVVMYIDDVRSHCAFYNQDHEKLPELILCGRRIRFARALLWSRRGSEVLWRFQGLASRQDGPPDCHEALGWGLTRYRHWEIMRLRFFAWYRVARQRCTSKKLRPTLRSCQVTSRRTGQLGILIEGFTVPDDHH

SEQ ID NO: 960955 - protein, 283 aa, Homo sapiens
GVYTEKVLEATKLLSNTVMPRFTEQVEAAVEALSSDPAQPMDENEFIDASRLVYDGIRDIRKAVLMIRTPEELDDSATLRHEDSLMSASRTERPRSRDDDLADQLAIVPGRLMAHASPGAIEAKIADQVASFQEETSYAGLLNVSKWCTSSGYDIIVLAKQMCMIMHGRHDMTLPEAKWTTHYSTSDVISAAMKIAEAGSRMDKLGRTIAVPLPRTLACKRVTLSWPTLQAHRPLRCPRAVYFCLPGLGRCAESRRGSSCVSGVGLRLSLIRAARLYDAWCHR

SEQ ID NO: 960956 - protein, 147 aa, Homo sapiens
SQPRSPDPAAAKMWMPKKNRMAIIGNLLFKGGSLSGWPRKECLHMCLKHPGAWQNKKWCPTFSVFCKGQCELSLSESPERAQRVKRKRVCVPVERHIFLAWCHLITNVRGFLPRLLSRGEIITFYICCGTRGEKVCVSPWPTPIARA

SEQ ID NO: 960957 - protein, 130 aa, Homo sapiens
MVLFGIVVECLGTRWLGLMCLLSASLFWLAKAPVRLLGLHLSEATTCVDARFTKRLDTLQPQDTSWISGRLASTFSRVVVVVCLDISVLDPERRRRFAEEQSPGPRGWQQSAIAKAAVHSLISVKDYIPA

SEQ ID NO: 960958 - protein, 79 aa, Homo sapiens
CPRPSGTAGAEQVVRIASAVRVPPGVRRRGSRGRRAGISQTPRKRHRRCPDRGHEMQILGVIAQGDSFGDREKKKGKLD

SEQ ID NO: 960959 - protein, 178 aa, Homo sapiens
KGSCEADLGLWNYGELQNLAKKASKTIVCEKSTHWSGGRCLLASVMADKGYKKRGSTFQQSQKGTAWSMGPDVRLAVGQEQCYSILAANDDMVFMHVDEPGRRLGLASKSFHLRMIEGSVYSKSLDRDLYTTTGGETDFTKVTSLRRACYDKQACSHDSMILSRTMITFDRRRKVDGA

SEQ ID NO: 960960 - protein, 283 aa, Homo sapiens
ISCHRDIISIAEDEDLRIIFEESSKLEDHAAESAQPRRPGSEQLSRLKLKTQQRYSDSLWAYIIWSRRLSRPPPIKLYRETNEPVKTKTRTFNTSTGGSIHAINDTKRSQIYGSRSDNYMEKEETDRRYKGKNDPGKDSSMGYKRQRYSMKKTTNYTEETITMYRCIHMSEIQNWMNLGSSTRVQDALASIKVIIGTDREEEDNHMVTKIQTTRQTREQSRSINNKVGQWDDKREERRKDNDQGYNSGVKTTRGQKIGLNKQPCLEESREKRHNKETQMNNTN

SEQ ID NO: 960961 - protein, 31 aa, Homo sapiens
LPPQAVSGAAACLSGCGSVDCCSEISAELIR

SEQ ID NO: 960962 - protein, 238 aa, Homo sapiens
FPTTRCSLSTAAGSDWYCYYYSLVCGSERILARTEENNLRLGRRKRVNESEERELALVKRLKTSCFNKSFESTVGQWFRQHYTLIIFRAVPGKSGQSITFCGAASWLQIESIKYMGTETTCVAAVLNEYSHLQRTVIGNHADLSKGGDEYDNHCGEGSSVVPLVMISCIRHTLADNFNPVSEAAWRKSRIVSDLFETGYAAWPVHLRRSPTSVWVPLTCHVCIPGLLLTRVGGSYTSD

SEQ ID NO: 960963 - protein, 263 aa, Homo sapiens
MISVILCDNGGPLAPSVMGAIDAVRRSQKGSFLVRPFGGSCLRASLRNEGVRTWQSEDCVRALSVLTNASSNAASMHVLSPFQSAASSDGSCASPGGDAVEKEVEDGLMLQDLVSAKLISDYTVTEIPDTINDLQGSTKVLQAVQVAGFPLPPSLDLCCQTLIQYVEDGIGHEFSGRFFHDRRERRLGGLASQEPGAIIELCNSVLQFLASVVSSEQLCDLSWLSLSLLGGGPVVLTGWIAQAWLVNRGPVPFRWAPLGALCP

SEQ ID NO: 960964 - protein, 202 aa, Homo sapiens
QTIGFNGVIYFLGSCKIKTWGEANRKPREAQRRSPSEVQNLWCFCHVFPVGQGIPISPPVVLFLSVKRSSNRRASPGSEVCRGWDLREHSSGGLGQRQTAPPCVSPVQNGVGPKVLVEQTVGCGGSPRVCAEELSSRAHRSLCAGASNASQPWEEQPGLSHSLGCQHPAGATPMVPPNMLRGTGSGSKRVPPTGAGELVGRI

SEQ ID NO: 960965 - protein, 150 aa, Homo sapiens
VDCTCEARGGMWPWMAVLNELVSVEDLLNFEKKFHALRRQSGSVVHSSYANVWSYCLVPGRCEPSTMTDIRKGIVLLEELLPRVEQGGSAGLRLLPGPVRDTYLCSNGITQTGSYTVAAPDGALPSKSEHAPQTHSHGAKGTCDARSISY

SEQ ID NO: 960966 - protein, 75 aa, Homo sapiens
SRCLELYSSVLFLLVLLSSHYAQYLLARHCKQTYLASGVHRVLLDVLVLPGRNALSDARRNAVTACAPEFRTSDA

SEQ ID NO: 960967 - protein, 175 aa, Homo sapiens
MTRSSAANLQDAIADAEQRGEMALKDANEQSGMGWRMPCIKAKQDLARLLKEYQELMNVKLALDVEICHLTCKLLDVVRSAWLNGEGVGQVNISVVQSTCLHVAMAVCHVVSAAGLGLACEEAATPMCSGLGVGRCGFMFHADGRRHCAVASALLEAAVPTIKYTSSSSSSKEEL

SEQ ID NO: 960968 - protein, 203 aa, Homo sapiens
MSLLQLMSLCRGCAFPTFFVLCKSCVCSVWFGWACGHQQQCNTLCTVGTRHCLHWVVNAQTNSVANLNGVRSLQFRYLNVGHMVQGIATLVFNPKGTPIVVPPWVAKLQEFYLCTRQTGASPSVTLSSAKVQPLERQKIWKGKPESHEKRPPFYTNIPKRTLEPSQANSLREALLEPNESPHSKTRVGPNRLSLTFGWTALVV

SEQ ID NO: 960969 - protein, 173 aa, Homo sapiens
NKLYIRSLHEVLIQDEARWLVPGGRADANMQIFVMTLTGKTITLECRMPTVTPYENVKMPKFNDKEGIPPDQQLSDILPVQHMLGCDVPATLLMTSQPYPANAVPPMTAMCDYACHGDGCAIYFDAYLLLTRLAHEDTTCDKMICRKCYAAFTLVLSTCRKKKCGHTNNLRTQ

SEQ ID NO: 960970 - protein, 246 aa, Homo sapiens
TARYEAWWLVRRRVFEQCRDTIIARTKGLSILTHDVQSQLNMGRFGEAGDSLVELGDLVVSADLMCSCPLRPIWPLCATPWRPARAAWAWCDLLPAVTAMPATMVEQWLLPVLAAATAAGLTLTACSLLARSVSAVCLSAATSMFLTGLRAPCASDNVTGPLFCWEHVQAWASSDEHQLLSALLACVLRGEVWRPVSWLRSRCALFSGPLCAVQLSALVGFATEPQFLGRAAAVSPMGMGGDRILA

SEQ ID NO: 960971 - protein, 105 aa, Homo sapiens
MSMCVPRGISHEWPVLRGDTMSVDASSVWRVRCGTGRHFAVCNLKLSGAKMQSNKTFNFVRMQNHTPMKCIINITTSSSTTMQQHAAACHHRQYLQMGNMCQQPK

SEQ ID NO: 960972 - protein, 233 aa, Homo sapiens
IIGDGALRCHRGWSALGTCLGSLQPPPPGFKRFSCLSLPSSWDYRHVPPCPANIWYFYVGGEVSALLARLDPATPDLVILTTVWPPKDAGDHSALTPPTDRTCYKPSISGHIKTHASNNTLYPYQLLTLKFDTEPLIQTHTILASHKHTARSTNSNGQRHKHSDTSLPRQKKKASAPTKYHQSSPSLARTRARRYTPHGLRTPFTDHQGTTARNNSTRTPRAHLYIIKMTASN

SEQ ID NO: 960973 - protein, 291 aa, Homo sapiens
MRSFATACGSSRIGLPPRAIRVRLLNTNCTALGLVVRVCVAAEAHEGLLALDHPAPRNLSHALGRLPPFIIGYLILAVVITNVSVRSSNICWCSDNVCIRDVNTDKRDVYYRLAKENGWRARSAFKLLQLDKEFQLFQGVTRAVDLCAAPGSWSQVLSQKIGGQGSGHVVAVDLQAMAPLPGVVQIQVDITQLSTAKEIIQHFKGCPADLVVCDGAPDVTGLHDVDEYMQAQLLLAALNIATHVLKPGAACGPDIPRPGCDAPSSAACGLLLQGAGCQPGAADSSFEASCL

SEQ ID NO: 960974 - protein, 170 aa, Homo sapiens
MADSGACLLLSAAALPVLRWVAHQDEQCCPVELTRDLYRMLPCLLDSLGSSLSHSQSLSSHLLPGAEKRRAISDVRRYLLSLLLTFELLFISLLWIIELNTNTGIRKNLEQEIIQNNFKTSFFDIFVLAFFRFSGLLLVLCRACVFRHWWVIAVTTLVSSAFLIVTCHPL

SEQ ID NO: 960975 - protein, 259 aa, Homo sapiens
VAAGRWRQNVGYQWYLDLLGERAISTSVCVRAHESVVNELKTFRSQTIYGSCSDHPLPEVAHVKHLSASQKALKGELENGLLEQPLHGLRKSSCIALKFNGRCFAEIEQGLDRVADGCGRCLCFFYRVSPRSSSCGKKLYVYGPLPLSFDSRVGGHAETMRMLDMKVNPIHGLQSSKWDYEEERVEEVRDAGCRLHLRLGSVTVMDSMPIYWKPVCQQLYHCNNDRYLIKRRKKKEKRAYFAGKQEKRIANFRHIVREC

SEQ ID NO: 960976 - protein, 218 aa, Homo sapiens
VRGAVMQCPMEAGLPGVGCCQQPRNEKDGDGRDPVVSRGAGDTGPSSGHAWSETRVTPTLLLLATCVMHEWGARAAPSHISLQTLVVLQMACSYVLLVRSARVPSFPGDAKLFPRDDCLGMWMMPAVPPVRVTVDMPHDLPACCAPPLPMASDVPQWNCDSPPLRRRDPQAQISGRGPRVCKLSSGVQQQQQQEKPALAAAEESEEEIQSEGNRERTT

SEQ ID NO: 960977 - protein, 145 aa, Homo sapiens
IEWGLPECRQSGLVLGVCHCQLVCLELCVTSPGAGPASSLGVLDVLLSALEPFLGVPGEDPSCTRCVLDDEAACMPTMGHVLCSQFPLAGMEMCSTNVMFGDVHNLMCLLRDVPDVMDPNALDLPELWHLSACWLDCYCEWKEVL

SEQ ID NO: 960978 - protein, 172 aa, Homo sapiens
SAASWSMSAACDCMCNAGTGAPGLTLGNAWGPRLFACSLELLCRLAPPCEMRSREVLVDPRMPGCAAHVLCGLLFLWQWCVRFAKVASMISGLRTPMDGVLLGKICAKSLLLNACNHDVDEDVHGNIHFTCSLCPPALSVVIPLAFSDGQLTSVFVVLDALPAGGLSCDAAQ

SEQ ID NO: 960979 - protein, 228 aa, Homo sapiens
  misc_feature (6)..(6): Xaa can be any naturally occurring amino acid
MTIPSXSIGSEQRLAEWTALSWWPPVESQSGMLMMWITCALACVLVTPLPTPCSQHSVTSLPLSAGAHAMAMTSLALVLVCCPKLALRVPDGQWSTWLAFCCKNRLAGVLGCLTLASAAACLCPFDTSHATMIFVSWEMSGCGQDWRLVANAGWPGGACGAPLGPPGIHDHLWYFWPAKLQASSRVVMFVYEFWDCGESALKKFDHMLLACMEEHKMPSSSLFSFTDR

SEQ ID NO: 960980 - protein, 136 aa, Homo sapiens
MRRAISDVRLLPSVSSVTFDLLFISLLCDHRTEYQHMASCEELVSSEIIQYNFKTSFFDIFVLAFFLLLCDLLLGLCLCLHAPVHWWVICCVTELLVSSAFLICQWSSSLSCSANGAFGYLLPIVSFCPRLVGDLV

SEQ ID NO: 960981 - protein, 151 aa, Homo sapiens
MVRCDECGTVMLPCVWPGVIVGDSLCVLWVHWPVHFTALLATPDPPCLHFHMPPESCVLFPSCPPDVGLAILIVLSSVMCCIQVSLCLTLRTDMPCPPSPFTYAVSLVPLYELVGSFGVPWRALWLVFPLIVFGPSGWPISQGLLALLWGF

SEQ ID NO: 960982 - protein, 222 aa, Homo sapiens
PTPTVFRQMQTTFPHDQLTTLRSAVLVGAQTLSTPAHLMMSTITLTSGLCDGCCQPVCPDLRADRHLRTELMWPHTGSLFGPRIHPQDLAIKIHVSDQELQSANASDDDSRLEELKATLTPDHRQAPWNSRCTPYDFEKDDDSNIHMDSHRGCIQTSGQKTMTYLQQTGHKSKLIAGKIIPANANDHKQTVVDFVCLELYTVVQGHRQLDILPEWFPQLGPA

SEQ ID NO: 960983 - protein, 167 aa, Homo sapiens
MSAGVNRPRRRWRRPEAAEARNGVMAAGGVGGWVLVLGAAAELCAGGWWLRCTGPGWPVRSREPCAKLCRSLRLECALCVPVLCVLKLLLALLPDRVFSVCVLHAFSVCVRLVLLPILLLVAHASCVPCVPLLPVRPDLLPAVDPCPVPYRLDAWTKRLSSCCLLAM

SEQ ID NO: 960984 - protein, 148 aa, Homo sapiens
MGLSLPSCALAGGCVAPGALYSFVSASVGHECPPPCCLYAKFVSYQEMMLDKCGVVKWDNASPSVKWWRDVVLSLYESHEETTWCSVYPSDALEGALRRLFHHLLECPHIGTGFLNGSVRSPTCTTFGRWATQEVHIASEHLPNSLQE

SEQ ID NO: 960985 - protein, 229 aa, Homo sapiens
YKACVDSFLQQQHVLVVPGVWSCALTQRWSEHATTSPRCDPQNLCKTCHAPAQTEALSQLFCSVSDTDCQGGAICRPCCDPPDPPQCALSPRLLQGHDWGQLHTACAIKLMTNLALGRGVPSWPGDTGASRMSWHVGRGGMCWPMRDHTLKEVRFLQPHCTPVPSVFTHSRTTPRPLKMASIHRLMEAFSSVLQTQFPSTVSTVYWTSEKLVKGPRDCPAAGDSGPAAS

SEQ ID NO: 960986 - protein, 273 aa, Homo sapiens
ACLPALRSWSWLPCAEPDCLELPWAAGGDACRAGLPASLDEVHMCLSLGPWQVSLRLFPSALRWPKNGVSNLSKIPGMDMENGVGNLDMEKPYNKNEVKPGKRWRNATKMNVEPDDEGKSDEEEKPDCGGEDRMRGKEEDEGEPGDEGQLEDDGKPGKAGQVRKVEGKATMARAKPCSQGNAREPAAGREKRPAEDYVPRKAKMEKTDRVDGRITPKELSGGLTGNASEQLGDIKDCGDVSGLKGLGKTETVFHGSKDSGSFAEDRVRIREKA

SEQ ID NO: 960987 - protein, 163 aa, Homo sapiens
RDLHDRTNYGYDEDRGLIGRGTYRELNPVHPAGGGQPVAGVHACCTSALCTRLPALTVHVTQPKDVVAICVSVARMLVGLFGIATLEKTHSRICCSEKCSSATYKQCDRVRVQPCCRICEVGSSSVLKWSLPSAISLLGTECLGQLCAKHRTAAIAAVTCTHV

SEQ ID NO: 960988 - protein, 195 aa, Homo sapiens
MLVAGGNLPRDTRRRRDRRGAAAVSSGGPAARTRKPSGKERRDAGDKDKEQELSEEENKLQDELEMLLLERLGEKDTSCIAPVLEELARRLFLTFHDYLPKPLQILRHHYGQLKEIYENLAPGENKRFAADIISSLAMTMSGERRVPQVSWLVGSQEEEDYWGHEYVGHMEEKWEGVEELDEQQKVSRELCYSVK

SEQ ID NO: 960989 - protein, 77 aa, Homo sapiens
QQAYGLMLRFNRHDGVLTLCCPVLSACDAEVMPLHSSLVLDNEQNSVSKKKKKSNGMLEEIGVIINCYISSLLLAHN

SEQ ID NO: 960990 - protein, 94 aa, Homo sapiens
RAMYYGSVLNSDEAASYVSAADLEVRFRLRGGFLASPVRVPSSHTCEPWNVCRAQHAPLEELSEDVKMDASVHDASVPRTRSNPECGADVTCVQ

SEQ ID NO: 960991 - protein, 96 aa, Homo sapiens
MAEFICLEWKYKLGTEDRVWLLLGTSICAINITNRRGKWHVNARISEGQCIPSCCTESKALEDSSRVGFGIPQYRGIVRHHRLQCTTHGFSGTYLR

SEQ ID NO: 960992 - protein, 213 aa, Homo sapiens
GHEWDPHGGGCPQDDGHSGTFGSVLVGNRIQIPNDSRACEPRTTGAPSRVVGGVGPVAAGERRQRPVSSDAALRMRALWLSVKLGCAVLCMYDDRAVSQQDAHFHFHQILPAELPWATRGPVNVLLAPLSSEDFFLSGSKDRTCAASGLLYNYGDGTSETAPRLVYTQHRKSVFFVGQLSAPQHVVSCDGAVHVWDPFTGKTLRTVEPLTAGC

SEQ ID NO: 960993 - protein, 106 aa, Homo sapiens
MYTTTHECAYVMNVACTDDAVLTSTAEPPCGTQLMIVGWFHLPTCPFLFAYSNVTQTYGLVGPSLVFSWFMTFGFVEYGWMTCDLFDDANYSDGLLADMNKPCQCY

SEQ ID NO: 960994 - protein, 98 aa, Homo sapiens
MRLAVPYVRTLRDAATQCAEAIHMEENSSRPQMNKTNTEEDEQKGEQFIENELQMNDASEAVDMNKNRDKKTKNYTSPGKNIHLEHALQKDCYHHKTI

SEQ ID NO: 960995 - protein, 67 aa, Homo sapiens
GRTGPVVIRTRWFQERGLVGHGGLTSSDPSGGLEAGVLSWVSAPAVAILYACCWCCDVAVSVLGSGL

SEQ ID NO: 960996 - protein, 113 aa, Homo sapiens
MQANGVGAPRSDKVISSISKQGSSRIIGIEDTLLRPFGLAVAASGLNTKLDGYGPYRHLARPHEGVQNDPNGVEPTWAHKTLTNLGRNNWTPICNPGGLEPQRDSGGRETNEG

SEQ ID NO: 960997 - protein, 109 aa, Homo sapiens
MRAVCYSDEGILLESVPELLPNVWEVPFLYLCTTSWRPPLAAAPAGELIPLLTCSLPAGTAGVPALLGLPASPACVCSIYHDLLAQCVCQCCNAVLCMAVMMNCWPAVA

SEQ ID NO: 960998 - protein, 120 aa, Homo sapiens
RGRGPRGPVYVPDEKHDPVKAGVESVRPRAMSDLLMNVNAGSCTPAMLHAYLVDLDVPCCLAACHLLVDVLVHHDACVLAAAWLAVDLAPWMPMSPVAVIWLMAAGALVQPFLPAPGPTR

SEQ ID NO: 960999 - protein, 119 aa, Homo sapiens
MAMEKLLSEELKKLVETLVCPLSTICSDKTCELLTQNLDDMSAHIVCLTIKSMKLDTDMRIQMWLSLFDNDFMLPCALLLVHEFACVLCTHVACCLHVLHHVKILPILNAVCMFAERCL

SEQ ID NO: 961000 - protein, 151 aa, Homo sapiens
MSMNPKEEVPTLLVSLGVLVWHHPQYPRVAGSDPGTLTFASHSCGTCCVPDPGLELHLGPSDVPKFCKCGNLSLRDLVDFGLCESHVAASPECLNHVPVHLSCLVCCVPMPWDGPSMWCAQTSHPMANPPLGDETCVTLALKNVTLYKYAR

SEQ ID NO: 961001 - protein, 273 aa, Homo sapiens
GGWPDGDDSLYPIAVLIDEARGMRTLHASGSTSIKKLSTICLVPLGLKGPEVMLLPFLTDTIYDEDECPPGPGRTAGNLHYPGGSAQMYVHCLLPPVESAVPQWSETVVRDEGSGVLTWPSHTETASPSDLDGALCAASEAVAGRLSGSPPCTSACVPLLQSATPECPVLLKAGKFDQIRPEPVLQMTPPMVLVWPESVQAGGESVKGVGSWTTSGVTIMPHVLQSLALTSRIRGGVAVDGFVTRQFCPEDWTRVSIGHAMKKLRRNRGVTSQ

SEQ ID NO: 961002 - protein, 205 aa, Homo sapiens
MYEAGFSAHAAWVHAVRCGSMETRTLPPAFPETFWHLHRALQCALLMTVPVFLEHLLHALRLPAVAPCVAPVCLLLLLPDPLLWSCLSNLQLCPACLLSCCPHAACVPAYATALPLPASAWCHAAVLLHLPMHCCMLPLRTPAGAMLAYCVLCGRSPVLLALLLLTGCAVRLVPACAGILHMLTFLQQLRVDLALLPRRELPPTP

SEQ ID NO: 961003 - protein, 115 aa, Homo sapiens
MRIEHHTTEKQRHKKQQKGEQTKCRHEAEHKQQHTNKQEKTQPHNNHDNHKDESKANTTRAQNHQEQTHDQQKTTTKQNKPRKQNKRTRHRPHQTKQKQRKTKRQENKQPKQQNR

SEQ ID NO: 961004 - protein, 66 aa, Homo sapiens
WVLIGRGRQCTQLLGVAATLAPGSLWLPVALACPRAAVPGTPCVPDPEDLLTPAGVLLCDLLLRWC

SEQ ID NO: 961005 - protein, 102 aa, Homo sapiens
VSCFISAWTEPGRSFPTPDRTPIASPPSPLHLHPRDMPLRHPRPPQSSGRRSQPHAADRRRPYRSAAPCTEPDSFQTIARVAPQKNLAEHKCTSKQGRWHKF

SEQ ID NO: 961006 - protein, 71 aa, Homo sapiens
MPENITDSRLYTSLLATKCPCLVYGSGWHFCNPGVYRCLAFVKPPWPEVRTALGLPDIVAGLWSGERVRDW

SEQ ID NO: 961007 - protein, 176 aa, Homo sapiens
PLPPPPGGGEKTPPLKKGGKEGPQKKRGVAPSFLIIKKMLCDYVVYETPGSIVFHNNKNFVEQPPLPLGPREDTQNSPLCGAFQRASVVYTTSDLVATSTTEEEKKEWRLFKKKHTSAVTIHRKESVSRGRNKTGRPRTKHSPRGSGVFLLAREEHTECGSLPGRHQKRWTHNRDV

SEQ ID NO: 961008 - protein, 172 aa, Homo sapiens
AACLRPLLRVPVLEVVPGRKTNSVSSEDHSPVVPLVRNPACELASARTDVFMHADLAEDKEEPLSLDYQQAAEMLCRVPLPNMSSRPRQRSFRTLLPGPCTQKKRCLYWELISNASDALEKLLSQTWCLTAKALPEIGDSLCLTNADESDTITIQDTGIGMTQEELVSNLVD

SEQ ID NO: 961009 - protein, 191 aa, Homo sapiens
LSQGPLLKKHAQLPGPESPRGPIQEEATKNKPRAPPTARVRGLSSLWEWVWQQQLSLSATPCVYLIHLEVHHVLFKRPREKRGEWRLPAELCIEEGVCANNQASAVVNRGESVCIDSLAETSVRRRKLSEGRGSLSNERDSGRVRERVDNSLTPPPQQVDNQNNSHPTHNEGRRKRGESARASTRRGTINP

SEQ ID NO: 961010 - protein, 171 aa, Homo sapiens
  misc_feature (39)..(39): Xaa can be any naturally occurring amino acid
  misc_feature (87)..(87): Xaa can be any naturally occurring amino acid
HEDLKDPHVGVPAQELRKYFKMGDHVKVIAGPNFPVNCXWPWNHMCPFHFVRVEENFVILFSDLTMHELKVLPRDLQLCSETASGAXDGLGGGAQGQLKWGASWVQLDPQTVGVIVRTRNGENLSRVGWTIVTGEKGWFDLVQELQAVTRKKDNRFGLCGLVGPFKKARKQ

SEQ ID NO: 961011 - protein, 86 aa, Homo sapiens
MLQEEMWTRRGDRGCGGEVANECRRSPVGEAKICWGCRLADELWVVGEEGTERRGERIEKEGRSKADRWGRKGWGVRDTGGHNALV

SEQ ID NO: 961012 - protein, 151 aa, Homo sapiens
MRTKVQKKSLLTTRNPFGYDLIPREPHPKTLPPQDVLAPLRSPTAKKLRQERSSYGSKLAKAVASMPREVRQCTTTRLLKPSATKGPTTRDPKNTRKKRPYLTNHLETTNNPLDTADWLGPDRVTLEQDKDEWIEADTRPGHPAAPDTARE

SEQ ID NO: 961013 - protein, 179 aa, Homo sapiens
MASSTIPELCFCLYGAWISSGLLDLRADIFDRIARGSHGYPQTLGLADGPQTRLVLQVCPAPVQGPPSPWKLQVDGAAIKKPEPQRNPGGREPPGPETATTTCAGQACHDKPDTADARRPWPHPHFQETCQARFRVKVVSARRDQHGSRDAYASSRGILPSEIIQATHLRASEWGNTTG

SEQ ID NO: 961014 - protein, 132 aa, Homo sapiens
RGTRLVNSGHLLLRQQQRWGLGRALPLLWRGYQTERGVLRLPAEEAREPLQPQGALERPPVDHGLAKVGDSILCSMVHKAANNQAPRLHRTSPALQNVALKIPSPGADTCRGPVPHGHGLFATLGKGKRASF

SEQ ID NO: 961015 - protein, 177 aa, Homo sapiens
MPSLRLPCLVSGQLDVLLGSPPCPCLTFSLCPMVMACWRRCSLLIDPSPPMPAPAFMLQRLVHLHVRCSCLSLLSWLVLVLGYRVPQVGSHLISWFCLTVTQYSRACNGVHCVGMTYKGMFRIGWDVIRYTIRTEDTPCTHVGLPLGLGGNLLNLSALVVCTSDAGGRSYGCKGGNS

SEQ ID NO: 961016 - protein, 102 aa, Homo sapiens
MLRIDRTHVNCDHHQVYQNVMQCGAYGNDVDRFLDIPGYGFSKTDNNYGKLMWRNQIGQKLVRDYGDYNVFGPHHRCGHNPSENTTWSEETQQKPIVVDRRD

SEQ ID NO: 961017 - protein, 124 aa, Homo sapiens
CSGGARGPCGPVMVNRGGFRGGFGSGIRSPGSRPWTGPGPEAAELAEARPSDKEWDALTKVVRRLAQRTLQRLNAPCGRRLYSSSSTAHSNAQLTSITLTLSFNERAPLFIHTALRRSLRQHFN

SEQ ID NO: 961018 - protein, 116 aa, Homo sapiens
DGDSDDGSDGWCAGGQPRGLPGAVSDPWSRVLALASRCKMRLRKLEVKWSAEMALFEQLNVLVGSSTWNPNCCACGAHCPHGPHMKKLMHGPSCAPVILPNYLLTNTYQHVSMQTL

SEQ ID NO: 961019 - protein, 81 aa, Homo sapiens
SRLGFKSADAVVLALVPETGPSGCSWNIMWPYVYCAVLWPGPELSSEPALHVPPCVSWGCEDDLRTVVVCAAEPATPVTVP

SEQ ID NO: 961020 - protein, 133 aa, Homo sapiens
MAVGAPRGPVPMLPMVEEPCAEAAAPLPPRHRTGPQGCHCCSGLLRPHQHHSHPVPHPAHPWPTLCQRGQRGVTRMSPQRQETSCVEHAGAYSDNWMGYLCDGGVTPPSSDLPTISSEYRPREYSMIGKPERG

SEQ ID NO: 961021 - protein, 85 aa, Homo sapiens
YVEAECYSAEGDGDHSSPVSMASKEWGVLQPVRAGVLCMCVCSWETNGNLTVAHDSINDVRTGADAHACQCLVCLPPHDCPDACM

SEQ ID NO: 961022 - protein, 72 aa, Homo sapiens
FSLASVLIGRLAFLALPVTVRSVPVALLPCVCALAPAVLCLCPDVLLQRECACTPMAALMCCNCELCLMLPV

SEQ ID NO: 961023 - protein, 72 aa, Homo sapiens
EASGGGGGCGEKEELDVSGSVLSGVSECWTREGGEECVNGECVNVCVCVTAVWCCCCCCTCVMLLLCDVLML

SEQ ID NO: 961024 - protein, 256 aa, Homo sapiens
MNLEAGRFHCQCPALACVWTKPVPMRMSPCQPNPCHGVRCALPCAARGWCSVLSAPWGVMGTFCQTCLVGSDVLLWPFLADFNGFSHLELEMACTPLHWDLGEKMRCCDGRVPWHEAPAVPPALQRAEDVTGKGVTSVVRWHCGTCRLEFRYDLVQGGQRSSGCREPVTLGAWTRVSLERNGARCPACWATEPRVLGEYPVTGTPFLNLKEPLYVGGRSRLQQRLAVLCRVYLARRCHTVDSFEAPNDARTVQDMQ

SEQ ID NO: 961025 - protein, 270 aa, Homo sapiens
GQVPQPPGKERQAEVPTATLQLGCTQWSSVPLVPGVMMLCVETAVKREAAPGPQCWCVNVVLCGVNGGVECTLMGWVCAVGLLGPSGPEVEWVSCHGTPCLVQNVVEMIHWCVQCGVVLPPAWGARMWLGKGQLYTCGALREGEPWLGAPPPPSFHGPLLASQMVADKRSCLGSDGRGQCMNPGGMSPGCLNCMGPFCPSGVGPLHSNVGSLFLSCGVGGPAYQTEWLFWSRGDRRTWYVVWPFPGSALASRSASYSTRTLARVCQIYLV

SEQ ID NO: 961026 - protein, 250 aa, Homo sapiens
TKMIEYHGSENVESYILTIMNMVTGLFHNPSIGNAIHIVVVRLILLEEEEQGLKIVHHAEKTLSSFCKWQKSINPKSDLNPVHHDVAVLLTRKDICAGFNRPCETLGLSHLSGMCQPHRSCNINEDSGLPLAFTIAHELGHSFGIQHDGKENDCEPVGRHPYIMSRQLQYDPTPLTWSKCSEEYITRFLDRRLGVLFDDIPKKKVEVQVIAPEYLWCHTGAVNLAMYFAGVNVQPGARRGALTGVLMTRG

SEQ ID NO: 961027 - protein, 101 aa, Homo sapiens
RCPACCGGTSQEAGVECGLWGGYGTELAVCCPETAQRGYILVWCVAWLVMSCCACCAGKTGCMLNGRCVAVVGCVVLHAFRQEPACSQWPQINGWEECQST

SEQ ID NO: 961028 - protein, 175 aa, Homo sapiens
RLLVDLLWWSWMRPHDARLPLCGLQQQRFQRMSPEDGMRTRPGDGEPTVRGPEPPSSGRDFQVPDSVSEACSRCTDGGCLEDDSTKHVGHGMRSLPPRARQLWPPTSMYHVSDVWKIEAKEEFLDLADVLLPHAQTYVPRLVRDEGGPRSGCPRGVVLAASHWILPFVQAAEKPV

SEQ ID NO: 961029 - protein, 83 aa, Homo sapiens
GLEPAHPLLLQPLESSTTTCCGPGNPSPYSARPHREPFMGAPPTACAPPPGPVPHLGALAPDYGLTGRGERGGSGQSLHLPFL

SEQ ID NO: 961030 - protein, 190 aa, Homo sapiens
PARQRCAGMLQTLYDYFWWERLWLPVNLTWADLEDRDGRVYPKPQIFYNHCLPPVPCFYPSSVSITIFRACTVATPLAALLNIKEKTRLRAPPNCHLGTFLPGPCGNACPMQVEVELLSRHEPGSLAAKVERRFLSACRNQWTLAQSPQEVPDESQLDDSHFYLIAFICLAMSCPLCIKPWFYDIEEQFW

SEQ ID NO: 961031 - protein, 67 aa, Homo sapiens
VSEEAPLRMIRLAEVDPTGEWGDHAGAQVPIILVGNKSDLRVGELHWQWSVASPIMSQFPEHLTTCT

SEQ ID NO: 961032 - protein, 96 aa, Homo sapiens
STRDVRMRLFPLLGPRAESDFCRFQDPLRSGLTRLAVQLHGELPKGGQDRRGHVRSQCTKAEKQVDGRGEWRLRKSAWTLRLQGVPSTAIRRDLSA

SEQ ID NO: 961033 - protein, 67 aa, Homo sapiens
GEKASLTFIALVGQGAQRALCGAGSASFFTITGFWLRRMALALSDGCHAQVGADNYVSMRIHVVLDS

SEQ ID NO: 961034 - protein, 236 aa, Homo sapiens
MDAEGLAAAAACPVTLAALVDSVAPRGLPSGSTTQPWSAGQAPPQCGALWGKIPWVYWQWQPFRSMPIFTQTQLAKVSLVPSPEGDRSLVAWLGQSWPECPVWPLPHLPCLAGGNGVGRVKHCLCPGCMLCICPCACLACLHVVSACPVWCLCCELVHVCAVATEGMTHCPRGFLACVGRNVLGRPVWAGARALHRLTDPGLRAACMREGDYTHVVLARLVALCDSAVLACANMAC

SEQ ID NO: 961035 - protein, 246 aa, Homo sapiens
DSGPYSGMAEPTSDFRDSYRGGMRLPRLTPTLGSPETTLPRRGTGGMLLGNAADTATTTYVLDFPQPGSKPSSESAAAPWMPRSLPGASDHHFDSPDTSRGRKHPIRSPVSPLDSQPINPAARLWNYHAIQHRWYWKTDILIEEHSDIKKSFNPCQYKNPLLSTNRYDCKNITELQDVTPSPREEKSKNEKEKNHKEKPERHESRTREAGSAEREKKASRDKRPASPTKRSRRNSRYTGETTSRGP

SEQ ID NO: 961036 - protein, 41 aa, Homo sapiens
MDLVDRREENSHGSAILVVSSDANKTVAVSSSLEDCTVQGQ

SEQ ID NO: 961037 - protein, 163 aa, Homo sapiens
MWHPWPGPPARCPLWLALLGADLPEQLYLPVVPGFVLDTNCLGQQLELPSWMSPTCAPGAGTAVLRLLHHPELQLGASGAAALTAGEDAIAACFLINCLYEQNFVLQVRASVGLHQLPHEGSVRSYAAAGQAWGSGSPGWQAYLKATRNLCGFDPLAMGPFGR

SEQ ID NO: 961038 - protein, 111 aa, Homo sapiens
MSSFLRHEGAETMPVPRGLRGMRRTSTEPQAACHLCRGQWGACRSGPPSSLVRSGDDGDAGAMVMYGPQGWGGATSWEALTPRTDVAMCESPNSQQLRLNLVPLAGQGHWR

SEQ ID NO: 961039 - protein, 269 aa, Homo sapiens
LSSPPPTVSQVPHGPALPPRGLPTVSLPPMGLPTGPYPTRGLPTVTHTPQGSIPTGAISNRAHTHTKTQIGTSNTRRNTTTRTQAPRPGNEKTTPRQGAVTQILASEEHNERPFHVASPNPEHLAPQGSIPNTSPYTYPRREADPTRCENIAYAVRDRHLSTPDQLMDRHTGWCARESQEPFCPRHNTVLGLEQTESQHHRLSYHNPSLFNQSTPTSRGVTYPPRMHHRWKPFVSPLAKPLDAHTHRQEDYAGGFPASVIAKAPPPTLP

SEQ ID NO: 961040 - protein, 74 aa, Homo sapiens
KLGRVTVMNQCCEHNWGEARLIDVHAGLCKYEDVEHNGDYTYLDNLLIYIYVNNELSILREKDTKMSLCTVKQV

SEQ ID NO: 961041 - protein, 208 aa, Homo sapiens
RVLRTPVPQSPGPGHRSPDSGHVAKMPVCTGGVPPRGTGSTVPKSWGEAGLRPGLHHHRHCPPPRPPQHSPVPKDAGGGLRPPCSAQSSFAWGLDHTCHVGKVPEGYLRGVVWAGLPPKTGPMVDWALRPQQVVDRVGALAVAKGNAKKAEVGGKSASNRGLPGASEGMREKNQKNSLRLDHLRGDNGRSRWHRRDRRTGSRGDEGKP

SEQ ID NO: 961042 - protein, 187 aa, Homo sapiens
  misc_feature (64)..(64): Xaa can be any naturally occurring amino acid
MSLDIQSLDIQCDGAELTLDVADAPPSCSSMCQSGSVLGLTCVPSARRQLAGNGTSSCRSWQAXRMVQAPWQLGAELLEALLQLTELGRMSGCAIAVLRGACMTPLLRRSMNAEPPELLPDWGPGLRGSLSMHTYAALAHPCMERATLKLRTLLGRNAGPLQPCLVGEKGELPFVEPPAQGLVPGPL

SEQ ID NO: 961043 - protein, 95 aa, Homo sapiens
TGVSLSGLGWLLGPAGLCVLCVLGCLLGCVWDLGTVCPDDAVDEDGVWAAGVRCPGVCGWLLNLFCQLTGMLPCELVQCWKDWTGVMHAGMLCSE

SEQ ID NO: 961044 - protein, 159 aa, Homo sapiens
MLSRAVEAPDYEVLSVREAAYSTERSPRVYNIMHFVFATRVYILCHIVPGPASMKPAEFIHQWCDEDATVNEIALELCSFTLASALGAVLLLPLLHHQPMRVSCSRCARNYLSSSWLNGLPPFHCALGDLGLVFSNCPHRSSCPLGVFPSPGSKGCGPE

SEQ ID NO: 961045 - protein, 288 aa, Homo sapiens
YSSLNRLFLPTTKVGVGGPKTQPVRRVPGVEPAQTRVWSLAVPLKRRMVGRLSPRPHCGLLFMSVHTLIVRPLLLVDDGRTHRGWLSSRGLACRCLPAPSPLPPLRETLRGVPLVPGLDSPHERLGAHALCSATRHACAVFEKVCFFAAAGPDLLAQNVGCHVLGNRLRGSHRCILDERSPALEGAHKTMGLRGDHVLPPARICNLRGGERRLSDEYVRHLWKHQRPVALGDKIHPGKNWKTPGSVEQPENGWRLDHRYDVYPPTCNITRRLEKAKADPMKTRHKGAQ

SEQ ID NO: 961046 - protein, 241 aa, Homo sapiens
VSLALRDRRLEFLLRPGHGGMLVIMEHGMPVTLCEPVTMGLYWMLKLAAMGALRVWLTVPPVLGGVPWFLHTCPQPEWMPLYVVGRSLTSASWPCAAAVSSGFDWCHPCWSPSECRQLLTLEHVLLCMCGLSLSFALSPLHPGPQATPASIVGLLLSLREAAYVLPVSRGDSQDRTARRGWWRSQRGDVGYHWPFDRADLIVEYLNACDLESEKAPAEATTFELSLATEAPRAGALSGSPD

SEQ ID NO: 961047 - protein, 134 aa, Homo sapiens
LQLSGSAPGGALRRGAGALFHETCVACAATVAGLFPRFASATPQLLVVCHVLGSVCRLVAGMLLGPAAVPVRRFRGPVPLVACSACLSLSASVVLLLNAGPGQLDVCPETGCLMLGHFALAPEAVPAVHLGVQF

SEQ ID NO: 961048 - protein, 133 aa, Homo sapiens
MEVRYGLHGSWADVCLVASTVHLELWIWKTCNIALKRRSPNLPSLAVTLVWQRNGGGMFTIPKAEASIQAGAGDGEWEESDSRTAQSPRSKCPRCICPKAKGEGGAPAPPEASLLGPKGAVKAPRHPGPREEK

SEQ ID NO: 961049 - protein, 123 aa, Homo sapiens
ACNSVNWMMSSSAPAEPLCGEVAQSEMGRKGMLEGACSCDSSGSESFQTMCRWCMGDVPSGAHMPGRPCHPVPMICDVCCACGPLRMCTLPGCVLSHLTRTLPHQRTLKGAVLHKLSNPWCKF

SEQ ID NO: 961050 - protein, 83 aa, Homo sapiens
VAMGLCDPVDMMWMGAVVCVPAAALVSTVNVLLLRLRAVDFAERHGYINVCICQVTSSTDPVGLLCCGPSANGVSFLGSSIWY

SEQ ID NO: 961051 - protein, 207 aa, Homo sapiens
MRNAMTTEENARAERVSVPMSGRLSSALLPSGHCLLPGVLYFIPVGMTYLYTCVVMEQRVSSLTPREDLLYVGISPDIRSCVNLLFLDMSVCSSSNNPPGVLVAGAISPLPVGRFEMSIAIPHTHTRIRSLTLGCRRASVVCFKVRSVLFRGGNALGQSGYPRGFEAVYCWAAMGRSLATLLSVRSRVGNEKPAFWWKWVFSPWGRQ

SEQ ID NO: 961052 - protein, 180 aa, Homo sapiens
VGPRGRLTESGIVCLELFGLETRPGLQLVCVTVPTSCRSAKTPGPVDVQAGHDMVLVLTVRTEEARRLPEHLRLWGCGEKRVCSLLPSTESGTLMAALLGSHEPSNMKMVKAEGTKTLIMCHSIQETRIGISQRAGSKSKPGKQVLNLRSFMANPNAGRDWFDHLVLPRSSRESELLQRG

SEQ ID NO: 961053 - protein, 337 aa, Homo sapiens
MYMNMIQGCYTGLPLQDEVCVCYTSHINRCKSRRMVSLCMTSEISMGEKYIPTGYRIETSVLALYPDIYKHQDNDELNTLKCEIDIDAMDNQSNKKSSKISDKTNKKYKNNWIIQSKLKWDGNLIVYLNKRKLDQASAELKYSTLKEVNPSANQNRMIGQEVTTYKRNLSLDGLVENLTGTYKGTYCDTMRTQQNSRRSKTQNQQNTHVDNTHWTATATNSRNTQRRKQARERRERKQKTGNRKNTIHKIPKPKSTRGRRITTKQKKEHSEEEPNKRRDKATNRKATENSTETQEDTSKAAGRRKSHKEDKDPHMGEAKYNDYNNHTPQQAKKACSR

SEQ ID NO: 961054 - protein, 128 aa, Homo sapiens
  misc_feature (110)..(110): Xaa can be any naturally occurring amino acid
GCNMCLLDDESSAPAEALCGGGATERNGAVRECLKWFASCDVGLWSSPDYGDGAWGDVPSVHTCLAAHVHPVPMIGCGWPVARAHVHCARCGALHTLTRNNPLIPVRDLXSVRVSLPRNSPNPVWANI

SEQ ID NO: 961055 - protein, 309 aa, Homo sapiens
RVDNNQLLLLMIHVFLRKEEQLFKMILDEHLCAHGWATCSCCTVLLTDCYVYLLREMGATEKPYLVEEAYSYNELDYVSVGLDQQTVKLVCTNRRKQFLLDLADVALAGVTLFWHSLKSDMIKGCREASLPPDILTDATMEKLDTGTNLVAKNRSVRHLLVTDDASTDLVHLGGPPQTRSLGPTPCHCSTTEGTIQPREGMQNYKAASSLNCGKGNNGTEVLTSDASKKQGYHLPVTQDTNRKGNNIMNTRMNTEDIYTTYVDLTGNTDITGFDHNIIQEIIIIATGPFLKRIIITKTEEHKFTRVERQ

SEQ ID NO: 961056 - protein, 143 aa, Homo sapiens
CLQLSGSAPVRRPQESVRALYSMRPDVAWAGTVAGALSPFRLSYPSAPGSLPVLGSVCRLGAVELALAPACRPLSACFLVSSAPRGRLPAVIEAAGLRLLKLDLALLDVFALRTEPDWLVGIIAARHLSACPLLVAPWGGTVY

SEQ ID NO: 961057 - protein, 179 aa, Homo sapiens
PFLCPPGSISPYTPDGLASVMCDAGACHFSMLPLCVAPVTVLQSACSCVVEAGGVGCTCLDVCVPGAVLQPRMLPGQPPCRCRSLSNHDALTCVSVPVGASLASNSLCLHEHVAYPCPFPGGNPVTQWTLWGVLAAATPAHTVPGQPAHHSLDRAVEIGSGGLGKAKLPKLKYTSVPYQ

SEQ ID NO: 961058 - protein, 73 aa, Homo sapiens
RYEAQKLERMETNVEERGQSSSTVLKPEPNTVSYRPVQLDTTWWGLQTAPCTGLVHGGVTHEAHGMRVAGIVA

SEQ ID NO: 961059 - protein, 102 aa, Homo sapiens
MGEIVFPDTDVCVFLTLTRDRRRRGDHEEFLSVAKCYSSYASCCRIVPRCCRVNVDESTNVVSVLSPGVHYYYPLLHSSSQSRLPVTTHLFDIDSEICDKSS

SEQ ID NO: 961060 - protein, 287 aa, Homo sapiens
MVCRAATCRGTSAIARPPLAGPAVDASLAEYGNLRSVRSSSCLETAGEPAGQRACCGGLLSSPLSPHCTGGKCGFDVGSLLFETDEAIMGQATFLEHLAFKGEQKESGLGSALDELMRGRAWGPILIGLHAPVEHTVLTTINGCLSKGSAERLWTLLGDICAGTCKVVGRPHMFEKGSVDVESLRETCTDTLDASIAENVALTLTCIAPGITLVPTLLCHQCFLRCAQFRTVKAADIVADLTGIIFNTITRPSMLWQQWIDWAQSCYSPEDLWLVKFGTRPDIKRRR

SEQ ID NO: 961061 - protein, 256 aa, Homo sapiens
LPPEPREQRDVERAGGNQAASQLEELAGLEMLDHAVLLQVIKEQQVQQKRLLGPCSDECLLLLCDLSEHAQWMIHHADVHGVTEGWINPVHVCDVLHQEARVACVCPDVPVMAPEGNGQWMTVCDESCLPCLCDPGPQMLLCVCLPCSIPVTLTMRSLEHSEWACVAGYPAGPPELAALTHEPRGSPGQAERWPEGCRPQGSLALVKGAPQWPGAGARARPRQEAGGPEELPRRGIPGQSQDVTGGSQTGKLEDVQ

SEQ ID NO: 961062 - protein, 250 aa, Homo sapiens
RARSSCGLFAAECLDLLRTDVINSGGAYPNIPLSYSLTWSTQDLFMLHVDGHGKCLKPKKPHWIMGFCCGHLSNKFWTVFVQKEFLSIQDRDMKATYLSGICSTFLENFGIYVYCSDLTAKMKFCYTFGNCMGVSVTARHQETPPCMLCLAASKCACDTVVFALLVLMLVLQTRLTDEEVEIDADGCVQYEAWSEPEPAMTGPKRHSHRNDSLKRVYMENTVGLHRFCPQQNYKIIECADPTYDYYPTMI

SEQ ID NO: 961063 - protein, 240 aa, Homo sapiens
ASPLVRHPRLVVYPTLMDALSCCPIEAPRGRPGQSWPRCMTPGHAFLANAPSPAPVCWSPASSPSNGAREPRPLVPPVSVPLPPSALHPCEEPRTSPRQPGTLPGCHLPLCLGPSSLVKRLKVNPLPSSELELLFYWVTTAAATCPRMGLEPCQALLMLTQSRPTDKVWLPNAPGKCSTMMPPRWGVLAAQCSHGPRECFGGMCRPPPTSCGLLPESLSSVQPAAPDRPGVNGTSGLSLA

SEQ ID NO: 961064 - protein, 243 aa, Homo sapiens
VYEEAPTSGSMFMTSSIPSPNQRERTSSCFLRANECKTGFCHYDKVTCRYKITSGYCYGVSPSAPGEDEFKCPIKGESIAMTQLVELGCVIWLRLRLQDLGSMQETKLVYFQGTKDRRMEAHNYYVVSYEAAGCDQYASPRPGFSHSCSMSQNFDMYSTATYSSVSNARPACTVYKLSGPKTDTTAQAARFLGLDMMEAADEPPDNVPPEIFHYQSARMCGLRDDLKPKLETRREPRLLNGAH

SEQ ID NO: 961065 - protein, 51 aa, Homo sapiens
MVYAAAADAELRCGWDDADADAACGIDVLACDLMLCAARCCCCAVDVGMPA

SEQ ID NO: 961066 - protein, 308 aa, Homo sapiens
SPWPINFYWAGREKSRGVGVPSFPSLYPKNTLQGTEKRPRAVCCASGGPLGGRQSGWIVILLPVLPRSEAWGEGGNSSCAPGRDCECSSEPLWLPPGDSCRPHYQPFAHLAQAVGSSQIAGVDSGALWIIFAPGVGTSQTRRLSVFVAEVVFFSRGSLYQCTQPVVTCRPSISQEPLGEGVPAPTGVPVNHVGTPWLYRGDLPSRGVGQGNPPRGSQFPLSSGRGLTPRCYSAFLTGFLARANWPLIIGGSHLDPQGLLGEDSVRPGGGIHPSNIACGSPFGPLRRLGFPPQGSSQGEARLLNGVDLD

SEQ ID NO: 961067 - protein, 146 aa, Homo sapiens
SVPLMTPISLKGRCRQLGDGKRCSLEDLALMEGLAHMLEGPLPGKVLLEPGVRGFLLRVPGLQFLRHVVYCLVVHRANRGPQRKGKPPVASEDPDSRKWSCYVWVSKKDDTGEGYFFLSLVQSLEHSSDEMAAHEGLSEYFREAIL

SEQ ID NO: 961068 - protein, 240 aa, Homo sapiens
MSTVALLVPTWLCGWRKLSLTQCIPQCHHGGSVEGMCPALPSPSHVSCLHVDSMKTILGEPVDCGCAGAWVFWVAGFHVVACTACGRDILVPCDSHFPMNSHVCCAIPVCAHVYTCWGVVSGMPPCCSVSFTCCTVLLFPPFEHLQQTVLTTLLGVGISLVGQPCYNAFTETNIYRGCACIGRRPLANDRVFPNWHGVTMIDDAPLVEEVEPLCCRRPLKCVRAIACCPGSAKPPPWRLG

SEQ ID NO: 961069 - protein, 200 aa, Homo sapiens
AGGPCAPQHAAPWGAGGCLSVAHVPGALLFLSLRCDPRLVPHWGGLRCCSSMNVPQPVQADQIDMHLQIRVCSLFCLRMCGPVRVTCPMGFAVSELLQGAPRACCRSSSLPWEILHLQGTVYICCDMQEMVQTSHQVFMGILLAWAQRLLHGARIQVNSCHCNRTIPVKVLGARFNDIDLTWCKTCVLPQDPSFNWYNQT

SEQ ID NO: 961070 - protein, 232 aa, Homo sapiens
CAGSAAAHLSRPLTGAGCGGSTRSSLKVANEPVLGFLQDMPELRCPAKGLEDDLKGLDVNAIPCVVGVMRSVLDCRDVQYQVYAFVTMDISVAKFCYADKSLLNKAIEAALAARKEWDLKPIADLVPRIFLKAADMLSGPCMSEILGHDHGGTGKTCDPSGDMTLQLELIDFFRFNAKVMLVELVRSSEAHQRAPRHNSLCTGSDGIVEASALNLLQSGHLLRTGLWQRAYE

SEQ ID NO: 961071 - protein, 266 aa, Homo sapiens
MAHGCSSWHGFLSAYACDASDGAWMMLVNDMACALVLSLHACDCHHVSVLNAVPLCDVCVCPCVYICCMQVMCLHVVLCCLLWLPVVPLMATCCAHVVLCAVEMWPDSCDFVFELLVFAHQPDSGLLGCLGALCNEHCTMAVSRGECQWVTLCVLMTQNMADVRGCGAGGWNSSFSSDVDWIVLHVAVGVDASCTRGLCLNAVDGTLCLPRSPVAPKGQGHSAGRDDGRPGNRLPSGVSGLEDRVAVSPSCGFVTCPRMWPKGKTA

SEQ ID NO: 961072 - protein, 247 aa, Homo sapiens
MGGHVMMLCKCVTIFSCGVMPETCCNGIVCGGYLCALFHVQKDAMMWACGCVDATCGVGHAVVCPCNCGVLVPHVPWCHRHGTVRHVVTHVDIDVVSPMTCHRHTNTANINIKKHVAACGACSWDNWLSHVPIACDAFEKGACEMLRNEHVQLLCVEFASSELSPCDGAEAWANCVMLGGAPLWDHFCCHGPGMGLVWGLGPCLGRPCPQGSALCGHGSGAVMCPVWGLLRCMPHRHALGVVGYVQI

SEQ ID NO: 961073 - protein, 52 aa, Homo sapiens
MSDTPVCGIYKQVLEPTYTGQAFPNTNALVSQTCITKTQFRADLAGSELCEK

SEQ ID NO: 961074 - protein, 238 aa, Homo sapiens
VCLEATEYETPAGPVFLPQCPEEEHSSLPVLHQVPVVTSFQLTDKMVFLFLWLHTGMQVLLSSCKAAAEPSWDDKDDEIVSRSDRASNSEPCPSCAWVVNTHSTVREIRWRKEVWSTPVECDRYFPKAACAKVVPACMGRALVWTPYVAARRCRDAWSLRCVARLCRVAQPCPQWTDACPTSRGPAFRVAWTGEIQNGLLEDNDVTSYAILEVRPRLEHRYLYHSCLHIRSLTWNGSE

SEQ ID NO: 961075 - protein, 236 aa, Homo sapiens
MSVSGGFQNYVLMCAWVDVPLWHTCRAPSPPCAHDVSGCACVPLAQMCTCANGVWLSNNSHAPQLSRIPCERLSLCALVSPNNSPNTRVPTFDLLMAANIYTSLKEVCDGVCDTQRMLRVRRRPLRNLLSPKHTPRDKWPRDKRPHEHPHPDKTHRHSASEHTARHRQKTGDSACGMCAPPRRPSQLPPVRCGKRTQPSTTLPWGANRKSAAPRAPLARDAPQPRLPAPDPGGAVL

SEQ ID NO: 961076 - protein, 231 aa, Homo sapiens
IKEIGAKNVRKQTEEHGEAYFVEDEVEVIGRAFGFRRIPVISVLSSAELVVRCMTDRVQLRAQMWDFPSNASRNGLTSEQASLDTCDWAYRSTNARQAGWKEMCGADGQNSRRDPIDCLMGIEFDLHEYFTEVPKALKLSIGRRTTTGGLMVRSWQETGHQGSLHWTIVILALSANALGGGMQGCGLCRNNSHAVGTLSMHYQWVPTVATTGHGGWETELAQLVGGQPKEF

SEQ ID NO: 961077 - protein, 263 aa, Homo sapiens
ITPLLQSQAPYKSLWGLRGKNSSVSKNKKHRKKGSIVHPRGPRQRRGGRPSIKASLKRAAGGGGRRGCKEIRGTTGTGGGPPAHLRGAPGGGGTTTSIPRALVVPGGGTPEGRAKDAEVPGENTPWWGGAVNGALRGEAAGRDTPENGGLQGGGHGGFTLHRSRRKSIEAAINKGKDPRSKNATNKEEISRREIPEESAGATQRGPEAGGSNFLPLGTPPCTNGPTRGMNTRRDTKGQRRGAERPLRRDPGTQDGGNGHHHNL

SEQ ID NO: 961078 - protein, 268 aa, Homo sapiens
  misc_feature (79)..(79): Xaa can be any naturally occurring amino acid
  misc_feature (81)..(81): Xaa can be any naturally occurring amino acid
  misc_feature (103)..(103): Xaa can be any naturally occurring amino acid
SQRRGVDRSGSTGSIRARCVGRAGRPQYEHRRVRAYVITSHGEATGTTGPILESTTSYLRSRRSGCERFLHMRHMQRIXAXEDVPECARHAGDSGVGLCATSXIRKSAESREHSRSGIISCMTCEGQIAGVAGHSAVLRIVVQYSVPLYAGARKAIWSSSDKKTVTNFQVTETWGRYSRATTYITKGYKCGLTSQLREGQPEVRLSLSRVFSVCPLSSRTVTVREEEKLELEKLLEEVLSCKGELEEPGARSTVSAALIPSEWGLDVA

SEQ ID NO: 961079 - protein, 283 aa, Homo sapiens
ANPTAEEKPGPIKPRVNPTGVLQNMAVKREALGPGSPWSLVWQDKGSQKTARKFSVALEHWEEERDVVFKGVPGLSQEYIPGVIWWSGGVDSTHRHNGHLVWANVPYSYGEKNILEEMRKSIHPLKRHNRCPWAILCVPHVANIGCGTQNNKYGVPPCFFTSVAPVRKEAVDVWRVRMCANAMWWGCVGRHKGGEQRKGHCEQHIVWGEAPMGNALLGGVPGAYWGKEPNAKEKIPPYGARALGGGQTPGIKVWRPSGVLILKPNQRLQFPFLGSSQGKKEPP

SEQ ID NO: 961080 - protein, 162 aa, Homo sapiens
MDGEKGDPGPPGPPGLPGSCGASMGPLGITEDFAMGHSGPPGDLGVPLGFLRACWDPSELPGQMPGDLMARMGPGRGSAGPRVDLGRPGPKGTPGSGRACGEPGNAGKDGQNGCARDSMARMGEAGRKVLRRRRAQGLRAPWNNGDKSEKGDSAKCELVNAP

SEQ ID NO: 961081 - protein, 121 aa, Homo sapiens
MQVEAGGYSAEVTWRCLGADTTEDGDEKSLEKQKHSATTVFGANTAIVCLQFDRVYIYHLRCYVYQCQKPLGFEIRIALTDPYAHSRVTIHAGDKTDVSIIPFIPMNPTLGTKSNYSSDES

SEQ ID NO: 961082 - protein, 195 aa, Homo sapiens
MNDMMHQRWLMGTILQRSICCSDPDDAMSYDLGLQVWLPEGRSAMEQPQCWKPLRVREEEEKDGMCAGGMICEPQMLNGGDHKHALPSSMLHRPLPELLANLTAGPTADLACDGGLMRQPQHGSDRVCGDKASGFHTVYMHVRGGRGFFRRTIRMKLEYQKCERSCEIRRRTEQVQTAVQRLDGMSKGAVAVGAE

SEQ ID NO: 961083 - protein, 193 aa, Homo sapiens
MQQLSGLVVPVPQLFATSCALTIWTTAALDQVSEARGINWMAHSLHVPKWHSWPLRGAKTLSFAQIKAFMEKLLVPPPPADGPDSIPQSSPKSDCPCPNLSYPVTEPPIGYGSANLLQPPSLGPHQSQILEWAPLTPAISKDLPGPHMMSKNSLPRNLGELWSHSELARIGWDSPWSSELNMNGYHWQELRQV

SEQ ID NO: 961084 - protein, 270 aa, Homo sapiens
SPWPLIFFWAASGKNPGLGCPFSSLPLSTQKTPSHKDMTKPPEAWCCLKETLGWQRQYVWDVDLFFCVPPRQVWRNVWTNLLWLTARDLMAHRPAGIPSDCGPPPLIQPPPSFPHVGCLYNTRLYPPPWDIGPSVGSPKGAASPRYLGPWVFFQRPFPWSQLCYTVRALNIFKTPVKGGAPIGLEHSATVPLLGACPVWPATSGKQIFKPGRGNPGFKQLFPDITRQRTTYWPHVYHRNMRKPSPERIHPSAFLNVPKEDFPRAPQKHPH

SEQ ID NO: 961085 - protein, 108 aa, Homo sapiens
DPALNQGQHQRHVLDSEGYLLFYHKQILEYEEPYLAAGQKNKGNALARPHKVILPGRTIKQKKPNDNNRTRENTQHSQSNEQETTQTQGRQQQKQTRDYTKATGDKQT

SEQ ID NO: 961086 - protein, 84 aa, Homo sapiens
MPLEQMESALLQVLRGIGLDGPREEAHGPWWVRMCSCYLMDAGDGVAPRSSYSKVEGHPGGRCRAADVTRIPPLRSSWDASQTP

SEQ ID NO: 961087 - protein, 120 aa, Homo sapiens
MHLAAEDCYWDMLAYTDNDVVIGMDVAGLRVLQCLGMYDHGLSSLPDDPSRYISSLTMLADLYKSFINGLPRWCLSEDPFDHVMTWWSLAEVHSQLQESSVVGGDDLTCDQPKRVIANGL

SEQ ID NO: 961088 - protein, 250 aa, Homo sapiens
LQKQKDSMKDDKKKLFVIAKWDYTAQQDQELDIKKNCAAVVAGRLQDVVGVVSELLANMDWAMYLSNYVCCCEEHALNECGSLCELNLNGHTSASGKTRSEGPALLGCCPPLPSTGQPEYPANVHAVLPDLKSTTSTSLAFFKFCLCGLMREDELSLVNGARCVTCHGEVQQTVGGVGSYKLGRSSWFPSNYGLWSEVCLRRLLESPSFLSLWQGALAEQWPGLRVLHVVRRCTLRFRHGRAHSSRGDWG

SEQ ID NO: 961089 - protein, 226 aa, Homo sapiens
MGDTLVAVPYRPSFTAADPIQVSSHCVSASPSTVGQAGVQIGNCLTWELYCLEHGIQTRWPRCQVTMTMVGGDDSFNTFSQMKQGAGKHDATVSRKYVDLEPTVIDEVRNWQLNRTDYYTPMRHTSSTWPGMMLPINYARGTLHPFGNGRSYDLVLDRIRQSWHEPVHPRTSEDISMSKNRKTNVVGETVYAEGSTFDLLYENRSTHVDLMARKSHAGSFLQLYHE

SEQ ID NO: 961090 - protein, 157 aa, Homo sapiens
NGLVGLCLIGRGLTPDESLAAHRRAVLVTITPRGWSRMSVRFRPQSTHHRAIHEQAEADTQQLLVLTFLLLPEPSGVRPFPRFPRDMRGVRWRQRVRWARGPVRSRRCSFLVASRRTYDLDKVKMSQAPLSPFPKNNTISVHILGGEIDAPFAEGRE

SEQ ID NO: 961091 - protein, 207 aa, Homo sapiens
PLSTSEQALLRPPALPGGESMSSEDAIRQSNQILRDALLRSFCISKPARGRMKEFLSVQCSRMARKLVETDSAWRSSILNEAPKVSRALSGVWRHLNEMPASTMADGQRALHVKAQCDVLARGELAGEPESLVSASHSSECQGSGGSGPGDGQLSKATGARRRERGGRMKKRRNSVQVDQAAHAGTERWRTSPDGAPGASEEKGTGQ

SEQ ID NO: 961092 - protein, 73 aa, Homo sapiens
RLKPLYIKSFESTVGPGADTYIYIFRVCREAGQPHSLSAGLVAKSTKSNGKETVVGRLNETHILQREVIGYRC

SEQ ID NO: 961093 - protein, 225 aa, Homo sapiens
MGRVILWTEEGLPGLCTCAHVKTCKCALRACDACGFRMSVHGYINGASVKGHHPTDPVACWLLPHLPKDVSYQVIRYSDLMNAVTDDLYQYACLMGHSTLVAKLCSICCANEWHQLNHCAHVPPVWATNDLKGYTYVWLPWMEEALRGPVDTAGPWASWETYANRLIYPQHLQHQEDPDVNADPSGIQERIISLRPTGAVDTVCVPAGGPTSDKPILKAGQDVPP

SEQ ID NO: 961094 - protein, 220 aa, Homo sapiens
NSEPLSGWMVRAGSTRMLELMSMLPGNWFGRNWLQYRSHLEPSGNPLPGHPHYFCTQCTSSQLPGPLTLHPDLHPLQEEGQRPPGVTTENVRGGHGLDAIRMEEDGRTEGTGRQKEEGEMVETGRTRRQESEERRGSRTTRKWNAELCRPLVGVSPGWGLRAYGRTGMLSHGSLLAHLFEVDTPSSSTLERLELQSLEAAEIEPEVQARGRQAPGSDLSW

SEQ ID NO: 961095 - protein, 225 aa, Homo sapiens
GVRCEACEVMLEEGAPTGASPATQPPWMQLQSSFRSSDMPHADPLVRCMLVAWHQLELRYALYDVRSPDETTVELVLPGGSDVVTLDQSRSMRTGTRACCDWSSRASSRSATWRCLCPCRSDSPVSPPRALRPHWPAFYERVSLEFNTVCSVSVRGGSSVTDRGQPGPRALRYSLSRRPTHWIARGTNLESGMEDSLYYNSAKTTQSDDELPLPNSMDGQHPPPA

SEQ ID NO: 961096 - protein, 134 aa, Homo sapiens
MRLLPPCSAAVDPSGQREQSAAGARLCSQAGQVPWMSMAPLGCLCASERALCTGKCAGGPSGLSSSVLTEGPKALTCVGMLATQRRGSPVIARLLNQRRVARTQATDTGQGTPHRAQSPTQPTQGRKPDTGHRA

SEQ ID NO: 961097 - protein, 171 aa, Homo sapiens
MAECASWKAAGRFFRVRSLQITQNFIIPKKEIHHMYPDMGKWNAFSGIRLTTSDSSLPSTEGVKGKKLTFEYRVSEAHRETRSRLLDTLDRLDLIADSSMCDQPLSVMRNKCIQGPGYGKLCMRKQNKSGGHKWVATHLAGLVCLRVGEKLKGVIWGTHCALGYGTGLEAP

SEQ ID NO: 961098 - protein, 67 aa, Homo sapiens
HEGHYLTVEDSGSWLGNAARDNKKGRVTPRHILLAVANDEELNQLLKGVTICQWGCVTQHPPLMLLC

SEQ ID NO: 961099 - protein, 191 aa, Homo sapiens
DAAAPRCWRKRKMSHPELLQLPRDLEQPSQAAGINLEIIRSECQLQPEEASVMPELEGCLASCGLRSRSSTPSASSASISGLFLGTGRACFEAIEQKQLGAGRPTCVSDAQQHVPVSDTVQHHECAFHGDHFPPAALKENKDRNGALLAERHERKESSKLAGRIDGAEPDNRGEQETGTALHTTTGPGESN

SEQ ID NO: 961100 - protein, 109 aa, Homo sapiens
MEPVPCTLTGISSILWALPSPRPSSEKPQSGLCPPVVSDVLACAWSAVCDLWDLMCCVVACAFTSIIPCVPICMNALHSVPRCCWLVRQHACHSTRLALMVRDMGSAVI

SEQ ID NO: 961101 - protein, 243 aa, Homo sapiens
DAGAAGVVPWGALVALVMGEPLVCFLLECFWHVCILVAGCRCACVSVAWVPDGLLDALLECNGLMDNVSCDALSPSLVPACVKDMNDQCPCEEIYLFSLPINGIMRSFDFFLWVPLSRMRFLKIMPVQNADPCLASCTSVQWHLYAIWGLQCATSVWVVKCAPMECVHLPSCGAIHPCANALQSVPVLQMATVGEQRSGKAPHLSLCNGVTWAASGSCAGNAIIPAPRGHWASYSGLVPKKLS

SEQ ID NO: 961102 - protein, 247 aa, Homo sapiens
YPPPSVCPSVRRREWTDVPPYRPHTQPSEKVSSIDEEIRLSVPHCWMTMTNDMILSKPGVSSGYVPPPVATPFSSNVQIPMPACLVVHMHPMTILVKSPSSSTDSAPGSWLLAQSQDTVPCSAPAPAQCLRSNSMSSPRPRAVSLANTQTLMGPQPHLRLPAPKFSPVTPKFTTCGYQVQSMEPQVDLGSQTKSRNRGHTESYFLLAQGSALNSQLHYASKGEPECSKSTQSHTVEHTVRLARLSKR

SEQ ID NO: 961103 - protein, 150 aa, Homo sapiens
MCCVPPCMAVLLPFGAWVTCAGCAVLLRCGPWLMHVVNAWLCLLACGNLWLVMCLPGFCNLSAPPRLDSAVACEALVIWHLGPHPTLGDLLVRCDGLAGCWQCWGLKKGRKVTIVDKILLWASLRRRKAIGSTPGSTFSNPVHVYGPWED

SEQ ID NO: 961104 - protein, 170 aa, Homo sapiens
MVVHGTSHAIACLIIRFVDSKTRQQTLRTTCALSHWSNDCEAADHSSAQTLGRYPCHKLEYLCNPSGKISFCDGRSAVAHLALKHRQGKNHKMRIICLCGKPSWMDNENGSGETGYKRLKKDEKEMLTLSILGNEEVNTEKLTALCKHVECAKDGTGSHLVTVPPWAQYG

SEQ ID NO: 961105 - protein, 159 aa, Homo sapiens
VRCLAAAVAVGHGGLDMSLGPAWGCRVGGGGSELGRGYGARFGCLGSRQCVHGTMLMAMRSLLLGPGPASASCLLLLLGLQCCRCPPLLRGLVHVLCCYCAMVLPALPALATPLGAVDTCLLIAAFDACLLVLVDKCDPAGLELVVRGPGDLCLTWLHL

SEQ ID NO: 961106 - protein, 45 aa, Homo sapiens
MWILGAPAGWAPALVQTPVPPVNASYNSQSMVFHSDPKERRIHYR

SEQ ID NO: 961107 - protein, 228 aa, Homo sapiens
  misc_feature (73)..(73): Xaa can be any naturally occurring amino acid
MSKSEVSVKSPVTAEEALALGGYEALKQLMRSLEVRRFGDKWAQRCIAYLCWLMKKHRKTTNSSILGCVGRFXTHQCALLAGRLAVQNLWKCQRPTTRLRMARSCVGTQKSMRCRPRDKIRLEDRGVASHLNPWWEQEDDLGFGLGNLNMRRRLERKQFSAKQDEYTLVEARFIRAIDSLDRVDFDNFDERGARMAKMGPTGTNGGVGARYCNRYLVTGAHGTSLLVD

SEQ ID NO: 961108 - protein, 296 aa, Homo sapiens
MAMRELVECLNCVWCANPLMKLAGHFTQDKGPICAVRDLMAMCPLCPPGGPCDSECSPSQCLFGGAKRILSNDSSLCCDLKISLAVGPMIFASPLFVCSPDGAPSKDPYSTEFGLDRILGAFDDVARATGVMEASGPKEAVIPGPMVASPQMNGNGPRLLEFDWSPVEPFGETTIGYPMNETRLRAGPPNVGKAAPYLGREAFGHGTYRPFVLGEIWLQRQFPMVGILSLSHDRTAKRCNPLWISPPQMEKFSNICSLAERVYTRWKTPLFGVPGKGTPHDCPQRACGGPRRGKSS

SEQ ID NO: 961109 - protein, 104 aa, Homo sapiens
MCKYQEIWGKTLVTQDPMATEDGNHECVSRCSVLLLDSWRSVACTVCKQTDWKDDATMLVHTLFEMACSLILDKNLLYYGVVIDKPGPVETKTVSTSRGHSVGL

SEQ ID NO: 961110 - protein, 74 aa, Homo sapiens
CSLCLCLAVVACPVPAFVPPAYVTLPSLLSLSSSPEPAPRFLACQVALVVTWCWIDSLYWSSWSLSCKLTWCMC

SEQ ID NO: 961111 - protein, 198 aa, Homo sapiens
MGAQMMVLHCHVILILEPHCYATPSLDCDHEIICIGCPSPCHWATDACVDMWPLDKHACQPLTVGHVGVCNVHRNIACPMELGVETTRHIEHKKTIGTRTIAQMDREPQDDNIERATTTGPTKAKHMTPKDNNRTPHATTHRTSQHRRNKHRAHQETAAQRRSRSTPDQLADRSRQTHANNNAPEAEPRETTHNKTPT

SEQ ID NO: 961112 - protein, 236 aa, Homo sapiens
RGPVPEAPAGGPVHACDGGDCLLEKLASMLETLRGAGMGGLARRQGWPGMWSCAACIHDAGLVLLLMLHATDTHHANTFVLHACVANGWDGCCVALHCHSAGPRMLLLCCCLRQAHGGCMRAWMCQTTVCCLVGWLLVNARTVSCSYNGRDVGEGSLAHAAFHGRCIMMPLGALAGPSPGCLWAARSQRWEVPERLLQEELGELSGRLVEVQWWPHDGLAVVQPGICQNGYKQPSG

SEQ ID NO: 961113 - protein, 109 aa, Homo sapiens
MREICALAGRAVRQANRRQVLGGDHAMMHGIDPTGTYHGDMRPAAWNCINCVLQLMATWLASTVAPAAVLCGSWSPVHQWTPVLLCVALLGMIFLAWTTSFSVSDVVAW

SEQ ID NO: 961114 - protein, 115 aa, Homo sapiens
MDGRPEEKSPHCTASDTSSTMVGLFIQTRTDSLVCQKYTGWYTDSILGTECKGDITRVIATKCQKGQKKSEETKHSWTTRWYPGEERLDDVVNTLWRVDPFEEKFKVKIEVRRKY

SEQ ID NO: 961115 - protein, 89 aa, Homo sapiens
PSHVRRERGSRGSDGEDASSRASENRGSETTPSIPRPPKGPPPPHDLALPLLLLPSAHLCFWSATDNGESLQSRTRIAAPVTPCVPGPD

SEQ ID NO: 961116 - protein, 140 aa, Homo sapiens
MADVTARSLQYLSTRRTRILCSKTDLYSALTGPAVDEPTGEVLSLVGKLEGTRMGDKASRGPKRRCKRVERRMPKTNESVIEDRHEITHDEGLYYYCCRKRIEREWMGHTSTCPKNYHENSRQQRSEGATHHNITLLSLV

SEQ ID NO: 961117 - protein, 145 aa, Homo sapiens
MVCHCENPCVSARGVYTPSRKYVAKKGVVLKVGVRATGKPPPIGVAAFTPWEPFTYTENPGKPPGSQRLLGVHGPRGLTTSLSGEASYVNLPTMARCNPDSPLALCGLGIPCTTGRLLRGYRWGRGREVWLGCPSRTPGGLPLTL

SEQ ID NO: 961118 - protein, 245 aa, Homo sapiens
ETDLSSPGGPGWMCKGAILGSPKPPPPKVTRQFSGLKPPRDSLGRLTGALEPPLPGYKFVVFISKKTGVLLPCVKSAVSLKLLRTSMCRLRPCHQAIPNGACEIIHGCESTGVALVLLEGCNPYSHIMYIKERVSASNIYHQRCGAFRPRNLVPYLFRSHEAYGFGVRNNIFMCGDPWCIFSHRGHNTNSVYVETSFIEKIELASWVIILERPFIWDVSSGTKIRRARQNWCAIKETLSKKAIAR

SEQ ID NO: 961119 - protein, 170 aa, Homo sapiens
MSGLSMLRRPGPRTRHIAEGGVPPAQSGCMTVCDGPGKAGRPIWRACCDLLGGRSRANKVGSSDIFAHQSGVQGAFVPARPSGQTAYLPWGVQARLPIRARLSGPAVNPRGAAAGVARPGVGDVYKPIAPAQQQPPGSDPWAGSRSYRDGQSPWCCGGTFEKTLFDRLRY

SEQ ID NO: 961120 - protein, 135 aa, Homo sapiens
  misc_feature (4)..(4): Xaa can be any naturally occurring amino acid
  misc_feature (34)..(34): Xaa can be any naturally occurring amino acid
MCVXRPHHILKHKENVLSPATSLRQPSQDQHVIXRKENKCYPPQTCAGMWSAISDEGPEAPTPWRRGQKSPCVKWLKEEKRDPRPPNHRMPPVEAPVCRPQEGIIKGSSRGLSLKKNKHQTTNNKTHFVGGKYHK

SEQ ID NO: 961121 - protein, 204 aa, Homo sapiens
PNQKVPRLNLQCRHCSEMNSLHLGLSGTKPSFWSQGAQPQASQVISPTAPNPRKARWELEAAPWFAQVSQWQAGSSVTLNVKRTVTNKHYSGYLRDLGMRFRERHNRWVSVCCAHKNSKDIAGAHLRRQRLTRRCQVYGTRRGCKQRIRCSTRAHRKEARIVEVETLKRGIHTFKMDLQEVESITVAVNRNQRKMSTSTGLLGP

SEQ ID NO: 961122 - protein, 119 aa, Homo sapiens
  misc_feature (115)..(115): Xaa can be any naturally occurring amino acid
AVTVFIDDESRLLLNPCVGRGTKRNGANGMLEVLLLRDVGSELSKLGNGQGRGPRGTTRRPPSHPAQIERAAWSPAQALAKGVGSPQTLHAHNLVNVKTLSKGRFFQKNLQNRGXKIAL

SEQ ID NO: 961123 - protein, 164 aa, Homo sapiens
VGRMQMVDYYAVGPRLMVSDDEDELHPNIDYGQSLPLAASAPGVELRCYAKLPQIRVRNAWYLGQWCCLRLLAARCPECHDGTLKELEVALMAARQELDAPAGLMHMQSAQRRMRELVQQKLEEMRNEGEEVCPGTVDTLSKDGFSKSMVNTKARERRRRTQRR

SEQ ID NO: 961124 - protein, 257 aa, Homo sapiens
  misc_feature (186)..(186): Xaa can be any naturally occurring amino acid
  misc_feature (253)..(253): Xaa can be any naturally occurring amino acid
VYVFNYIFSIDNYIQVMKPGLYNSPPKAEEKQIHTQFTEEVTSETPGQTAAKDASWGQGRGPAAKAHHSSHVGAKSVGTRRRLWVEGRASPCIVSRETYNLSREGCPKLRESTRRRKHQRESAKRGPPVEDRMKRITVLRLNREEETTPLLPSLYRDTSVVQQSTDSYTTRDDYSLLAPGRAGEPXQSTARNIYPTTRSSTYIESSSAQQQGAMSTTKIAYPRIHIPKAPLRDWSTPFPKEGYPPENDPLEHXMERN

SEQ ID NO: 961125 - protein, 209 aa, Homo sapiens
MGSPGPFVSRPDLRGCCTGPQPALRMLVLPSPLPSAFWRFVLRGEPLEGPSPVGRCRSPEAGPSSSIVISPGFISSMGQPLSCLLDTQGVPYSSSSGGRGSHRGSQWAMWGSMAHQKVLQTAPVCSRGLRCTCPTFSRHRYHAHSECKARSSVTSVVKAFKRCQPLGTDTIPIHLAGGGRTHGLPASALARSGDAGDLAITVGCPLVHS

SEQ ID NO: 961126 - protein, 67 aa, Homo sapiens
RHVCTSSYLSSVRGYPESLMNLAYTCVPMCGYELFYQPARSMHTRLHGPGDFTDDHSRLTAVANAVL

SEQ ID NO: 961127 - protein, 81 aa, Homo sapiens
VVALRGGCVPRRWSCWMHCVRVQRAPATREGAPACVPSFATRALYVPCLVCPASPLPACQHALCGDCAVCAVLCADCAPVV

SEQ ID NO: 961128 - protein, 177 aa, Homo sapiens
MMLWCFICALASWLLPCAKVLHMQHVLSCAAHNDNVLAPQTWTCATCFLLSVNDGGEVDTPQQGDWCMHMRCALPVLVKPHIIPFILDEIGAYIEDRHICGVLARPGVTISSIEKKLSAFLAMPPVVILLLMTNTPCRCVLGRGVHLCMPPVHCTAQVEGPRDGSLAAACLMPAVPL

SEQ ID NO: 961129 - protein, 227 aa, Homo sapiens
MSLVIPEKFHAYFAEYSSTKLIDGRRKIAFAITAINVVWAEAYAHVVLRKADIDLTKRAVRTQLMDEVETVSHRVSAESIASDKSPRTGFLNRQKDVKDGKIQPGPSPMALDNYSSVKHLDATEEMIRAHRGSCVTSGAFVSEARHTKTTGRRGRTVGVSKQEISSVGLVCESNESYTLVQTKNPKPEGHKCGAARTGYDRGSGLNCARTERAWPGGENYRSPERGP

SEQ ID NO: 961130 - protein, 225 aa, Homo sapiens
STEPRLCRSCALSTPCRHAHHWMMISAALVCDNVLLCMCNGLASRCDDAPRAVFPSIVVCAPVHQWRDVCGMVSEDDSYVWLTEAQSKRVHPHPEVPHRALASVTNCGLTWRKSGTTPSTMSCCVAPEEHPCAADRCAPLNPKASREKMTQIMFDDLQPQPLYVAIQAVASLYASGRYNGIVMDSGDGDTHTCTIYEVYATPPCHPEIWTWHAVTELTTHEDLTT

SEQ ID NO: 961131 - protein, 129 aa, Homo sapiens
MLALTFGGLGIGRCHYLVAPSGNVWSLVYGKKPWNTRGLCHPLRRWWLRMEIIGILQYWGQPLWESLGHQTYGGVGDIRIALGANPGEPIGLRPGGPGMRSQGIWGPHHTRKPDGMCEKTVNIRGYGCT

SEQ ID NO: 961132 - protein, 72 aa, Homo sapiens
GKQGLGVAQAGSPAPGLKQPIHLGLPKCWITGVSYVAVATEAILNGAQTHSYTECKGPLHVDRSPSPLVFRY

SEQ ID NO: 961133 - protein, 258 aa, Homo sapiens
MMLVDLLRVGLQKGRCMSLHGALSKLIRSIRKRACILARCPPMALHTRHRLTADVTCPPSRACRHITCAASGINNWRCPIPGCPGPLRRLRPSCVPPGVESHFFVGYFPIVSLIRTLQRSLWDHTIPVPRGVYWLRLVPSVASRFSPPALLSTASAFSTFTLRLALSRAMSLSLPPISDARQHRHAPSSVLLHFTHYSCRVIIPRPPISSSRLFLDLSRVLSFLFLLCRPFRDRLQWMWTPVWRLSIDLLTQRWARRH

SEQ ID NO: 961134 - protein, 250 aa, Homo sapiens
HCAPTPHPHPARLPGPPQASPAPTASSSSVPFSTDCEDISTCVHYARQHASDTGYDDNDLTPQWHRGDQFSQHHAGLLKTPSPIQRTLIRAPQGRGQDALIYSAHLAHETYTDFLAAPRTACPSLLRRSSTLRPEPRLHLRYCAVALAGTCLPRLPWPLGISCLLLATPFRPTLAHTTTAPWLAPRARSGPSGALCIGPPPGYSLPDHLSPYPTLSSPQALASPGPRSLLPALCSLRLQPHTVHSPFVLP

SEQ ID NO: 961135 - protein, 225 aa, Homo sapiens
WNSELLMGLRAPQRVPGFCGLKASETWGSWVSKHHLAIHYAGRVWGLFGMVGMECAAVQGITKIKVLAIFQQAAVGWRLSASSCDLDVQQGLILRGPVARVPRARVRGASFVTQRVQQDSLFERASIVVGREGASTFPRGVFLQAGPSEFLRESRSISRDWDWYVSALVSVVSAVPTSARRCGAPGGALLNRAETSTVSSSSGFFRASSSYGARMFGMIWGGPEF

SEQ ID NO: 961136 - protein, 105 aa, Homo sapiens
MLLSSVCQWESGAGPGLVFPGDVISCVMCVVRKGALKWKGSLPLSCHGICGRLCSAVAEWDQCDGLSCSCDDHKFAMRYALNRITGVEEQVRQRTPSGSGFYLLT

SEQ ID NO: 961137 - protein, 261 aa, Homo sapiens
MDDTNQPNTQKQEHITRTEKKKTTKTKNTQKHDTEEHKAQNESKTKKQQDKNKDTHTEKKEHQKNKNNKRQRLKGTERGTTTQHKHTEQTKNNTKKSNKRHEQENKAQRKQQSTERTTHNTTHDSKQPTQTKKIQHKQQQKQNKNKKKKNKKEKQRTAINEETKQDKTEKQNNKKQQEDRKAKKHKQSTIKPQKTHQKKQQQTNRRNEEHKNKTHQNPNEKKSKQNRNTPTITEKALRKNKHRTHKEKTQTNKKKPNNTKN

SEQ ID NO: 961138 - protein, 33 aa, Homo sapiens
  misc_feature (1)..(1): Xaa can be any naturally occurring amino acid
XCAPGEKIAPFGSRAGANMWGRGFGPQNRVKEG

SEQ ID NO: 961139 - protein, 117 aa, Homo sapiens
VCCDHRLRSEPAAWPQQWLGDVGTTISCGAPKELGKCWREPGLSRFCLAAVVRLRPVPPSPRCVHIRSCLCPSGDWTHILPGGAMKLGPDEARWAPCSLPLSRGVLASPGFVLSIRI

SEQ ID NO: 961140 - protein, 67 aa, Homo sapiens
GLFPLTGVLRPGVRKQSTADSCALLSHPDGWSLCASCCDPVNLGAHRCDPAAPAPCLPPVGFHHDRT

SEQ ID NO: 961141 - protein, 215 aa, Homo sapiens
AARKAMPDSGFLGLRAHFVWTQTLMSVRAVRCAQRNKKLGACAVLLLAQGCLLVCVGWLTQYPVRTVLATCDAALTLLCACFVMMCPQSERTRYFCCDSCASKVRNMWLDKRNDETKRSETDKSPCIIVNGRTAFRGVGPSNSRSDGEPAQYPRKGSPVDDPQRKKSGNVSSAVPGPLRNSQSVVHRSESFDRKEGKEPFPIVGLVGNGGECQWP

SEQ ID NO: 961142 - protein, 159 aa, Homo sapiens
LTSLTRRWLPGPSRFHAGAAAAATWQRPRTGVGRFKTNYAVERKIEPFYNVAGKAQRGPDWPAPHSAVCGTRVNILEVASWGRCCWSLEQDGPWRTSTAFDHQPMTIEVHGDMPDRAIACWLSCGLARVAAITHACGKADTHWTPVANHGLSDHNLHFC

SEQ ID NO: 961143 - protein, 123 aa, Homo sapiens
  misc_feature (5)..(5): Xaa can be any naturally occurring amino acid
GAVVXRSQEGGVSICSLLSTVVVSLPTLPMEKLVALLSPKGLAGPGACEDVSSVPVMTKTFASFRSECEAEVGWNLTYSRAGVSVWVQGLWRWIGTLHKDQCAGWTGACDVASLRHSTTVPYK

SEQ ID NO: 961144 - protein, 235 aa, Homo sapiens
FCTLATREVFLEAMNVGPPEQAVQMLGEALPFIQRVYNVSQNALRLSTPCLDSAPRVLWNAMVACTVLSCLHDLWLLCGQGRESRGMSLLGRCGELEILCRPCELSWSEEPQTVTEKVWRPAQKRPTLSVRNKTPQPVVSPSAYYTRAAARASPVCWCRAEQAGVGCRARRARRVAPPSPVGCICGPMVEVPSVPGCGGSILSSFLASDLSSSKAVLDPFLPGGGLSPGTVPQGW

SEQ ID NO: 961145 - protein, 160 aa, Homo sapiens
MPKGKRARERRWSPAPVVVKKQEAKKGVESPVLEKGPKNLGMGQDIQPKRDLTRLGERAPQYKSCSGRRAILYKAGVKGAIRGIYPGFTQARDRQTDTQRGFKRVPQVTDQKNKARKRKPENVVGPGAEEKEGWRDKGGRPNEKEPPGPCETGGYTTRSH

SEQ ID NO: 961146 - protein, 213 aa, Homo sapiens
GVETYRLSHGYTVKAQPTAGRPKARIPQSLTSVSADETGPCGVRCRTQKKRWEPGSPPECAAGLAWWSPEMAACMTMPSDHPVCMHVVHVLVSHPNGHAMMPVLQLSPHAVSNDLHLDVASNDMPEYNVLNPHDVSLKPSDGWHQSVLSDQGVLGLGVVPRIQEELTPGLPPSISYRLCPSDHQSLTPVKQAPGPGALSATTGADTRAPGSPR

SEQ ID NO: 961147 - protein, 211 aa, Homo sapiens
PLQPQPKSRWIRDVTHGLTRIGAHSHILGTGVSWTDALEPRAGFQGSLVGSAGGTRGRLRVVLDDDPWKGRLPVVQSLLLASPGHGGKTAIAIGPWRSALEPLQRHITAICRSSESLSPLEIEQDRGRFDARAITGEGPIGPVRQFHREAKTRSIPSRNESPDYGCQTPPGIGIPDPGNPRANGASIGLAAKNGGAPYKGPNQNELRRPRS

SEQ ID NO: 961148 - protein, 300 aa, Homo sapiens
LTLFALVCRPGSGSWSRVRGLTADGPGLVSPGLVPVTPGAMNACDVARGWLPAVLLDNGCNLPARAGVRTRTPTCCRAPQGLLDDGNDVMCKLTGWQGQLWVMGMTGKNGVLSELRALRAHTQDGGCLENIDGHAFCEVTIQGDATVENHAKRKMRCFTWQMGCLKDLRVPCSVPLAGNCLAPIPDRFNWPCLQAHIVVTLAIKGGFGWQPRALLFDLFRTLYLAPLSEKNFFFGYAPFSVVSTNAHIGEPAGEGLIFSSASPVAPARWYKVAWRSDSRLPWPLNGLERRLLFQTSFGGS

SEQ ID NO: 961149 - protein, 40 aa, Homo sapiens
MSAAHEPFQSILPDRSPGRARWVTPVIPASCEATQAVPAV

SEQ ID NO: 961150 - protein, 229 aa, Homo sapiens
SCTQCGLHGLSPGPSMCSGLREDLQWTQSTLWQHDEDALADTDFPCNICGKIVHAARHHDGVTCGANLGLNALRLRMSVACAYTRQYRLMEHMRVHSGEKPLRVPDCAGGNVHPSSANLISHLLQLHISHSLEAKKHRGRPIMPTFASPGTHGREKRGDEQQAGGKHPGSKLEGSWVAPLGPKLHNTQELKWNSSRYQCKSREEGQPESKPCLATQIHPGPHARRGEPT

SEQ ID NO: 961151 - protein, 122 aa, Homo sapiens
  misc_feature (106)..(106): Xaa can be any naturally occurring amino acid
DSSILVILDNPRSIPNTPKKGSLYSPALVGRREGRQATRRPGVLFGKVHTNPVAFPFVGSKRRKTPWITQYISGLINVNTGAQKERHTLECGFTTRAGCCGDNLSXSLSTQNICHMMCTPSV

SEQ ID NO: 961152 - protein, 225 aa, Homo sapiens
VPTPACLALPVCAVRCFAGLVMFCCGLQESGCLLGLVTCGVPRRDCVTGGAGCCCGPRDSCRLHIPVPAHEMPPHVKSPGWTEVMAAAALTMPVHQPSPSGGPQLQPSAQSLAWALEVSALCAVPPVQLHACSMQQWRLGDGDLCHVTSPLRPCPVSPNCPPIAAHFLSGEPTLRTKEEPGPGHCSSVCGRSCGEVCLSTASGDSRGHNPPGLHLVRHGSSLDQK

SEQ ID NO: 961153 - protein, 104 aa, Homo sapiens
PLLAWLPLRRVDSSGVYFRGTLVQRGVGLGRIFPRPVVCDVCGSLAALMRTSQAVVTQGSLCFGTGIYRVTLGYRGRGHPNVYTCGATHSSTPVCTPAGWRLDR

SEQ ID NO: 961154 - protein, 109 aa, Homo sapiens
LLSLPCVIPFLFAWFLIAVLTPARVFRGPLSSVVADGRIFQAGVVSWGDVCAQRNKPRRVHKAPSVSGTGSKCTIWGIGAGAYPYVYTCGAYPIVLPQCARLQAGVLDR

SEQ ID NO: 961155 - protein, 241 aa, Homo sapiens
RRRMLVVECVRTAAPCVWGAEACAVPSVERLGVGGLHGSAALPRGPRQNSLPGASLLLLMPEEALALVPEILAAVTLVSCPASRLSCTTACALTSFKRQQEESFQCCRAALCMLSALGDPSSCEVLEKITEVPWLLMKQKQNSASGCQLNASEAWLEPVLPKRIETSDGQASGEQEEAGPSSSQAVTLKWGSPLAQICSPCPAGHCQASTGQGQALDWRVQSKDGPSGACQNWAKYYRELW

SEQ ID NO: 961156 - protein, 134 aa, Homo sapiens
SLWVRIPTFQPATCVRKKITIFIYDPAPKKGLKTQKNKPYGHRCGADRPHAICPRSNERQGQLYVKRKTKLNTFYTTKPPTNFWDIAGLGTQQSYTTGGAFGESRDKAQEHKLSAPSIIVDHTRSSHSLYGCAK

SEQ ID NO: 961157 - protein, 176 aa, Homo sapiens
RILVNFILVRITVHEMITSYGSLNLQIREIIYKILQKHSKKTRSSPISGSGSLFTPKLTYGWSSLGFKISGYYYWCLPSFWIFLLVPQCQNFQSLLRFQMAIFLVYAISEQSSMDRLVWKERMSWPGAQLFSPWCTLVFSKPGAPSFGKSLLSAGGTHQQVMGPVNSPIWVSRCRE

SEQ ID NO: 961158 - protein, 335 aa, Homo sapiens
ADALRWSNCFFGATYRPPGDEPSNSLGATLAAVMSQAAVTNPLRVSRVAVFTTSGCWTQASGRRHANGRPWETIPSGLGTGPVPAMGQGPRTTQPQGAAHVVCRRVRRGCSLASLQLHICNAFCDSHFSAEESSLGGRCSQSRGSQTLAFLLFLSVYQDTGPTCHVPEATLAQPAGRSLLPGCRLEFCARRIQCGDGPCRIGEPGPGGERFAVSVLIHLMGTSKGPSMSSLHWTALAVPCSPRWDSDPCAHQSSPAAEWGHQPAPTRVTGALLACTYCCHSPHWCKWEPPPGAWGHSPLPHIRQRPHPTPSVSCTCDSMVHCVLPKAKLKAVVPN

SEQ ID NO: 961159 - protein, 239 aa, Homo sapiens
QLRRKSLSRATSIRCPSAHGPGLSVGRGLTPSCSSPPPIHAHISLPPLLVLHVGLLCLLPALPASVSPCSLPPPSVTMCLLVSLQLLPSLQWLAPDTNSLFPLMRWEAVTHSSSFPSSPDSLGSVAPVGMWKMASYLLLCPSPLLASVPVRDNAPGGMAAGRCYLCFRSARRPLQLLEDPYISCFIVTFGDLQCEGMQGDGIGIPTYDPPLSLMPDVSPWQGVLEARGNDKHRKAEDPG

SEQ ID NO: 961160 - protein, 161 aa, Homo sapiens
LSVSFFCAVIVVLVPLTRVVCVSPPLVDVDSRSCTPLLFCGSCSSTYFFTDDVFPFVLFRLWRVLSFSRVVFTHCGFVWLAGFGVSPRVDLWVVLYLRVIGVILCSRSSVSRFVILSCRYVSLYGFRSKSLFSGDLLCGLSYAPMNCCLFKGCFVRGYVCW

SEQ ID NO: 961161 - protein, 89 aa, Homo sapiens
VSKNLLNKKCRNPGLVFGTLGWARRPRARSNPPGPWSGRRVGCGCAGSLGALPENAGYHLLLALCERPESRTVANSPIGELQGPCCLEM

SEQ ID NO: 961162 - protein, 210 aa, Homo sapiens
QYWSKPINILWEEKSGLPSTIFIFSEANRFYKYIFLVSLETRNSQSSPLWPAGEALGKGNLGRHLAPSLASSPGGNLHQSIVGISWGPPHTGSGHIALHYSSPVRHPPTSLHLCGLCSPTNPPRHAGVAPRALQGQCRPIISEITPDTLEGDIFSPPVAVVRGGENFSPNLLLLPLLCVPRRLSKSLEGAPQLRGVETEARRLSGNIRSG

SEQ ID NO: 961163 - protein, 216 aa, Homo sapiens
RSNASLRISRRRIHSRYSSIMPAATAAGLLSKPVRMLRDPAPLPGVGSAPPAYQLRSPPATTTNLRGPLPGYRARPDYRPRRLAVTYGPYPGSPHTHPAKQRGTLTTPTYRPEARRLPPAGSTQGPVYQRAYSSGPAYRVGTTKARKTSLGRGRTPGEAAPDGPKLKPRRTTPSLPHTQRERRKPRQEGPPSTTRPYPPPPPPTAPPPRRHRADRT

SEQ ID NO: 961164 - protein, 287 aa, Homo sapiens
  misc_feature (131)..(131): Xaa can be any naturally occurring amino acid
GKPPRRENPGTITQGQPPRVLQLIAVNRPTPVGRVPFEPVGRTRSPKNSQKYFPLPSEAIGKKKRYWVYKGPSSLHRILYPEGYMLSRVVESSSSALIYAANLVWAYVPISIWGRRYTLRQLFRQIFTILXKAYNRVSLGYLLCPLWCNMRWSPTTTIYVCPPHVLLISRALSPKNTVEVCVAGVFETNATVCGVLCAHTCCRKRTRDSRTYSVCGDRAPCVTPAMCGVSPEDMCGRQNPTAQEKIPPILACPVCGTKLSEIYKFETPVCCFTTSFIPPQEFNSPFP

SEQ ID NO: 961165 - protein, 142 aa, Homo sapiens
MAHNGLLSAERQGASFPSWFTPPKETCPHSMWTHGAQLSNSVRKQLVASPLGCEMGTFQRSSLGEGAGSARPWRLTAMAGPGSSSPPVWTPESPSETIPGQCQRSADGGVVPANVMSLPVGALSSGLCSASLDGLRSRCGVW

SEQ ID NO: 961166 - protein, 148 aa, Homo sapiens
MSCFTWSTSLACRAAARLAAMALRQWPMSLLVAAPASSSQWACVHRAAAEGPLLPERVGCLCCCQCTWLCSAGVPHLLRSWSWLGNAGPATTRMTLNHPPPLQLAILQLTEELNNAAGLAVTDSPRDGVLPNIQAVLLPKKTSATCGA

SEQ ID NO: 961167 - protein, 252 aa, Homo sapiens
AVSYAAMAAQPEWHGLEAPLPQGTCSWRVVDAWFNQPAPVMILQERIGPVKPRRAGDRSRAPLSGSHPAHSCVCPHGSCTTTKGARRVLLASSLEGARGWPSIPLEKRVWSSGTTRHFLVGSRGDGGTKSHRHVLVALPKRSQSGLTGSYRLHNSINLSFPEEMPLRTRPGRETVSVGRTENCDTQLSGPVMPGPERSIRRGKLGVITEEEKNFKARSLSLRMARCRRTALRHTGKKSKEAEKGFEGNKPRA

SEQ ID NO: 961168 - protein, 131 aa, Homo sapiens
MRKHRGKSRPATSRKGQCQGGWTRKNSCETGEEEEGILGQEILGRRRQVTHCQCRPAPSRGGGSFRHVTVQLVLPVPKGDTLAAMTPKKYIGTISYSQMAKGVKENKKDNPETSRRTSVASGPEMEVLPKT

SEQ ID NO: 961169 - protein, 177 aa, Homo sapiens
TPVQLGCVPWSALCGPCDGEPAVASCGVFRAVAFGAGVAAVDGGRGRGRGALLECNGLRIRSGCPVTKLGACLVKDMKIKYPGGDLSLLPCPLRNQRSLIFFLGASLKDEVKKIMPVQEADPCHGSAPGFKGNSSYIGDYNGHVGTGCKRCYQGRVATRHPVGAINPWPRISNQYPR

SEQ ID NO: 961170 - protein, 90 aa, Homo sapiens
LSVCGAVRWCECPVTLTLSPAFSEGPRAAPATTELPAGLKNIWPCNTLAMTTLSVELTDTCDACAMTVLLQRSKEIVAQTISQYAVCPSQ

SEQ ID NO: 961171 - protein, 76 aa, Homo sapiens
MRRRYFKLGKSHNPGDVSHVVSFNPSTDTGPLLGEEGPRACVGWWWVGSPLSLIEQKVVWGIEPGYMTWDVVLRAH

SEQ ID NO: 961172 - protein, 287 aa, Homo sapiens
MSSHLFMIGCSWTSPTIPHALLRICPPFGRLPLDVSRAPDPSRVSEPPSISWSVKLCWEVLRACAFRAVAVSATRNPMSLTPVVRVLSLPFEFESLHCVSCGSRQTYPPWVWGYPPRPGSPFAGHTELPRPFCVTFPQPDNVLAYTWAALPTHMYACAHYLCYRGHAFAAVCSFIDDPQFGVRVSCAFLASPFAKPLRSPGGGCTRPVAHLQRSVAFEGAVRTRRPITSRGPRVALSRQPEDFLGQGLMSGGRVLPRGRSHGKASLCLDRAAGMFLLGGPLGYAYLV

SEQ ID NO: 961173 - protein, 192 aa, Homo sapiens
AGAEGGAAGPDDGVGGLWPPRGSCPVLLHLLLASVVHCDVACVVRSIDCLAPPPCLGSLLRVPRAWDCLLDLPASLLDTCAVCQQSLQSLAVRLEPKLLALSINPSACCMPARAWSCQLSCAHPGGAATAEIQQVGVILVPRYACQECRQIDLVDNYFVKRHNLKLLAVLMKKSEQVCTSCEDNCKCSRVRV

SEQ ID NO: 961174 - protein, 194 aa, Homo sapiens
  misc_feature (1)..(1): Xaa can be any naturally occurring amino acid
XRARDCRRGDSMSDQQLDCALDLMRRLPPQQIEKNLSDLIDLVPSYVRISCLTVDQTTENCQRQGGVERITFMCDYNRDGDSYSVTMEYKYDPTLWRMGPCRHDSAEKAGGVTPTIAFEQLSRPVYMKSGRLICLTSGILESWVKLGVILITRRLCRWIKEDQSACLGYQYHVVKSAGEIHADAAHTYKLNSHG

SEQ ID NO: 961175 - protein, 122 aa, Homo sapiens
MRCLQIHSANVTLQKWGDMEACTSPWSCHNLNNNMDVESRTDGYHEDDTLASRGLLDADHYCYLMAQCGIMVYTRRKLQKLVLMDPITDYDILKVRNQTKAYQEDWKPMSTPSPWGDRELTP

SEQ ID NO: 961176 - protein, 100 aa, Homo sapiens
WNCINVYYNDVPPVLAKYVPRACARVIWSPAPWTPVLLCVCPSGHDLPVPVTDFCISVSSVCCLVNNLWPMCVHYTECAAELCVTLVLDVCEKCDVLRCL

SEQ ID NO: 961177 - protein, 210 aa, Homo sapiens
MWLDPSLLACLPLPPRLPCLALALGLLQAAPMCCWSWRPEGDHKQPPPPAAPGLFCCWASQAVLTRDLRPVQVASLCATLSAIVALACSMRRGECQPLHGARARAWAGGLLKKAERRDWRQSAAQRAGHGVPARRIYGRQHGLGCIAGTNIRLTRQYRHRAWSETTMEVPNPKTREPKAYDDPTWDIALSCIVGANDTWLENVKGLAQKA

SEQ ID NO: 961178 - protein, 301 aa, Homo sapiens
LAAWMIACIGCHVLVDVGLKMCPSALMWHWSWLCERKPVCLLENVLACRNVCESSLCLVSDCVTPCGLGNGVLPKWVCGGDLGMSCGPCCDAYLCGVTCVGLMPVVEPCPGMQVFPGTAELEIKRWLTLMCCLLATNVLFSRWGPPPTLGLASTSVVCPPIFWLEAHGPLALSPRSSFASSSGQPTAEQSLSSPRGMLLLDWGVGAWLELGGMPGPCSKSATRSDSSGLRASAHVEPFACGAVAVLATPVSGATGRGISREASRPANPGVKRGLGPYFPSWPGYVSRKAPSIRMCRHTERG

SEQ ID NO: 961179 - protein, 226 aa, Homo sapiens
GTRGNMAVREPGSLRSPTAAPGCAGAPSGTVPVLFCFSVFDATLVVCHTGAGYELLIQNVPHAMYVRPDQTCTCKIRGCSMIRLMEVGARIRWILPRRGFAGDAMQLQGVQPSVHAASSMHQLPLWDNLYHAYNAHDVIILPVSTARKRVHEPSHSTYNLACYALSCVEHETLSAKVAAEYSREVRVSLVEHVTTYRYNGLMETPVFKHNWMLTGCKHLGTFQEEP

SEQ ID NO: 961180 - protein, 273 aa, Homo sapiens
VLSHYKVLRSQTWVPRVSCHRNAQQQAYVEKVKSFPKDDPSKPVHLHSLILGYKAGMTHISAGKSTGRDTKVNKKEVVEAETICRDTTPWWFVRALVGYVEHPYEAYRNYTRLSYAETHTSDRMHRGVSIRNGTKSKKKAYYPHTAQKLDRMRMASKPAGERTTGSTEEVRDKVIQVIKDTAHQNNSLQPVSAKNARPTQDWEKHRVKREATCGPSKHGQGTANQAMHSKKYLRNQRRKDRNDMNDDNRGCQRAKSTRGTNRETQETARKQQA

SEQ ID NO: 961181 - protein, 260 aa, Homo sapiens
VHEAQLLSIQVAPSVLRLTMTSYMLLPVCLATSSFWSAWWLCCAPVRFVACVVSAFLRCPAFTVWCSCAVPACCILCPPARFVSSSSSGVCYCAVLCILCCAVTDLAVLTGLLAGQLMNANHAEPQLTCLASYLVTMCAAPWRLANWRARVLKDPRLGTMKHVGLGPPCDYSHYYTTILDLRDKILGATIENSSDLSCRSTTPCLAADDFLNQVGDGHRLCCIEQLNADINWTAAKVLDELTWQDRPGNADRGLKEELAT

SEQ ID NO: 961182 - protein, 78 aa, Homo sapiens
SPAALAAYKLVLILDTVDERMEPWRPRFSGWYDADLRPGGPRGGEALEGRRYEMLAMRFDICIHHQVQTESDPDPLDR

SEQ ID NO: 961183 - protein, 183 aa, Homo sapiens
MWHSRAGVAAVDGARGHRGLRELDGVQWPRIMAVDCPVTQSLGPALVKDMKIKSLDGDLISSPMPINGIRDHLISSWGPLIKDEVIKKIMPVQKQTRAWPAHQVQGIMYAIGDYNGHDRLMDVKVHPQEDGHRPSRGEPIIPWTKHLPLVPVTAGRLLGRKPRSAKHPHMSPAKGDMGRLQAS

SEQ ID NO: 961184 - protein, 161 aa, Homo sapiens
MACLLLLLVSLAVGLLAACTCCWADHAAMVPCPVLGAVCMQWCRWRWVAVCMAGVPHRATFLPGGCRWKMSQERPTFYRQELNKTIWEVPERYQNLSPVGSGAYGSVCAAFDTKTGLRVAVKKLSRPFQSIIHAKRTYRELRLLKHMKHEQCDLVCWTFYT

SEQ ID NO: 961185 - protein, 247 aa, Homo sapiens
MASAGVAAWADMCWSDVFACQRPTSRCLDTKPAACLLMPAAGPCASTCSSLPGATDSVTCPALREEENYSFLPLVHNIIKCMDNGQPWRSTSDLNCPQKQVPVMMLQCSSCTMPWHPPEPLNMQQQQLQSLREQVRTNEELLQKYKSLCMFEIPKEESDGYDFLRTDVGKPMACLPTTIPKLLLWGCWFPVDPQLSSVKLQWVRVAPVACARCIACCWSQRKGLVRRGFLVSLHMLECYNWSAVGKS

SEQ ID NO: 961186 - protein, 259 aa, Homo sapiens
EACHMKSGVCGLLPDLRHGNALYSSNLRDDTEVPFLDAMIMCPLARSTCAGPMPRAPCRPTTCARAYVPVHSLCLLCCPSAPRYCPDNGQGSSGHLPLWTRIMEEPSGRTEPALRDQHTTRRMQRIRLLQPALETQLRQRHDMRDVTARLRGSSCQQKRGMAKTRPIGGQRGEQGPRARGQDTRQPTGATNSTTGSRAQDNKVGPKRKPVGGQQDPDKPRENEQVRRSYTIAAHRAENDPRRPNRGEAPEQPTEKKHPR

SEQ ID NO: 961187 - protein, 269 aa, Homo sapiens
GWFVVLVLIVHVGFSCGLPSLSGCLVLSNILRRGATCISDSRRSSTQGRLEGGRSRVGGRRAVQAGGRLMGVKRVLVVLAGSCAAGRCLAWGMSMPDADACCSGGRGDELKQCQGDRWTAEKYSFMATVTKAPKKQIQFADDMREFTKFPTKTGRRSLSRSISQSSTDSYSFSCILHRYALMMRFLPERSSKTNSKGSSNFCVKNIKQAEFGRREIEIAEQDISALISLRRRAQGEKPLAGAKIVGLYTITGPDSGVIEHLCSLGVSPV

SEQ ID NO: 961188 - protein, 223 aa, Homo sapiens
MSYNYVVTGPEAHRRERLRDLDTELRPKTYTCGFAKNTRLEIYVCHRLSGLLALKEVGMYGKIAGHGAETVPNGGESNGPAVYLDSEVQEPDILEYKQSGESIDIITEPMAMYQDRIGRPSETGIIGIIDPEMPDDVACVYYDGLFKVITSRIAHNKEVTAFNILPGRDLHVHRMPSSYMVCQAPTILVMLPGPSGRRVKTYEVSTERRTPSGPWNRTFQSRL

SEQ ID NO: 961189 - protein, 102 aa, Homo sapiens
  misc_feature (7)..(7): Xaa can be any naturally occurring amino acid
MDRRGGXGTEEDISRPGAARPSPSGLPGSYRFKKRTELSCAGITRHVYAEGQLNMACAPCGTSLRYNRVLLEEKPETVAAAGIRNYPVIPQPETRRPGGGAG

SEQ ID NO: 961190 - protein, 107 aa, Homo sapiens
KKARTGCVGLQINLCHVPAIHDRHGQHWGCSARPGCLLHVLGMSSQSCWQGSLALKWTACGPVRSRSKLHSGRASGNACSDQLHAQRPNAPRVAPAANGPSQTSTPT

SEQ ID NO: 961191 - protein, 270 aa, Homo sapiens
LRLYGPVDGLLVTGMKGSWPGVTECRLCAATCSCGLCHMIPSDGTPDTGNAITKSVCLLSTWPPLLPTPVVPLCSDVRCWQILEYMCDLDAESATYVVLHILVLKTNCVPGDFCYVWWSSTCVAMVWLKSAVSKESAQPARLWCTRPAIEQLEKITFPHVSRLPVNQAPGMSSEAKPLYGTNWRTQNDAKLTARGRPHGGRRGFPSRKGSTLSDRRRGRFVGASQVLRSVQRGGVSKATGWPGFSGCEEGSWEPARWVLRRVIRRWTRPV

SEQ ID NO: 961192 - protein, 278 aa, Homo sapiens
TLGEEDWGGYAHPVKTIHAATQGTQVIEGTPITDIPTWGPSSTLMPGHILDSLRPPSQHTETAVVVNMPAQATVCQPSAPGRCPHCPVWWQVCPPQDPPACGQQCTWQVAPCMPSTCLPAQPVHDTSPQWCPCHQWAPHNLTRAHGLQMLLDHWRGEVMSYTDPGDTTREMEEGIRTSNAERKQFTDLKIVLEGREFEVHQNVLLPAALYYQGPLIQQVRAKTACTAGREEDESIGPCRNLKADVLGVACWKFDYTGVTWSSNSDNAKHCWWRQQFRS

SEQ ID NO: 961193 - protein, 143 aa, Homo sapiens
MVKYFLVPERAPDASWDLVVRRLLGMRVTRIPSMQTCLDVKTQYTVEVTPLHQQDCLFPADSLEQDQQDSHCWAERPISCQCCSLGVTSLAVISTCWTHQNQTMTTFTWNINHARLMVVAERCITVGTLTTVAGTEIRRESWS

SEQ ID NO: 961194 - protein, 127 aa, Homo sapiens
  misc_feature (42)..(42): Xaa can be any naturally occurring amino acid
  misc_feature (60)..(60): Xaa can be any naturally occurring amino acid
  misc_feature (76)..(76): Xaa can be any naturally occurring amino acid
EYLDEYYRLDYEDIIDDLPCRFKYRTVGALLTLASATERDPXLLTHKEPQPAGCSLNERXLHVQRQQQAGKLRDKXARTRHEGPELMAKSGRLFNVTLAEQEAETPAEATGKPQRDEAGPQRQLPAL

SEQ ID NO: 961195 - protein, 127 aa, Homo sapiens
RAARHDGPAGVLGLPALRSCLTLRALALTHVLHALHTLTVRLRYTLRTSALLALHNARRKRLTRTATALTRYLPRAEEASYFSSAHCDFKLAITTHYTQQPSSSSTRSRKKPLPLPNGPRTALTHAH

SEQ ID NO: 961196 - protein, 62 aa, Homo sapiens
  misc_feature (24)..(24): Xaa can be any naturally occurring amino acid
MGKVKVGVNGFGRYWAPGHQGLGXSKASWGNTGGTYLRLRPIQTGKPPLSTCDALQTLPVGY

SEQ ID NO: 961197 - protein, 181 aa, Homo sapiens
MLAACDVDFVPAKGLATSVLLSPVTSSVDCAFQLDAGDEAGLVCLSVYMHWPTTALVVLWCWVLPRWRLLLHPLVARGWLWCQCLPSGICPSVLGLPAVFTTCGVVLRKRAVTSMARFPQLDMHQLRQLPWTHPSEQHVLLAHGAGMGVDLVLNSLAEEKLQASCEVLGLRTVASWEIGKF

SEQ ID NO: 961198 - protein, 145 aa, Homo sapiens
MLPALSNRAQAAYSQPSRPSSVGCPSCRGGFAARPSGPGCSCRARSHVIGCYRPPRGHLGQRHQGHDRPQSLPAKFLALTYYWRATFWFPSLTRRQAAQSRVLPMSPLLVAHCVAPTGSLACAPFVTSCASLAIHAIRWGDQLKD

SEQ ID NO: 961199 - protein, 199 aa, Homo sapiens
GLMLIPRVSSCAVLQYFVPGYEDLLQKIALEARVRPEYGLGYVMAESKLSESTALDAQATEDQMELRGHKRWREAMNAWLFPVARIWVSEGSRERFRGFAVAPEAAGPRDGSVSRVLRCSADSGCMPDDAHAWLPVPGGCVVLGASSWRILPGILLELGAGIGIQMAGQEGAGARGMFVDEGSWVSRGSVLQVLTRATT

SEQ ID NO: 961200 - protein, 239 aa, Homo sapiens
MTILHKCPKTLGRYLVVPGQERGLRAIKQEKPVVTWVLCGEGLVVSLRRAQGCGGRGGQGRRGDLEGWWTAQLQGGLLFNPRGEVGHVGAILPLVKFHKREARLPRGEPSLSSGPPRGLGCGASRRIWGPVLQESIRGVGQRGGYTTSRCVHANDLFENVALDSRGKPSPMRASYPPKTNWDRGVPQSCQSYTRKPPGSHGTGPVGGQGHNPVWDEGKRAWPQTGGNNKICAMGALKKE

SEQ ID NO: 961201 - protein, 219 aa, Homo sapiens
CLDEDRQQGGMRKTIMLEAMIKKKEFQREAEPEGQKTGEVHDHEDVETAGNKRDAKSKSPMSTSSYTSYEKPGWLDCPLLVADVLALCVCFDTVWLPLQSRSRIMLTERKDDYRWRDPLGDGLFLLRDPLHCSVAHRTLLFLLRAPGSGDSALPNLILMTADAVTGARGEEGPRVQGGAPAEHFLALILSSPADELWAWVSCSRVLLFPGRPAMLALGH

SEQ ID NO: 961202 - protein, 231 aa, Homo sapiens
WGKKPGPGARAYPKKKGVYNVHGPFFGLKKCTFISKKKKVHKKCPLPCGPPFPSPLSCVPPLKPPEEIEPLWLWGVGVREKQTRPLRESERVSKTHTLCERGAIFSLSQEWREECVCVRKKSVLSQKCVSRKRKSPSLCVLYFSFGCCVAPRCVVLSFRRATQHLLFFNGDAPQNHPRSVPSRLCRRSRGERFLLWMVGTSIIMKLFMFHPRRCWYVGEMGGKKKGVAPND

SEQ ID NO: 961203 - protein, 54 aa, Homo sapiens
RAHCLPGQYRGVGASCARKLAPTEARPEVILTNFQASSTDARYAECGLRILGLP

SEQ ID NO: 961204 - protein, 233 aa, Homo sapiens
SGLVSLTLLKLSEVRNIWKSTGWAEASPFVEAPGDVLLGAWPSFSRLAWCRGRAASSKAGLGSGPVLGKPCDDMGAVSGTNSRITSPVLKFFVFFVEETGCLRFLVPSGSWGCCCRSGSQIFPLTWQGLVASRGCFTPNSSLALKPPLSTLGGRTCVAPSNQSPRGNDGRAKRKDVLGFSPNCFANEWSLELSFDRSGVLWDRRVWLTRVCAGGYRGGCRPHNANPVFFKMAK

SEQ ID NO: 961205 - protein, 139 aa, Homo sapiens
KNGGEWRHKGNPPPWGRPQRGGGRKEEGGGERERGAEGGGGPRRRRALWGEKTPPEGHTRGEGSSLSEKRERRTQTRKSTGEDPSSTTGGRGEEREWCVGRTRRGRRRPLEEGRDEKTQRERHRREGETQHESLRERGV

SEQ ID NO: 961206 - protein, 116 aa, Homo sapiens
MSQREGPVAQGDLLLGLPGGGGWQAGLWAMAPGLGWGPGVCHSSVLRACEHWPVLGTSPGALPPEYWGGVPLVALKRSPVCPGMVRGGQGPLWLGKGLPQGEPVCAWCLMMVTRVR

SEQ ID NO: 961207 - protein, 207 aa, Homo sapiens
  misc_feature (33)..(33): Xaa can be any naturally occurring amino acid
AAAVPPSDGCVLGSPVPRALRPGPVPRTECVPXGCAALGCAQAGRCAVRATPCKVWRRETPGRAARGFCPKPLRRMSAGSPALLYSPARTLDNAGHRWGNWETSTGGEVHPRLTTEERTCQGIFLSAPSKAVHECNFPGAGQFRGLKNGHESKTTGYQPEWRDTVLVPWKGELVKAQTPGFPSIQGAVGPLGTVGQFDRKARLSLIK

SEQ ID NO: 961208 - protein, 118 aa, Homo sapiens
MPGMCFLPRSHDDTGILDSIGRFFGGDRCAPKRGSGMVTHTIPVKNCSHTVSLPQNVTRPDPRRRPRSPLSSMNIVTPRQYQPPSQGTGERTVPDADFSWGAEGQRPGFGYGVRKRPI

SEQ ID NO: 961209 - protein, 205 aa, Homo sapiens
MPSKFTLPAAPRMRASVSRVSWSLRGLVMVTDRERLRTIYNREFKISFGTPVTLVFSSMLYVNEDCKSGLRHQDSGQVLQTRTLGLTCGSQKEENEAGGQIIRQRPQVTGSQDLSMTGLEYLHGKHGVEIVEVQGAPMKPEMGSVLFRLDLSRKEGADPEASEMAGTQSVTSVTSSTLPETQLVSYMKTGVACPCGPVMVEPLSL

SEQ ID NO: 961210 - protein, 172 aa, Homo sapiens
MVNSRDAVPDMVMVELALSPSIPSPVWVSQCALSEDVSWLKFGSACRLALLMQQEERAKAAWEIILLNENMSSWSSRMLGSLCYLEQELTCRRLPRWAPQSLGPHKTWARLVCCTPLGPRVASYHVRPSWAPTTNSFAHWEPLVPWLVCPRQSLADEHRGGCMILLCVPKSP

SEQ ID NO: 961211 - protein, 134 aa, Homo sapiens
MDTDSWALAVDEQECGCQVDDQFADHWKRKSNADTNGIIKTSTTADENMMKSEKDVTDADQLLTNKLIRSNLVDNHETKCEVLQLGSKAPLMYSVKSFDTSYRLKPHASPGKSMPWDFNRTSKIRENALPMIAC

SEQ ID NO: 961212 - protein, 50 aa, Homo sapiens
MVSPTHAQIPDGSGPHRIPFRAVKLSCPIRVPPVGSQGAYLGAEETIASV

SEQ ID NO: 961213 - protein, 140 aa, Homo sapiens
MLPSPQLRSSKKMYIRLGSGHTLCKERQDMIKNEVPSTEYDLSDQEHQPSGWRLSTDGEVTNDSCHAERLCGGNQEAGLTLRKSLLVQTKRRALEKTDLKFIDTTSKCGHGRFQTMEEKKHSWTTEARPNAKKTSYCQTT

SEQ ID NO: 961214 - protein, 43 aa, Homo sapiens
MNIDTKDLVCLGLSKHLLAVWYLLRRHWTCQQPFWPGFSLNGV

SEQ ID NO: 961215 - protein, 139 aa, Homo sapiens
MWPKPGSCARVAPGPLLSPGRGVRKVSLRGARAPARREGKGRGRCRGPESFRRALGAGLCAHPGHSARGRAAMTCEWPSPAKEGSPRSGVWCAWRAWRLVKKTGRGQRSGVCAARKGRPRFTTPRYEGEEDFHIREGTG

SEQ ID NO: 961216 - protein, 30 aa, Homo sapiens
MGLNGSWSGYPSWFLTPGCQYIPWDVLLPV

SEQ ID NO: 961217 - protein, 244 aa, Homo sapiens
LRPRPSYRSPLRNWTSCAWPCEHAAGCNCLLPTLCCMQSDPDDVCWCLLCALDTPMPSCGHTVKCPPALNRWTLASVLPSCVLVEACLLEHACCHWCWLSHGWACNLAKRGAPPGRGPCAYPGNPENVANGHTMPGWGPDCGDTDIIGSQCPERRLSLLLALGLGLNTLGRRGHQETPGMDYEIGARGQSKQMGPSRSESQRDRGHRKTNDNHMEGERPGQHPIMRPKLAPKPCAERPAASPPW

SEQ ID NO: 961218 - protein, 210 aa, Homo sapiens
HLDLPEDFQADGVCSAGVGRSFYQVQPPALKALHGARKWTLSKAREECQCITHTSREPALCKSASTFTCCAMAHPESSETVSSSDMEVFNANIIQLAILSSSLKHPLRLYSSSTASKWQVSRSITSHLQDPYHLTLDWVANVEGLLQQEEYTKQKLKRLWVVPDQQADQQLPGSSWNEVLKIALSDGFCIDSSHPHALDFMNNKIIRLIR

SEQ ID NO: 961219 - protein, 175 aa, Homo sapiens
CKSLDIFTVGGSGDGVVTNSAWETFAEIPMSREQQKRCENTDDKMFAETSSLAFLPVFDQTGLACECEPRGIRLSSVCDPNGGQCQVPGQSWLEEPATDVHLELFGYGAQVEWQTVGECHLQRNLIECLHAITGQLGQMHTCFQVSVCSDSVIGAYLGTWGFTNLPALTVQWTCR

SEQ ID NO: 961220 - protein, 120 aa, Homo sapiens
SVWVRGPIVRCYEDASPCPRAHPPLAVAMSWTNNCNTCSFLAPFGCISIRGHSQCVEAVEILLLTLSPLSKRRQRICRICAETMPKMDKHKNSLPFVMLVPSILIKCGNGDRGSALPGSH

SEQ ID NO: 961221 - protein, 121 aa, Homo sapiens
MSTPSQTFTKDLPFTITHFHAENACICRWERLPQWRPLHGRPWWDTKNPEPQSQAFSVNSRLRGDYQCYTLGKGSMKKRTIWSTDIPSIFGTKRDRNTVTIHTYCALLKRLTCRDAQPVMD

SEQ ID NO: 961222 - protein, 245 aa, Homo sapiens
TTGTTMESAGVVCPYRAIDVPVHVKHCTRTWVNAAADDPSDGLALAVSDVPCSRDTYVPIMGQTVYECNLCITSSNVVMCIDVPKCNVKQRYADGLLVAMCQTHTYASLTLPCVLRPQCDNANAPVILTHCAHCETITKLNRSGTNATCVTFAYAYNYAKVAIETFQSHYVWNHWRLHTLRGTFGLRRFGICGLNNSAPPNLYGPRKLLEEQLYTLLTATYEVNFGAQVGTLVDNRPQLGANGAA

SEQ ID NO: 961223 - protein, 39 aa, Homo sapiens
MHGRNNVHSICHPYRNEAHRADTHYEHTIRDKQQRRHCE

SEQ ID NO: 961224 - protein, 184 aa, Homo sapiens
APQICVVGSGPAGFYIGPNYLSKHPQAHVDIYEKQPVPFDLVRFMDVRRLITPRRMNVINTIYPDGPVLGRCAFWGNVEVEQGRDWCQELRRGHTTAVVTRATGQRTIGTTVNDLVTETARCVLRPLSSLGWIQWRFLTNQERGARPEAVTQPVILGQGNVGSGRLARILLTPAEHLRENGQHE

SEQ ID NO: 961225 - protein, 129 aa, Homo sapiens
MPCSDLMLPAVPFSLLRVAPAVTPSATGTLHSLPLLTMCLLGCPCAAWMDVGLHVVLCAVHACLAMCYCAAPLPPCLPSDDAPALCACCPALTCLLLLMPVQTHACCVVSVRSPVHSIAVTCLAAVVPL

SEQ ID NO: 961226 - protein, 144 aa, Homo sapiens
MGLDVQYSIPTTYVRMRKYLIRPQRSIYLTTQLTLDFAKREARESSEINEQASPAGLHICSIDALIRSVYDKAEKSKQPIAQVFSPGYRPQNPMYDPHHERHTTITAMEATLYNTKQTVHEGEPTAGALKAWKLKTIQRATKEG

SEQ ID NO: 961227 - protein, 196 aa, Homo sapiens
SIHVGYGRSSCALLLLSVHFSLDVAFYPVSSSVCASIVFIPVLCLWGLFCVSISSFMIVRFSVYDFFLCLVVLFVRVTSVYHVPLGYCVPQHATSSSQCPFLSLPSRTIFYEDVDFIKHVYVVYCASVTLGVRVSSWGLSIMELAVLIGIEPVTLLVSWLSLDRLYISIWKAISTMLCTCPSVTHLSYQAAIGRRV

SEQ ID NO: 961228 - protein, 256 aa, Homo sapiens
  misc_feature (31)..(31): Xaa can be any naturally occurring amino acid
MGWAHAVPCAAWLPHNARLSCVPEMPCALQXMLTGKKHVGRMCAQIAVLLCFECAWVGIAKIVLECAWVDVLWADRCLHVLLAGSQFAQEKELSVRLCVNDVIDLVCIMAAMLMCCVACLFGPPVKMHKGQLCLPSVRAEDKAGSAVHRAFVGIVCTLLSPAFVWIVGLCHCTITVHQQARSLAPGVPEVTPGNLQGDFPSVQEHYSGVALKKEAHFVGKYLSAWLKVVLLSLVYNGVVSAKQIREQVCRNGSCCR

SEQ ID NO: 961229 - protein, 107 aa, Homo sapiens
MLREKMEYSASCSACLCPASPTMPPPEYPWSNGRVCCNGALSAVTNATFLPAMCHEPGCLSACVPANGHQHVSGLTLPAVNWWCLSRAHPSLVNPDLTSVNVSWVKK

SEQ ID NO: 961230 - protein, 112 aa, Homo sapiens
MRDPQVAGDPVTSIKTSSPAEQKAIIPCNVPLPDVCSPLVPSKNLCTSPSSSSPPASAVALVLGNWREYRSGPQGGALLSLIPSPAVSTGSLCEVRYFVTAASVLCAIGTWA

SEQ ID NO: 961231 - protein, 215 aa, Homo sapiens
MRGMWAASASTLWSQRDLGRGARSRLRMRGPCCGDPCCKRAVHWLCTESWGLMYHCELCQLPLWLLTLPICEPPSCSPVAQPRPYPSFLVLEVVSSDPAHPCWEVQHHDGGAPVGGGVRQPRIAPRQLALGNSPSGLGQANDLGRPHRKLVTCQASGEPLWACSPHFLAEIDSWPPLKSLCGTRTGWCNWLPCVGPNGPPGKLQNTPISRQPGRQ

SEQ ID NO: 961232 - protein, 243 aa, Homo sapiens
GLDKTRWFEKHQSTCKQVWLQMPGLLPSTMQIYKKHLVLVPAGLLLPAPPGQKEASYDPVCTERLDEAAGQCVCWVCALWHFGGLQLHPPFPAVRTPTCPALAEPTVGLLHGSPWQRHHGCHVPMCMQEHAAEMAPTSPVESDWEPRLDSLLPCCSWHLTPSLPSVTQAPLMWSAGLSSWVDTGEDEYDPWWDVGPRDPWNQKACGKDFAFGGSCIIRRQSHRRLFIKALPTEVVQKLPCTGC

SEQ ID NO: 961233 - protein, 330 aa, Homo sapiens
MSNTFSFINPYWYSQGSSYCNFKIGLGHPVCVPRYYQYMFPDLAPSRQATSSYRLQITDWPDTFDWHSTLVVLSPLVVAQLQVWWACSPFVPHPNFHPTVQDLSPGAPIIGPFWTTFLSPHSRGMLCVQMLGEKQCPHVGSLGERMCVLWSPCQKIVGSVAALEFGRVGYADLLSGWLPPQCLFVLGQTEIASCLSRPIIANYYQSSLGQPQNAPQWAQIRPPKKRPHGLVIMHFEGQRWAPPLCGRLRPSWSIYVIWGQQARCAALLTRRTLVSFRPLSMLLGRTSPSYTALPLGREKRGVTYIVGHTPRLTPAALCVGAPPPTPPVTV

SEQ ID NO: 961234 - protein, 66 aa, Homo sapiens
  misc_feature (51)..(51): Xaa can be any naturally occurring amino acid
  misc_feature (54)..(54): Xaa can be any naturally occurring amino acid
  misc_feature (56)..(56): Xaa can be any naturally occurring amino acid
LFWASLVLYPFFQFLVSMIRSGSSLTLASFILVFFVASVGVQMDRLVCRKXDKXLXYGNSGQQAET

SEQ ID NO: 961235 - protein, 112 aa, Homo sapiens
MIATQGPPKDQRHPHPEAAALRNCQMLLGIRHLGITLCGSQPTKVVPDPQRGPPACVRHRPWHSIKQYYVLCSSRDEKSWPVSPLRGRPPAQSLISAYSRRSWWLRLSRCPR

SEQ ID NO: 961236 - protein, 79 aa, Homo sapiens
RRGYGRVWRPNPLLPVRAHKPQERRRKQAATLKAAPGWLNCGSWYVKPRPASARAQSRAYVQEAAQPLRGSTYRDTMEH

SEQ ID NO: 961237 - protein, 90 aa, Homo sapiens
LLAARVRLCQHLACGARMAFTPDWEMPEKFPLVTTIMCLCTLLTVWCCVFWVCVTPEQALGTYIANRVTRQADTYYTTCIYTCCRYRLSC

SEQ ID NO: 961238 - protein, 80 aa, Homo sapiens
EEYGRMLQADPNKVSARGEEKRTSSDGDPWEQLLIENLIHNLDLVPNSCTEAGLRRHAASSKTEPGVLGLQCFATMMSQL

SEQ ID NO: 961239 - protein, 104 aa, Homo sapiens
MRTLTKMAVMLRWPSLSSSKMQHGKWRICVQGRSRLDRAVRAADKGYERILFLSVKLEHEAPDQKGSSERDLGQQLNARSENYCNEESGSELNGMTILDRVLYD

SEQ ID NO: 961240 - protein, 91 aa, Homo sapiens
MATSRYEPVAEIGVWCLLDSVQWSLCFPTCGHFVALKSVRCPQLDVSDVLDVMCASQSCSSSVEGVALLEWRLGVLFEASQLFVLADVTVL

SEQ ID NO: 961241 - protein, 43 aa, Homo sapiens
MPVGSPDAVQNSSLGHSLAWLGVLGGKAMGNPRFVPARAPKPA

SEQ ID NO: 961242 - protein, 202 aa, Homo sapiens
PGNKCQALTDHLLTAGWPADFVFARKSGLCDEAPRPPKKAMDYSSVQQRSVEMAVSDLTDGVNGEWLGAKHDVCVCMRYPCGGLQRWVIHDMLSGNHVWSTDVEEIILVTQAPYGVRHHGWSSCTPEEELEPAALLDREWVHKPALTVVQPRHSPTENSKRPKAHPRRLGVVTNQFSWGWYKAPWTIARSRMFVDLGDLPDL

SEQ ID NO: 961243 - protein, 224 aa, Homo sapiens
TLPLPPLTGVSVYGALQEDPLVPPLQRCGQLCQDGHSWLSTARLQPSTRDWVKQTLGLDRPGKSLSDSDPEMWELLQTGEGQAVSVAWSSVASSRTFCDADAAGWMALWVLSDTSKYSEGYPGKRYYGGAEVVDEIELLCQRRALEAFDLDPAQWGSRMSSPSSGSPSQPGSSTQPFCCPHERIMGLDLPDGGHLTHGYMSDVQRISDTSIFFESMPYKLDGLA

SEQ ID NO: 961244 - protein, 250 aa, Homo sapiens
CSGDSAGPVRGEGPVSQWHSQSALASAQRELAAFRTNGTMTTCKAEDEWNVPSVCPGAGKQAERTRIASLSMLVRTEVSILNSPVSWRTEGDEQSELNAAGDGRRQRRCQICWTGDGCACLQCMRHASNLCHELLNAGSALRDGGAEPPGIGRLINRRGLHENLRQELTSQAGACGRILGHEFDVRWPRESSSRNEHGLSTLQLSNAMLSGPGELSCWQRKHLCQQLACRAGRARTPREALSEQLAVGPG

SEQ ID NO: 961245 - protein, 93 aa, Homo sapiens
VVEGLRRLSDYPEVHVVFSLYCEGTRFTETKHRCEAWRVGGACVFNKGGGLFLPLVPRPKWFNQPFGLPAWDQEGAFQPDPGRGPRGLPLPPV

SEQ ID NO: 961246 - protein, 241 aa, Homo sapiens
MDDEYRAALVVERTAPGMCKAGLRGRRCPPGPLFPSIAGAPQAPGLLMVGMGQKDSYVGDEAQSKRGIHHPEVAPSSTAIVTNWDDMAAKIWHQTFYNELRVVPEEHPVLLTGGPSVKALRPNRREDELMISVLRSSYTARHVRCGMQAVRSLCASGRGSGLVMDSGDGVCQTVPICGGVCPPPSVILLSWIWLGGTCAATHEDPHEAVTACATDERKRACLGTGRAWVGECRGRPGRSGR

SEQ ID NO: 961247 - protein, 90 aa, Homo sapiens
MERTTKDGRAKGKHSRQGEEVIEDDYSTEPNAERPIKQRPKRTVSAEFFTKKITSYGEIRGEKHIYTGEEGRIKKGAKTQPGGAKSVFAT

SEQ ID NO: 961248 - protein, 259 aa, Homo sapiens
KQKQSAAPSQAPERRERGLGTRGRVQRANGSSGDSPVGLGRHGGMAGAPVLRCGAPPVLPAASAPCLPLCLPHASLLPALLWCELMGAVTLALGWWPCGLNWLRDTLGGLSDAELPPPPCMDQCVTVELELEKCAAQVLGLLGQLCERGLEELIDYTGWSQARDPARATAKMLNYQGHFHLFCHSACNRIKDTVQKLGSDHKDIPQQLFLGLDKPFDTDSLLRDLELFPFGIASSIRDAIYPLRGKLLQLAEAVALDDV

SEQ ID NO: 961249 - protein, 107 aa, Homo sapiens
MRRMYEQLLFHRSPMPLLEAKRALLNTSCGSNETALDLTHRFGNLQITMVLVKFAVHASEFPEFKHMPYHTGPVALCALELDHMDIPVAFLAKRPYHSKHGESDTKS

SEQ ID NO: 961250 - protein, 127 aa, Homo sapiens
PGCPEPLAWSCLICVCVVLSAPPLPLYEFSCLAQPLPCISASIRPLTETTMSCVSLCGPLVCLTGHGVWDMPGTRGAHWLRHSDLAAEAWESPAWCTWTQPLTCADAPVLSYLTQCHTSRKQCLSLY

SEQ ID NO: 961251 - protein, 198 aa, Homo sapiens
HSGLPLVVDRRSLHTPAVLHREHESGAPACCPVCTRACCACLVALRAPSSTIVRWTAVRGGAWQPKAGRVPMLQSRNICFSYRKNDSLDELLSMACEKLAARHMMCAKRTSLKHAEPVACQLTVKENTLSTPGAPSLRDVEIASENPRTGKYPCLRREHQALKQRYQPNGTSEIVLLITRPRAEIHRRCKTYLTIDKY

SEQ ID NO: 961252 - protein, 300 aa, Homo sapiens
WERSGVPPAAPKLGSRAAGRPVPVSVVRCCPRLGPYVCAGPPEAARGLVPPPDALASARAIHMGASRMSCRRRPALHGQCKEIINSSTEMKKHFLKAAYYSKKKTHKLFMTCWCRELKEEVIQKAVMEFDLHPKARIEEGKSKCFSELFCVHNIIRLGKKPVEADHVAKEVLLGGQDPASLKSGLGSSQGTWCERKLSEETLFLSCAETSDLRRIMAASTVGVVTYSGCRHPPFALVTPSGCFVAHMWGLCVSPPYCSGDLAEVIRLCTTDAATSRVINPVLKVAITSLFNRPEKKHLDP

SEQ ID NO: 961253 - protein, 109 aa, Homo sapiens
MTQEHTGDPQQRDYAPTDRTPRAAHAPSERIEMTITISDFATTAGGTTHHHSSTRPASAAELEHVSTDHQRDISAHEHTRQPPSPRSATRHSHPRSERDRITAQPPPAT

SEQ ID NO: 961254 - protein, 44 aa, Homo sapiens
AETMHVTGTISRKQILAATPNPTVGHDDFEEVVCIGSVAELEAP

SEQ ID NO: 961255 - protein, 128 aa, Homo sapiens
HRHANFAEQIGCEELHQRAREYILPALMNRHCPEHNYNHTSSNATQLDTHYYNHNNTNNPNPPTPYTTNYINHLHTNYKYNTHNHSHTTHTPRQHLRQTIQVTTFLSLTIHSNPHDTITRHTPANINI

SEQ ID NO: 961256 - protein, 31 aa, Homo sapiens
MGYEIRKNSQGAQSGALTKPLGGNRTKGGST

SEQ ID NO: 961257 - protein, 99 aa, Homo sapiens
KLGEGWLNRPRWGGGWRLGAEVCGPEPTLDSVRSAMTAALAVVTTSGWKMGCLGPVAKGPGKWSWSGGPARLPHVRGDGGLGGEAELLRYEEEFLRKSN

SEQ ID NO: 961258 - protein, 39 aa, Homo sapiens
RTHGATERAALRTSAAWRPEMLSGKNGGSRGGGGCSVQA

SEQ ID NO: 961259 - protein, 126 aa, Homo sapiens
MIPKHVVKGKQVSVALSSSSIRVAMLGGPHGECCPSCVRGQLTRKESTLEQISSGKSPSPGARCRIMGCTPLERPWLGPKRTFGCARANTIGIGKKRWTQDLYPMDQRIPPQLRSLPPQCVAHPGR

SEQ ID NO: 961260 - protein, 175 aa, Homo sapiens
LCTDVCWMPVMPVYLDAWGLACVLLRCALSCACDAACCWMLLMPCAAQCLLRMLACLRSSLPWLPASPVAVSSCVCCVHCAVCFACAACACPFDVCMPALVAACCYLSPACVCMPRAVLWCCCPCPCAPVMLPCLRVPTSIGTAVQWCVCIDGLGMLALPCDVLLRACLPACHPH

SEQ ID NO: 961261 - protein, 192 aa, Homo sapiens
MLQERMSDCSFWENHSAGHMNVTGDVHHHAMLAPLMMCTLAVIRHDELWMDVTCAKPSLKTWVSQSCLSKKILLSIRAQDVIQLHLALIQHPNADQSCRQKGRCLLNRAPWVLSTYKRSEDPGADLANLGPGKNLTLTDHHCWFREPHNQPDTVQIWVTKKFSKESPGVTISWRKPSSGLAVIRSNRRMCQT

SEQ ID NO: 961262 - protein, 246 aa, Homo sapiens
KNKKNPVYIGQVPHYPCCGSSTALTGGQPTQYVSHPDKYCFYCRALLMPVAGLKLLRSALLLPPTAVPDVWPSPVLLYPHYDYPAASPSGFLAVTTSYMSLLMQQAVWTCCTSCVICCLTYICCPVQITWGSAFHAFAQPVLPVPHSAMLFVQCPALVGSSPLPLNPLLCSAVFIMSYARSLEFWERDYYTTLCWLTSSTRLVTSWTWPLALMTNNLNSIFYEHLTRTLRTQLCGDLVLAAGHLWP

SEQ ID NO: 961263 - protein, 144 aa, Homo sapiens
MRRGFIKCPWKYTVRRVDGRGVYALQGPVFNKHSTHQLTAKSTFDPSSLHRGYSIVSVGIEKCSPFLVTTSVGYTFDLTLFYEWDTVRYTWVRLHIRAWREQMAVYRLSNDAGSRLAPGSTQITATGPLLDGIWNAPHTDPYKH

SEQ ID NO: 961264 - protein, 84 aa, Homo sapiens
MTNIFICQRCDSDCQTRCERLTTVPQLTHTLKYLSLPVPDRARSLDYNCGTARLDWLHQHPGERWPRMAPALLTISRTCLRDAH

SEQ ID NO: 961265 - protein, 46 aa, Homo sapiens
MSHFATLGRAGLFGEGRPVGGPGSGAPGVPGHVMCACLKVNELREE

SEQ ID NO: 961266 - protein, 268 aa, Homo sapiens
MSRLVESGRGCFLRMSRGRSAAMAPSLEWHCLEAPLPQWTGSWLLCATWFNHAWPCNDSCMTVMCPGNANGCCLLLPLLPLLSCGPSPGPFCCCFASTVFLCTTTEVLLLPVPAGASSLGMERSSSVVPVAFDNECVVPWEAILSIFLCESWVMGCENIMSNCDGPPRPRALETDCHDSAIEKEGYPVITKKVQSLTISHPTCTNGSHSRGWPLPLAPGADETLDIPLTFEHTNLWTNICVLAPKELGHLRTPMWVHIRSPGFTGGES

SEQ ID NO: 961267 - protein, 127 aa, Homo sapiens
MTRRLTHTHGATLQHLDAGADLQRLTPGEPPCPATPPEPRPLPHFPPSRKLHGAAHTPLVDSLHRGAYLDTHQLHWELFSPLSLLGTTFKAVRRAGSLPGTAASRLAGLGQNPPPGAKFLNSGHAPP

SEQ ID NO: 961268 - protein, 119 aa, Homo sapiens
YVEAWVLLAEVRVLGLHTATVAGVCWLCCPVHITFLVLPPLVVHVTGLNDVLLDCDMCCDMHVAVTCSGCDMHVAVLHVVCCDCATVLLVVCCSLCSLLPCCPLTQCAVCPVPLPCVPD

SEQ ID NO: 961269 - protein, 125 aa, Homo sapiens
MLARLAVIAGKRGRRGRPRVQASPLGCDGTIACMLHLKCQLCDDKNACHAVTIAVPPDRTDTILSYLIKVTNEIFRHYDDFFERTILCNSLVWSCAVTGRPGLTYQEALESEKKARQNLQSFPEP

SEQ ID NO: 961270 - protein, 178 aa, Homo sapiens
MQTRASDPSMDTELAHERASQQLAALAMIRPRPSDLPAPQRTFSRRLSRLERVSLPPALPVLGSPYPSLLPAQLAPRSPPTHRWPTLPAYGLALLPRTPSLHCLRSTAPLPMLQPDCSPTQPTSPGAPSARARYHTHAPAHMHCCPPHAHYLRCATAARRLAGTSPSTATTGTALFLH

SEQ ID NO: 961271 - protein, 736 aa, Homo sapiens
LVVAAWAALSLSLAVCAVLRLVRLLFCLVSSPFVLLARGGSVVPCLALFFSSHLSLILPSSLFSLSLRSPSSLVLPLSVLVACSSLSGFLFSLVSASRCVLASPPSLFLPLPFSLLLCSLCSVLVLSLLLSPFLVLFSSCSLSPVASCALCSALLSPALFLVGFSLLLVSVRVCFVALAFACLRRHVVVVDCPVGCCASLLSASASLVVLASSRSSLSSVSRRSTLISPAACAPSSLCRFVSCFTRVRVARVCVVLWGLVCRRRMLLFVFVVFLCWFDVFVLWFVCGLFVWVCMLCPGVVCSWLGFVFFCFFVVGLFRCVLVVLCSSLSFLFFVFFFLSLCVRLTGVRALCAFLVVCVSVHVCGRVSVVRFLCFALGVVVVGLRFHVLGYGSVRLCVSLSSAVCSSCPLRVSRGLPALVALAWLLGCVWYAWVYHGRAGCAVGLHGCVVLLAGGCDRRCRWVPFAFVPVRFWASLKCGCVCFVLRMVVVSCPVRGLLVAFVCLPGPRCPSRAVVPCWSWVHGSLPSRLRRQLAELCSAGGALLPSGGPVGSAQAGPVLVVSLGFAMGVLALQSYAWDARGMALTCAGSLSAVAYLTILPLELASGVRLPDVHWPVAIGLFGTPSSKIWNLMARHLPSGPQGRRMGPVPYALSLHGQVLQGRVRKRQPRLPRVQRGFGSAASPTQVWFLPGPPTCGDKKGMEWGNEEEHGGPQSFCMTLWLGHHPFWRARRSGGGNP

SEQ ID NO: 961272 - protein, 69 aa, Homo sapiens
GTAEVNMRMMLRLGCIHVKPAAGTNCKVTFLAVTGPDWWPEVEVVCVAFDTPDRAKSPDARDRENQSIP

SEQ ID NO: 961273 - protein, 274 aa, Homo sapiens
MVRGWVLIGRGLSLLVPPARCCSSVLLLLGSLAGPWRRPRAPRAAHPVLRMEPAALFGELAVLQHFVLWKCLCLVTDDCGTLGPMWWMPYRVVIAAAVHCAACECASVWCLPVPCGALCSGQLARTSNQKCPNPWPVCACLLPCCLWTLAARPAPMDAQAGSGCSACQSWTCPSDVSCGTPVMHSARYSDRWVSQLLLSERALVVTAHTGLLFALLDRGRGRRRVARSPESRCCALASGFSISYRRAGPPNQDRLLRLYGGVLFEHLEPTQMAG

SEQ ID NO: 961274 - protein, 107 aa, Homo sapiens
MVRSCRLGAICNSHTLYTWPLNTSSSTSCFSRSSSRTNTVTATNSVSACLQTQDQHTTTNTNHSVITSAFSLHLFTLLYKQTSFIIQRTRTQHTTTIKPRTTQPQNT

SEQ ID NO: 961275 - protein, 314 aa, Homo sapiens
MHGLGFNSAEAGIRSLRGIPLLGSMMDNNEAPGLRHHPVSCMTMLRHGGASQILIAQESLECLPSMCLDDLLFVVVTGRMTCDLALPRDYCLEIILNAGLPTGAMEMPCNVTMMEPLLAEPSDLYLTEWTSSSMAELPLNQNVKRADESWTHTLNRYPVHYATAKPSELNLRTIADLISSKHEPASLTCKTLAIYACARCSVTCMSVAILAFCARAYKKRPYWQDCGLAASPRTVNTKDTGWKGPMWHIPNISNRALDSVGNPLTTPYDIQVSTPFNDLAGVMNVWVNVTPGLTAPALWPDFRTYTELRDNLAT

SEQ ID NO: 961276 - protein, 237 aa, Homo sapiens
GRRLGLTGAQARAAPLSCAASGAAPVPPPPVPLPRPGLADGRGLRRPKPDALVLPCCVLGAASTPAPHVTCRPSVPLDSGVPFPSRYLLCSPARPSSRSYTHAHTHNIKTHQLSHINPSSLHTYHKTTPNTTPHHATHTTNNPTHTTHNHTTHTIYTLISIATHTTQTTLAPTHTMTPTHKPTPPHATNTDQRKRPERNHPHAQSTQTTHTHHRAHPPQPDAPHPPPTTHPHTRNKP

SEQ ID NO: 961277 - protein, 122 aa, Homo sapiens
MVAYSACDAQHVDLVLATFSDPLRAFMQWPLAKPSVDVGCMRHRYTGMDLTNPISPYAASITANVQRGSSQPKGCALRIGRVHMEHEGRGRPKEVPQYDSGDWAFKKLAPPTGERDAPNNFR

SEQ ID NO: 961278 - protein, 54 aa, Homo sapiens
  misc_feature (25)..(25): Xaa can be any naturally occurring amino acid
MPDNPCPAKYCIGRSHIGEEHSGLXGPGIFPLGHKPTNFFPKGTKTTNTPQGAL

SEQ ID NO: 961279 - protein, 289 aa, Homo sapiens
SLPSVLARSIAFLPSLVSSFARCLVIVAARDRHGRLVCMRTLVMACLYTCGCAAGGLQPAVPDDSVRVCGGAVLCCVTLLCCPVCTGGGALPADVHACVLCVSVCAPRAACVLLVCHIPCGVCAATVRLWMCHDVPGADCQLACSCNMRTVKTPVSGMGQSWPLGSGHPEWSLVLTVDMNSLDRAQAAKNKGNKYFTRQGKYEQAIQCYTEAISFVPYMRRMLTFLHFIKTELLAFEHVAKIGKNVAQGLYKNLLNLIPICEALLRRAKPMKADIRGMLKSPGGGYRSV

SEQ ID NO: 961280 - protein, 252 aa, Homo sapiens
MVSGHPAITRTERFGAHMVAQEPEIIYLRLYGQVIHGYLCQKNQLHIHTRYVMFEGGIGLVMVSYQTWLCTTCPRLPLGLDPVRGMNGIPWSVDNIIDVAVRYDVETNEIVDLTCSCEISRDEYPQRPWNVYQLATLPAVEPMAPVCPCHGPAIPHVARGSATKSLIFSDQALATEYLAPSKRGGLGFVAEPCSLGFPFQGSSRYTGAQTEWMITWSLIWAIGPPVKPPGNRDNKPKTARNRVPGIPKGAPG

SEQ ID NO: 961281 - protein, 231 aa, Homo sapiens
ECELQKGVLLVSVLLRGGGGSMGVHLSTIPRLLVKHAVPGENPMGHKRSEMDSCTEGTRLTIDKLLLGQTNSGNTERRNDDDCNYITRMKAYSSKLPLKQQPMQRTLIEDGALGGAYGTRTVARHVSQAVERDSLVTILRVVYYEGAGLRGHPVVDDGLGSVAQALVIQKWTWGANYREPSEPRKGRRLARATPKKPSKGTIARGQPQNTQGGGYGKQEGPSGRKAPRSEN

SEQ ID NO: 961282 - protein, 197 aa, Homo sapiens
MATSRYEPVGVKLVSVPMWTVYKARDPTQMDHFCGPQECESPQVEDRGGDEAFPSCTVREVVLYLMATWRLFEHSQLFVLELMDVLCHNPRTDLGRSMVTLVLGALYDQGPKDISGQGHPTRLAMTKRSRICCSQCLKRPRFPSCQIASYTRRSEARDHSGDSGGTVILVTFGLAESTYQWHLHRGVTLVDSESLPI

SEQ ID NO: 961283 - protein, 42 aa, Homo sapiens
  misc_feature (39)..(39): Xaa can be any naturally occurring amino acid
MDEDYYGSAADVGRRGCAAASRMDDSCENGERMNAGGFXASK

SEQ ID NO: 961284 - protein, 236 aa, Homo sapiens
ARYDGWVLKEIQKDFLLLRYEVVIIDEAHERSVYTGHPHRPPVPHCDSPWLRVNLPLKLLIMSGHAAGGWTSPMNPRLFCQACRLVINGVNPCACSHVTSAFQQAGHLLEDYMWLMCFRKVCKIHLDACPQVCIPVCSCLVAVLSVHSACACQCSCECAFPPYQSPATRKGRLIRKTRCAGNAEVEEVTGARANQGAVLSVLPQINLDHSTRCNRQAKAMSDSEGKKWHDGTRGAL

SEQ ID NO: 961285 - protein, 257 aa, Homo sapiens
YWAAWSNISRFGARCTVPGVRKASECWAPGGKKRWPLTGYWVSAVWMQKVCLLQPPSYTGCGGGDAVGMGGDVDAEWWKTWLVDVGSGGLAPPKGLRRLVVTPPQVSGTGGAQAAWLVLGLTRLVLLSSEGRPRAKANRRVNAMLDGLGSVPEVARSETHIHLWAMNEEGRTPRKKTLAHQETRDHALREHLRGMGKCASPGAPRYLAARTCLLVIVTPCGAGRYPWVGPEATGEGDCRMLYCLPVRSGGTLAAVPT

SEQ ID NO: 961286 - protein, 161 aa, Homo sapiens
  misc_feature (137)..(137): Xaa can be any naturally occurring amino acid
LSSGAFSGESPNEVSRIVTKDADYYNMLLKKLAPPLVTWLSGEPESAVCRPWRNIRLKLSQERGLEDRVKEEDQESVFGDSTDDSQSIVKTERELGQSLIAFGQSSSRTLAQGSWQKLKRKYASRGGRLTFVREGCXGRIGTVCQSMVEQSAERLVYSTLA

SEQ ID NO: 961287 - protein, 233 aa, Homo sapiens
ETLQGQLEEKAQAARCTVRCALASAQRELAAFRTKVQDHSKADMMSWKAQCGPGAWQEADSEKYASSADLEEEVSILNRQVLEKDGGELMELKAVLVMCRCHENDARSSDGDGLRLLRGMDSQQQCHELQNACSALREEVHEPPVRRLMKHAVWLQENLREAADLDMAERAEDAGPRIEGVATEKFFLETSRPSPPCSSSTPSTQALVSELLPAKHLCQQLLAEQAAARNATV

SEQ ID NO: 961288 - protein, 216 aa, Homo sapiens
LVTAGLALHCDSSKPDCAIAAAVLRGRGAALPELVQWQVDNGSVTPSPPCAHPKAVWCDTCAAPMCCDLSLLPDDPHVRCSGLILCSSHKWCTHARECCHAQTVCTCGHAMWLLMCNVGASGNDHAQLPPALSLAKPASCGSSDLVPMACCRHALLSVEWARSRCVQPVRCCGVTLALHSWTGVASGQSSAQGAVVSLLRRDNGLAWLSNGREGES

SEQ ID NO: 961289 - protein, 267 aa, Homo sapiens
MIGTEADEKEARGIDEVVVDDSCCSTRWIPNDEAQTKKQKGQRVKECPRTIDIHTTKREDRGTSDTIDTKGERAYTRLSKGERKEYNHYKSKTVKQEQRKRSIESNNRESHTTKNNERSEKDTKAIEEQKTDELSKHRQEHQNHAPRTQYHRKTGTKARYEHDRTSGAQTHIDHSEVRRQATNSTHRDKTAHHAQSGATNASCETMPYQPHASTKARGRRRGPQADSNQNMRPVTTPQTLEQTRQTPPDDNTLQQDANDWGHKSIEA

SEQ ID NO: 961290 - protein, 134 aa, Homo sapiens
LPSPPFTIPLGGAFPGQGRAGLTPGTQPQRPTKSHNARKEKTQQTKKRETQRSDEDKQKRTMDDITTTRKTKEKRHKKATKKTATRKKQKNTQKEKRQEQKTRETTRKKTYNKQNKKNRKQKKEQEHKKTQQKT

SEQ ID NO: 961291 - protein, 141 aa, Homo sapiens
MTPFMASMHKKSRMNGQYHACPRTVSTNDKHKYSLEQLIANPSRGLGEVATTTNINPVHPKTTRYKVVTNANHHQADITDPKDSESELLLHSQTAPEIRVAKQQRQNNNPPHGTPHKDPQATTPLTNTHPPTRKTHTHQHH

SEQ ID NO: 961292 - protein, 164 aa, Homo sapiens
MCSNKPALFPPPVKKHYTTQPQTSTNIDHSRGLYNTGVARGVAWASWRGKCRPKGQAVPRVLSTSENPRESPRGERYSTGAPTKKGAPGGAHKEEAPRPQSLPDNYTPRGSHTRASPPFQRAFYERRRKGPMVVIPCGEGTYGKGHAHAISQKWAGPFNPSRGN

SEQ ID NO: 961293 - protein, 112 aa, Homo sapiens
MTTSASTHLNKGINAGCYMIHDLRDEKVQDHDYIWTRMVLEKDMRCKTRNPWTDEPKMVEEIDHDDGTYRLDSRYLIQLMRDYQQMNSEVIDDLHAHDISGPTTDKGHLNHS

SEQ ID NO: 961294 - protein, 159 aa, Homo sapiens
MSYPALSRLVLRLQQRSGVRTLTVLAAVMLVCSCLILSNAGAQQIASVLAEYCPQGGWTNVGRRTIPILQAAPRSKCPWLDTMELAVVYVCRGAQEMVVYAANVTVATQIVARAGGPATRGAVQSGVDKTKVRSCLAASNQSLGSRLGQMVLSGVDTVL

SEQ ID NO: 961295 - protein, 71 aa, Homo sapiens
YVAQGEAGQLRRRYLCAPVLAASVWLVMRAMAKLIIGRALTACSINACTLPAEMLVSCNRALSGDLGQGVV

SEQ ID NO: 961296 - protein, 167 aa, Homo sapiens
MAKTPVCSEIWNGMRHNACSIRSNDCVRTKPLGTSIEGPGTHWVKALARGKSPESHVNIRRKAVEVPRKTTVRRRGDLMKPKPSLRGGNPRGRGIIRCTRPRPCPLVTIVEALLSEGPTWFEIAGAVANQVWCNRESPSSFHVARGCLLMMHQSLPRASCSDRVDIG

SEQ ID NO: 961297 - protein, 250 aa, Homo sapiens
SEPDAPSFPLQSRLPCPLESRSVEQPRMHPQNMPLLVLLPGLPLGDLILTAPDPASWRLAAKCLPGLLPGCMPPVASLCTSLRRWVPWKPVFRLFRFRLGLWRPAGCSRYCLGLVLHLNMPLLRLPLSVPAALGLAKLLFLVDLCAQPLQPGELLPSAPALRGNLVPAAAFRLPCLAPPPPPPPPPSPPPPPPPHTPPPPPITHTPPSPPTSPTTNIIPYTNSHSQNPSPHTTHPKPHPPSPTPTPTPHT

SEQ ID NO: 961298 - protein, 102 aa, Homo sapiens
MPLVKKREFKAYRIWTMNYIWDLPMRPPGIELGRNDHQVQAEGSKDMSTLVVFESRRRWDNLTLLCTGGDNKDATVACLLGNPTNCNLNSTPPIRNAVQCAR

SEQ ID NO: 961299 - protein, 275 aa, Homo sapiens
VLGEKINILSGRDCTKLGDRDPLGELTVPEQDEAPPDAPVSAEVCLLRVCALMCPGASCASLTPVWPCGKCPCLQIPLVSWIPVLLCWVCCLCACPVLCTVAGNFVSTLTMTISNGHLTTKRVIDSDTMWTESCEPAGCRPVRSLPLHVGLRLVPACLYYLSPLKLGALGSYLLWRPVWLLFSSTGVLITSHLKARVAQHSCEPARCVKRPKKSCIDEIVYPKSLDSLRNGAWAHLRKGSEGEPISCFGVGGHWTLTIDAGPDQDTTHGSGDVVE

SEQ ID NO: 961300 - protein, 120 aa, Homo sapiens
MPWCVPCDALATLLMAVGPVPRHLADFHVALWALKDDLPECGDLIEILEGCMVPQTCPGAVGLSTADLVCLCVCVFWCGMQDLQSAIACGTPDDPDVCEHVAAFITPHCSDMTNGHFLHD

SEQ ID NO: 961301 - protein, 70 aa, Homo sapiens
AVLVVAAAGDPGPDACAVPACAHNGAFQLPPPKRTCPASFLLAACKCAVLALPYLLTAAPVMTAHCCVSL

SEQ ID NO: 961302 - protein, 245 aa, Homo sapiens
MPVHTLSPREPRSCTPPYHMPPCRDQGPWHTLHTGAGRWRSPETEQHVEQAWRPDKAKYSQEPARGQHHAQETMCSRLHVQDKPAHSDPERHLHRQQDASQPKPARAHAMAPCRRTQTRNWTILRQTSSTCVDRPTMIPMTKAKHATPWNVDRGDAGQDKHTAEQNNNQRNRTSTQTINITERSEPREWNVQTQRDKEQQTGTKELDPNEDGTMQTDIHSTKTQQRRNKGTRQRRTWTEQNTEKR

SEQ ID NO: 961303 - protein, 296 aa, Homo sapiens
MWYPGSQSRTQRVVSLGEFSQALQEPCNKSLGLRSRHSYHVEAGGRGPGQRGVPGVTDATRSEPSVFGTDACSGKGSSSLHSINVEANECSAGYPGSVASGAQVHVQRSRQCVTALCRGGKQKSALTGNSYTICAVAPGLTRQAPRYAWTAQLQCKWSLRCRVASGRGDPHVECGAPRKHLHYVRLQKPGAVDKTTVPLRNSHMKHEMQSTEDRDPGHTQTESISRFRAGSERIAEQAETSRKTTKWKTRSRKQRRAEQDWNKELDKHDRMGPKVAEMTHNKRTDDTDVHKVKHET

SEQ ID NO: 961304 - protein, 132 aa, Homo sapiens
  misc_feature (76)..(76): Xaa can be any naturally occurring amino acid
GKALMDSTAMGWELRVEKVRVSLLTQADVEEEEMDSITEVPANCSVLRSSMRSLVSLPEAHAGGLGKMQPADADKXNPPVDFSSRRLDRRSWCRKQATPQSLEVSSANAEEAQTPIQLVTRTGLTSLRVTFQ

SEQ ID NO: 961305 - protein, 145 aa, Homo sapiens
MWAVGRRWAVGLRCVLCCRSVCLTQCRLVLCAGYCMMLLSILLLNDDMLHVVLLAMYCCVLVTTDACAFISVLDLLDACGGAALHVPLLLALTDVMLAGWCCSVEIAVVGLDCVLPIVAILALPLLVLSIVACYFGAPAIVASLL

SEQ ID NO: 961306 - protein, 308 aa, Homo sapiens
APCCAAASWRAPRRGPRHWRESGRWVPTTRALQTSLRPGFLKGGLDCAAVLEWCPGSSGHGDLNVMGDVVMIKVAWWCKVEAANEHPCLSLECDAWGGRLVQMLPQLDVKEGSPVMPHGMVLVIGACGSGRRSPCCCPAALLAWGGPCGLALRLSRMAWGPCLQPSRHQHDPLAGLVPWAPVVRLWLRLEACLFCALSSPLLHAPTAHVSFRLPRLLCRLNPVWGCSLFLGLQPPVEPLGYSGGSGGAQQAAGLAPFIGGPYFHFAAFGANALGFPAHHWSTALGSYSVAVGRRSFGGAKDEPEGGVR

SEQ ID NO: 961307 - protein, 154 aa, Homo sapiens
VTAAWLLGPGNMMVAGAEGAEKGPRRRWVVLSQSGLKRRGQNQVSGCCTRMCCVWSVIPTPASSWKSCAWPVDAPCIHVTVFVSASVPVLWIHMCLCGPSLCDCCLPPLLHHRPWEYGCPHSLDLAVVLVKCYVKWINDHGLWSPREVRKLKAT

SEQ ID NO: 961308 - protein, 154 aa, Homo sapiens
MALTNTHWAQTNRNIWPIPQAPIIHILLPWDNHLSYKLWPWNYISPETHDNTVQRQEPPREFHMGGTQHRIDTTNNHPSHPNGGNIQAKHRDNPEKHTKQHTRGGDHTITINPCTKQLTKDRQEGPQKDPKKDGKNHATTKTKEKNGMRRPNTQ

SEQ ID NO: 961309 - protein, 244 aa, Homo sapiens
  misc_feature (81)..(81): Xaa can be any naturally occurring amino acid
MRRPLHTNAVHAHRDGVRREPPESSPAALALCHPSRGKDIYLWLGLVRAARERTKTAVCPLVAASALVPPLYIAPASVLFXPAGCAPSLASRAHSCELISVERRHSPPPRERVFLSRTTPPSVDLCCLCEEITHPGHHKDRLVPVFALGSCAAPPPNRSAPVEQEQHISSLLRYTNQRREAHEEASFTHQRRCRASKREERGATPNQRHKGARPAKGPTQREGRPRKKQGGATRLAAPPPKKSQ

SEQ ID NO: 961310 - protein, 284 aa, Homo sapiens
MLLVSVRSAGRLVSPALPSRSCALALAPAALQPCAAPCVAPAEVPACALCQLLLPLWNLVLLPDCWPPASCLWLLLLVALLGPDVSDCGHFPVPLMCCLTDLLACCCLWMPCACAPCFMPACPSWGCSDVRCCACWAALLLLTVPLCHAEWPAACDALPCCLLPDCPVPCILAACPEPVVVLRRVPPLTPAPDAGVNLLLARWRCAACAVQLCTKPKRRDLVGTTPFDQTREPLEFDLPWDPLHCAQLCQSHGNALHVLDTGTTVNWTRYGHRSDLGPELTKEC

SEQ ID NO: 961311 - protein, 209 aa, Homo sapiens
MGVLKLGGLDCIRTKDFQLQTDHTPVHLALLDEISTCHQLLHPQVLQLLVKLFETEHSQLDVMEQLELKKTLLAQDGSPVLSSQVMLLPCLLSLTSDTVLCAAQLAHCTLLTHFAIFVTCSAAGRSLAPPYTSDFVQLFLPILENDSIAGTIKTERRALTLDGSSIAHCKSNFIMVNNLEHPPELKQNIPEPVVEKPFQEAVPEARAAS

SEQ ID NO: 961312 - protein, 123 aa, Homo sapiens
MLPQAITVLSTYICGHPIDHLDLPATRRADGSSSSTMILTLVSVTSVAGLAPANTYTDLWTSCWLTPACRAVPFLRQRPRRMETTGKSQRETYSLSPPLATPTLELLHSRIIQTAQTTPVQTV

SEQ ID NO: 961313 - protein, 108 aa, Homo sapiens
MGAQPISLSFSSRAVREEVRHTHLVPPPSPPRWRPRPPRRGGNTPECARPRGGSPERTGVRARDTHRGDSRAGEWQTNELPSAVGRVPPLCGGWRGGASPSRRATSRS

SEQ ID NO: 961314 - protein, 35 aa, Homo sapiens
GGVLREVVKHPSVESVVQCEIDEDVIQVSKKFLPG

SEQ ID NO: 961315 - protein, 160 aa, Homo sapiens
  misc_feature (145)..(145): Xaa can be any naturally occurring amino acid
MSPLLIRDVTYLHCVNINLKIPAGKTVALVGRSGSGKSTASPDLITRSLLILIDRRHTPAWMVHDLREYTLASLRNQVALVSQNVHLFNDYGLLSTVAYARHWYHATAREATIERSRPPLLRLSSMRIFTQVMMDYTVSRLQLDXGENRTCLPLWSVQRS

SEQ ID NO: 961316 - protein, 238 aa, Homo sapiens
RIPRRSKELVTIIPNFSLDKIYLIGVVTWVPFNPVFTRGSAPAGWRLTCNTTAQTMLACSLQQLDWTARQHAWQNDERITRTHNGHRDTLYPHMAPSTLNLTTWKPLPKASPVSQHLMCLSKNNNTPQTAPRTASNSRATPCGQTGLLVEGPTLRSFTPTKPSRDSWFLGLGNQTHKGSRKHRPRVNVPPNLAPTRPTGNYTLLEPPMWTRGKASPSHPKPGRTLYTLQTTKGRPSHN

SEQ ID NO: 961317 - protein, 182 aa, Homo sapiens
MSELTRRQEAEQLKNQIETPGKHVQMLTLSQITNNIDPDGKNANMRTRRDHCGGTWPRSYSQCTGAQTPGYSSVPRRMVNLSSGTSYTNQTTVNAHPIMQLHPGHHAHVQYAHFWETYCCALTRGLQITTYAPLNTHDKPQERGHVARRSSDPGTDHPVTRPCRRNPANTTNRPTTDHPGAT

SEQ ID NO: 961318 - protein, 32 aa, Homo sapiens
MRTTDLLTEKQKLRVTEDPENETRLRQESIPV

SEQ ID NO: 961319 - protein, 123 aa, Homo sapiens
SRDPFPHPSLSSVHRIALLCPVAQPSPSVRAGGLEQPEARSRREKRQRTDPQLASPGRVASPPAWQWRQTPAHLLLATTRPVVDWAFSGHHALWVFLNQRLQEMVNLCYAREIQETGWEHFGS

SEQ ID NO: 961320 - protein, 111 aa, Homo sapiens
MSNSDVCDRKNTLGGQRSTERQGRWGNYPKNGVPSGHIVIAGHTVQSHQANESFHMLLKAAYIADHERGTEKIRVRVREGSERACNGNRDLNRHAVELFTCGRFNGLDGIR

SEQ ID NO: 961321 - protein, 227 aa, Homo sapiens
QAARRDAVGRVPAAGAWAALLLAVCIGADPGLSGSGVVYAPRLAYFHARKHASPAALARGHVRLRAGTTEAGRSLDLILWRAAGVLLPSAHGACPDRGSCYWVFVNAGGWMGAMCLLPRHLLVRRSVAALTAPGLGSRGHSGRYWLLTTLAHPITLWDLSSHWRRRAYHQEVRSSSLAGDGTYTGLVIATAVRVVGQDITVMVEYGRGVIPSTLALRCWSDTVFSHP

SEQ ID NO: 961322 - protein, 182 aa, Homo sapiens
MAIRAQHSNAAQTQTVGSKQGLCQCQESLIETDDPEMWEYAAEGEGQGSVSGLELIASENFCSLMLQLECPGGPDLNNKYIGGLSWTRDTMGETECGVMKEETASASSRDLEKTLEHGYLQQIGESNVTAPTTVDTPDKPESALQQTTTCKPIKRTREINREDMRHYDNRLEECTNIQHQQE

SEQ ID NO: 961323 - protein, 91 aa, Homo sapiens
LLHQRTSGDTSLSRTPETLLPFAEAEAFLKKAVVQSPQVTEDPLRGFALDPVHSCEGSSVITYQDVWRRKRQNKDGSGLGPLGGGVLSCVL

SEQ ID NO: 961324 - protein, 274 aa, Homo sapiens
GWWSQDLWKIIQHYKKNYKRVPEGFGNSSQAVGGGTGGWDRSGAKSPKSFSAISPYEVVGDSTSQIISSRDSRGVRTSREHKWVSPFSLSSSRAAWREEYLYRGPPRKFRLSTRSGGDNNRGHTRGCGGDLEGGGSRGGSPRTQTLGSGGGKSMGPGRGDSTYSLVSEPGPAYHFRGFVEWQTLPAPWWEVAPWEDGALASTESLTHSDPVHCGGGPKHRASQGVARERPHIYWVFVGKQARRGPNKIRGKKSQLKRPWGGCDKGQLGEQEESR

SEQ ID NO: 961325 - protein, 206 aa, Homo sapiens
SKHLRSMYCGHPGRAVPLRLWAQPVVIVMDSGDGVTHTVPIYEGYALHPRPSVRRGPGIRPGTVTGHTFYEDPRRERGYMLLPPRPSGRIGARTSKGGSGLLPSPLGLTEARHAWPTQRANRVPHSVRGEERRHTEACRDWSTVSRPVWATDADIRVSVRSLASRPFTSMGYGNLWRHHTKKPRLRTSNHARCGRWHTHAPAPGTA

SEQ ID NO: 961326 - protein, 92 aa, Homo sapiens
AGAAGWCRGALSGPGMGNRGGFLRSVSAVASWGRGRWPVDRGRGRWPLELAECNGLEDEVSGCPVTKLCAAWSMDMKIKSLCMEIYLFSHAY

SEQ ID NO: 961327 - protein, 46 aa, Homo sapiens
MTQTPKGWAKPQTQPSENTEKQVSAQAGRVSNIPYRSRDPDSDKCG

SEQ ID NO: 961328 - protein, 272 aa, Homo sapiens
  misc_feature (56)..(56): Xaa can be any naturally occurring amino acid
  misc_feature (157)..(157): Xaa can be any naturally occurring amino acid
RSVLVAWAALLQLLSRGVNLVVMPAHPSVPEIQRFVTLLYRHGDRSPVHITLIPMXPHNQSKTGTGAPRGGVGQDKHYSAEEMRTCTGEACGHGPWLRSRLYARACPKRLSYSPRAICRALVGDGRPSEGSCLELGEASFLLYAVLQCPGSVPVSLXFPRTQSGGLSCRFRDLAEEQLRPFESTSSKYPLCCRATLVCPLFAIICRLQTRVSVASRGLFPLMWWAPLVVRAPSLNGRGHCFSLERTDVAPGARYQLRRRLSKHIARGLLLGT

SEQ ID NO: 961329 - protein, 222 aa, Homo sapiens
DIYEDRHDGVPSHSSRLSQLGSVSQGPYSSAPPLSHTPSSDFQRCPYRSHAPVARPLPYSTRVKDLYLSGSMIPESLIPLWQAQSKHPMGANWHRGLECWRFGNAGASRPAPCSLLWLALWPRQCSSGALWIPPCECFERELTCGVHRLGPQRTALALALADFSRGPPNPTVGALCCHRDQPRATWGGGEHVGPSVPSLGPRRPFSRGPNFPLGYALGNRGT

SEQ ID NO: 961330 - protein, 220 aa, Homo sapiens
SVERCGQLVRMAIRAQHSNGAQTQTGEANEGLDSQESLSDSDPEMWELLLRGEKDSACVCGRVSVIASRELRAAELRLEARGVLSGRISTRRGYPWQEIRMGDAEVAGMTFELGCAYAPGALGSLLRLDPAQVGESNVQPLSPGSRSHTGRLDRPFLQDLANRDHGAGPCPDGGPVSPEGYIVLDVKSGYQAGPIFFRVYWPYKLNRQKLGSFDYNQVWA

SEQ ID NO: 961331 - protein, 104 aa, Homo sapiens
  misc_feature (96)..(96): Xaa can be any naturally occurring amino acid
AAGCCWDLAVLQVCRSLPGGLCCGAQPRPVAWGSCHPAQLRCLPMCCPCASGACALSVGLPDMHAVCVWWPDVPDASMCQTPFTTEPAYLRDKNPXIALLPGVK

SEQ ID NO: 961332 - protein, 216 aa, Homo sapiens
FGGVVARVAAAGECWCVRGSHASSPAPAPREWMSRAAPCSGATDYGRIALTTRRRAENEAGEQSDMRSRVKRLDMGQGSRKWDFCEIMQMRAGPFILALCAVVPVWCNSPGAKHSAVYWRVKDGTDDFYQLKILTLEERGDHGIKSQEERQGKMLLQHRDTHMLSLLHTQDGVVHHHVLFQDRPVKIVEDNMNLSRMVKKMKKRICLSTGPGYCAS

SEQ ID NO: 961333 - protein, 182 aa, Homo sapiens
AAAPLSRFYLFFPPFPFLFLFFFSLLPSRPFITITPRRRFTRKGEKPAHNKKERRRKQNKKENNTQENNKQKREQKKKKTTRDKEKAHRRNNKKQTHKKTKRKQEKEIEKKKEKDKNHEHTNRTTEKKQKKKQKTHIPQNNKKKNEKEKKKKEKKDTKEEKRKKKRKNRKKKTEKKKKTKTK

SEQ ID NO: 961334 - protein, 228 aa, Homo sapiens
AGLATCWCPGGSEPRVAALGPLRNDLGRDASHPSVLLLLGSLSRKKLVVSLDDKLRYLMLSLSMKLSSKWAPAQTAPLPVAPDAHLLLQICATAVCHLLPSWCPMSSWMPWVMGWAVCLPGPALPYMALDVYLQWCTPCPWNALAVLDPYVRGCPRTMHVARPTEVLGWYPAPLRLFHSDPWGHAQPWCEAATVSLILRLPCSSARWPLPFAPVPARSGLRDLELCRL

SEQ ID NO: 961335 - protein, 110 aa, Homo sapiens
APLSSARSQGVLSDGGIHNISTVAVPTQPGSASTSSDARTEPLDSSVPCLGVVRNPPAGGAECGLSGYVPWVPGCPCPEPMLSSEGESVNVPAMEPSPKPGTEVIPGSPQ

SEQ ID NO: 961336 - protein, 245 aa, Homo sapiens
RRAPEPGGRRARQQRRGRGRRLQCRPRVNQESVPQERAVCPGAQTELFQHQQQVSRGNEERHVHLMIEIIPVPDLWRLVIRRSIMVSLHVKAARAFSGEVSKSKADLLLSSLQKNCLIDRTRKKTVANTGRVTERCLAVGMSRRCCRHLAEVSKGAERRACMQRVQKRRSAAAVAASTSSSLERLSRMTRNYNDLGNGGEELRDDLRNYVTGTPWGEKADSPQEFSGAWACQTAGWIRNKRPLGC

SEQ ID NO: 961337 - protein, 127 aa, Homo sapiens
  misc_feature (77)..(77): Xaa can be any naturally occurring amino acid
MRPSDDRARSLVLLLLDECEEGSLVPVPDESALIATCCSCLYSSMAVSSEVYPALWGPSVGMPPSSELQRRTIRDSXATDGWADKVGEEASRRGPSFHKACTGTDGSGAQRPHKGRPTRGPTKTKAR

SEQ ID NO: 961338 - protein, 143 aa, Homo sapiens
MSSAKGAASSLPPVRLLALCCLWSLCRDNLRAVDRFLSAAVAACFSPELVILLCLPAESLLVPDPFSSLDPTANATLTTDDLTCLDAALAKCAVPSTVPLAPGHINVCDHMNERMTVYWTSLVCVVLSVPDTGHLLVTLSGLT

SEQ ID NO: 961339 - protein, 90 aa, Homo sapiens
RAPTTGAPCHVEDDMPPGPGMDNVCCHLWLADVIPCVTVLFPAVMLPGLSWVSCGSGLAPPSWSPFSRWAWFIWEEIVFQWLAIGLIDDV

SEQ ID NO: 961340 - protein, 247 aa, Homo sapiens
HAFGVSGKSRAFGCGGCGREPAGEVLLLPPLYSDPGSTGMSILQQLSASGVNSALFQMPPHLMSLPSKLVNFGGVAVLSDGLLLAWWPCNPRTLELLSCGLRCGPSVLDRGTASQGRVAHACRVGALAMYPVHAGYIGQGDADWGRSRGAVFSSPAVVQHPGEPSRGVAPGRTLEGRRSVIVKELQLGIWLNFGLDRVAGRADGIPVEMGVIGDDELQCRKSGRGAGARAINQGRSIDWWREPKYCQ

SEQ ID NO: 961341 - protein, 79 aa, Homo sapiens
SLSRGRGLAGTQKGPSVGHTDVGFPTIQPLTKSRLPRTPGNKNWCHLYTKEGWGTRTKIWLVVLVVAQGRLSEGVSVAG

SEQ ID NO: 961342 - protein, 130 aa, Homo sapiens
NVLLRATPTPVLAAAPASVPCCQRQHLAAVLLCSLLRAPASSSDPAVQQLCCNCWLLAMTPVPSCCNAPCCRPHAALLCLVLLFHVALPLAGLLWSCACTHVILCLHCWTATEMTQLRCACPDVIWDPDW

SEQ ID NO: 961343 - protein, 208 aa, Homo sapiens
MAPVHLLSPCAALNDMQCPGHSELGMVWLVGVPDGDCHPHRSAESLPTLSDSGSLCPLPPVLADSEKTQRAFGVPRHDPLPDPLKVPPHTDLTHPDICIGGPRDAAPQDSTGKRENVSQTPWKPLCPAPTHALLTTKATPDCCCRITKVACWFGTVSADTQCPGFEPSREGSRAPLQKVFNPKMQIEGDVVTSTAGVYAPTSPATGRA

SEQ ID NO: 961344 - protein, 109 aa, Homo sapiens
MAPGGHAVVALSSRHCTDVLVRLCDCVTLAVCAVQIRRAVTQAWRHSVWLNTGARMQLLVYTACSGVGAQTELAGPADLEEAKGWAAFVGGVIPSSGNIQSSVTPATKR

SEQ ID NO: 961345 - protein, 162 aa, Homo sapiens
MELACKLERRLRREEAEEMWPPAGSPRLPHAPGCPKPDALSSPCPVLPTGHAPDAGAAAPRLSLACLDINDGRCCWPRLLQVVFKPPTLEFPDVQACRLIKLTWMSMFKLYRTAGREWLQSDLMELKLMMEKLGGPPDLTLGLKEHDQQEVDEDFDGKLIFP

SEQ ID NO: 961346 - protein, 168 aa, Homo sapiens
CCVVRPGGARRVAQFWWRGMGTQERGDPVVTAVALPLPVLFPLPSHFFCGTSTPSSGCSVTLVHACAMGTCQHLDIGVAPWKTVNCCQDMQKVEKPGSHLVCGALCASGVSVTSMSCVRLQSCCVGPNIGHIDHIRPKWAFHKTLQGPDQIEIDTTKDKVGLESTQEQ

SEQ ID NO: 961347 - protein, 89 aa, Homo sapiens
MDERITPEKDTERHHGRQNPPEGRNKEWRNKRTSQKQDKDKTEEIVNTPAKREKKEMDETKTKTRMISDPRRTQKLEVKINNENTTRVT

SEQ ID NO: 961348 - protein, 279 aa, Homo sapiens
VKVVTAMIAVPAHDVLLDVLRNWSDMLLCLLLVGLWCSCLVAVLCLSCGLVAWVLSVHLDCAVPVLLPVSLAAGSWQECLRLECALWSSTGGAALLPCADRVFVWVLQLLGGAGAVPSFVVPSSVARAPAAWLPYRCRRIQPVPYRLELDQKISSSLLAGIWIHTCCPLRLRMLRKSGVMGLNKDSQLGFHMEPGKIKRGGYEYVYGDPHPYSLTSWTDLNETTGAARSPADELTTLVYDLTGKESSGIGKQFLWAMLEKVVRNEITVKVQESTGIRNS

SEQ ID NO: 961349 - protein, 146 aa, Homo sapiens
MERVHDRMFCEVIHLLPGVATTCSRDRPRGSVWPVAVRMSSAHLVDLFLSGRQIFQTATQADPPGASVLLQVSTAVERKLSHARNETEAPNAWLSLLRPAAVDVMRPAEGSWRPASDVPQLLKENLARGLLDLGHAGQIGHLLHQC

SEQ ID NO: 961350 - protein, 199 aa, Homo sapiens
MPSETPQAEVVAQQAAPTRSGTTLGEGDAWRRGPQRIMEAKEPLCDPGPMLLSSVHLAAGAGLPPSPHITTLDPVQNLQKSCHDILNENLGTPLWSESTRFGKKFGLKCELLANVSVLQLRAGAVKDRIKPADDLKMLSASDDEARDQRIEPEIGTTGMGGTEREGGERDKTEPKQSEGNAADTGKRRPPNKKTKTQRR

SEQ ID NO: 961351 - protein, 38 aa, Homo sapiens
MAHSAHMGLAWGTGGPMGNGGAGGPRKRTLGTKRHSSP

SEQ ID NO: 961352 - protein, 108 aa, Homo sapiens
RVTSLACVRSCVDQAMSVSVCHVFLSMCCPEGPHSTVPTISQQCHLCPVCAMWQPTPTPHNPSCASEMLHALACAVCPTLYADPALIQHDDPFLVRTCVPMQHCVCML

SEQ ID NO: 961353 - protein, 153 aa, Homo sapiens
MALCFKQGMPHTAVTMAHQTCERVYTKYTQQCMIRHQIVQQHKLNAASILAQRELTVCATCSHSAKPLYRSTEAVDSPCTIAAARQNSDSAHRQQIVQPPAGKGYLGFNLISQSSPCLTAQQPTQRPSLKQTQTGETRRPVACHAQTPLVTPP

SEQ ID NO: 961354 - protein, 79 aa, Homo sapiens
GAIILILTKVWQGSAHQVAEIPAHVPPVIAVTLESPDSVVSAHLYLWHRSLCHVQWTLMSSDGLWLEGRWTVLWKNLCQ

SEQ ID NO: 961355 - protein, 79 aa, Homo sapiens
ATGSGSSTWHQKQSIILPAEPVSGCTCSAMSFSQMISENAEWHESEGRVECPVKACTDAVCVSDGLDMVSWRAWRCMQC

SEQ ID NO: 961356 - protein, 124 aa, Homo sapiens
HSSGIRQATEDKDSMETGRLDVGSRHRDQRDGVCVLGLHLAKELCRGDEDGDSWLQVTRRLPITYPPYLTTLEVSLRYRSMNLALYTREPHKHLATSPWLALSREPQQWLGARTYTQSISYAPI

SEQ ID NO: 961357 - protein, 163 aa, Homo sapiens
LTIGGSGQRRTWPRPTTWQLTVTSWREELRMKLESIRQRSWGNCLCQGQGSRKWDFLEIMQRELDHSSLVPVWATHLVPMHSAVVRRVKRWHGMQLRNQCLKGILEPMRRDAGGGTQSALRRRPWKSTQCQGVKRICLAFAPPRKVTYNFDIVRTLTCAHIAM

SEQ ID NO: 961358 - protein, 300 aa, Homo sapiens
LACCHELALMLLCVCPLCAGLCLCLCCMSEVMCSAGCAPVCGSPAVTVCCCALCPVSAELCWCVCCCALLLASCTPGVPLLPPAMCSVPALVAHALLNVLLACFGARMVCLQVEDAWSGVDSCGDTWVVTDVADPIQLGDVLAIFGPPQHPTTRAGYFKARLKFPIDYPYSPPAFRVPDQDVGTLNIYETGDVCISILHPPVDEPQSWGSLPQRGGNPTQKRQDHSPECDLPPNERKPLSARNVTPRDFRTVAESREGSEFQTSSEGGLDQGARSVTGGPQLAGLLRQAGREANLREQRG

SEQ ID NO: 961359 - protein, 256 aa, Homo sapiens
RRSPGYPSAPDSRLGGGVAVAAVQKADLSLADSIKQNHLQTLDGRRLNAGLHLTTTETADGPLTDCRGMTHSVGHNTQTLPTILLPGLSDLTEHTRDTLTTVQHDTNTPMTSRHTVRPTHFDTHYHHMYLLYPTHTRNRTLRRQPGTGLQPRDTLNDNAGPPDLTPYPQRGSNIPTHAETPYPPLGHNATDTHHVGPPLHPDGGTNITPHTARYRPNGKTRWGPHRDHGNIPTPPPSARGTQPPTHHTRNTTHRPE

SEQ ID NO: 961360 - protein, 226 aa, Homo sapiens
MPKLELPLRWTWPRYMLNGRCEPEGVDDLRLCAAELLLAVSVFEKTKRLLFLVCAHGLPVTTVCVIECACACLYHLARCPQMPVPLHVVPLSVLHCGHDAVICDHDCACLIMDAFGMASEADPSGVERPLPVPHACEPWMGRRSCCVSCELSPVRAVVCCTCWGLAAPWPCTLCGLVDCSDMYEEMCLCTSLCHVLRPEAGLTPAAFTWEPRLCFAAFPWTERSVS

SEQ ID NO: 961361 - protein, 147 aa, Homo sapiens
MVSPARVDLSLLSRAGHERLPLTALSINKEDYKIGQGYLIKDGKRDQEQDASTDYDLSDKSINPLVWLRSTSGEGDQVSLCHAEKAVLVGTKKRVLTLRKSCAGADECGGLWRMIDLKFIDHLPPSLAMGRFQTSGRENDKHSVGTD

SEQ ID NO: 961362 - protein, 330 aa, Homo sapiens
RKALGSSPGLPRVPCVHVNGLRGCRNGLMPCVMHLMASMSRARNDLESLLVVPEMNGSLPMMCLHAAPCLCGRCDSATTSPMCWPVCGDVLMLPLPACLLRCDCGGGTHVLCAAAVACVSSWPVSPICLLQGRCLLVCVLCGLHGFHVAGAACACLPHGLPSAGLRIAVGLAWLSLGAACRKGPGCSWWATLVPIDTSKPACCPALPFPLKVLCVAVPGASSGCAAVCWRPREPAEARAENCLSVGDEGRGALRLGEVYSGAVHLGRWAACLGHLPIPEGLFGGRRIEGARAAKVRPVSGVLSPVRGRPPVAVRAGPQGWAPRSAAFRAV

SEQ ID NO: 961363 - protein, 233 aa, Homo sapiens
RDWSWVIGSPEILRKRLSAVVSRLHTESDSMPSNDSATPTAQAVPGCSLGSREGPERGQAGTLDVRQATGGYMGPDKPHLGRGWYLGPVTESLSGIELAIMLDEDTLVVSAHAVGSSPAMEIRGRGDLYSWLRDATAKAYQGPGCCVVARQRLLSGDSTEKRTGRPVNKVIKSVSATGLSVLFLRNTRPDSPFGPAPCPHILSRPTHHPGTLLQAGTSCQALGSMKAPIIITE

SEQ ID NO: 961364 - protein, 279 aa, Homo sapiens
MERGGRDKSKKAKTPAGNTTRFLCPTRKYKLARKGHLWGIIKIRGSRGEQWRTESLKGVRHPSQGGDSCGTQCETPRGGEKVSERGRVWREEGHVWRAAAGNISVVDTKGACGLPTRRISVRECAEREERRMQAPEGAPPTRRGVYKREGGCTPPRGGHTQRREGWGPPLRGSCGAPEREGSVTPAMQAGDQEGGGSKHAAVWWCSQTTGERGGSTHNLTRGPEERTNQRGDVAARGAKFCGGHQTHIVMSEEGDTPLIPATIYEHHMAMRDHQTLRGT

SEQ ID NO: 961365 - protein, 131 aa, Homo sapiens
SPSLVFWAQNPIITPPPLVNGGAGKKAKNPKTRSGKPPSVSGPPPFNRPCWGFGFFTSWPLGGWGVDVGGVGTPSRGASVAFGAPLWERMSRGGCGKKRHCAAGREFSGGERGGVVPPQKCPYRRPEGGGG

SEQ ID NO: 961366 - protein, 34 aa, Homo sapiens
MVTLDRGKCVSKLESGRWRKKLSKLKEHTERGRE

SEQ ID NO: 961367 - protein, 67 aa, Homo sapiens
ADVTQGSRKAVGGNVQLGSLRDCEKEMRLLLAQCLEGAYGPEPMRMRGMRAENRSKWLFYKVIFFES

SEQ ID NO: 961368 - protein, 100 aa, Homo sapiens
MLHTSFSPPIEGDTNGGTHSLSIPSSPKPYTASNLSRKNEKLNYEVSTCEVPGRIKQPKWFPVNDVKHVSPTLNFHPNANPLKSLRPSEKAWVGPNREKP

SEQ ID NO: 961369 - protein, 167 aa, Homo sapiens
MVRVHRDQWIGQGAHSGSISRMLGPSSIIMATQSWGSWLAENGPISACAWVWIIFRSLAGPPRERIFPIFSISEVGALEVVPTPRRLFRLLGRKSPRVRRFLPPWVAGVLGWAYKWVYKSLLATRRRSGSRQVSNYDDAEGGSLRADERAWGRCLPPGKRRQVISGT

SEQ ID NO: 961370 - protein, 91 aa, Homo sapiens
MSGALSDCGHCDFCRDMKNVLVVPQQGSCAEVPAAASASCVARESYKYFPSSALTSDCPQSPCQGPCLALPTQQQPHAITGMLGRIPVKIE

SEQ ID NO: 961371 - protein, 305 aa, Homo sapiens
KVEEHASQDPIEQGDETPKTPKDQTHTQDNQGEAYGGPKETPTQWKSFPMTHKGHIREWTHSIMNKSGILPLCPGIVGTAGQKIIKAKQWRCDITEETIMERTDGRLEPRNDRENIQQEYTAKDNQRQHSIGQLAEERNQRRNQDQTITCITTAGPATCTAAEPPAAAGYSRYRGKSHKREDRDKTGDIRNTTEQEEEDPNDDSDSLRPSHIMNPTMHANPAKKPPKRELVKTKLQHTKRTHIYGSNPQKPTTKGGPHTNKHTNAQPTPRTPEQSNKDNENKIDRTKPFNKPPTHTYDYQTQRHQ

SEQ ID NO: 961372 - protein, 220 aa, Homo sapiens
GLCLWLAVVASEAVVVFCVVADRGAPNTLLASGLKIAGRGAIRKLTKNGRAESEEEESIESLYDAHPDDISVVKCQKDRYATYQLEVTSYRVFQHPGITGQSSSGESKDNRECDEEEHTTKSSHGLAEEQKARQVQLPDRRQLRSVDVMCSAVFRGAWDERAWLTVLGTDFPRHGKDFIAVLVTLKWSRFEPDWHTMVPWRSGEVRNCSVRVWNLVSVYW

SEQ ID NO: 961373 - protein, 221 aa, Homo sapiens
MKYPQATRTSNNEPQNTHRVPQTDHSEQTHHTQTKDRRRNTTEATTHQTTPHRTTTNEEITQARDRTPVTNHTATEKHTQKTKNNNKEENQHRIRAQWKRNTQIKIERKKNKQEHHTNKEQTTETTKKSSKETMMNNPKNDPKDRNKSKEKTNKGKTEAEQDKRLLAPEDKARTQSQDKKQSDNKHRRTLANKRAQNETTNKTQRKRPETQDEHTRQTRST

SEQ ID NO: 961374 - protein, 210 aa, Homo sapiens
LLSWSLGRGFLRAAVACCVPGLSALPAPGGWQECPGPEVQVPAIPDVCCLHCAGAQCLLPAAGSARLVLECPAAGESELSEQHVEPDVWPACLSDCGLDEAEAEIIQLLKRAKLSIMKDEPEEAELILHDALRLAYQTDNKKAITYTYDLMANLAFIRGQLENAEQLFKATMSYLLGGGMKQEDNAIIEISLKLAVSMLAQNRQEFAVAG

SEQ ID NO: 961375 - protein, 67 aa, Homo sapiens
QAMLAGFLAFRSGQPESLSQPVSCAPACLLSPGPAGAVGCAWLPHGAPPPPDVLAGDPCPMPLTLQA

SEQ ID NO: 961376 - protein, 276 aa, Homo sapiens
WQTGGPGRCVLSTQEWSSSWWNPFQSTPSAAQCLDKGEQIGSLSEVRIRDVRLWMICDINSMNWRKGQMDGPSSSPEEAVIERGNRKLSEQVTAWCINSCCDAPVCERTWWSDRLSHHPLLGTNRALSLDKCSVVNNLVSPKQQALPSYCTWYTQCLVSDSRSWCLYALSIARPRSSPGRCCTWSCTELAHEDRWCLSFPCAVLGTALVSPSYHFRQAELSAGRWLRGCGPMRQVPMRCPRDKCRSLFRRPLRGPSSGRGPRSACYWAPSHSKGCR

SEQ ID NO: 961377 - protein, 274 aa, Homo sapiens
ILATSSLARLLKPLDQGEHPDFKRTPCIVRTAESVSAKQSSYEVTLVRHSTINITKKRGSFEILSDPYLAYHNNRASDYVLRIMDAYGHNYDLSATSSRDQSEAPFDLAEGESRIVSPAGFRISRKYSREAPFSPEVRSVAELHQNELVSTIKRALTTSNSSVGSNILTHSSRLNSYTDHYFVTQDSYFYPPCSYEFEQHSPEFRYTNSYTSYGNKFLPLTYLSFYDMSPYPLNLQHSPQAEKKNKPGHYGGPGKGRIGREGFLPVWNGTRPKA

SEQ ID NO: 961378 - protein, 351 aa, Homo sapiens
CLNKVEHVGAACLHGDPATHLPVGLLQLGRLCSTATYDLPTVHMPDVLVHDPCSVPHQLLCNNVPGAGLMCCSECSMCELLSCHGMPLNEEGSDSLWLLVMHAPLTDWWLCACCGAWCAFAATATLVPWLSLGSGCGQVGTWGQTVEPLLDCSLGWWLHRVFALNFALVYPSSSVVLARDRSCVWHWVMLASVPVIGLPLCALLTFSGVVAPGMWSPALVPLAFSGCHESCGCAPPARRDRVATAGCSFLRICQPLQVVTTSEHAGPPLVYGCLRLATLKLLPGLGTDRNVFRPWWGPCGTVGPLCVGSTLRLFTPLRPFQRDPQCAYRAVAWTWLDPPGLPWATGSGGAL

SEQ ID NO: 961379 - protein, 145 aa, Homo sapiens
LVQPHRQLLGPRRACRSKTVEGPLGYQGSLPMAIFPTSVLLVVGPIAHHPCLLLKCVRADAGTERADIWVKGQGSAQPGRLDCHWAPMTPPACVSRVQRWRVLRVWVYVPELDESAILDPGRKSSLSLDEDLTEEQDVSHRRINT

SEQ ID NO: 961380 - protein, 120 aa, Homo sapiens
MDHTTKKKGAKVVGRAPPTYMLAYPTTGREVDRDSISNRKAGHPAQDEKKATEQSKALAEEQPTPRRTFALEMERIRGGDENGTKKAATEQWRETKKRREHDHHQTRHTTAHYFGRYHRL

SEQ ID NO: 961381 - protein, 206 aa, Homo sapiens
MSTWKSNYFLKIIQLLDDYPDNVLIVGSMTMWAPEQMHADPLCPFVGNGLWLLMGKNTMMAQGHPRAPGKQPSSGETAASYPGECWAYVVHHRRTSLEIEGHVSLAKYTVPAVMPVSGCHMLPVNVTVASPEHWSRAREDLLIPGFEVSPLKSPGAPIEILSDVQLIKTGDKVGASEATLLNMLESPPSPLGLVIQHVFDNGRIYN

SEQ ID NO: 961382 - protein, 243 aa, Homo sapiens
MHKSYFLLAEDGGPGGWRSGAPHGWQLSPLAGRQLQPLWAPCPVLLFMVCWCLSLVDGAHGWDHAPPPQQVGSDLCVQGLMWCWHMWEWCDPGCARGHCTWATMHRLCLQMCEKNGIAPCMCHVLQVEDTLPVILGGSQCCTKMLSLEKDVFCLKDGVMRIGRPGDLFSVRGGRENSVNMTARGPPGWLLMEGLASPPVVSAGAGKKPLEDVLFWVTGPQSTFGYAQVSLLGILMLWPGAIRV

SEQ ID NO: 961383 - protein, 96 aa, Homo sapiens
PPSAPRHRLGSAWSPFLLAGAQSLELPLALAGLWLAVSRCPLSGGPVLSWEVLVAQLDPELQLQLPDVLPVIHDHLDSCLSFAFAPVVNLHQSCEC

SEQ ID NO: 961384 - protein, 66 aa, Homo sapiens
LRYRSQAYTPATMSNGTCSWYMILCTTYSCVVCFPARKSRDNMPMIRETNHSNAMSPLLDTERVDR

SEQ ID NO: 961385 - protein, 154 aa, Homo sapiens
MGCRQPLLPSRNGMVLNAPLPQWTGRLAAWPLWFNQPCPVRSCMTVMCPGNCQWLLPAICPCLPLLSVCPHPVPSLCCLPARVLRTSTELCCAAWACRLLALDGCYRWMAWNFHIRKVCVPVIPFRQLSCRDPEGVLEQSPTGSSPCKGPNPVA

SEQ ID NO: 961386 - protein, 242 aa, Homo sapiens
GSCALRTECGCPVAWIGGVPAVACGSRHWSWDAALVRGDRVMAAWDLDGSRVCPPDWYLMMVLCCPIRCMMPVPVPLLLCDLDFVLFAVSAGAPCELPLCVLLRCAPPGSAPFPGLSWLCGVVLVVLFDFRCPCLSHVRMEWLHLCSFCASSPVCACDADSVACASFASLALPGVFPVLAMELTCLRLPQDDAKAVVLAPSVGGQSRSWLVGPFLPLTLDMGPMALGACNGSTLRPGPVTGA

SEQ ID NO: 961387 - protein, 133 aa, Homo sapiens
SSGGLSDPVETLKNRPIHGRHELLQLVTTFSLYHILPFFTNCAHVMTECAQCGDACLPLELDPVFSQGLLFRVAAGWLCSIVHWWCSGCEIPCVPNCYTSPMGFAWHDCAIHPACGLLKWMLMKHLHFHGHRK

SEQ ID NO: 961388 - protein, 272 aa, Homo sapiens
LPLQAQKCLLQMRGFSRLPDVCSGTEQMFKCQVLVRFGNPAVVCVHSVVHALPCHAPMSLPLPPPDFVCANRCTVELNVLEMCGTCMCPHMCTVICHVAFASVTNLVKYALHVMCTICVTPGGCEYVGAGSPVMKDPNYLRQNMCDCIIDGALGGPLVCGSPRWDCPTCLSRRLKRTYFGCLYIHRHLCPNVPTPSVTKSSNISFTFPSRSPCMKVPRISMPKTSATGDELQVIEPSLCGLKKLSHFPGLLLLSLKIVANSFRDHCCLQNWD

SEQ ID NO: 961389 - protein, 76 aa, Homo sapiens
LTSAAICLTAKMLIKKTWNPKFTLRSHYERAYRIPGDLYHHSQSGSAHRLRGRHSSMLCEPARSAGHRDKEELLCC

SEQ ID NO: 961390 - protein, 179 aa, Homo sapiens
HFFSRFKVLNHKDTYQNYLTQNITYVKIIKSIHVRIHRTQKQNPETQNRKSHINRRRHTTRRERRDSTKTREARKSTDQKNEKKRSAATNTRKKREHRKSRGDNEKKTRKNETTTANNNKQNTKDETRKEQKKKQTGDNHQADESNKRKDRRTRKKKKEHKTHNRDRTNRDKERERAPT

SEQ ID NO: 961391 - protein, 220 aa, Homo sapiens
FNATSEFCRTLGEIPTYGLAGNLRGAVSELMDFERDEERSANGGSESDVWSENIWLCARVNLDEEKQQQDFSASSTTILDEDLICEYVVAVQLPCSCVRTNGLLDDHMCRMCGPGVNVPPTMSAALSLCTASMDEDVPSDDNVHACEWSEYLMCFTHGLQCDECDCATKPDVKIEYVDGDWAVKLTPKEAFLAAVHRFHGKGSGKMKTERRMKNAGRGRR

SEQ ID NO: 961392 - protein, 294 aa, Homo sapiens
LYSGVHEVQGQQTAGNASESGPWVHLCARMLNFTGSGDTDSIYAADDAGHMLLMMGHVRADDIMDPDNASLKPMWKTTSWCGQKRLSPEKCDCIYLASRPVQQLYTRELPCGAKCATPSTVYYLMDLYLAPGLDDLRNVKNGKVASCSVALNEITEIRTRIGRRGSFEDKTVPAVRRTAAPMNIACDDSMPQQGGNELPEHPILASVHVLKLDNNSHSTYQTRGLEEQLNSRNLDKTEGSLDAMMQVVADRTEIEWDKRGSGVATDKEQLRKEMGTTKRQDRRTKQSKNDRTRQ

SEQ ID NO: 961393 - protein, 254 aa, Homo sapiens
TRWPVGLGWNLRTPGTCAATLPACIEPACRVSCLRTYLKGRLLGNGGGFALLLRVPLTQRLAAPTLSKSSLQSRVAKPAQREKILNEIELHRDLKHRHIVRFSHHFEDADNIYIIYWSSDMTESPWPTSWKCPGTPCWSQKCATYLRQILSGLKYLNQRGIFHRDLKLGKFFSSLENMELTGGGLWAGRPVGGLREQQEEDHLVGTPNMWLQKLLLRPGPRPEAVYGHWALSVKAALGSLLGEVTEGVRASAVN

SEQ ID NO: 961394 - protein, 184 aa, Homo sapiens
MVVYLPFAGPRNLGFLGWEARQNRSPETSRLQNHIVGGFLTSGFPASPSRGGRLSPEHRRYCIVYTQTRKGKLSRNPRPLSSTAGPPYPLRAAQGSWVVALPAPPGPHFLCRSPECGAPLFVYLGGPQNPSPFPLPVSGLSCLKFCAPFEGFLRRILLDSKRKGEGKAWGLKGLAGKGPPDLEK

SEQ ID NO: 961395 - protein, 155 aa, Homo sapiens
TCPNGKRLDSGTCVPVPSRTPPPDAPRAWNLNLHVLQTVAACFLICTDGSRKVPRAKTSRLHGADEAAERVTMCMVELAGRKVVGYLVLSSRTSVHVPTVLVCPHGRSRVPQYAAASKDVCCGVSLVPHRACTLSSMFNRYGASTMHPMVARECA

SEQ ID NO: 961396 - protein, 241 aa, Homo sapiens
MARLIPSVAGGNQRTRSSLSRDVRRLATSFIHGRVQSSWEANDTRPTQGVAHTHTRVKSPTPGNMTLSPDGVLNPPPPFSPRGSLSRDRVASSLNGIDARPPNSGCIPSGSPTSRSGASFFAQAPPWRVPLPFWGHLVVPGVFPPQSCALLASADPGSSPRRGCPPLGLLQVCGPPSSWRSAVYPSSRAHTRPNAPPGGDDRPRLRSFSVGRLQEQVGWGLSKARHSNFFGARKNPKPNKH

SEQ ID NO: 961397 - protein, 118 aa, Homo sapiens
DGPSCLFKTLMVQKHGGCFTPFSLGMVAGGVNRASISYHFSSCNKMVEGPPSTSKSNKLVGGTGEGHGKGGRRENSLRANSQYKKEGDKKRSLQNISSISGAGCGGARASVPSRCPVR

SEQ ID NO: 961398 - protein, 96 aa, Homo sapiens
SLFPTEYQLPTALRAWPGLRRSGKLEEEKMKLSRIPAVRSNASSLWWPCLIYVGCEHNSHEQIEEECELYITNSGERSDIRVSLHVARVCILRMKR

SEQ ID NO: 961399 - protein, 224 aa, Homo sapiens
MRAGLLECCTRLGRWCGAWTFAARLRGRRPELWTPAMQLLNGALGTGSGPAAHAAYLVLSDATLHVPTKNGQLVLTSPCEICDLGPGTAASLGGRSPGRPPAVRVERVQICRAPREPEAACVDARIIKTKQWCDMLPCLGGGRLRLVKSTGQGCDSALHAGWEDKDHHGLLTNTAPEGPLGSGLGSLESPRLSTSSPLASDFTRSLTTDHPYPVVREDGSGLAS

SEQ ID NO: 961400 - protein, 195 aa, Homo sapiens
EQGRPGVSDPVEPLPERNSLSAIFNNVMTLCAMLPPECYSPTSTPSCIRGSPRSVRILGSLVAILLDVSDHCHPGEGADGCSALHLSSHMIKIVLINSFGAILTGTDLFGLAGPSALPEYTDTTIMMWPGPSKAFYLPSVAMICAIASMAQELIRQCLRLNHITDCCCLSFRPSSCNHGPAPPWQLYRYYQQLTP

SEQ ID NO: 961401 - protein, 76 aa, Homo sapiens
GQVRGWVVIGRGSARAVCVTLPRAGVAGRLELGVRRRRSQVMEEPGMCSWWEVQLVVPESCEKEMRLLLALLGVSC

SEQ ID NO: 961402 - protein, 116 aa, Homo sapiens
MYPTIQIEKARDSVASNPGPSGAPGTRRHYTAPVAVATTVRGDRLRRVRRSRSQSSLPARILDPNTTHMPVFTSCRWREYSRGTPGEPACTEETPTYGIGPPRRGAIKVADLPCCS

SEQ ID NO: 961403 - protein, 248 aa, Homo sapiens
TRPAGRAGCGEHGQGYRGYLAAAPASRRWLAACLGPWLPKRCSSTPHCTTVPVGASVNIHLLPPAGACVGYYLEAATGHSPKNIILLTRTGWCPLTDRRLPGPHTTSQGTQDNLTITMHRLQLVGHWHLHLPGHTRRSMYYGSGTLVLVTEEQYPRMAQIARTPHQGPLPYPAPPTGSSPTLTPADRPLPYPGPARQPLPSLRPWRVISFLLGAGPEGGVKYWRGPDKNWARGDKIGAFCYEPLTSVK

SEQ ID NO: 961404 - protein, 177 aa, Homo sapiens
SWTGSVLIGRGGRKIVAETLAVQFVSDCCFWDSCYPQCLTCAVSWSLNLDVSCCDDALCVIDDPACCLLMGVAEPIFCDVVIVSSKYKQTAMSVTCQLELYTSSVKGRRETPAYQGPGIPEYVEPNERCSLLAEDKVTGGHMNSVIGRHIQQYHMEDTEIKGEVLYLGYYQSDIDWR

SEQ ID NO: 961405 - protein, 183 aa, Homo sapiens
IRLSTRLGVNRTRPRAWCNSTLDVEGIPCIMPAILVCLGFHLCRWCATPPPHITLPGGGEHDQWPTSPCDCPMERPGLHGLPVRGLHVQQGWLPVDFPVPWCSELHQWLCQALHDDLWILPSAALCALPGCYYVPYDLMCVCVIVCVFIITKRDRPACMIVEVYLPWVQLHFPDFTNTHSPWT

SEQ ID NO: 961406 - protein, 271 aa, Homo sapiens
GPPWLGSRWWSAPNPVASARDKEKRIQQYQTPVDQLPSRTGYQLRYLAHSQLAEKIGLYDEEVGVLDSAELLPEAASIKLAVPAGHTGPPISVYTYGLLPTHLGPATDRVHQGQGYLTLQNPSTREPRYKNAKKTIRAAAMYNYARSTNPPAREHRGQPPPRGPGGRRSYEEYERELGAQHARPRTYRPEKPYRSSIHHRARPGGKGYASRDYPGAFGTRGTLKQKTRAGAKSRDPIRISPVTGCNTSSGVTQAADSAPMCRKALEGSSVR

SEQ ID NO: 961407 - protein, 141 aa, Homo sapiens
MPEETQTQEQPMEEEEVCDVSPNRQKLPSMMSYDTYNTFYSNKEIFLRELISNSSDAYGQQSGMKAGQIPVNYDSGKELHINLIPNKQDRTLTIVDTGIWNDQWSDLINNLVYYTHKSGTKAFMEAYAGWCRYLYDLDSTV

SEQ ID NO: 961408 - protein, 84 aa, Homo sapiens
MALNSRLVTRPENSCYMSHLQDNIISMQTRQCRILYNSTMVQLRICAFRKADKDATQSPVESSTSGDQRFWPGRCNTEEDRKKR

SEQ ID NO: 961409 - protein, 177 aa, Homo sapiens
MEGKRAKVLENAEGAENHPFSCRPITADGERLVGMAGKRQAVHQPKQYIFIATKRLIGRRYDDPDVQKDIKNVPFKIVRALPIGRCLGLRLMGSIVFYRSQIGAYCSRLQDATGDLQRHYLEAHQQQNACDSQSQANYNDSAETGHKAAADFWLTVLRVKLTKCSLAMLDNDSSLVT

SEQ ID NO: 961410 - protein, 278 aa, Homo sapiens
SVRASAVGTWPWEKAVSELPFRVWLLPAPGFPAPSCERHHKEECQDRANLMCKYKRIGCPWHGPFHELHGARGCVRPPDFKTGSERDGDPGWDVTSSLPHRMHARCTTASSPCSVSDKIGYTGDRAPPPACMPHEVWVGGLVKSRSSGGQQASGHMSTDQRQDMAGLWTKSPWWTWWTPRSDEDRPETEWNGGAEVDPQVHTLCGISQGAPFSLYSPPGSTTCKWHLHLCGSRVSDSPGNRKVGSLKGLGTRGCLGPGAERPARSLSWRSWPKAIGGS

SEQ ID NO: 961411 - protein, 267 aa, Homo sapiens
TKTFTLTSSGQREKLCGKDEENGEEDHLVFYGSQTVGTAEEFANRLYKDSPPATCDAEACQRTLSEYDLDLDLSRPCQRSDNSPGGYTCMCHLRVSGGPHTDKCHRTFYELVLHVMNDSGSLCVVNVRWMYMVLVGTMTYLRHFNAMVQCTWTHAGMADKARQPTSIFELGIRADRRLWNLEMSDFITWPESIHEPRRDVETPMEALEATGAGRYQTIQPERQLDGPPTTDRMQGQRRNMRGALGRRARHYERTREPPQKIAKKPDP

SEQ ID NO: 961412 - protein, 240 aa, Homo sapiens
VGNGQSAEDARWSHGTCPSARKDCRLCVANPEEQRCLLDASSSYDMETLRMCNLYLNARSAAVQDLVLTTENAVASTDLVQNNTSYRNNDVVCYFQYTMSKLNGTHWYVHTLSSGSTWHDVTDNYSHTTSTSAEHEVADTLAEYARLSVGNRDTTTAMHALEAMALTPSTALTDDFLRTFTPTTEGTCAGLAYILRPLGSPIVTLYKASHKQATYLTHFAIEQHTFLTLVLGDLETTEGT

SEQ ID NO: 961413 - protein, 219 aa, Homo sapiens
MDISVVVVSSLNAMVQWNLVSFNGCRACGLHPVDGVGVNYDSPQMGPCTGDVMLENYQNLLALVTSTCTSQMCSLIWERGRRSHWMHADGKSPEGPVQNVELDVLVPSPTAVAIMQMKNRPRSPSVERAIGRSSRAKGAPGSVDLPEGVKASDTRGGTHHAMACDVPGRGIPPQGSPIRQKGNRGCPCMGTDQKEPTMGQKGRETGREKTTTNTGPVAT

SEQ ID NO: 961414 - protein, 79 aa, Homo sapiens
  misc_feature (1)..(1): Xaa can be any naturally occurring amino acid
XKSNDDASVFQEEEDGAQHRVPGLVALFMVCLLTLTCVRFAASWARTLVLLDNLNVRGDSFAISIREPEVTCGFDAHIQ

SEQ ID NO: 961415 - protein, 203 aa, Homo sapiens
MCDSVGLAWRRGALGCSWLGIAAGFLSGRGRGLQKGAGDSSRHGTPHAFLSPSPPFSGKAELVMNSCTPKTRLGHSCAYEPPYDAWHFPSWDHHIILTFAIHYFFTMPGSRAGPLEQQLVLRKICHSSQSVCYNRSADGIMWQLTALCPMSLATSLKTWWNMCGVRNLCGQVWYLSVPPLEGLTKWKGHWGATENAGQMHILE

SEQ ID NO: 961416 - protein, 241 aa, Homo sapiens
YDRPGFNRPRLKPGALGSAADRCNPVEERAAEPPSCLGTYSEWLLAAVVTNRFDQLFDLTESVTHFRCVLECAMQMNNAKNECLAGGAVLFVGPCVANDAAAQCLLCPGPISNCWHGKHAAARMSHEDDRKNPLPPSVWRGLTEKRVRRRPPVALKEMKEEDELERRPDQQTSVVNVENNLIEDHEMADHLVKKIRKPLERKCGEWRRIFMLIDLIIDRPIRGRGGLGQRSRWPWTWNGPD

SEQ ID NO: 961417 - protein, 294 aa, Homo sapiens
LPLMISPRSAELLADEPGGAFLCELQFGAEPELAVISCLGRVNLIGGTQDYNQGLDAAYGSGAHDVLLVVQAPAMDVAECLVTHHTLRCARVSPMLRMQVYPHDPQTPAALAVSHCVTFLLDGAQSYGSTVRQSISSGTVTTMHDHTTLHTLGTYTRSGKEGGGSKGIPRIDPPMKSEGDVAIGSPMPYQSATSRYATNDEVTHRVYRTPLIQIRDEQGDIPWIHNENHYGGDNEKYTDLGSHLQDHPKRDGMDSQDTGEPWKTTKTYSDSGEFGTLEWTTYQLGPQDYKYVNK

SEQ ID NO: 961418 - protein, 224 aa, Homo sapiens
MAWLSASAGHLPGAAGWLTDGCVILMMEMLLAWLVLCTHMNDGSDDLNAWQHHVMNVGACSELSWTLLRTRSVMYGFCSVNGLPMLLCQNTVLINLGGLKMCLMPCKCACASHVAEVWQSSSSGVDVIVKPAAVEDIDAGAIWAACSLTGLAADSPALCCTDCRLREDENAEPVGTTYQKTDAAVEMKLDNREQVGDRHEGEELRKRRTGNAPVRGQVRHSGGQ

SEQ ID NO: 961419 - protein, 96 aa, Homo sapiens
RGAPPRTSFTVPLAPFAAQPRIGPALGEVMLSSKKETRAANNRKTKRFIYTSSSKQARAKSYNSRTAAIQSKYKTHIRDKVLHKIQHRITHNITLH

SEQ ID NO: 961420 - protein, 277 aa, Homo sapiens
LGARLGLNRPRPCFGLRMAAVDLENAAGVWALGKAIGVLTSGGDAQWHELLLSWAVTRMGIYVGAKCLPHLRGAMSGLVELECENINAVPTGLSCLQHHPAGACTIIVQLLAAMAFTTREGLPGQRPTTWSSTDHQPVRHLCVGWQPYRCQQSSAASGAACWSELVAGRKISETTARTYSHLNIAGLVWLHLITDFSGPDMTIGTDSASTCIMECHRCHHHNCPEPPEDFVLEVMGGPVGYLALDSAGPWAVGVHPGVHRGAWDFCLRVVDRAGPMH

SEQ ID NO: 961421 - protein, 221 aa, Homo sapiens
MLGAEPTEVCVTSLLDASMEHRVANASGAELQRCHKGDWPLPVTWYLQAPVWLCVPQPSKCSCLSIKTGSVKTGLLVPVGRQNVWTAMTSVASGMEERGGARMGCASGMWSSSAGSVSCVMAARPGTRLFIERACGWQRLMPPKRTGGEHVSHECESRRNSQSAWRKSCRCTRSGGLFAQEGLRAWSSSSSPSLDLGRLRSRSWKAYPQGNRWANQLCLRP

SEQ ID NO: 961422 - protein, 210 aa, Homo sapiens
MCWCSWLLRVNVERLGPPDQRDLLGLLVLIASLGAKVEQVRGWTEMAILVCPCVLSGPSVSTCGLRVLLDVDLVLKCCPDVLPNGPPCVSHVDSLELLAALDHPGSNGNPGPPVSPMVLLEKMVPKVLEETVAPLAELVNPCSKVLLDPLAEKGEPGDDGPSGAEGPPGPQGLAGQRGIVRLTGQRGERGFPGLLARRVSPARGCSGASG

SEQ ID NO: 961423 - protein, 182 aa, Homo sapiens
MACQHRRTKYYKAILMKDLDAFENETAEKVTLHEHLVPASKVCRITHIRLMVCEPETLLNVGTTTLTEASGKLHLLDEATSIPVFWGATRSFTVSPKVTQMLDILRDYLDYRGYSYERVDGSVRGAQRVALGQLRTFGQQPIFRCFSWVLGPVELALILNSSRYCDFVDSDFNPRNDLLAGA

SEQ ID NO: 961424 - protein, 105 aa, Homo sapiens
MITSALELFLFWMKMNHSLRNLHNTNLTCSCIIDFWAEIIRVLDKIEVLYEDEGFQEIEQLCSLSGIYSILSPGGYYEESLNYALWKQGTYFKCTMINSEYVETI

SEQ ID NO: 961425 - protein, 187 aa, Homo sapiens
MANGSPLSGDDIHPVGSSSIDPFVRTFLEERKVSNIQCAVIKLPDVYGVFQFKVDYNRLGYTHLYSSTSGIRCSAYSSDSADMSRFSPHRHLHHYILPDAFLHVCWRLFTLQTIVFLHMKRQETKSDSEGLRDHSSDTGDEMTGTGDGGLIRTLVVLCLLLSVSKPWEKWHNIYLCGTMQQLKTPKG

SEQ ID NO: 961426 - protein, 221 aa, Homo sapiens
MPWKSSSIERLTVPELTPAGLRCLVHDGCLGPPAIGRFLTVAAVFRGRMSMKVVDEQMLNVQYYVLAVYGCEKWIPDNVKSAVCDIPPRGLKMAVTFIGNSTAIQELFKRISEQFTAMFRRKAFLHWYTGEGMDEMEFTEAEVANMNDLVSEYLAVPGMPPQIEEEDFGEEAEEEGTKGQSHPSTIRLTQFPETVINYKHAHHCRSSTQEEVVRRPNMTCL

SEQ ID NO: 961427 - protein, 104 aa, Homo sapiens
VVLFLLVSSWICLHWVCGVRGISYFGAVWSFLIGDLFAGCLVTVVYMPILCTPVCGFGSRFLGFLSSWPFPHAHRLVLIVLCPAPVSGLFWSVCILCDVILSPV

SEQ ID NO: 961428 - protein, 162 aa, Homo sapiens
  misc_feature (158)..(158): Xaa can be any naturally occurring amino acid
MVTSQIMGLIGTSSQPDAHGSHPACWGGGTSHKPPRQFVPPASGMPSGKGHQSGEESGGDACHPWQCGEVQVEGSLLPPGHGSLKPSRHHGIRASRPSRVRFPLLPAAYTGQAVAIVTCIIASETKEDPQLLALMRENGGGAQGQRNCATGLHLNTYXGDSS

SEQ ID NO: 961429 - protein, 381 aa, Homo sapiens
VCILPLVVPFLCVFLCFLSPVLFCWLCFCFFVFLFFPLFLFVFLLVVLVIFCLRFWPFVLGTDASAVVPCSVVPLFASSSVSVCRHWSPVPLFLLGSPIGVARFLCFAPFWAFVFGALQFRAFPAPLFEYPCVVVFLVLYTLSSSFFGVPWLSTSVRPLQAVLILSASVGIVVDVLFFRKSVTLASPGRSFSVSTFAYSPDEGIVFVTPLVSRVFRDNLPLDTLWASSSNIDTWKQSIPAHCAWGTACPPACPLGVTCSPMESRWRSGMAKRHRLPDCSTHHKTPPTGAHTTHEMASNRKCSKTAQQVSSTQAPPSCSLLLDHRTFPSGSIPKISRFHRPPWGFSLTQSPCPALHQKSGYSPRPHSHRAEEASAASSNMYI

SEQ ID NO: 961430 - protein, 178 aa, Homo sapiens
AFCSCCVSFCALCLVSSLVFWCCLSALFLFCSVVLRFCCFCSAWALLRGLLVPRCLSLLSRSFYLFFSFRSSLVLRCLSFFFFVFLPSVFPVLVALLWSLFLRSAVVYLLLLSFVCFLVLAFLSFVPAPCLFVWGFVLCVVLSPFVFVLSVSSRGLLLFCPFFVFAWWLLSSCPLLCA

SEQ ID NO: 961431 - protein, 285 aa, Homo sapiens
ALVFLFSHAFVLFSCPLVGPLFVLCFGVLGSLFSSVIICVLCLSLVPFLFLFLLFTVFIGVFVFVFPLLCFGHLLSSIFRFCSIVLYLLAGMFFVLWFPLSRIIAVFRLGSCQVSCLICFLSVLSSFVGIIISGSWCSYCASGFIASCFVWVVVFGSVMAFFEVFVCPLLLCFFFVFFPFLVTSLVFHVCSVLVYASFGGSAPVKSVMALWFSVLLCSCVDVHWAHGVGLGAPQRDIVLSIFVLHAVILGFSVLCLRLQVSLASPTGRRRRPFRVHLSASSALLR

SEQ ID NO: 961432 - protein, 186 aa, Homo sapiens
MHMRNQTGIGHTCPHHWWESPNHCGYIQGSKPPDKATGRAHTKANKEGHNREQYTRTHIKNRPFVQNKGSGADTDPAPYQNLPTVIRHPKVHLKIHNMGHQIRNTAEESNRHQRGTPLIEQAHGGAPQGYRASPNTHQYETSPNTRPHAGHAPHYEYVANNTSAQRGECTTTCGHCGTEYDERERE

SEQ ID NO: 961433 - protein, 280 aa, Homo sapiens
MLLVPILQMDEASVKMLHLDVWMKTKLNQLTINTLMNDNASCVLVLPTGSGGPSWSVGLWNQTNDMWLPDHALPNHLCISQMVPCYPVTCERPNAIEGPVLCPHSAGWGRVDSIRIGYRYIITYPYPYASRSYTESEWYLVREGECTVPESGWHSEMTQRDGKRTRPIHTLQKNAHGRKGVAGEKTRERGPIDNMGPNHRMQQGRSNEQGFEPMVAPRVSQALNGVLWEQPEHIPRVECRGEGAVVAVCRNWKGDCAVKGGLYEMGSGGLCDPWCKGDVV

SEQ ID NO: 961434 - protein, 102 aa, Homo sapiens
MARLWAVPEVGPSCDRRSPTTRRFPYAGRGVSVKFGRHFEGSPPISVSKEGGEGKAWGYRGVAGKVPPVREKPKLRWGQTRQEHFRSIPEGGERGAARKKEA

SEQ ID NO: 961435 - protein, 102 aa, Homo sapiens
MSYVPEMNLNVLLLRQCASLSCASSCDKCAGSKAIVMGMNTSTWTLMACYAQSFHSFEVNMQCVNKMFDSFKVKSVYAMASMHVAQHIITYLIICVHAPQCA

SEQ ID NO: 961436 - protein, 274 aa, Homo sapiens
MAFLVGQQHVCCDCPRYHSEGDLSPDLLTFSDYPFGEEACGEIVGYSWSSLEEQRMWNLKHRCPSHDPMHCDVMHDGECASSPEPQSSYLGSLGIWDEEGGDAGAPPFWFLACGLELSYVPQMVTLSVACDDPFLGSSPLPSRGPPFAMQPRWTPAFGVPPPPEWSLGPGMKRAGWTADCLVPTVSELGERDLRLKGWKTLAGVCLPHAGAQLDLSKGGDMSGSHGVRQGKSLCSSFGDMISNYKASERQGGQNRENGKQRPREKQTEGEHTGT

SEQ ID NO: 961437 - protein, 289 aa, Homo sapiens
MELLSPPLRDVDLTATCMALSAPLPQRDDFYDDPCFDSPDLLLLRKDLDPAACCTVGAAAPETLNEHSALPRMCVCTLALVLHCDVTDACAAAAQLGTTMAVGRCLLCGLQGRCKAAMNTNCPTRLQWPAAMLLQAVSRHEQMEIDVPLRHSMLLHCLRQSKPIRLPKVDDLRNCHPHNIDGACSALLAATHVTPRPWLPHACLLCAVARAPGPAVAEHYSWQLRRVQRCAQCSDGMMDTVAPRVEPVVNCKRASKRWPGHAWKSVVKLMLPIEVPRSLATCGGMGREL

SEQ ID NO: 961438 - protein, 71 aa, Homo sapiens
LPHLPPPPTCRIVASVTLPASAFSLLVICTSSQMQRLVTDPCLLLHEPVSSGPVLCSMVTPPVLPTPRVLS

SEQ ID NO: 961439 - protein, 117 aa, Homo sapiens
  misc_feature (1)..(1): Xaa can be any naturally occurring amino acid
XIAIRAVYRGISYYHLRASIACPLPGGPNMTVLALLFDVCAVMFLYVGDCVCLRVIVVLFGAPYPGPIISYLLACPVDFIAAYSYRSLWPPIPVSNGWPQERVFVMGVTVIDGTLAA

SEQ ID NO: 961440 - protein, 127 aa, Homo sapiens
LFLRPADSRRVPVAPSCSLWTPLACWVICRGLHCALGLLDCWILCLCAAYLMWLPMQLPACACDVNILGTLCCDVDLLSLCCELPQVAVMWMDVPAYCTVCSKMTLPHPLLYTLLRCHVDATVTRCT

SEQ ID NO: 961441 - protein, 510 aa, Homo sapiens
MECCLELVGCVPWTPDPRGLLRAPQLVHLMAPACFTHGHVCLPPLLHPCAPASHCCCPDADAPVCSASVALAVAAWVSCWFSSEVLGDKCDAPHLFECATVLPLICCDKTLRGLAVASDDSVACLRTYLTHWCPCWEGTRGINKGLAIYTEGIKKGPYRTSLRRQGVIRQVIKDVAQRRNWPPNTITLQRSNIALSHHTTFNGSKTAKYPLIQTDVETGEQLLVRGHILSNAIPPEWACHSPLISTNVILAPQKLMKRTQDHPNRTPGEPRVPTADSHNGHEPIPLNLLACRTTWRMWHPVEEGERTETIHRHEVSSTRHSKRDFPTAHPHTTSLNEGPPNAGAGIYRSEDSPEIGESGVQGAQEPELVKRNAISFSNTEQPIRNAPIHQSQFPPHYFRHHYSQWPSDLYGDDLIPVATRQHLKSEATRTLNKRVWYYQLAPKQIIQTKIGDSILSHNRVVEIIYKLNSASRLHPIPNGAVNNGGAVRSSHNSPPILHSERKRYATYSDL

SEQ ID NO: 961442 - protein, 174 aa, Homo sapiens
VLPGVPCCCWCIVHVWPVLCVLHDAVMPASEPDACPVPMCSPCALCALPPLCLLPAAFCNWCPVLLHVHLCAQCGYTNVPVVPCVSCPCPCAVLPAVLCCSSVRVVTFRLVHSGVLVCNALLLLLMVSGGVAVMVCAFAVPCALCLCAQQLLCLYDRGWTCVVCVSICECLVLC

SEQ ID NO: 961443 - protein, 109 aa, Homo sapiens
MMEERKRQRKEERRITYYREKEEEEQRRAEEQMLKEREERERAERAKREGRATRVSRSGVKKIKKEVGKGEKTAKGSGNEEEKGREEREIEMSLLKDLWGDEIRRTGKD

SEQ ID NO: 961444 - protein, 177 aa, Homo sapiens
LGLETGAAYVSEVTSCPVVQRHMNRSSNESQSDRHFNNSINQCESLEKGSRTTEVKLKLYCCYISRPLKDRCNMPKTGVLDLIKKGQMVTHVNALGSLPKEAARAELCRIEESQIKEILSLGIHLVQSGDLATDREDTNMEIQKSSGWKTLRKTWHTQQIKITNTDTKPDKNAHKNT

SEQ ID NO: 961445 - protein, 353 aa, Homo sapiens
LFPFSFLVFFALCFLSLVFILSVLPFPFSVLSRLRSFFGCFFLVLYGVLLLLFVFCLSFPVSLFCVFSLLLAYFFDRCCVGFFCTFFVPFLHLPVVWATVAGLYPSSPMFGVSPWSRVRVDALVLWFLSPSTTCSISRLGGAHALGSSYSVDIAKVAPGRSPRLCEARCRFVTVVPFPLVRGLSPWCLSCPCLGDPFGTPSLWMTVSCLSISPLPLCSPEVVGSVGSDPSLPRTPCALPLRSLLFPPLTYPPPLGAYVSCPKVLTSFVYTQVPIPIAAYADKGGTAHVPFSVWPTHWGSIVASAQSELDGGSREAITVHPSPLMCSYPTPKIPCPTGGSPTTMRMAKHIGSEQ

SEQ ID NO: 961446 - protein, 331 aa, Homo sapiens
LLSFCLSFACYFLGVAASVCLFFCVMWSRLDLSPPCVVSFRMFHGSFQCFGLIPSVGPFVGWYQVRSLLSPYAYACCLPLSSFLYLMLFVCPCGLNCSLRMIGSHHVHCLCFSLSPSPDCAALSASWDIADFIYMMAWMAADSGLPGVPPYDTEPLIYDYEGDRLGGSGTLSSILSSQGDEVSRTYDYLKTVVPRFASAGRHVWAPVRVGVRGQMGPPGQGGSFTLGHCYPDTEAGQPDPGAQLDMPLPGLVAVMAPCRGSTEVTRARPHLGTGAASVPVGEGHKSGGRTLSVDGAAQEEATIPARGGKSFSQSAQCRSHSTSPTRCLTSQ

SEQ ID NO: 961447 - protein, 116 aa, Homo sapiens
MWVSGSMLGVSFSSSNLSERERAAAHRSPYNAQPSVIRPSIHSLIGRGPRTQHSSIIPTQGHVNITSSIPGMSSSTPHETQTQNISQSSPVMPINVNDSFREIISRIFIIINNNRT

SEQ ID NO: 961448 - protein, 222 aa, Homo sapiens
MAPVNGAVENGQPDRKPPALPRPIRNLEVKFTKVRRAAPPTLDGLVAPALVHAMTLVAVRGAEGCMLCACGCPAWCCLPDDPDAFPALGCGSPGNRTFRWDVSGRGSLVLCWGFCAACDASEGAGNLRPVQAALLRGPVACPAFPSSGPLTVSPCACPLLIGEWRCAPPFDSERAGFGELPPQKTPAMISRVDESGFERVGGSEERQERVREAGWRSCSWKT

SEQ ID NO: 961449 - protein, 173 aa, Homo sapiens
VPLLIIVSLCIVSIFSVLFSSLLCYVQFFVSIFRRVPAIFYFFNCPSLSRHASWSLLLSSFRRPVSVARVLFVWANTLCCYCGSFWIPVLGCSFPSVCAPRFLAFSLMELAFSLLLCCYFLSCPVPPLCPPVCFSCADCCVVFVTSAALPEAYFHSSLWVGLLVHCSWLLRSL

SEQ ID NO: 961450 - protein, 113 aa, Homo sapiens
LCRLVLLSFLCSFIVGVFFLLSPISCVTPFGPCVLSSVLAAPVVSVFCVFPCFHFLHVDCLAVHVPPGVIPWFLLLGLSWSVFSTCPVSVSLSSRSDAHAMYMMLLSVLLCLN

SEQ ID NO: 961451 - protein, 188 aa, Homo sapiens
SDASEDDVALHCCVVWLICPVVNTLICEHWSIARQSVFTWGMRTRPSHAVHFILYTNVSLGPGLVRVKLLALWDRQYFKLLYVHYLSNLHKVLTCLSGPLVSTIYWIYSGFLVVTDRAPECCGYLSKIWGRYNQQKYAEDGPPDTPWFSHGGHTAKISDFSWNPNDALGHLLKCLRIPNHAGIMANGC

SEQ ID NO: 961452 - protein, 95 aa, Homo sapiens
  misc_feature (79)..(79): Xaa can be any naturally occurring amino acid
MFSLLLEPGALHLWAHEGVHSPCHAWDLWKGLPWHKGPLFQRTPRIWVSFFFSVIRVYSRGPALGCGGNAEGFAVVLSXTALGLDVYYAQSCPPP

SEQ ID NO: 961453 - protein, 71 aa, Homo sapiens
VCCEVRLVLFCVCCSCVVFFHAVVVVSLLVIGSSFCLVFSSFLVYRGVSVVRLSVIFLIVVPVVPFGGSFS

SEQ ID NO: 961454 - protein, 30 aa, Homo sapiens
LVFPRGCDRSISLEVLSAHLPPALRRARPP

SEQ ID NO: 961455 - protein, 247 aa, Homo sapiens
MEEEIAALVIDNGSGMCKAGYCWGLTASPDACDFLSSLYVCCPMTTMWLSVCVAWCHECDSILCVLTDVPMMQMRGILTLNVPHLSMASVTNWDCHGRRSWHHTFYNELRVAPEEHPVLLTEAPLNPNGQQREDDYRECMKTYQHHRPCTWPSMAVLSLYASEDSTTGMRYMDSGDGVTHTVPIYEGYSPPHTQILRLDLAGRDLTNYLMKILTDARYDAFTTTDRAGTSVRDIQEQLCYVALYFEQ

SEQ ID NO: 961456 - protein, 309 aa, Homo sapiens
KASRGWARIGRGVCFIEVATPEGIFLRVPTASYDLDLFTMTWGPTMLLSLMFDKSLEETIIQKAISGFRKCAMISAHYGLSDVLTISSSLYANVTALSSESIENLAQVDLGAHPHSAYSRPTRSSSTSGPRSFMVTSCGRAGRISWEAMLAGSFRGPKLMAQGYDRGRRFRGSQCGKISLQREETPSNRGESTVLSFVSWLTLSGPEQSSVRGHPLKTKRPESGLRVYKANVTQTKMITGKQVSSQLEIHYRELMKALVFSDTRRRDFDEEDAASCLRDAGKRLGGDPDRVAGFGIVEHLTTWFRPDLS

SEQ ID NO: 961457 - protein, 220 aa, Homo sapiens
MTSIEEPGTTILKRTLEEPWKGLKVGVGHGKGKGDKEMIPQNEHWTKVEAKQEYLRTGDNMMSEAMEHYTTMSQTKDRAQIELGQINKIRDNAEGHQDEQEKETRADPKQHKGKWEQGHRNRTAQKDKYCNNDKKHQAKTEQGAQRKQTAQREQKRNEPNRRDKSHTKRQWAQRQNTNHTATRKHPKQRQQGKRHRPKTPENVKKKTKETETTKEKKQKI

SEQ ID NO: 961458 - protein, 74 aa, Homo sapiens
GLDRVLVLSGRGGTKLLPEVRLGVSLSDRDGSWAPPGLVAGVLGACWAESWIWGLSALMSCVDDVMCVCGCCVF

SEQ ID NO: 961459 - protein, 161 aa, Homo sapiens
MAIRAQHCNAAQTQTGEANRVLDSARRCLSGHVILMMWELLQREKDGSVCGLELIASEILCGEQSVLWMKLSCCASCLWPCEAFDLDPAQWVESMSSPTPWCPQPTWPVYTALLRPHDRDHGCWTCPDGGHLNPRHYMSDVKRISATSIFFESMPYKLNRL

SEQ ID NO: 961460 - protein, 164 aa, Homo sapiens
MWSAPLGHHTTLVALGRFPYTAPWEGSGYLGPTPSAGAGGALSIPAFVFAHIGDLNPWARFGTIVAQRPIVPPVWITLSPYGIFPALSGQVLPGAHDALDPPSAHVPGRPQHPTHCDGPSVHQLYGRGCTDFTHPSPRLLSLLHVAGPSDSRPCACVTCGCWNY

SEQ ID NO: 961461 - protein, 68 aa, Homo sapiens
  misc_feature (52)..(52): Xaa can be any naturally occurring amino acid
PPKTGTLDLFPWFTSNTPMAPALPLDFANIFVIGEGNKPWISLPPGKGIRLXPPTKKDKRLAAKKNSG

SEQ ID NO: 961462 - protein, 77 aa, Homo sapiens
  misc_feature (52)..(52): Xaa can be any naturally occurring amino acid
MFLKSTPELQIAQVYTLACFTVCVDRCTSSEAASVYALMTVVALEGFIFVVXPSVGLQIGELCEGFLTAWVCTFVWS

SEQ ID NO: 961463 - protein, 92 aa, Homo sapiens
  misc_feature (12)..(12): Xaa can be any naturally occurring amino acid
  misc_feature (49)..(49): Xaa can be any naturally occurring amino acid
  misc_feature (62)..(62): Xaa can be any naturally occurring amino acid
  misc_feature (75)..(75): Xaa can be any naturally occurring amino acid
  misc_feature (83)..(83): Xaa can be any naturally occurring amino acid
PQGCTVALASDXCSIHLQLQGLVNPARELGKLQAKRVKAQRQAQRLREXRAASGYPVKVPLXVQEADKAKLQQTXAELPKMNXAITKIKKML

SEQ ID NO: 961464 - protein, 97 aa, Homo sapiens
FLFIFHVAVGASRAAVEAGFVPNNRQVGQTGKIEAPELYMAVGKSGAIQHLAGMKDSKTIGQINKDIEAPIFQVADYGIVADLFKEDPEMTEKLKKK

SEQ ID NO: 961465 - protein, 149 aa, Homo sapiens
  misc_feature (37)..(38): Xaa can be any naturally occurring amino acid
  misc_feature (93)..(93): Xaa can be any naturally occurring amino acid
  misc_feature (108)..(108): Xaa can be any naturally occurring amino acid
GVRRRRKGGEGEGTKKGKGKGDEGERPKKKEKEGRGXXKKKRGGESTAQKTKEKGRPKKKKKTPKNGENGRRTVPKGGQGAGTPKKGATPPKXPGSQGESLGPGLAMXPSSGGEGPACCIFSGAPTTASFPPLPYPILPNKAGVIDPKP

SEQ ID NO: 961466 - protein, 103 aa, Homo sapiens
MCFFVTVVVTPITNVGHQDLALKSSTNTVVNTTGFLLNFDISVRLMPDERLGPGFDDHGLREEPECGPDAKWEMAANCIGSAKEESSNPRCSKINCDHLTVLL

SEQ ID NO: 961467 - protein, 97 aa, Homo sapiens
  misc_feature (85)..(85): Xaa can be any naturally occurring amino acid
KEEAARRKQEQEAAKLAKMKIPPSEMFLSETDKYSKFDENGLPTHDMEGKELSKGQAKKLKKLFEAQEKLYKEYLQMAQNGSFQXGGTGLTFLTIVD

SEQ ID NO: 961468 - protein, 121 aa, Homo sapiens
SVASSLGERGPESMELFVRVLALELALALGPAATLEGPAKWTYQLELQHSRIRGSQRGPKEGAEEKDIGTNRQFFTNWELGDQRKISGKSTVISQEGGGGYEKVPGEKGCPEALPVSELYE

SEQ ID NO: 961469 - protein, 126 aa, Homo sapiens
  misc_feature (77)..(77): Xaa can be any naturally occurring amino acid
KNAQTVATKPLRRASNSTPTKSYMRTSSKPRKPRQPPHNKHTGRTLCASNHVILIKDHSPTNRTQQLSHRRILPLQXDHNTMGLTHPPPPTQKTLIHKKKHPHVHTPIPHSPPIPQPRHHYRVFLL

SEQ ID NO: 961470 - protein, 95 aa, Homo sapiens
  misc_feature (29)..(29): Xaa can be any naturally occurring amino acid
  misc_feature (42)..(42): Xaa can be any naturally occurring amino acid
  misc_feature (56)..(56): Xaa can be any naturally occurring amino acid
  misc_feature (94)..(94): Xaa can be any naturally occurring amino acid
MLAPEFAKRNVSLIALSLDSVEDHLAWSXDINAYNCEEPTEXFPFPLLADRNRELXLLLGLLDPAEKDEKGMPVTARVVFVSGPGLKLLLSCLXP

SEQ ID NO: 961471 - protein, 153 aa, Homo sapiens
  misc_feature (7)..(7): Xaa can be any naturally occurring amino acid
  misc_feature (32)..(32): Xaa can be any naturally occurring amino acid
  misc_feature (73)..(73): Xaa can be any naturally occurring amino acid
  misc_feature (83)..(83): Xaa can be any naturally occurring amino acid
  misc_feature (89)..(89): Xaa can be any naturally occurring amino acid
  misc_feature (108)..(108): Xaa can be any naturally occurring amino acid
  misc_feature (125)..(125): Xaa can be any naturally occurring amino acid
  misc_feature (146)..(146): Xaa can be any naturally occurring amino acid
VKNPPGXTLTLEVEPSDTIENVKAEIQDKEGXPPDQQRLVFAGEQLEDGRSLSDCNIQKESTLHLVLRLRGGXIEPSLRRLAXKCICDXMICRKCCARLAPRAVDCRXKKCGHTNNLRPVKKVKXGGSFLEEAASCPGPVALEPPXVSLSLTG

SEQ ID NO: 961472 - protein, 171 aa, Homo sapiens
  misc_feature (21)..(21): Xaa can be any naturally occurring amino acid
REHRSELNLRRLFAASVDRFXHFSLTLITHHGRILVGYSQNLVTEDVMRMLVVLAKSRGVVAARERLFTGVKIIFAEGRAVLLVALRIRSFAPILVVGVGVLPEVIVVLVLMKSFCPRVRRGAWMGFPGVTVADVFFLGLGGSALGPLWVLVPLCLLFGGPRVWSVSCFDG

SEQ ID NO: 961473 - protein, 149 aa, Homo sapiens
  misc_feature (23)..(23): Xaa can be any naturally occurring amino acid
  misc_feature (28)..(28): Xaa can be any naturally occurring amino acid
  misc_feature (31)..(31): Xaa can be any naturally occurring amino acid
  misc_feature (69)..(69): Xaa can be any naturally occurring amino acid
  misc_feature (132)..(132): Xaa can be any naturally occurring amino acid
NFPESLLAILAEEELLEELCVSXWSDPXVFXKSRAGIDPAEEMELLLENYYRLADDLSTAARELRVLLXDSQSLIFLILDQPRNVLMRLNLQLTMGTFSLSLFGLMGVAFGLNLESSLDEDHGIFWLLPGIXFMGSGLLWRRLLSFLGR

SEQ ID NO: 961474 - protein, 57 aa, Homo sapiens
  misc_feature (5)..(5): Xaa can be any naturally occurring amino acid
  misc_feature (21)..(21): Xaa can be any naturally occurring amino acid
  misc_feature (48)..(48): Xaa can be any naturally occurring amino acid
QKPHXMGPTSVTGNFDTVASXRGEMFVFKERWFWRVRNNQVMDGYPMXIGQFWGGLS

SEQ ID NO: 961475 - protein, 208 aa, Homo sapiens
MASSPAHGPGPQISALRKMGVKLTPHNKETVQHSDVLFLAVKTTIIPFILDEIGADIEDRHICGVLRGPASPSDSIEKKLQRFRPAPRVIRMHDQHIQIVVRRGGHRCMPQARTPRMEDGRLMETADWDRRGATDNGRMEEDLDWCRSRGLSEQERPVYGDCKYQWTDQEQVSTAAIKKTILDKVKLESPDRDRTRTHTGHTRQSPKT

SEQ ID NO: 961476 - protein, 94 aa, Homo sapiens
RDPEDGEQPGQLRTSSPSMSEPESGWAMEPNAAPVASASCPHLLQQGGSTVHPPGDACRHQAWGAQHCAGPAPLSIIAVRRHRDEQIGTQNYET

SEQ ID NO: 961477 - protein, 110 aa, Homo sapiens
MAILCSHSSQKWCVLKNVCCCVYEVTRNANNITHDVWVHLKEAYRLRGGGVRRFEPGGLYVNPYFEKSPNHGRLKKDQICYAVKAPLEGRSRGSERTCDWTNCMLLFSPG

SEQ ID NO: 961478 - protein, 39 aa, Homo sapiens
AWVKTDRKRRQKFEENEHETGTKITISSLQDLSIYNPER

SEQ ID NO: 961479 - protein, 221 aa, Homo sapiens
CGKKTPSFIKKMAPPPLPPKQPPRENRGPKGCGSGFVVYAHGMSGGRRLLVVGVGGCFAPPFVHGDVCVEQKRYWVWQQGLFSLFLRPYPPGGVTPPHRERKQRWSPQAAHHTKENRREWSLREVEEKKSGENEQRKPRGDANHTMEAPQETRHNGKTPKRGARRRLAHNTPRERKDEQQASTNHTTGLCHLLLGPLFFKRQPQGDQMREGINPYTPRNQI

SEQ ID NO: 961480 - protein, 68 aa, Homo sapiens
TPVSGSVPSGALDGPGIGEPRWLSAEVSAVASGAGGRGLWTGPGPRPRELRWSAMVLEDKWSRIALYT

SEQ ID NO: 961481 - protein, 107 aa, Homo sapiens
CVLQCVLECHAGAAVWWLALSACGMMEAGPEPCRLVSMSCCCLPAVLVLLRALCLPAVCLDCLTACLKHETYCLTVPCAGWLEPALLQPDCGNEAGAGQANGVCGCA

SEQ ID NO: 961482 - protein, 152 aa, Homo sapiens
MQFVPVVLLPHSAAGVVVFALWFPGLLMVLRLMSNVCPRDVLLHPPPQLFVAEVAAAVVALVVHPSMAEHFLTLLDVPAMQKDYGALEDSHSRCGEHHPCTGFNVLWVHAPMGFGASHPTCGPQGVPPSVACSSQPAYGPAGPGPTQLGGPA

SEQ ID NO: 961483 - protein, 232 aa, Homo sapiens
QLRSGVITLSFQLITVLAGSFEYSHAAPFMTTCRGNPRLAPTSNCSYRHTPAGPAPILSRLCPAYPPCMAILNRNWKDAGLNDMVYLVCWAVKLNDLIADWFACMCYQLSADSWHMLRRLWYGAVPSFSVVAIFLLWITYTHMHVLAEAPAAHHHVPCVTLWVCPWRLTGTYAAHERTLEQQKRICEMAAYFSHSNLSAVCTMIRGAAYSPQIVCFTLKELHRTGAPFVGAY

SEQ ID NO: 961484 - protein, 125 aa, Homo sapiens
TPYTHDPQRWGKLSAGTAVLPSQSLHSGMPEWKRQRRNLQNSSSSYCLTCTLRRTTERQRTKHTSGANCSRALTRAGTPWQLRANHAASCTRSGPTQLATLEHYTCAQEAFNRPSLGHNCFCFEQ

SEQ ID NO: 961485 - protein, 255 aa, Homo sapiens
CRAGCYSAEGELLVDAGSEKEEDALPECSRARPVAPVGLESDLSKVLCTMLRMFLQSAGPHCMSLRGEVATSNDQCVLAVLLLCLLLCELLRWSLGCHCFVQQFIRCRRCARDERLDLGLTGLLGVTVHCYQPGALKLFFRELPWAPLPLLRTSCQFIAAIKFAGPWPWRSRCVRDLGVRSLARSQPLTLCVMLFQHLCLGDRARAEQNRMSVQSLLAIVSGPRCCGPWWQRPCSAHDHGVPEQVVELILQQCAD

SEQ ID NO: 961486 - protein, 235 aa, Homo sapiens
GALRRHFFFPPSFPPLLLPSLPLSSPLSSFPPRSAGACWGERLVLQALALRGRPAGSWRGGGGRNRDGASESTAVGGGGELGGPAAGSWGRLASERLRQEVWRLCDGFGRQIQAGGSCGGGGSYSDLLLLLPRTGRCAGGCVMLPDERSRKWSTSRLTTRLYPPGLVRSQHRSIDIFELGSLIAPIFWHRTHYLHVSSETPEQTSKGQHLKLMILLLKSSRTLKESKNLIASQLI

SEQ ID NO: 961487 - protein, 71 aa, Homo sapiens
LRTCRVPYIMRRTFGGNKLYWAVFSEYVTTYGYGMDYAPVEFIPRRDKKPLCTRHETPKYGLLNTVMEPYI

SEQ ID NO: 961488 - protein, 212 aa, Homo sapiens
MGYDQAACYSAEEFIISLGSCLGGPCAEHGDGHHWGPGGNYYVDSFLLGADAADELMLLCRYAACVDPVCQPPLCMAVLTAVPDAPLTSALCSFLSNGDCVFCAASWNPVHCGWAANCCTLLRVYHHHHHHPYVHPQCARGWLAAPDGRYMRSCAVSPLPCVRSPSLGLPSSRPYGIKPEPLYRPEGVTVPRLTLTLCTLTDYAMWFSSRLI

SEQ ID NO: 961489 - protein, 253 aa, Homo sapiens
RSVELSCNGHEKVYRLLLKYGDAWVKKYDRSSLRTLGSVGEPINCECLGVASQGGGGQQVHAGETPGVQTEDMVASASHHGPRKKVAEILPAMADDGPSLASVPVLMDDEWAASWSGSNCLLSGPVHLPVPWPGAWPGPSMCDHQLIMWTAYFNVPTHVLLHSHGDWGLPELRADIYQITWAGWMMSSTSCGHLAGCPAEDLSDAIDRPTLQIPESAVIGYPHDIKGEAAFAFIVVNRCAGDSDVVVQELSHG

SEQ ID NO: 961490 - protein, 240 aa, Homo sapiens
LGRGWVLIGRGSYPTITISYLPHAPPFAGGHPAQLGLGRGASTFKEEPQTVPGGAQPGRHAAGVPHQHVKTKMLHQMCELQAGCVNLAGCATNVPGSGMLDAASALPVMDNGEDCSVPENCGAVEYRLASSCGAVWPSSNRRSLTHCHATGCQLLLGVNVTRLLNCPLPLYWTPPLLVTVLWHTASHWGPVEQAGGHPPWDLGAPANHTGLLALLPCAQSFHLDVYNAPPSTFFVCFSAG

SEQ ID NO: 961491 - protein, 244 aa, Homo sapiens
MLCVLHARHRGHAATKGKIGSAKKALTFISNVGNGVTRSPQTGPRTAFGTPVWMYRMGCPWDAPTLVCDANSGRRQDLWGQLLAGPRSAGNLGDTEGWVLEFPRARCPRGNARGMTRAVMRARRPLFFARRGANRFDGASTPGVTVGNKPLVICGAPIMCWWSPGCFPKELALMKQAPPLGTVWFPATIFVFPTRGMYPHWYRMFLRTPHKRGMVDTKGGGWLRRANSGLTYTWAPKLFVGKRP

SEQ ID NO: 961492 - protein, 237 aa, Homo sapiens
ACSCRAHPRGFGSVHGSRPAFLHLRPPATAAMGPTSPPHGEVPGDGVGAPLLPVPYGFSAMQWLAASPWRMLTTVFLELDSETSHVFLSTMDMEGRKLPCTVPNIFLISFKDSEGLQGDGKLQKGFSKIAFYGYLSQIDHLKNVIKELGTGYAAATHLRMKDETEKVADEDIVDHEEGCTAAGGCYHDYLKEAADTLRAELSKCPPTAIWGWQRGTRSRAQWGAGLGPLWVLPEMSR

SEQ ID NO: 961493 - protein, 84 aa, Homo sapiens
TDTRRSYPTPDGRPEPALRSPLHRTLGTAPDGPPSVRSSAALGLSRPTGRPSSSLRSCRPVTDRCPCSTWLFLPRISSHPRTFR

SEQ ID NO: 961494 - protein, 195 aa, Homo sapiens
  misc_feature (71)..(71): Xaa can be any naturally occurring amino acid
YEVMGWWPACLHNPWVAGHPDGLLHLLLLLPGQAYHPVSTCGGDRTPSSLAGAYQAMETNAPPSIYRVGIXSYLLQPHSIAFNIMSKCMKVLAPTVSPHARVVPHDKANVINVKLVSPSPLRGVFKGREGLSSSCWRAMAGHQSNPRVVGQNDEGAPEPPNGPLTSVVPTMNPKARRVIASGGSHASLFQHGLMG

SEQ ID NO: 961495 - protein, 71 aa, Homo sapiens
LGDAINKYDVLLSICTMPQLACYELVTVRSKTTMRLFYADSGRFDPDVEPPDNSRLLASGLGSLLGPLVKR

SEQ ID NO: 961496 - protein, 198 aa, Homo sapiens
MARIGEGRSRRIWIVLGAWSPVPAFKLWLRVDIELPSDDPFIDLNYSGFTCSNTDSTHGHIPWHRQRLSNGKLVINWKSHSPSSSDAMIPPERLNVWRDVWQLSYVRSESTGRLHHPVVEGWGVILQWREPPTGHHLCAPLADCPRVFSSWVVDHVEVLTTCLEIVSDGSCVSDCFMDPLWPGASMTNFGIGEGVLLP

SEQ ID NO: 961497 - protein, 292 aa, Homo sapiens
FLCFVFSLLGVLLFGSRFLAPVGGGGLSAFVGIRFIVVPRVFFRVVVPLFRIFCAPFSVQFVIARRLSHMVPIYSLKRPNQRSSSAPERYRHRVGYTSEGQHIWRREDSAGHTRIELRMGWTEHKEAQRMSPCSQEEKWGRPRMHGSYRDENTGEHERRHPGAHLDLLYVQLSLTKDLFHGQATSYSLQGRSSGDRAAGNIITRYCHTHASNGGLEDYMSDRVQCVSTAQEWDPSFEEALDGLTPLWHSFVPDGYTLASERQEVTSLTKLYRGVPPGMKYVLYTHIHTDTIK

SEQ ID NO: 961498 - protein, 271 aa, Homo sapiens
MNSQEQGPCYAGEPYPAGMYNLFEEGTFRHYRERSTLNMLTPGGRDMQAGFCCTAPSGAIHPLHDLTPEQDLGPVSAPHKDFSVMETAPDPFVSQCPPSPSAAVGLCVTVQSSSATPSLFPLTGTGQFMCTRLVGSQPCSWELEERTWRYHKGPHHFRHLPPAHRGRGHREEAGPSVGINVPQVLWPFLNWEVPGWPPGERGKCLTGADTPGRLCLLSPVISRFHYLLTCHVTHQCESQGHSWSVCRSSATSLFVVGQPEAVARIIVQFLT

SEQ ID NO: 961499 - protein, 238 aa, Homo sapiens
  misc_feature (236)..(236): Xaa can be any naturally occurring amino acid
SLVILSCPPVLSVYALLLVCSAILEANFQAVGGRSLDKFLFGSSLRSILDLRLTLRTLFPTLVGTPAAPAHSQRFCLQPRPLCHLGIQLLPLRVWGADMSKAQGLCRHIGWWPLGLGAQPQHDTVLRQLIAMGHHMAQSCCAVSQGQCTIAPLEHASALWSMMAQMSGFCSAFLDHWRISPHPRVGHEQGMESHAYAKPPAVTQYQQEVQGHLNPLFPTPSQQCMHACPSSHDGSXGT

SEQ ID NO: 961500 - protein, 160 aa, Homo sapiens
MCLDPSTSARPELYGLMREWGHSSATPRGRTFKQLVEALDKVLLAVSEVVPRSSRLTVRTLFPLWWGRLQHLLLQRFCLLLTTPLPLGSSSFPFGSGVLDMSKGFKAVLATIGWWPWALGLSHSLTQCSTIDSMGPLAQSCCACVQGPCALPLELPLPVS

SEQ ID NO: 961501 - protein, 57 aa, Homo sapiens
  misc_feature (6)..(6): Xaa can be any naturally occurring amino acid
  misc_feature (9)..(9): Xaa can be any naturally occurring amino acid
  misc_feature (30)..(30): Xaa can be any naturally occurring amino acid
  misc_feature (54)..(55): Xaa can be any naturally occurring amino acid
MSLDIXEPXDIQCEELSDASMGRSSSLCSXQCQVVRLTRPHGKPRLPQGTSQLXXLR

SEQ ID NO: 961502 - protein, 105 aa, Homo sapiens
MLEDNRALATRMIHAAFWFSTTSGIATATSAYPTQTFSHNEYFNMLALVRNTFLSSSSSGDDNYLYISLGGWKFDVVALTTNHDSYRHLVRTPRTIDTSMLLEFL

SEQ ID NO: 961503 - protein, 144 aa, Homo sapiens
MDDCSFQTKALDNPGPPVHSLTVELRWPGDVGAPIESVQRHLYRTTIIEDPRTGTGYDAPATEHNAPTLNPDRPCQAREIDLDPKLRAEARRVRNGAAASVRFLTTPALRPGEAPRHREARGGMPLSRPDGDLAGRYYGGSRAF

SEQ ID NO: 961504 - protein, 301 aa, Homo sapiens
MAPTRESACVLLSITTTDGYCVRGAVAHQWVLPRGPGALYRTRGGERYRAARKASGRSGIAPRPVIEVPFRSTRCRCPHGSNGYLAQSRFPPGESILSLSTDHHVELNSQYSNMKCAVSLGALSSLNRDWKSCMERTVNSTSRTKSFAPPEWPETDATTATCNEKGTCVRLTQVHPFPWARLFVSALIKVTTSAWLGTTVEYLLREPILSPGHPASIAPGSRATAPIEHSVGESSESLDEDANELVTFRQSAFRRGLFLVIAFLLCATPSVPFRPYGALGIPEAGPLVTLDGCGPMKCRPP

SEQ ID NO: 961505 - protein, 134 aa, Homo sapiens
  misc_feature (80)..(80): Xaa can be any naturally occurring amino acid
VGGLHRGHELSAESETNETIQADVACRFRLVLRLDDADGGSHCVHGDVLLEAGMGPRCLGPYWSYSESALIVLLSSAVAXLCNGPSWQTLGQDRPNKQPLNFGKAWRNDRKDKRFDMWLEYNRDASDCTILISA

SEQ ID NO: 961506 - protein, 163 aa, Homo sapiens
  misc_feature (117)..(117): Xaa can be any naturally occurring amino acid
RHLGASPGKPEHAPTTMPPGAQDMAPHRQEPKGQDILGQGHSHPHPFHTGWDAPTPGMSRDASLHTMALIGLGHPHAWTPRLWGPASRPDHAHWNALIPWTSLLNGHAPLRAAMPLXESPRWVTQAPMRVRIGEDVDHPHSMKRPQMDSSMAAATDLHDAVKA

SEQ ID NO: 961507 - protein, 155 aa, Homo sapiens
MNKQKSNKQEAKEPAQCTEQATGGLRHSSAEWGLAPKETLRTRQQSLGGFSGKAVGPKRMFGCSSAKQTQYPSDQLANPSTQGSASYTMSSKRVACCQEVERIELKWRPLRDTHSTHTHARTHRTHTHTPPFQFPLPVLLDWYRPKVFIQKGSAP

SEQ ID NO: 961508 - protein, 141 aa, Homo sapiens
SPSPRNAERAPCEFVDLYVPGKCSGRQLGSSVPRTSALIQSELVAQEGGQGTQGQSSKIGARFQQRLLRIIGGGRYPVGMGVGSPALISHFYRNLCPKWSGSVAKWFFKRRTFIELGRTKFSNELVGENSLGPVRKYITKA

SEQ ID NO: 961509 - protein, 216 aa, Homo sapiens
LGSSPWTPDDSRCPKGSLRKFLEHLSVGRQRPSGVLDQLAVWIASRYELLPVRCLWLQHWVSTCGGQMVVLHLTDGATMGIVLCLEGSKHSGMSAWTWVKNVVSQDDSLPKGWSDGGKRESDFGQVCWRCCPMGPFRWQAGLGEMVPWPLKGGLSLWKEPLGHWQQTWAGANSKAKNPFGLFVRVQRARWYGNSGETCATYPKPAWVGETPNKRTG

SEQ ID NO: 961510 - protein, 73 aa, Homo sapiens
MVPLGDCLPPKGVTEEFGSCNTVNTFYVLAPKEMLQHCLVLKDTSKEDAEVLVELPQTGDLDQNTIETMRKPR

SEQ ID NO: 961511 - protein, 94 aa, Homo sapiens
FARCCGPAAVTAPMSQWTHHIAVHPPAASGRAMDPAAGSLLHCRRRRLAGPSGCAPGWPKHLCTLQVGGQLGKPVELRGRLVALSVLSPEFQTR

SEQ ID NO: 961512 - protein, 258 aa, Homo sapiens
AHLVRLACNVGTCGWVAHHLARRQEDAVSLFLGAVTTCSVPRAQSCPAPLSPPQPPTTCPAALSTLAPVRRAAAAASIYLHPPAMERPVTMSPLVSSSGQPTPAAARFNVPVREGARGLRRKKRRREEDGRWTEDLEELECAGEEARRRADPRSQCPPPLPPGVALMDFGNAFVPPGPRDSCRLLPPSSPERRRLGTRAPVSSTVPEPSRCSCCAVYAVKLPEEDSSGVAYRNPRQVNRSESLNFHADLGKHIHLDSS

SEQ ID NO: 961513 - protein, 70 aa, Homo sapiens
ERERERHRRRGGERLMIIIVIPERSSSYILDVLNTNIDGRRKIAFAISCHYKGCGPKYMLSVVYEEEADY

SEQ ID NO: 961514 - protein, 182 aa, Homo sapiens
MAWDHHHRGGEAQGSMGSAAAGQMMQSERADAASSEEVEGEMAWPWEQAEAECGLLEPVGSSWLNEELDRAQERLATALQKAGKNAEKMLADESEERYEGYLKHRGLKQMPKRLELHGNPNSKKLSTIAERGMIGKYDEVATLGGDHLKGDLERTEENELSLAEVPYAESMDEQISTDGPRT

SEQ ID NO: 961515 - protein, 185 aa, Homo sapiens
LNPFSAASQPRVCECQRGIRQQSLFPLVPVILRKVEPLWAGGGRGQGHIPNTCRARVPVRGTFRLCWEEETWAGKEPGPRAVRAASPLPPLAQLSSWVVSMPASFRKLFTKEKYIFPPEGLGQGQGRECYGNESPGKGAPGRDVNISGLPRDGIGLRTFETNRFQNPQNFAPGALVGQSEGRTGK

SEQ ID NO: 961516 - protein, 353 aa, Homo sapiens
LWNWLGSELGRIVVRAWQGRLAQAHGFQCFLRDALSVLSVLCSAARNIVLSHTGDASGHSSAADAAIKKLADFMKHHVTAKGELDPAVAPCDVLGLHKHVYLECAIIHCLTRFGENGKTPLRGGTMNESQTADCSEFLGPVFEDNREQQQFPARFVTELKLWIDEKMLTAQLTCPMTEALKNCILSGRRQPGIHGRAGCQLKTGWTKVDKEGRELHLEEKPMSLKALVSEEAEEDLAQCARDEAETTNQSQRARRTYIDCQPSMTCMAKSCCACEKIAWISLNAKLQWMIREGPNGVHPCKKRNPGRAMPNKTGVDADRTGKRDKDTGSAHTNTRPAKQACKQEVSDGMEQQE

SEQ ID NO: 961517 - protein, 239 aa, Homo sapiens
MWYTDKYGPIDVQLSPMYNAMPERMVAPLVDTTLADWRREQNEQHMGLLFNLTVVYTFRGNQGSRWCGPMRWKRTNGYGIVAQHTSGLGTTFNSVVALLVEKAPKRSAYQHNEITANTHWVHHTKKGLFEEAYHTPYRGGTNATTPDCSEGRNEPTERWNRGTHDSDGTYTLDTATRYGVAKVLNTGTQTHPQVRSCVSNASTRNTTCDQVKTTREGDTMRPQEQASRCEAAKFETVLR

SEQ ID NO: 961518 - protein, 102 aa, Homo sapiens
MHSDDSKKALKHVGCSATWTVLYPKRQNYTPTGNFFTNNWNWRTYNYSTFGKLSRRTELGPNLPVITRFWKNVPVWRKFGPRANGLVQRIKSFPLDSGVPKG

SEQ ID NO: 961519 - protein, 81 aa, Homo sapiens
MMLSLYGGEPVLSVQRYLSSRTENGCCATPCYAVFPYPAGVPHAWASLIWPGHVRCITSEYPMSIQQVLRQPQTSSVLVLM

SEQ ID NO: 961520 - protein, 48 aa, Homo sapiens
MRRVQSDHRSGTTVEVKPDPRKNNLVEIILDINVSQLTERLKGDVHPA

SEQ ID NO: 961521 - protein, 206 aa, Homo sapiens
  misc_feature (108)..(108): Xaa can be any naturally occurring amino acid
SPGTTAPMDRSFQSSFRSSDNAQSVTPSPDALPLPGTSSSCKVLYDFEPDERRGAGASMEGDVDHAGPTRSYENWYEGLLDGQVGLLPAQLRGRCLCPCRYVTPPRCXPRLSAPCRSDHFVAGRVSTKNGGLVPLPVSPRVFAPLASSPRRSRKLLGCHLDAGGDPNTWGDPPGSRIVGSGLHIRPVGRAQAETPQNKPLSVIAVG

SEQ ID NO: 961522 - protein, 261 aa, Homo sapiens
GGLVGPGGGPHSFPHPLPSLTGGHGGHPCMHNPNGPPPTCDAATEHHQMNQGTPDRSMWHHGPPSNGSSTWEVQPVGSGVYRLQSKEKGMIASTSSLLGAMSDTTRRPDWQPRGGTGTPEKEKRKQKTRTEEKGKQEKRRGGDREEKQERANARGSNSGPRSAQPKPTRPRRARNTRGRDTRPHRPSTQPRARSPEPDRDQAPDPTTPAADRSAPPPPSRPHQRTSKQLPRRKTARSRRCTPHAREAQRPAGAEPHPRPHA

SEQ ID NO: 961523 - protein, 112 aa, Homo sapiens
MKHVKGNKAIKKLDTKNIPKAHEKIWDLDKKIQKLLTNGRKREDSTKDRINGAHIGKVDSAAQEESDQDNPPGTYARRPEKNNPENTVVGRLRPGATKDKENQVNNDRRNTT

SEQ ID NO: 961524 - protein, 177 aa, Homo sapiens
IINEVVLGFNFGTVGWHPMNAVRLTLRFMLHALVLAMAGPRLVSRDLRFGLVLRLFTPRRRMFGPVVAPKPKCESLPGPGDERASPVHPVGPCCCTDWAWVGEIPPAPLEGLSPASSSSLLGMGDDCKRRCSWEGAFPPVPLPPESEESISPAFALVVSEEDTSAFPPCCRPFRDDE

SEQ ID NO: 961525 - protein, 488 aa, Homo sapiens
RQIEIVPKEKIVILLCGRNTMCTYYSDGRPLMERKAAFDIKLPETKGCQTHGHGHTQEELWHHAMYVAVKTADPFYEIQRTQANSTESSMRIVGSRHSDAEAMDECTGTGLNVMELPHSGIHDTVLKQYKERNGQTYINLDKIPSDPHRLAVTSHNRYYIDAPYRRTSGASKSEGKYLEYRYQKTMKNWIQKKPRKMHREEETSSDKEESMSEPERNTMENNKRYDAEPPNHHKSYTEKDTHDEKIIEKDRKEIIKAIFCAQSKWKHMNNDKKQHQATTDKTDIKGYTTLNHSVEQGGQHQIQTHSTIQNRERQYTIRERAKQTPKTTIRNANKLNQGENTEAKTQNRYDKENNQRREQSTAKKDNETKKKSTQTQGSDTQKERNKRNNEKEINQKEATAQRNNGTAERGKSRQGTSEETTDKMTAPPKWNCSKPRTQNYNHAGAANMEPERKENNEGTIETHSTPRADSQHTQQEKNEQQNTNHTNM

SEQ ID NO: 961526 - protein, 110 aa, Homo sapiens
IRLGTSLGGYSGRGSSRCRRNLQCPPCDGASPVPGQRNDDEDTWERAGWPGLVPAACVLGWRLCSSACCCLCGTGCQLLMCGFHAGHVDPRSPVLPCPPLPGDVAGMMPV

SEQ ID NO: 961527 - protein, 118 aa, Homo sapiens
VNTARGCLRPSIKEVFRFAYYKLLKKADEWVDIAGSEDGRSPISIQPDGLCNWSLLRVSSVVSSHVINIIWLMHSEAKDVRYRDDSNGEVHPSYITTDISGTFLNKTRQYNPCSNTLK

SEQ ID NO: 961528 - protein, 221 aa, Homo sapiens
MECPRRRRGGLVRPDAIHVTHVSVPARQGRNTLHVQGTDSLRSSVCVERQRREDVAKLICGNAALNTATYSNDTASVAGQRDDRAKTDRQHKGGSWEATGIPFTQGNVGDEDSTQGPLQTTHRNDSEQDQGRAHTSHTGNPDPHIPIKTTVRRTRAPPDELQNVTAWSKLSEAIPPVMPQMADLPKAIENGKRITDEIDVHTSPDTPRRNGLSNQRSHVCN

SEQ ID NO: 961529 - protein, 559 aa, Homo sapiens
LSHAPIGYLMCTLPGLSLCCFCCAELEHDCDVCVMPALYGLGYVLADALCYLVLTCVCELCCCVAVVLLAVLCLIAWPACLCGVLVFTTCMHVMLLCLRPECHAVTLRTAFYLLVCHLLCVPDVPCAICGVPDCAVVCFLWTADGDACCACGVRAISLCVCADVTCLPDVVAVAACGCAMWMLCAVLLGVCAWLCLWACSGVWHNGGPLWLQVKIWWTGHTSWAPKLEPRIPHPESLDWYITLGKPLGAGLTNSWPPIPNHLDEKPPWGYGFTPPVLPFSHFQKMDILSFWMGVLNEERFSTGQLRYMWVYGKAIRALGRTVWTRTVSRFSYWTPQGPSYTQLVSLWAKLTVIPLIQHEQELWNFETTVGEHCRKEVPREKLCYGGPMDGKEPPFVERLEQNIHYHRTSLVVERGYVGRQWNFPIGVNLAHVEALFLGWTSNRAFAEAHWIPGTSLRGNTQCNGKGSQINSRPNATKRIGAGGVGSAPGEVVEPPSEGSRWKEETYKCNSKRSPPGRTGANESQQTGPGGGRQTETGSDVAEHEGHDDSIESRTHKCRP

SEQ ID NO: 961530 - protein, 191 aa, Homo sapiens
MRLIERRLNREPMNKVVDPLYYEQIGDDVKAPAMSNIRHIGMTLVTRTQGDQRLHLMVLNGSVCCEVSLCCFRMNDEGCTLGTDSQLITGRCIKGKKTRLNYTSMALDLTRDQMCSMCRKQCADNDWNAHVMMFRGLPMRDYDYRSSTELGFYLKKYRQTNPEYWKTVLMLKYQSWSRLIVLERTMDWDHH

SEQ ID NO: 961531 - protein, 126 aa, Homo sapiens
CAWWFGLMPGPGRGAELEGVACDAAADGYCGLVFWLDWWSRACACRNHARPCWSLLLGPVPASASASFCCWVTVRRCPPLLRGLVQALALRARSACAPCSTTPLGAGDTAVDCCLLSLVYWLGRQR

SEQ ID NO: 961532 - protein, 45 aa, Homo sapiens
MSLGLGVVGSGLSLQQSLLTPEPTVIGLPDSTPSKIELRPPKTDG

SEQ ID NO: 961533 - protein, 72 aa, Homo sapiens
AAAVPVARPGLVHRVSWWVPVGPRLHGPWRRRGRGAGMPLPGLCSVNVQCRSPEPMKAPGAVSMGGPAPASV

SEQ ID NO: 961534 - protein, 72 aa, Homo sapiens
RYLHANGRLKYSLSASVLHIGRAAYSYGSFLYRQKPANIGYFILLTCIASMQHAFIWLLSSREAKYHSEGPQ

SEQ ID NO: 961535 - protein, 255 aa, Homo sapiens
CWAVAVCLVSVLRALHPGPGRPLEVADGATVADWSAARAQECHGVCMSAGAIPGVCLPGPDSPLRVRLFLSWWHADDMMSCAAPCACVDLWGRVFCWPGQFSGELLATHLHMSPPPEDLVSFVAPGKCSAVLVPLPVLAGIASLRRSMLGLPVLGAGAQWSGGALLERILGPKSFAQLSVTGALLLLLSASIARHEFGCQGFLNSAQPSLASETRPPRTCMYITIGHWPSFGSPVDLQQVPVPIGQFRYLPYDWL

SEQ ID NO: 961536 - protein, 125 aa, Homo sapiens
MSRQAKDDFLRHYTDVDPRTHPNGATPEYKVTAHVHLKEWTQRTVTMKCGCVMRTRVQATFRNAAMEDHGPTPTATSSAVLERVPRLSSRGPGVWPRLKAVSESRSGERGQRTCFAFTVHIPALN

SEQ ID NO: 961537 - protein, 142 aa, Homo sapiens
MYWLSDAVDLGLVYNHACSTYFPKDVSSCASQTSIQLHLLSSYPRACMELWDLLSWSRLDEPPVVDVPKQMDDWMVPCLTSSIFWDCKMLTPIAQCSRCALECLWVPSIHDPSNPFPSAPGEPAPCDPCWSLAIVGLAAIEP

SEQ ID NO: 961538 - protein, 292 aa, Homo sapiens
AGLLQALCSHPGPFQQTRKQDGPKKSSARDGTWHSSQNRTQISVSIPLLLLATCDVLSGHGGMLVDRGGRSGMLVQTPSSVGTPNGIFADSEEVTLVGGTVTSYASVTSDIVARTLGLLVIVARVQSLMYYVSRTDEGESRDGVGKMGLRGDIADDGLGGECPCTCPACVVLKPLVGTGDVVTGVEMKGSPLPLGSPSTPSMPSGSLPLLLEPVEDRFGTLFSVPGVCQEMRHVLQAFLQRDVAGHCLLGPLIQLLDRVPPSCSCRTGGSCQLVRATGGGAVWGAPGLGLPP

SEQ ID NO: 961539 - protein, 254 aa, Homo sapiens
YTYPENWRAFKALIAASVQRGSGPRALRTTATSIVGQTNRTPEYLRKFPAGKVPSIEGDDGFCAVMRATPELSYYVSNEELRGSTPEAARPGWLASACVGVCLIPDSRCPHDHDTLGCSATLGLSKCTHQTNQGQLKNVQRGRTAEAKILGRGGMHYVERQKDFFLVERSRVTVGDIDSSLHPVVALIKQVLRAFLSRQAYSHIPNRLVPHAAMNLAPSSGLLGGKCNWVRRWARLLLQVCETRAVRAPGDGRS

SEQ ID NO: 961540 - protein, 96 aa, Homo sapiens
  misc_feature (95)..(95): Xaa can be any naturally occurring amino acid
NANRSLRAVLVLQALVLQRWVDLVIRLPTCGSSGPPSVCLTGVWPSALETGPLFHHPVRHELGQLMYNETGSTHVGMCRCSNYRTHCCGALTLTXE

SEQ ID NO: 961541 - protein, 131 aa, Homo sapiens
MMLLVDAGCVDNWKNIAAQSSGAHSLHMSVIMTIWLLPNSRGLPQRGLPKGAKLHVIVARVCSLSGQWSLKLAVHFVPKAWYETTVMMDAAICAVLSRGTRWIVGTRRLSIGLDVEENIGMGRTIPLVHLP

SEQ ID NO: 961542 - protein, 258 aa, Homo sapiens
RGESCVSGSAHELLCDTQPLPVPHGPVAGREAVLSLYRALLRQGLDKLLHTLIETFYIWASYPVAEFLKNIQKLEDAECPGMRHAGRRRPWVFLNGKIGEDHLVHPPRGKRTEGAFCRHSCSLPSPSYRCIKKPQMSNGRRLAERKGKKDDNGIWHGHDFVLSNARLGAGGGWSGHAGHRTRVVFQRMYDRASQCPYQAPPALIPFGGHGAAKNPMDGLPVTADQDMKTACAVLADPSKTLHLAQSFSAASHAGGGDL

SEQ ID NO: 961543 - protein, 214 aa, Homo sapiens
MPTHHTAKKTGRERGIQEQTLVPEKAQEKKASKDAAHNTHELALTEDNPMQGTSTGTQRTKERVHNIPKDNGQDFHVHMKSMRHSPTTQPIIIRQTTWQKTNVDHTRPQPRKKPYNPNTTQLRITQQPTDTRSERTLPHELDTPKGTPHIERLTGHGTRNHGKKDGTGHNGPKRQVAGINDKEENPYNRAHNSAQTCQWMSHNQQERHPQEHGD

SEQ ID NO: 961544 - protein, 105 aa, Homo sapiens
MDMTTSPAGLPPSCPRPVCPLSLPRPFSLGVLAWDVDIYLSIGNVMLPHPFVNTAPISAVQSHFDLCPFIVQLISLSAAGVASLLALDVLRHHRPLYKSLPRKER

SEQ ID NO: 961545 - protein, 119 aa, Homo sapiens
MRAAPCVAVSDAFHDRLIVPSVTPTGVTLIIAPSRARYVYSPRPRSPLVLVPLAFLGRTPVQPLRLTCSCLVPEIRPYVASGLIRETESGGEQWRYPVGPGCPGLSAPCALPPDASQWE

SEQ ID NO: 961546 - protein, 234 aa, Homo sapiens
TRDMLLDAGVPAVPLGCGSARPGPSSSSAAGPAAGSGACAGAVGGAYWRRLLQAQAAGVELEGGSPPGVARGGGRKTQQPGPPARSLARPRPPNPEVRTRTRIRLDVATGPLLIPPVRPVAPGRALLLLPVAQGSDFKVEICRVICLYGQVQVIGVNQSAKGQPCPRHLSLCIPTSGLSIHDFTTHQPEKSEKDLTGDARNLLTSHLNLDDGRWPMPEFSPRVRWDARPFNCPL

SEQ ID NO: 961547 - protein, 290 aa, Homo sapiens
PHRLLPNVTNSNGAHHQTWTMEMDDVEMENYEAPPETMERDWMGDAKTTGDLTKADIEQTPVDTAYNPGTERLREMTPEEDSDEATQDRLTGENPDMKLWKPCEMGTREDGEGDETKDMTHIRSLAIAKSIRLRCQGIKTQAERRSHENKARNAVLNKASKRTQRPPKSCHGLTRHNTGNMQIVDTMNRGSSHHILQPIRDHHPLLLAVTEMQRVRLPPSGAREEHPWPQERRQTEKQTGTRRVHALNGVHSAPGGQGQSRHRRDKAILRPSGPPTDPHRTGSKMSREKS

SEQ ID NO: 961548 - protein, 190 aa, Homo sapiens
MRKGPWALLCCPVNAMGHGVHVVAMCHGAGVLPGEVWEAAKGFMYMPQSVKAHPPQSFLRAQPCAVFRASTHLPMGPSPGVDGISGICAGYLCMATSGELVPVRGALRLTVHLVPCCSASLQGQCVTAGSTHSESGVAVPVDGHMHLDPPSQRIVCTLGSGPEDTEMVVRFGAGSEWASLVSLLRLHLDS

SEQ ID NO: 961549 - protein, 179 aa, Homo sapiens
REKVLMQELVTLIEQRNAIINCLDECPAEGGRGRQDVVNAMIKKKEFQMGELNLRAMKKGKFKTMNVFETARKQTVMPMSNVPHETMMLTALMKPVVVTAPSWSSSCVLCSVLKWWRPAPLMISHGVKMTNGDGILCGDWPLPPQWTSDCSVAKESLVSSPEPQCSGDSALPNLILMTA

SEQ ID NO: 961550 - protein, 243 aa, Homo sapiens
MDCIFNTIAGVLVESAQNAVRPTAGIIPATTTREDRHVRGLYKLDREPVGHRKSFLFVCHNLHGGEDSPPSFVIGPLTRKIRSRGCQGAVLLIQAVRESPSSLNKSGTDSVRRSAGYLASVRIPLDRLSDASPLSRVKGTDGLAISEWCFHWADRVWGIAPFLMSATGCLLEGRRGRNPSVVSLLVFREAGRPASVSPGAPSVLRIVVGSCTASAGGPPINLLLGPLPRAAAPRPSVALAVPP

SEQ ID NO: 961551 - protein, 211 aa, Homo sapiens
PGPHLLAAQCQCNGPVCLTSAPSARCDLSACCVSDYLCSLVDLLWIPGPGLSPCELCISNLEPNPEVIKFDCITVAVQDPLSGPQRGAPISCVSVILVICCILPILYRCLINLAFYVLHPPCHQRSPNPDFSPRCKGILCPKEFQTQIRTWDLVESRVKDQRDNVSTIPTVLQRHTWLLCHHLAWRRLAAAGWLTARYLRVTVADTPARTS

SEQ ID NO: 961552 - protein, 35 aa, Homo sapiens
MSPARPHGGAPGGSGSLAAGPVCVSVVALTGLSRH

SEQ ID NO: 961553 - protein, 253 aa, Homo sapiens
GLDFPNASTGEPFHQPRPGLVPARRCAQSCLDIASFYWTLTNNDTHTQEPSAQSGGVRSSGQLQTLAPQCVRELSALAVSKPSWALSHQAGPVVALLQSWVPRSCMVAHAERLTHGVLHSRFWVVDQTHFYLGRAPHGLGVQLDPCVIGCWAVGRRQLLAAWLARPDRESLRPTGSWAKAAAPPINLGPGSIDTPATTYETPIEILLNGTPVSVPYLASAPPPLLSLWPHSRLEGVYLNVLDDAPEFHLRSLS

SEQ ID NO: 961554 - protein, 272 aa, Homo sapiens
CWLSLCSRACSPSLEPPVVPDVTSPRSGIKETILMLKEQNRLLTKEVTEKSERVTQLEQDKSGSVKQLFEARALIQQDGGPLDSTFIYSLWGRVGPQASLSGEPHWYSGGYFQVLLTRAVCSHAQPVPRFQLGEASSLSQWKDDKPPCVTGGGWGRSPWGVTLSGPWPGLHSRVVLEYVLVGVALGQPNLGGVRRCHQNQGGGHQASRWFLLARRAPDAGSVCVGRTGLRVRGQGVGGRRPPSCPGLWDTVPQAPVSGDVPGGFLDPSEPVA

SEQ ID NO: 961555 - protein, 509 aa, Homo sapiens
  misc_feature (438)..(438): Xaa can be any naturally occurring amino acid
  misc_feature (494)..(494): Xaa can be any naturally occurring amino acid
MSPGCARIRSTPTTLMPHGPCRWSPSGLLTDMDVRTIGCLLEPSWTRAPRSRMRACQRRERSECEVRPCACLRRAASAMPQPIVAAGTALEPFRGLDPYPNLRHSRGGVDATSLPLWARTPRVALGSLVSQFGLLGHSGTHFPSVSAIRNADPLYHPEQLTDRLYDLANRFGGIFKEKRGRPFKPRGLVPRCDFGLPHSDQGTGRTLKRAGLDRGEPPGHFARTSTQSASPELPIEMCNRAARDLAWLTLNFRPLNSNKALALVPPQALVLGAPRELKPPFFRFRPPEGRRSGEIFRNARGRRRPKCAHRGAASAQVKAPRMGLAHRAFLWKTREGKEPGAPPVFPARLCFCNAPHTLVLQGGPTSAFSGPERQDAAFRGLCRAVLTPHQWLLRSQPAWRTATRFAPHGFQPDCMFSGAPRHLAELVESVRRPLSLYXRRRRPPFCKHVFADSKGPHGGVSPPLAAVWFVCLEGRSLFRESHKGGTRGAAQAFXDRPQPVCVASAPTTD

SEQ ID NO: 961556 - protein, 240 aa, Homo sapiens
GRAKVGCYQQQQRCSMLSSSMHPQMLMIVPTTNVHSSGSEEDVRTNGPCQYGSSRELHASEVPAMSQPPAASFSCGEPGLESNRRGELPGVASRDGLVASKVRGGERLRSLWRRPRQDLKCLKNSELAPQTVLPVPKLPVPIKQRAVPQGSLDGLAMAAVLSHQGQAALIARSVLSRWGAISDLVLHVARVGAAAAARMGVSLRVLRDSYKNGEQGPPEETVIPVTHIRGVCDPAFLPRT

SEQ ID NO: 961557 - protein, 315 aa, Homo sapiens
MSQRVKERLRGLFNSPFSLSWCGGLLPVTGGRWYWVRLQAPPASCGLSVRDPRGARLPKRPRSLFQSVGVVATQEKERQRCSHVGVRGREILNFLFSTIFSGEGSAPLKAGLPRYLYRDRTPELFSVGIRLWGPVCPPGTPPLREGGPLLETLSYNAPLAALAPCGRFFTFSTLQITASLLNTIGAHNKTQQTIYNPIYFPTCGGGLRDVVNHGKKSRSIHPEGPPPQNHTISVCPHKKEGLSAKNTGEYKSLNFNLNSCRREFFIILSRGREFIPRESPFLYPTFPRPICPLIPPPQYFWEGCTCVPPHKEGAL

SEQ ID NO: 961558 - protein, 252 aa, Homo sapiens
RVAGLHAPAAGGWDVRAGGERSSLGNVLRAAHLRVLTGAEWLVEAIRETPRWRSSRRRCLKLLCSWELSKYPTEVYPIKINPSLPQRVVLTDARTILEENIQDHGCPIIDKKACSITALPKMAECLSRQKMTRTRPELLQITRPYCGATVEPALLQAWTVAAVQTNMTDFQDRTPEGYWCLSSRWRRPVAAEPGMRVDLLMQGECLAGDDEDSVCASCLGGHGDGFRDHARGLCDPFWPRPGGLTPTRISPL

SEQ ID NO: 961559 - protein, 66 aa, Homo sapiens
MVQWVPAMSVDFREHFSLDGVRGNRRGRDLLGGLIPCVPVPGAWTWLSRAASEVLILQAALCLENL

SEQ ID NO: 961560 - protein, 230 aa, Homo sapiens
MAIPAERHNPIGLHHYATSSTNAIARNSTYTAPNTATHGRSTPPSPSTQTQTTEPTNTTPHPLPPRPATSNDNGTTESPTTHTRQTTDKPTRQTQAAEDHTGRRTRAKQQAGATSQRHQKHNNTGTHTDKHPTPAQGPNQRHSPRKRPGGQTHHGLGDSTLGRVSDPRDTPATQTIPRAEKRKHEATERSRRDPHSIETTTHANPKKTQGNTTRDPAAQHNDDAQHAETE

SEQ ID NO: 961561 - protein, 128 aa, Homo sapiens
MTTRETTTNRCSDQHRPKVGNPRREPNRRPMDERGNTTKDRCQTTAEERDPIKRRPVLESTPLKRNRERETKKKTTKRDKEHNEEKNKTVGEKDRPRRNKSNQPKRQRKTKETAEDDENHQNRAKRNT

SEQ ID NO: 961562 - protein, 119 aa, Homo sapiens
MDTGSWGYARHVWRSGDDLAARMLLPRTTPNTHSLTLPGDLSTELRLNIQAAINQGEQKIGKTQREKHGQHSELHEANPTQKDWKDGNEARAQQLSTQRNTAEMSHVACQGPQHPGPMG

SEQ ID NO: 961563 - protein, 137 aa, Homo sapiens
MFFVFFFPRMPGTAGSNQFLELRVKEPMGFFPLGPASWGLFSNHTSIFIPNEKKLNSKGSHLSQNSPLKYPKAVLYHRVPQEFGGSHKFLTARQSLKSNVEIYNRCPDAPSSGVGQSCHEAVCLCGREMPEPGGQTV

SEQ ID NO: 961564 - protein, 152 aa, Homo sapiens
  misc_feature (140)..(140): Xaa can be any naturally occurring amino acid
GRGWGKDFLPKFTASILHPKSAPGRKSHTICDGVWGRAFSCGLPQLSSVTHLGESPPARRKHPLSNVCDAACGEDHLCHRNSIRPKGLPAKKRSPERVEKTPLPICVAGPGADRGYKRGRCEISCEYVTLKRGLPLWGQXKTTLDTLLRARG

SEQ ID NO: 961565 - protein, 74 aa, Homo sapiens
MVGVETWLPFDGPGLIRGPQSLERTPLGDPQLSHAGLSAEDPERPGQHLACPSMSLELRKFEGGWQRHAFLRVP

SEQ ID NO: 961566 - protein, 101 aa, Homo sapiens
NGVRGRCRSMDGPPELFYDETESLSNTFASEGSLNTAGRPGVGKRQVALYAGVARKGRRIWRVREGEVTRVGADYLVSGKSTLSCRPLCGLGTSAVELTDD

SEQ ID NO: 961567 - protein, 147 aa, Homo sapiens
AYPCVATVGHRGSPPSWRAVVAASPCVQLHPSCGYHTLCVSTVVPVTPCTGTKGPGSSQELKGAKKVQFGVKIYTEYSFMQAPGKTACLMLCYEWSCDVAVTTNTSYSSHVSLGNNHARTRVLTHTPGRETSYSGRQQRNEVGLATI

SEQ ID NO: 961568 - protein, 198 aa, Homo sapiens
SGDAEPPPQPPPPRRDAAPGEPGPGPRGPRYLPPLPASPETPERAAGPSEPLGEVAPRCRGADELPPSAPCPLAARPARNVAGGPGTPGKVRGRLPGGGSSEGRAPGESEGAGAVRQSAEAEGGGRKTSPRRARLLQQPQKARQLAGTETKRRLGHPAPRTNQPILARSGSKGRGAGIGWGPPCRCDGPDRYTLRFVL

SEQ ID NO: 961569 - protein, 144 aa, Homo sapiens
MVLGPEQKMSDDRCIWRSWGVCQSWISYQSAVACSNRLSLSRVARGDSEEYFATYSLSEKISIPEEEYSCVSFRKHLGFHRTRFFLCAVPTMGSEESVEVRFAVWRQWLDLSCVWIRSVGHPCGAAAPAGCAAQTGSGYWAASC

SEQ ID NO: 961570 - protein, 78 aa, Homo sapiens
NNSTLFLQNFKNDPGAGTPPCIPRILGGPKQGVSIEVPGVSTTILWALSKNVCVFSLTYGDSYSQEPPIPIIFLVPTQ

SEQ ID NO: 961571 - protein, 133 aa, Homo sapiens
LSFLPPSCSLSFSLSFFFSFYKSERLWGGGLGAGAARRGEVVSPPARRMGLSHPIGPSAEVIVSGSPPEAGVASLWGRSDLQVQLKNRQKGPPFQCRPAGKDFGSPLHSSPRDQTLFSPQRRPPIGFSLPGSL

SEQ ID NO: 961572 - protein, 111 aa, Homo sapiens
MVERLRLVRTPLRQGRRGSGRASASVEINHIYGPGSLMRGVIRGCPCVVIRVERLTGAPLFRYMFDLSESMARDDFILTLLWANCPNGPNKGKTRFDVPPYQGWVTASKRG

SEQ ID NO: 961573 - protein, 81 aa, Homo sapiens
MDYSESPSIINEDSQRPRPLKGREETKRGNTSEARNGSPVRNNSPLDQEGGSNKPPDAWTADNFGERGGPPKTGGNTNKPP

SEQ ID NO: 961574 - protein, 197 aa, Homo sapiens
STVFDAKRLIGRRSDDCCCPGLICNIGPLLVVNDAGRPKAPMKNYQGERNQKGFLIQGVQDVLLCDSELQTDRRIAEAYHREDCYHVLWSQCQLTFNDSQRQATKDAGTIAGSQCTYELLSGAKLLLLLLTGLDKKGWSMKETCSSLTWEVARSDVSILTIEEDIFEVEVYSWRTPTWVDDDFDKRMVKHFIAEFKR

SEQ ID NO: 961575 - protein, 318 aa, Homo sapiens
  misc_feature (85)..(85): Xaa can be any naturally occurring amino acid
MWGLQNPGATLLGPGVSPLKNVLVLKTLNTLKSGPPQKKNPKGAPQTIFLLIPFVKRFTETASCFYSFSPQLFIHLTQHYRGVRXHVVHTTHESRERHQISSPTQRVITERGGVGRVIYKKSEINSIILSKKPLFGETLISVEDENFVVRQLDAQRPPRNRHPSRVSPPTRAFVIMSTTPHTGRHVFRAPSIYIHRETGTKRQPPPQRVCATTLSEREASLTTRHTLWVLLCPREETPSYIHTQSGGRSMITHPRRTSARRKIIEGGPPFLIPPAMYLLTPPEQSGGGIQTDLFDSSYDDHPADKTLCGLSTSCVEHP

SEQ ID NO: 961576 - protein, 156 aa, Homo sapiens
MVGPLQDLSPPPDLARCMCDSTAMSGACCMTWTYLHGLSCAGLRADRAWKAILPWVLDTIGISFKRLAAKCSTPDLVSGVLLRLVTDILTVVCACSDLTWIVCTLVEQCRCTSLALCDLETLYLHRPPIGTPLVDAILRWSFRTILNPQPWIGGLT

SEQ ID NO: 961577 - protein, 90 aa, Homo sapiens
GSPVHMGQNRQGPEQGAFCPQSLQRAQFTKRTPFLDTGQRVLAHFEQAWFGGGGKEEEVCTGDETHRGGQISFQGQLLNTKGGRDLCGEQ

SEQ ID NO: 961578 - protein, 120 aa, Homo sapiens
RSRRESSHVLTRESVACWQLTVGMTPLRRLRKPMAAMLTPSIPAGLRQVACLPACLLLPATAAAALVLTWLLDVLLTMVKLHDAWPGMLPPVPLVALWPMLDPAWRSLQCGLAVCYNFPQ

SEQ ID NO: 961579 - protein, 102 aa, Homo sapiens
MGFAWYCGMAPLSWPLVDLYLMCACLLKFTTHSAASLSPHHLLELHYHHCAIVCIICAIKTSALLGYAASCGLFDVPYKLHRHPWHIYHIVTSTWSLLPCGP

SEQ ID NO: 961580 - protein, 127 aa, Homo sapiens
GQSLTAPRDAQCKTGLIWKYNYFHYRSSNYWMIILKCFICGEQTMWAPSRCMQILHVPSLVNVLCDARCGKNTMMLQCAILMGTWYNNPALEKLGWPPYIGGDSVGNVCTTGWCAYILHDSIEGDDV

SEQ ID NO: 961581 - protein, 206 aa, Homo sapiens
MCDVPVPCPVWPESLCSLACEPGLTVPSNGGGHVVASMDKWKCVPNEEPTIGMHNVVELAECGGAEPKDTPPPVCPILRTIKVPPVSSQKVSIVARRRKYNPTRNSNSSRKDITIGNPDLQPEQTVPSAPRDPAWTQYCQKQGGGTWPHSSHNLQLNIDPDWGAAEVLKPGEPITANWTVNMGCAHIPDKDNAVVLKPSDMAGEKK

SEQ ID NO: 961582 - protein, 233 aa, Homo sapiens
RVPIPPRPTRPHVSCLQPPRDEEETSQWPGPASPPRVPPAWMPLSPQWLDGHPAPWYHHGSIPCCHPVLSMLTWEDHAHHPEHLPHDPKYATTPKVIHGPCALLGWSLTILPICPGDVQECVSSTHWLLACPELTTYLDALPDGFHADDVPMSPRRQPYHPHCTRALLHSLPHQARSEEEQGATTEEREQRQGTRTGTERERTGEEKDERREEGSPRRKAQGQRARQESGKRD

SEQ ID NO: 961583 - protein, 122 aa, Homo sapiens
RRSAGGPGGPCVALGWGTACVLPLECFGVYRFKVGRYFTHLGGGRNSPPVWGSGIGLESFHGAHFGLWGHNPPIGWGALFCGPCVGKNMSTHIMSVRGGYVACVRYTKRPTIGWLTVLSVAG

SEQ ID NO: 961584 - protein, 148 aa, Homo sapiens
MVIGLIFLHGKMPCWLTVSSVNEAKLHPPRFLHRVWLAQSLLLVIALFGLVAVFDYHMDRTGYADLVHAYTVLVRGTPCPFVLVLCAVALVGLSASSLFPGASFSLLEAATCPQHILLEVLPSSSFPLGTALVGPEGRPLLFNLGGKV

SEQ ID NO: 961585 - protein, 79 aa, Homo sapiens
LFRRHGDRDPVSAPVAFCLLDPKPLCDECISYANVGPLLWCPAFGNCLLRRSSCLEQRQSKPDWPRCQVSNDHFGVTRE

SEQ ID NO: 961586 - protein, 199 aa, Homo sapiens
  misc_feature (23)..(23): Xaa can be any naturally occurring amino acid
MPQEWPGPFSSNVVKCCNSCPPXDNGQVTSFVSPVDGYECVGVLDGTLFGVRQSCRQTLGTFAGHPPWNARLQSSLCDIKHFRVCQMLAIVEHLPGMTSPMCRPGDDVDALFTQRWSSLAPTVVSTSLIMLHIHSGIQFGAPGDLVVDPKAWNKEVFSGPTQCSAVHVVSFGPCSAWACCPLCDIPISVCPGTHPSPFG

SEQ ID NO: 961587 - protein, 35 aa, Homo sapiens
MEYPGCVQIHCPWIDEPLRVGCLVSCFSPNSSNPI

SEQ ID NO: 961588 - protein, 152 aa, Homo sapiens
RSRTSCEIGCFAKLTNTYCLVSRSEAQRTSTVCSEGELSDTIPVVHASIAWLPASSGACVWRNRHGSPGTQQYHLTMELQHIRNSHPTTQLHDKSVVDRELCSQPWAMSPTCNDYVALCPPRLGQGDRRQFWQMLLKVERLHTDMCADHGAT

SEQ ID NO: 961589 - protein, 196 aa, Homo sapiens
MGGSGKGGGPSSSMVHGSYWAVTLLRETIIIPSALGELDVLDAPGGISVWALINLTRGRFHVPHQPSFIVVERQVGTLPAEDVSTCGPLRTDTCELSPFSKLSLFRGNLWRKLQGGGHKILTTSRAVVPKKRGLYTRASRQNILNPRGLVLVNMRAPLLRAPHSGGKRPLEVSHKMWSHVGIKGSGVPQRQGGLLR

SEQ ID NO: 961590 - protein, 35 aa, Homo sapiens
QVACTNWKRVMIVLSGSLLHGCAYRTVASGEPCQP

SEQ ID NO: 961591 - protein, 182 aa, Homo sapiens
KLKGGYLVAAGSVMAQPSGRPAGPFPALIDAYISRCQKARSYTGLEWKRTLCRHEVNVESGLSETQLSVRDRAWRKPIPCRLPSGVEMCKWIFSFLIHRPGAKQVLSTWCLFPRSVSSPSWFWPAQIWDSIHRWDPQILGHGRAMGLAADRQPPRLLLQGGPVSFSPEIYLLHSIYTISSLS

SEQ ID NO: 961592 - protein, 230 aa, Homo sapiens
  misc_feature (114)..(114): Xaa can be any naturally occurring amino acid
GGKTPFFGLGGGGGGGGGGGLSPQKKGAPPRGVVVTCYPKREEGVFIKQPRATHEWVPIRQGGRPAGTTAQHRGAGDNEEVTARAREESNTEEHEGGAHCEKKVTRQTEPHTEXGSSETNKVRGWWIVVQRGVATQTVIGPHIRAPANEKTGVTMILVNSHSPQASRAPHYLISTDGTQHQSRCHRQAARGARERERGRKVSETHTQENHARLKDSTYLEVTPEQQKRDE

SEQ ID NO: 961593 - protein, 64 aa, Homo sapiens
MRIPTFMDLIGLHPGGQADRRMPTGGQPGTQKRSATIPPIHEKNTRDRPGSLGQWKRTEPGEIG

SEQ ID NO: 961594 - protein, 111 aa, Homo sapiens
MTNPRTHRTTLYLTQTIHSGPWANMRPTRPRHTQGTTPDREHRNTDPHEPEDPDDQMHMEIYTGASDKWAHTTEEHSQAYDTQNKKEHITMRGNKEMTEREKITMVTARER

SEQ ID NO: 961595 - protein, 287 aa, Homo sapiens
MRPAWNGMVLKPHFHKDWQRRVATWFNQPARKIRRRKARQAKARPHRSAPRVGSHPGPSCAAPRFVYQHEGALPGRGFQAWKGAFRGGRAFHKKGGPVTIGHFRVESEEGGNKSTGVPCMAQRCRRAEWEYTASKLILFPRKALGPPKKCDDQFLAEELKLSPPSCPDPVMPRSGSGLYGRQKRARVHHLRDREEFSGRPYRHKSPVYWPRWPNGPGHLIRHNGGKKEPRNSPKKQGCLYTKKNKGPSCGTMGTTGRENTCLDSHRLWFFVWNQLGWSRRTSCRSPA

SEQ ID NO: 961596 - protein, 218 aa, Homo sapiens
MDTGSLETMCLPWRPCALHTAGIRLPLPLPPRLALGWLSVWAPDECSLPQAKLERHEPLESVAPTKDLAHAFPDPIYPGRQCPAVGSDLGLEPVANPSCSGMLPGGPQERQHLMQCPQVSIGQPMELRSGMVLTVPCGADECLSAPRSRPPQTTSPRKAINRGLDMAPDHMYHMVPFKRTPIHVTWFKPETGTPVMWATDAIPGKSGNVQAEMCWYTV

SEQ ID NO: 961597 - protein, 208 aa, Homo sapiens
PVVGMEKDVLLWAQTGRLTCAQMPQVRQELCTSAERVSSLGEGLAQWFCLNVLSCCSKTAGLPCCGAIAEHDWEAFCHNACATPPCSDPKAVNIWGARGSYIYEKPLAGGWPQVTGAPSEGPLLGPEQEERECASWTTSKVGPCMKPPCCHTAIPRGDAQDTVPQRADKQMNGCTYQLEEEVTIIMGKGYGTRNLTCAAKRKRKKHET

SEQ ID NO: 961598 - protein, 196 aa, Homo sapiens
MSPISIGHEAQMRKNIEKDNAGQVTLVPEEPEDMWTHITTIVQGGQTACAPPTIRKVQTESSTGSVGSNRVRNITLTHLRWRPSTYRNLKPASCKELRGPTSKRNEYVKMGGYYHTIELETKPQVQPWAKKAGDSVELGGASKQSLVTKLELLMWRADGHAEKASPNTAKAQPKLTPSRQVGNTLATTEDSIRHGR

SEQ ID NO: 961599 - protein, 261 aa, Homo sapiens
MHRLGWGINERSVSLCYQEIMAGSLVSDARASWEKHARLAPAHGPVGRADDLPGYAHKTLSFLSNLTHFPAPRFLDGAWWRSELSIYSLHRECRWTTSSMKATMARGAPGATLVAVTDLGSNQCSKWYLSGSLTCCLKKPEDRGLLYRMPTFINFSVMLNSQIASVWHVTLSKLLGEACMLLGIPKDSNGAAVRWTQEVRWRMRKDQCTSTWAFLAEVLCQPTHRSTTRRKLMDEMSKTGKAVDELRIHTLVAVLLRWHLF

SEQ ID NO: 961600 - protein, 202 aa, Homo sapiens
MGWNEPALTELWHISIPRLLTPLPSLTTPYNTQHNHKSQHIAYISTSTMHEPSPISVCLQLRHNKHKSSNTDSTDLRLPYQHPHIPHLITHTRPKTLSHDIVSPSSTRLGPNPVSLREPGLLARSRAITTHLHPNTYPPPLDSSSTPPHPCHHADHTCPQYHPNSHITICPRIHTSPINPHLPPSSHGTLNIYVTTLLVFHI

SEQ ID NO: 961601 - protein, 98 aa, Homo sapiens
GWYGPADDSAEALLLWGVPSEELTQCAGCSACYCSGVSHQICPYEAVLGSGMLELSCMDRQLRVFVPNQCAGEGAPHRPSCISTMSEEAEEEVAAAYA

SEQ ID NO: 961602 - protein, 145 aa, Homo sapiens
LGGSPVLIGRGTQLVWTIGGRECHASTACPKRSACPSTHLPMGKSGSLGQWATGLVCVLGLSHGWWHVMWVPMSCLFWWHPTLMPWSCALLPVTHAPHDHLPCAMPHNVSPLLDMCPMMIGQDVHHMCAPSLSLLSTCPVCAPLT

SEQ ID NO: 961603 - protein, 117 aa, Homo sapiens
VLGKAGVIRTRHGCQARMHASYREHVNVSVQQLHGKIRLFSEQLENGPNTQLALPACRMNSILRDALNHVPLSLVDDAMQNCMMLVPMLRACDAHAMVMQMMLVCDECHDVLVLCND

SEQ ID NO: 961604 - protein, 268 aa, Homo sapiens
MVSPGGREWSGGWHPLDEHGQKNIRMSNFFIWTVALGVPCAHGLPVATDAAAGSAHEHPLCVSVPPPWEAATRRSLGLLRLHRVNGREWHSLTPCGAKPGERPALTALSISHSPRTGRQLRNEYDLALCRWHWISTWSSKLIYQARPPYSLEAGHGCKLAWVQNLEAGGIRASGMSSCSTAGWQGAQLVGLTKIPLARGIGCLIPSARAMTSSANRERELGIRGLLRKKTGTCQLSGPTDRSPKLADLLQRREKGSRTRYQQPGKGPR

SEQ ID NO: 961605 - protein, 263 aa, Homo sapiens
MARVAWGLLWLLLGSAWGCSTRSTVFRGFPPEDLMPLAAVYGHALVAVRGEMMLCAMMRAATCDLSVLRLHLAPALTARVFCHRSICRLAPAALLCHGLDPDGVSGQTSGPVILRVFGRVLEASAAALRLRASVTLASAFQVPYPARGHLLSDFHEPSCPTSSLALLLLFTGYTELGEVRVGVGDYMLPPRGTRGTKLDLPCYLNLLSGGCWNVAEDSLTDLDAHAYEALSPGCEALQQRDSLEPVLGGLASPDLRCCVEGLG

SEQ ID NO: 961606 - protein, 172 aa, Homo sapiens
MYEAWVLIRPMGTSVPVMLRAPRAVAGVRGAVGLSLCDRGRRPMSVGRVRCRALGSSPVSVCWVNLFANDVQLPVMLVQCWNDVMDVDACWQLCMDVMPAPVVRMLTLTMSVPAACLAPCVILNDGMCAGPVAHTYASVCANCRCAGNKLALKTVNSMPMKHEDWSDECINK

SEQ ID NO: 961607 - protein, 118 aa, Homo sapiens
MWTVMDVSCRWLDTSSTHMAPEMLLPSHEDDGGRSGIVCEKPCGGNGTPTSPRSIVMKERSPYMHPHKNTDRGKMEDVRMGKDKGASHTTEENHDRKKEIGDKKDKRTESSPGQKETG

SEQ ID NO: 961608 - protein, 211 aa, Homo sapiens
MGYSTGEVSWLRHAFVETPSGEGGMGAEGPAFSPAGPSIPSLALVPDEWNGVELGPAAPSSAEMGPLKPIAWWPPGLDLGEGTCAPWCSGSHNEAGCLAPTHNFCPIMGPPHSWGGGGSFPSGQVAGGAKPGWQTSGRKCGCLRLVCGAPRCPIAREPCVVSWARLCHPSRPGGPPDHALSACQPRRGSLRSWPPCSGLPPRVPEGSAVCW

SEQ ID NO: 961609 - protein, 278 aa, Homo sapiens
MGIGLSVFISPFVAGCAWCACDLMLLCCVVPAVDLGVLTLLMPDDVMLLTNVIAVPAGGHMSPAVPTLCCCCAALLPPVCDALPCCCLRTHVLSCVLVMMCVPGDAVLQCVLLGPVISLTQVNGDPWMLPCDVLAVCCACVCSMWNLLLALLETPAAASCCDVGPSAAMPPMAAAGVLVGPCDVSPPSPCGCFPSWAKCGLLFLPPLSPPFPPPRSPFPSLYPSRAPPKGALIFLILPCSSFSHSSSSLWKWAREGMWGPSDVARIVCCAQLAVVRTT

SEQ ID NO: 961610 - protein, 86 aa, Homo sapiens
MRETLQEAKNRKSSLCDIKALSGYVNLLPLVRTPAVIDHAQEEKGRQMLEAFSAPVVSAEAPIIVTSLDQLHITQDSNGPLEITRN

SEQ ID NO: 961611 - protein, 74 aa, Homo sapiens
TTQPTARYRLGFKLVHDGFLFQVKQTGADFLADGVWKMVGIRCGSKKGVNLPGAAVDLPAVSEKDIQDLNVMWV

SEQ ID NO: 961612 - protein, 321 aa, Homo sapiens
MAPRDSLDTQTPACFSDNVAFVLCLDTVFRGSLPAPARVKPPREGTLQYAFLRELETVAAHQFPEVRFSMVRNADQPGGSDVLCLGKHERFAYPVERAAFYACPTWRATVTAAQARIMDVRSRVDSKTLIRNLRGILLGPVLESIYKLTVDRGHPQTMPVFNSSYMARYQLGSYLDSVHGRGSPTYAVGLRNACGRGQRASSARLSNHLSRYLKDVRAALRQCCNTRAARVCSSRPALSQVVAMAFRVQAGRPLGLAPWLMGLLAYLGMAKGGFSRTFSFLFKKPPKAVLVRPKKCSVPPREARVKLLAAHFLFPRGLKGA

SEQ ID NO: 961613 - protein, 332 aa, Homo sapiens
MLRDPADASEAHESSSEGRGRSPSVRMDILRPNKGRHREMEQREAGTDESDRMSPRWSLYPSDSQVSEEVKTRHSEKSQREDEEEERGRERYHKRGAEEEDSSEEKHLEDSQERHKTLTFTDKTAGFTLIKTEELVASRKHMLAGHSQGERHIAERRVARRVERRQGARRIHPQESKRPTPEARKESEEGEADAPLEVTNDARGQERPRRKQSPTEPSQERKSTIWRQRHPQEDTEQVNLAWPDKGKKAPISHKAKRRTGTYGEDKRGLQRTGPPRTERETQKRSRRATKEVQHPQEEDLERHITHPHSNRKRNRKLKGTMKETQEGDQRLE

SEQ ID NO: 961614 - protein, 152 aa, Homo sapiens
LGRRLGVNRPRIACCSLDLPGSCLSLPSSWDCMLVPPHSVNICRDGVLLCCPGWLQTPELKSLLFSLVFYHFFFFFGNGACGPHRCGLGVAGGSVSAHWQASGLSGSTRFSFLSLLSTLGITSGAPPPPRRASFLWCFSRDGVWLLWARAGS

SEQ ID NO: 961615 - protein, 111 aa, Homo sapiens
MGAPINCWGVATPPKKKEPSYHQGYYLGGGTSLRCARRRTYLSEGRHSIYHPTETGRTSRARQQPPQPNYPHKWYTTTTKVVITQDGPSCEDPPPMVVRDTNPQHSKETTA

SEQ ID NO: 961616 - protein, 219 aa, Homo sapiens
ALRWAARCISVAVLCSATLGSAACAFLQPPRTCVVSMLGERCGRGWYVLAWAATGGYDYSFGRVCALMCVCAWCTMCTACSVSACMCFDPCLSHFPVDAVDCFGQTSCCLCGPVRILLMAVAPSLLAKAILQALTWLHPKDVTKGRTIQTRCETRATTAQLVPKPKARRGPPGFALAGIGHGKLGDGPVGKTPRHGRDLKPAKQSQGGRLRRNRKEPAG

SEQ ID NO: 961617 - protein, 256 aa, Homo sapiens
MRQYSLSFKLQGRVYIDLSWPSSDEEPPGLYPYPNSISIDAGPRQAPKIAQIKRNLSYGDNSDPALSTRPRMPPPRPPELATSSRLPSRARHSPGAIAAETANWYPKRYCSAHNKSRPGTLMLPRLDTGDQTMNNLSEEVSRHAMSSVLCAQVPRLLSVPEIPAVPGPSGEAKLETLMPTHAPKPQDLDRAPEDLPTALSIDGYQHEVQMKLYQLKANSWQLGEDPRERGRKRRNQPYAPKKQQTKRQKPHKAKAA

SEQ ID NO: 961618 - protein, 294 aa, Homo sapiens
HSQVACPVSLTVSGVMKSFRRNSNYAERCKVKYFFMGISFMVIVGPVLCPDDLKANCAMKNRSHQAPVAFLTTVFIPRFREYVCCWRVVNRGTEHRFNPSDGLRNTVRFFNQCKANMRITIVAKSQSPADTKLRFVKELLGKFQADPMGRIWFRDLSPRHTSRAFGISTIQPDFMQAFNQYITAALVLFGNVAHALLIALQRRIAGTATAYRCRNRDSFYTMPGRWHAFVCQSLRAIRHVLHVGALRQLVKSSMCPSRGPGVLLLRAFRSVENSVGRFDPAPCGVLQAYFGTVF

SEQ ID NO: 961619 - protein, 267 aa, Homo sapiens
  misc_feature (96)..(96): Xaa can be any naturally occurring amino acid
MEGVAHQSPPTQHTYGHLPFNSGCRAHIDAIFKESHAIREWYGIDQHGRTDSRINSIKGLRAYVIKSRMKGRTSPVRVNAVGHYEWIALVEARLGXDLSVGETTCQDMASNTYERSYTVGFRGTSSNQKVGTTIDHGSEWVSVSHEISAGGIGNSPGMTSILASGNDFLGWQRECSRPERAVLTQVPPPWSMPLQEIGRSASGGVPHGFQEKPRRKEERSTERHDSRLKSFDTVDEGPSIHVGHSHVGIFRGGRHQKKVLQRTKTRE

SEQ ID NO: 961620 - protein, 94 aa, Homo sapiens
ARGRKRYNKVEDRRLARAVSLGSHVAAEGTPGTVDSPLVRTDSLPTMTKDMFPGPYPRTPEERAAAARSIICVVEDYEPYPDDGMGYRRLPEAP

SEQ ID NO: 961621 - protein, 149 aa, Homo sapiens
MTWLRGIVAVPRLALPGRADLQFNCCTPSAWSECLIFLHVEMPCWFTCVFSELKLKLHHQWSCTGCLHIYCLVIALVGLCGWCSDYHMDCTCYADLYSLQQLVRDPCIKSCTSVHVAGGLQHSILYPGGFITTLLEAATCHKHIFFGAT

SEQ ID NO: 961622 - protein, 266 aa, Homo sapiens
ARVVIAYDTPLEAKGRFYTDSTGREILLRRRDYRSLLETDTQTEPVAMEYYYPVNIRVIYIDGCDYTMHLTVLTDRSQGGQPSSERWARCELMVHLKAVKDDGRGVSEPLMEQRDREAWSARSSHHVVLRGHSPGCSRRTTGSWRSRRSWPLRMVLAPGGGAAILSLGGSSVARTLSQGLPQGSLAGPSVHLLHAEPCWGPRKWCLLALGATEYCRIGEDSGRTLSAPVTLNFGDLYSSFTITRLQETTLVDNKLREETSSSSGHN

SEQ ID NO: 961623 - protein, 246 aa, Homo sapiens
MQVGPVLSSVARVSGRFSRCYVYTHGWDYGNIHVTFKPEQELLVIDWWSSNMHEMNEQENAALVRCGHETCKLRLKSFHIPLLLGQNHCTLNWRISTRPDDTMKQKFTGPLLPTVKVFLLILALILKRWHLPSRNHLPVELSSVSSLQALPPGTMVTGAPQLYQTTSVVMLTPNPDGPPSEAAAPMANTRLPVLEGHPPKRTISSHLLRLVPGPPFCISSLSTRARVQQAWRPRSSKPEGRLEGRL

SEQ ID NO: 961624 - protein, 267 aa, Homo sapiens
VVEAWVLTPATGIRMGGWVGDAAAGGHLRGAHGGLKGICQCAPARMATCSSMRGDNPKLMRHPVEDVSFPPRNHERWKGTHWVTLKWNNNVQEKGDQTLGGDFGEDMRTDALEVTARPKDGENSGGGPEATRRHGTYTSAVKPMDAPLEKSTQHRKYNVRQEAKTGTGAKGEYGAKALWWVYTLQWGILKDGMMEPLVEREHYGFTLALPWTFLADPTLYLPKLAGQTFNPGNNCIPPNGWGPPPLGVDGVGPSFHEYPRLIFGYPQ

SEQ ID NO: 961625 - protein, 41 aa, Homo sapiens
MGQAPTGDIIKKQQAPLALGTTQQHEPEARPTMTATGPGPI

SEQ ID NO: 961626 - protein, 72 aa, Homo sapiens
RHEEAAVAVAVYGGGDFLDCDFLNNPGRSERLFSLGGGLNETLRGPSGSTPAPALTLTSLPHVSHACLGSDA

SEQ ID NO: 961627 - protein, 187 aa, Homo sapiens
MHLPVTTNFDNNCYRDALLTSSINMYHQLQIILWYAIILHPMCYMAHEHKVNIEDVATEGAGTSVHPVSRGHFYPVLDLHSRAMYCVITVHAPGAGALTAQLGVHGELSSQCLADDFQCPEATPGNSYTYRKSTLQTHFLLDPVLHNQRVGIYVFDPPGQLLLAMDTIQYFIWLSIMGKPIPEDTCD

SEQ ID NO: 961628 - protein, 110 aa, Homo sapiens
YTRLGSEAGVAHIIPVGITFFKDETTALWIVFNVVSDTFFLVDPGVNFRTCINESAASADEGGRRKERRRDLADHTEQEGREAKKQMMSQHDAHVSTAQRKSLYTTHNKT

SEQ ID NO: 961629 - protein, 283 aa, Homo sapiens
MSFFPRMATTDVAPQDLDGAPGDEVQGGEQVPSMHQCVPCAVHVWSGTFMARARMAALVMAPSEGFCSAAAVSGSVCRQMSSPAGTQWKPFSTAFMSDADWCRTRACWKYYLRGLLAARVIGGSWCEAEMNSRTRKHLVCGSWAVPEYSRWMMADTVAEDASHTLREPHEHDAEWRTDLTTELVSERRRWPEAHTLVKGCLARCKYRGRHNTESLELAGGRPRRSRRYGTGQQDATTRHPTGNRDPVSTDHSRRDTCTAPQQRPQSIPQTADTLTNTHTHDTA

SEQ ID NO: 961630 - protein, 173 aa, Homo sapiens
MLCKCECHTQWLAQVDVPGPATDASAHAMHLVNCDSSDEIVTCATMVGMWQVKGQMHEMLSCHMIARLMKSCQLPPFEMVGALTRIKRCGHILWIDLYAPIDTGGVQIYRHHFILYSILPPMQHPGERASCHPESPIDRKEAERKMLEPKLQWEQPGPRKGPCQSLPRSSVTG

SEQ ID NO: 961631 - protein, 189 aa, Homo sapiens
MTLTVDGGGYDSITRCQLEECLAWLNTNQQTCCARVIDPRFKGPASYPLGPCCIGGLIARLNAYPSYPIPQKLWSNVLPVRALQGASRIRARAYRGLILCLPLWPTAYSYVRCHRTWTTPFLVDKPFVALVAYFAVPVRELIHRPGRAFVPTVPVTANELRGSWTSFTDTWCPTKALVIRAGCRMRGRL

SEQ ID NO: 961632 - protein, 249 aa, Homo sapiens
MAFLMLTSTKNSSAIYNYAKRPNVVVPLRGYYNPFDLTPYTLFTTRAPKTRHIIPSPYYINDPHLTLSHIDIISTMNPTIHQYTQPHWSHPHTYGPYLLYLHRPPHHRTIHRYTHLNYTPELHVGLKAITNYKTNDTMNSMPATLRHPASAPQHILTIDDHPYHIILAIKHLLINVDIPIQTHRPTPLSATQEHLLTHSMPLNDPLANKHDSIRHTSKEQTEPPPDTAEERAEQGTRLQHRISRRHHAH

SEQ ID NO: 961633 - protein, 145 aa, Homo sapiens
METIGRVWQWPPQLVAVYLVLPKTCTDGSGTPGTGQGHQSGDIDNLTRRVSQAERDRRVEEQNPRDTTRPKKGAGVPHNRRSGKGNYQRALGTRVGPPRRGGTRKQAPNGRREGGPPIANPRGGARGCRRQRIEKYKAKTRERRA

SEQ ID NO: 961634 - protein, 245 aa, Homo sapiens
NARSSRDFEYYKQYLCILASRTIKEWLSVLRDGETSPAVLIPSKPLARRCFPAIHAYKVCPDAVCAMRRPMSDGHGSRKNITDLVEGCQESQWSPRVRGTRHDRQLTFMKRNIITKHKLPSPRYWIIIGLVIAMAMSLLFIILLRFLAGIMVWVMIIMVILVLGYGIFHCYMEYSRLRGEGGSDVSLVDSAFRRISVCTALTADLVGFMIILSSLSHIILVASSRKRSLAIASRARLWNSVLCLH

SEQ ID NO: 961635 - protein, 351 aa, Homo sapiens
MGWGIPSKLLFFCPMIFLWSVGVLDWQWADYSPGAKLSEPEAERLRTDSLILFIFFHSLARLDLLSLSLFLCDNGCLRPCPPALGSCRGTDLRSHLAKFSSSPVFKPHSSLPYYTPPRSKRLARYTTAHLFPPHPPKTTLSVVLFTALRRSAGLHPVYVPHEHCASLRTFLLMNPSTRTLYATAYVTTTQERFMQDECYTHASLVRPPYLTPHRTPQWSSTKHPFSACTKQPWHASNHNEGDATHTHATTTRALPDPAHPLYDDTSTSEHYFNHHADNCGVTPTHLPPPDHCRTHHYSDRLARQRKPLQTPVPTYHQHTRATQKPLPTDTRPPPLRQRGQNNDPLGVTTGA

SEQ ID NO: 961636 - protein, 129 aa, Homo sapiens
MRTPQIRKPHPVANTATLKICSWNVDGLRVLALRRNRITSRYIDTKPQIELCLQETKMSREQTTRLKLPRAALALSHHTGHLLRHIGSGSVPWPCLPASLPLNRSFRAYARRTCPRRRLSVPASTACVR

SEQ ID NO: 961637 - protein, 81 aa, Homo sapiens
MRVAHATTEPAQPDTYCSDDPSAPSNNELASCRKGLSQFELFPESAKLEKGHVQGRRHRSSNASNDTPLDNIFLANAKQPL

SEQ ID NO: 961638 - protein, 76 aa, Homo sapiens
KHHHNSDDVTTLVDSEDGPKSTTQSVLISGEATVCSVSAVNYCLVVDAVDVGILARKLKFIYYYSGAAVYTRSDVY

SEQ ID NO: 961639 - protein, 172 aa, Homo sapiens
MPLSSISFPQGSADCQTGPYERRHHFTDCARFFRTNILQYPIYKSSSAPKRRRSPRPELLSYRSQEKQHPHSPSRQPVSSQTLRPTGPRLSCPSPTHSPSWPVCALLALPARSLTPALSTHRPGPGLGAPPLPPPPLYSLYSSARSCSPLPFAFPPITSPLGISFSTAAAAP

SEQ ID NO: 961640 - protein, 134 aa, Homo sapiens
WVNFGTILNSLNGFYGQIKTCFNNGGGWGSQHSTQLSGARASLCVGLVHFEQCGMWNSSMELTGSHVERHALTPCGDPHCAPFNEMLEKSVAHFFTTPREIEPTPREFSSVPRGFSRAERDTQSLWGESLEDTA

SEQ ID NO: 961641 - protein, 41 aa, Homo sapiens
MTPPGFAEHQTFGRLPMADWVLTLCSNQASCTASSGFHTSL

SEQ ID NO: 961642 - protein, 111 aa, Homo sapiens
MVGGGGVGGVPPVKNANPLIYQRSGVSGLCLAVLRSDEHVFPDSIDAREIFDLDICSINDPEQSTMTAMSEYCTVVEQVRVQVQLTPDEYSGCVLSHQPFRTASMATPYMV

SEQ ID NO: 961643 - protein, 193 aa, Homo sapiens
FPTYTDVPFIYSCWSDCDCYYYILACGSEKNPGTTEEKTMRLGSEKRVKSQRNELALLKRLKPLFTKSFESTVGQDSDTYIIIVQRLCREAGRTTLLGAGLRRKLNQYTVHGATDDHVRSGRLNETHIFKEVIGIMLIYKGGDEYDNHCGEEQLSVHVVMISCNRHTLADNFNPVSEAAWRSPTIVSTSWQLA

SEQ ID NO: 961644 - protein, 209 aa, Homo sapiens
MLPRTSSLSCLRTQWVDVKCDMEVSCPDGYTCCRLHVWGACGLLPFYPVLCAVSDHIHCCPCGVYCVTLQKCVPVNSGAPPGALCWMNGPQLTSACHDPQCLEDDDVPCDNLSCMLVPPPIPACQLTYWGVGCLLVQSQRLVCLLRTTSTAAPQGYTCVAEEAVSAEEAEICVLDWLNDACPAGFPYPIPGDIGCDQHTSWPVGQDLLP

SEQ ID NO: 961645 - protein, 103 aa, Homo sapiens
EEEEDDDEDEDEEDDVSEGSEVPESDRPAGAQHHQLNGERGTSECQWMMWSMDVDPLLDLHHGPVTEVACGAKPLVHAVLPCQMCSSNVHATDTSERGVTQTY

SEQ ID NO: 961646 - protein, 239 aa, Homo sapiens
WMYKRTCFGGGGGEGGWGRDGSVLPFRPPKHVGLWHASVRAPADTLVGLSRLLIFVPSFPRSFAPGVELSPCGWCAPCVVPSSLCHSLLSPERGVSLSSPRTREQSCALVVPPPEARVAHTLPPLPSPDAPSNACGSLCDPRCSSPPRRAFSKCVCLQSCPHSLVAPIRGRPRVFLTSYPRWVAPPVVGRPTWRRPDERPPCCRDGYLFARELRPLCGAVLSPPLAPRRVLRHLRWGPP

SEQ ID NO: 961647 - protein, 118 aa, Homo sapiens
HLTKKALEVLCCCFFFLSQSLALSPRLECSGMISAYCNLRLLGSSGSAVSASQVAGIAGTCHRVRLIFVIFFFFGEWSSGLRVGNCRWCDSQSHVQPSTLRGFNAILRGLSPSRVSWN

SEQ ID NO: 961648 - protein, 103 aa, Homo sapiens
MSFEVYLRRVTGGVYALQGPVQLSTYLSVYWRKLHLSTLKFHKGLSVVFWGKENGTPISWPPQGATTFDLNVSFTVGVTWLRFTLVTPSTQGFGVEHMGGYII

SEQ ID NO: 961649 - protein, 207 aa, Homo sapiens
WDKILPPRFTPPPRERGPLFWWAPPRKLIPPPSLMCEILSVWVSPEETRLSFSSVWSLLGRPERAHHNTPHTQCEKNPYYLSREERENKRRERDVFLYHQYTRCGGGEPHKKTREVCVRGGGRGVWAELSTHSSEGAPRCVGALSCRSPLSPLIKHLSPAGEEFVCARPTPAREREAPRKARSPPPRARERASAPATRVYERRGRAV

SEQ ID NO: 961650 - protein, 192 aa, Homo sapiens
DFSVSLKRQGRTNTSRCSSWTMSTALGSGASHTMDDGWMEHYKKAAHLHQRARGEALPRLGALRCDVRPGSHHLASRRSPRCVRCPARPLVGRGLLPRGTAPRASLRVSLYGSGRCGRFVSHLPSRPHTPHSSPTRLPDFRGGRVSRATFTISSLSIGEVAARCIHSSFPVRLAPLFKQRTLVAPCERWMRA

SEQ ID NO: 961651 - protein, 156 aa, Homo sapiens
SLEKSYELPDGHGAITYCAMSRFRCPEALFQPSFLGMELLMDIHDNYLHTPSLKVTVDIRKDLYANTVLSGGTTMYPGIADRHCRKEDHLALDHPVTMKYQDHCFLLERQVTPLVEIASAPILDLRLSSLSTSDCWISNAGSYDRAPDSRPFGPSA

SEQ ID NO: 961652 - protein, 239 aa, Homo sapiens
MAPLSHPQKGIRWVILRLWLLQFPTTRCSLSTGLLVGLGLLLLLLAAGQVRAILARTSIEENWRLGRRTKGNEESEKELALVRKAEHHCVQSTSFREHVLGQGFSTTYIYIFRVCREAGRPTLLGQAVVHESTIESMAQGDQLVGRLNESHIFNGSNWIMLIYRGGDEYDNHCGKEQRRAVGDDLLSIERQPSGQFCPVSERAWQSPDCVYSWDGLRLAGPDFPPGGFPPAVGQGGGGG

SEQ ID NO: 961653 - protein, 252 aa, Homo sapiens
MREKQKLRYFRCPIHYLDGRARKSYTFNHDEEIVHIHAGSVLGNQIGAKFWEVISDETMASTPPAPTTVGRAIRAAWHSHLCVLQSECLCVGPIMFLVPSCAGSRTWDPATLFAQVLLAQIFENQTNFVFASVWCAGIQICGPKAYYYSRAPHAVFDSGPGMLVPQSERLRSCRSRAAGSSMRGPIVTGRGCAELWYMGTSPYQQDPRKNTLESLSLNTFSRGAFSHSVLTPGSSPKMHPLRPVSGQDLLAL

SEQ ID NO: 961654 - protein, 160 aa, Homo sapiens
MRFHHPCCCSQILGVLIPGKCESLTKVARVRAMCQPQRQGVEEVGARVWKLRGDPLLGASGVTPGMPLRGPSDACFTTFCDVIILGRFPENGRSGPPLTRWRGVRRKALPVELPYSSGLTFPTALDAPLKGRYIFWNPAPSATPGGPSFGGDADGKPPDL

SEQ ID NO: 961655 - protein, 134 aa, Homo sapiens
MPMNMMAACDPRHGRYLTCGCCLTCGLDVHEVRSMSRCYNCAEQEQQLLLWNGSPTMSRQPSVTSTPRGLKMAVHLHWQYAQPSSDLLQAASREQFTAMFLPGMAIPPLVHSARAWTYMEFTEADEQNMNDLDL

SEQ ID NO: 961656 - protein, 229 aa, Homo sapiens
NKARSSLWCNQAEASVWLQCWSTGSIHYITLDGRVYDLHGSCSICLGPSLPPQSLGTRTFPSVLDERMHAGHLQQPPRITVGWPGCEPSSGSSTVTVGRQRLVGPACWLVGRVRVTRLMGRNMVLLDDQGAAASLMMAAAHLLMSIPSPFRGRLCGLCGELYNVQLEMTDFVPAQWPQPASNVRALFRGCNERGATSSFQGAVTEGLTNPNSLPKVACAAGQLYPNESN

SEQ ID NO: 961657 - protein, 73 aa, Homo sapiens
LGRPVYRPMANPALVYRRARSAKHARHKPGSVPVGVLWLAEEGFGDRVVVESEGALAGVRGRVLDGFRCVCCD

SEQ ID NO: 961658 - protein, 220 aa, Homo sapiens
MTPRYWRCTVAICRNLILKLAILWDTVLTTGWAAVVGCPACGQCWDVILLWPCELVPVFLRDWTSVLIVAWTLRFLVCNCVVDVISLLMNERLNDVMAVNACDGYGHIALRICPWMLEFIGAGLLTLAWGVLYLAPTSPACCRVIQMLLALSSIVTEGPALLGQTCLVLLLPGPWLGLHHIKHLSSLHACLASPAFLVCRCLPLLRPSWQCTPSRQLLPF

SEQ ID NO: 961659 - protein, 34 aa, Homo sapiens
CKKNTMNRVKDTLSYNIIVYVSISNSGLLDRERP

SEQ ID NO: 961660 - protein, 35 aa, Homo sapiens
  misc_feature (30)..(30): Xaa can be any naturally occurring amino acid
MLVVVQARWGIHKLRASQTLEETVLLEHPXTAGDR

SEQ ID NO: 961661 - protein, 81 aa, Homo sapiens
LVCSVCAVVVDAPCVVCGLRWRVAQVSSVCIAQWEVGVLSARRGCWCAVPDLSRIRVSNGGQVSMAVRVAELVYAVFLSAV

SEQ ID NO: 961662 - protein, 172 aa, Homo sapiens
MADVNRRKQKRVRVATGLGSYGVEVGTKDEGEAVAMVAAKKSGAKEECHGRMRTKGVVKGGRCKKEEWRVCGGKRKGTVRWKVVSGGASREMGVGVEGREVCVWPAARVVHETPSQEKEVGGRGREAGRRGEARRGRGRERRRVDERGRGSRRRSVRAAQRSRAQENVQESE

SEQ ID NO: 961663 - protein, 66 aa, Homo sapiens
HLSTDPLRVSRWQTVRSFSSHEAIFQTITWGETLDNTPLSRAEVPAAFRNALCPWFIETENGDDFY

SEQ ID NO: 961664 - protein, 204 aa, Homo sapiens
GPPSLWGVCLVLWGAVGAGLRWLRRVLCLRVFSFFPAELWFDLVGRLALSVVCRAAGARLVDVPGCTFFIVSLLCAPRSFVFLPRAGAAGDSSGSCWGCCWALGPRDRGVVTSGGLLGVFGALYCRSLWLLGFGLRGFGQSSRVSVSAVAWSFVVVAVVLGVVGCVCVRWLLVRSGVFLRLGLLGPVVSYVGECGGVGVSVRDG

SEQ ID NO: 961665 - protein, 73 aa, Homo sapiens
IKQEMTMEYKQELKKLHEELCILKRSYEKLQKKQMREFRGNTKNHREDRSEIERLTAKIEEFRQKSLDWEKQR

SEQ ID NO: 961666 - protein, 181 aa, Homo sapiens
MLFLGAGFRACGSVGIVCPLFWSVESSCLWAVSGVFCLVMVLVRSSSAWYYCIVVDLVYLLALWCVVLACIVFLFVLFNVVKDVLLDPLFDCARIDGVSSVDGWLMIACWGSGDVPGSIFGMFWVPLPGELAFVFLSHLVFPWAWSCVVVPHVYYVIVCLFGRGVCTRFLNCPGMKSGLLF

SEQ ID NO: 961667 - protein, 105 aa, Homo sapiens
MSRPRRPEDSNLATTMNYIEADYDHMRAVLHERSRAQGALSRVTRVDPSGKPSAPLPDKIGVHSQETVQPEPKKLPAAQQSSSTEVSIDRWTKSTDRSALQKALE

SEQ ID NO: 961668 - protein, 158 aa, Homo sapiens
  misc_feature (65)..(65): Xaa can be any naturally occurring amino acid
  misc_feature (68)..(68): Xaa can be any naturally occurring amino acid
  misc_feature (87)..(87): Xaa can be any naturally occurring amino acid
  misc_feature (113)..(113): Xaa can be any naturally occurring amino acid
NSRPRRHRRFYGKDSPACPQGEEMLTVLSGAVADANDELADLVAWDSSLEGMGTTFCGAMFSGPXLGXVHIGDSRGFLLRQGRMKRXTRDHSWVQSLLVDGRFTPEEAAVLLXRSLLLQVLIGQPQLIPGTQIVVLRLGGRFLFCSVGLCGLVVVDSV

SEQ ID NO: 961669 - protein, 104 aa, Homo sapiens
MLLGCGLVPIVIMSIWICVTTYFISPCHLKLVEVFTWSYYVKAQLLEIFTSCNCVIYFFSQGIKDPDLHMEMAPIRSGQPFENVSSTEAVKLNTYIYVKKMYIA

SEQ ID NO: 961670 - protein, 108 aa, Homo sapiens
MRGRVDIECMRALAGFIMRGRMQAMLVVAGSAALPLLFWLSAAAGCLVLLRRGSDALGVIGLGVLSVLLFWHFNIQKDPTALLVLLGSCSLALVLRAGYSWNRVLLVD

SEQ ID NO: 961671 - protein, 89 aa, Homo sapiens
QVVHVDGYRTKAPAFGLFRRGHTFRTLHGPGVNNLSLSSCPECKSTRSCKPKFTKIEFALKYQCVKCTVLTHRYYRSPIQTWTTPVHKH

SEQ ID NO: 961672 - protein, 107 aa, Homo sapiens
VFFFLFSLARFCGLCGSLFVDVSIFVGSFCLSLYYFPCFLLFSRDRAFWCVSLFVSPISVMPFVGVLFRVCLFCCSPILSCGVLLVLLSVCPSRLALDLYGIVATTL

SEQ ID NO: 961673 - protein, 60 aa, Homo sapiens
KFAAASTQRTAASVDLEKLPSDVEATQSVTQLTLTEGAIGYRSLEVISGQKAMAILRRRG

SEQ ID NO: 961674 - protein, 262 aa, Homo sapiens
VLILSVVRFLLAFASAVFARSVRSRLFLPALPALRLFSGPGASPGFARCVVCCVVVCVPPMLLFCLLLSLFASLSSFLFAGLSSSRFTVSLVVLRLSSPPVCFVAPFAPMFLPCGFPPEFSVDFSGFFPPCIGGVLYLFSGPRLIPGLYPSVYLFEGALYGFCPSCLCYGSRCRLRKSSCIRLYIGRRINFPVVSDNMYFRYVIHVLIGYLGTLMSPGGNSGHYRSGGISVGGPSAARPDLRSLSRCALCFAFSSAHALSCS

SEQ ID NO: 961675 - protein, 92 aa, Homo sapiens
IMPSKPDELTRKLRGHVSPRPRAHMQGLRKAPQVPGAELICWLDLACTSRILNFERNYHPGYMRDNVVSLECNYHYREELGASGPLVEPLYK

SEQ ID NO: 961676 - protein, 36 aa, Homo sapiens
NTPPPDHHHTTHPHHRCKRLPCLFTERAGARVTELR

SEQ ID NO: 961677 - protein, 376 aa, Homo sapiens
REHSDATFTTRSTRAGHRAAASTRFPATRYHRTGLLSALTPNAGTTHLANTGYRTCLTANMDTDRAPLALLAFLTRSTPLSRTQAFPRTTLASAMACAFYPTTHRRSAPAPQHPKALETISNSFCPRRALNAYAHPLRLELLNANCTLTAMVVTFWERTHLLHTTDNFSDHLRARRNRRPCPHLMGATGHCTLTSKQATAHTYSNNRVRSRFWTTSRFPFPAYPNLVPCLRTVHTSPTTHTQRIRTPRFCPHPNLGLGAHRIPNVEHNDNPLSNPQRPCTTGNRTPPHPRSIPHHCWPANHPQKQAAISRAARANICLYKPVKHKRGETPHRTAWPKLHPTEPAAPVYTRGAQTRVPNSGRATLHGQNTHAAPHST

SEQ ID NO: 961678 - protein, 419 aa, Homo sapiens
  misc_feature (382)..(382): Xaa can be any naturally occurring amino acid
VIVWDGDTTRQVQSNIMLPRSTVQVFNCFFRDLDALAYLGAELTCCCCGTDTTSRLSMLERLDQPIPDYSANLADSLQHLKPTPNAHCCLPASASSAHKETCTTLLSALSRYGNPHTQQDSTYAHCGTNYMCTGSQRTPSIWTPPQGTTLLSSIRLLHLYTSYNTSSISRTPPHGYQPQRHIPPTRLRATHAPRTSDIPLRATRPPHCATPWRNPKMAHGDPSRCQNRANTHPPSLQQHQELPTRNNNPEGPPNTTKSPHAHNTFTTHTPSAGPRKPTTLPQHISKPLYYIPTLTPKLPQLLPHTKLALNNMCNTRERRDTVCPFHQPHGTDQSSKKHATQAQTKRMAQRILTSQHTHDVGHSNPYTAAPDQQRNTERQWTXPAARPSTSRKTSGSPAHHRMPKANKANLVGRHHTVCK

SEQ ID NO: 961679 - protein, 77 aa, Homo sapiens
MANYQRKKGPPGQGVLYCAKLKALELEPRSVLFPKKNSPEGFPNGKKGPQNPPKKRRAEKFGFLKTKKFKTPPQGGP

SEQ ID NO: 961680 - protein, 119 aa, Homo sapiens
MSSVPILLILRFDSIYHTVTMRIQLRPYVILQCEMGIYEVHLSAEAPKKTLILSQRVDRTYMGRNEKINHFCSVVLNSKAQHCMTTLTVIAYFTVTQCATSSSGDSRCRDGMQFVAFVR

SEQ ID NO: 961681 - protein, 111 aa, Homo sapiens
MSEPNPILAEIEKFDKSILMNTYDARENSTCSSYRRIAIEQVERSRRRIVMRGARRSICTVHSTGYSLLILFSFMLYNFCKYAKRSVSGSMFELTVLSPFTIQMKLPVITS

SEQ ID NO: 961682 - protein, 137 aa, Homo sapiens
MQRCLTFSEYRRLASYYIVRSPHQEQSRRAPRNKVSPYTWYTQRATTNIAERMSDIYACPPANARTPRRHSSSPTHSELGLTWHCTTSYNAPPGQNHSTNHTDSITELITQNGQQKHMAYHTTLAKQAQHPTAFSMP

SEQ ID NO: 961683 - protein, 278 aa, Homo sapiens
TTENSRFNPTNSKTPSIYTGTIHCVANPITLASAASRLLSGVVSGNSFFLELCSNYSSHPTTFVPIFEHASTIEGGHLQVEEDEFAMVQFQNFTSATFEASVCASCVYGGTNHSCDKRPVTLWSPRGPLLWVSKHAPTSWNGKPRVAKKRALLGLPLSPRRKNAASLPALRERGAKLSERGGEHLRSRAGIRVGPSLFCRKGHLVWRGTPSVFLRQGSRGRRAGFRLESVGPLTHQLAAPYVGAAVDGQHFTLRRALPGTPGSRQGPPDEGAPGLEPD

SEQ ID NO: 961684 - protein, 56 aa, Homo sapiens
MPLNPNTSTCGDSRRHDPPTDGPLIEGGQVLPPIRGRCYPHRPHTAHPPKNHSPPN

SEQ ID NO: 961685 - protein, 111 aa, Homo sapiens
SNNNTRPVITNETRNNNTQDETRNNNTQDETSNNNDETSNNNTQDETSNNNTQDETSNNKTQDETSNNNTQDETSNNNTQDETSNNNTQDETSNNNTQDETSNNVDAAANL

SEQ ID NO: 961686 - protein, 204 aa, Homo sapiens
RRHVRHDSAGVINYPGDHQPLSGWARGVGQRASLTTSVRGDPAAAEPGKGAVPSLLEDLHFEGPVRDRPQVKPHPKKAKLEGAPGFSWRRSRYKELRSAGRGWVRPRVALTWSPKSGRTHRGVKKWGVEKDGDYQAGGQDGRGCEVLEGQGRLLGQARSLQKPAARRKWSPGRGRASGEKRTEPRRRARGRTPPAAKLKVVRPR

SEQ ID NO: 961687 - protein, 58 aa, Homo sapiens
MLSDGTAVELFESLRAHAKPSQPPEREKGRSRLLHNCVRVYHFKSFVIVDTEVDAAAN

SEQ ID NO: 961688 - protein, 153 aa, Homo sapiens
MRQPRGAALRRRHRRRAVNIFRLDSGDLVPPRRPSYILLLKILEDALLRRVLALYTQAECRDSRPQLHYSLSLLESRNPPTSTSHVAGTTGIFWEKPAICYALVLHNSYTWIFLLHLFHYYNTYYRRLSTYACSYATVYLIYLTFKATYDGNT

SEQ ID NO: 961689 - protein, 248 aa, Homo sapiens
SLPSVTNVTSIIEEVEEKRKRKKNAPPEPVPTKRNKKKRKNEKNRNKKHTKQQKTTKHNIHNEQKKTEQHKKQRQNSNDKTDRHNKHPARADTNNEQQSNTQEKRKDKKHKKQNNRNQRKKDRKKTTSKTKQTTTKKKKTNTKTQTNKRKNNTEKEKPDKHTKRKKKKRKITQKETNKKPDKRTEESQNKQQTQEKKKTHKREAKTRRERKGNNNSRQTKQQTTHNNKKKRETNKTNQKPRNHNPKPK

SEQ ID NO: 961690 - protein, 273 aa, Homo sapiens
  misc_feature (74)..(74): Xaa can be any naturally occurring amino acid
STSEATVGDLKQNFGYSPRQKESNDPEHLRSPEGDLESRTSPVTRRRSRSRDLTHVTRVRSTVPDILHAYSGAXSMHSRRRQRVIHPADIVLERRLTTLRESCRRFLDPVLHGSCFGVNWSLTRSTPCHPQVLFVNLEVVRDRSSICYSSSNQEISSGSRYTSSSTQADSRMSCFSRPSMSPTPLDRCRSPGMLEPLGSSRTPMSCPACKPAAPVMDGPGPRDPDHQRTSVPDKSCSVHDCTCLGAITLARSALRHVVVGLLRMSRSPGASEF

SEQ ID NO: 961691 - protein, 219 aa, Homo sapiens
MSILDTSILSAVDDPGLTGAYSWTPPENLADFCGCRLSPINLHISLYMVMLVCTTGDTTKTRKLSRAFAIAPILCPVSSLESLTILCLSESFRACSTAASPQRHAEPAQAEMSLDTPGGLHAWASRSWVLGVVLVLFQLLCPVGSLGTFLGLLLRDPQGGESDPCSPSTSWTTPCTGEAQQLPGLGPSCTPAHGPALTVLVASPHNGLLLEEPYGEITA

SEQ ID NO: 961692 - protein, 299 aa, Homo sapiens
GGGRPGRERAPMDAPSTGRLRTPTSRAQSRSGAPRRGISGQDKTPKLLPQHTARDPQTQLKKERHKERREGKRTNRREKGRKGGREKKTQKEEEAKAERGEREKKKKKEERGERQEEEKTEQKETSGSRSNQTDKEQTPPAHHRQKAEREKDENTKKEEKTTTKPKPDTREKPAAKGSSNKEERRTGDGKRRNGEEETTTREKTQDQQKQKEPHQAKEAGQGSARDSKTGREHERDEKKSRRRAGREKKKKRPRKEARDEKHNRKRHRRNTNDETPPRHSQHKDKEKKNKTKQDRGGRQ

SEQ ID NO: 961693 - protein, 260 aa, Homo sapiens
RRCTRGGPGALVVPGYVLNRWWSSAEVSARGIRGRWSRPCDGAAWPECRGCSRSARPGAIMEWMPRHRSCGRLVQGHEDLSPWSGDLSLLPAHSMDIIASLISSWGPHVKDGGFEDYSQSSSKLTRSQVQLATYGCNGHLLAIRRHYNGTAVRYWVLKCSKEVATVILGAIILAKLSIVPVRMRLLGEQRSCNAPTSVPCEVTEAACGSVLVRLIPVTRCTGIVSSTVSKKLLMMAGSDDCYTQPGLDCTWTCKDLVPLD

SEQ ID NO: 961694 - protein, 111 aa, Homo sapiens
VSADQAEGLCKQWLQRAWQERRLLLREPRYTLARWPPAYCLAEVGITFWVIHRVAYTEIDWKAYMAEVEGVINGTYDYTQLQGDTGPLVYPDMVIVYIFIGVKYYATQPRH

SEQ ID NO: 961695 - protein, 229 aa, Homo sapiens
MEYHIYRCRLNQYFYIRNNQPRHQINSSTAYYNFTGVSTLYPSYTSLIQYLHSSLLHHFRTVIYELIIFSSHRLPRDFTSLLAHNFSYTICFIRQLIFHVYHPNITLSFDVRRTDTGILYMWLLTTFCYVSTLLADGSEHTEISKSIMMKHQQPTPRPPSCGGAETGSYPPPITTATRAHTDSFPAGTHPSNPKRTEINAPPAYPPPTPPPPPRRPPRAPRPHTPPHIP

SEQ ID NO: 961696 - protein, 95 aa, Homo sapiens
SRASVNRTRLDTLQILLEFQADVNIEDNEGNLPLHLAAKEGHLRVVEFLVKHTASNVGHRNHKGDTACDLARLYGRNEVVSLMQANGAGGATNLQ

SEQ ID NO: 961697 - protein, 175 aa, Homo sapiens
MNWHKSKKKAFTMYCEESGRMSDGKKQLEKDFSRHEKYCQCHSVSIAPSPMDAPDFLCATKKAHLMEYPGELEVTVAVEAGLGPREAVQHVECTCGTNGVLGSDEMSLTVYLVVTNGLHMATKGSPVVGSPMKLPRVDPSRMACAKVACIGACAILLVEPSLWHALGQKGYHHRN

SEQ ID NO: 961698 - protein, 84 aa, Homo sapiens
QFDLTNQIQFDLTNQIQFDMANQIQFDLTNQIQFDLTNQIQFDLTNQIQFDLTNQIQFVLTNQIQFDMANQIQFDLAYKNNNNV

SEQ ID NO: 961699 - protein, 133 aa, Homo sapiens
RRHESARMIIIPIWLQHGDDKTSLAMVSEIVEHPGQQYRDAEQREPNDNRPSPHVSRVPSRPRGRKNRINTIISNGSSAPIRATGTVRISPSRSSLRGTMPIGRNKSAIDASITTENVTTIPIMTEGRRGREF

SEQ ID NO: 961700 - protein, 63 aa, Homo sapiens
STSDLGRLGLMMMMMSDLGPLDLMMMMMMPYLGPLGLMMIIMMPDVGPFGLMMMMMRRRGREF

SEQ ID NO: 961701 - protein, 140 aa, Homo sapiens
MGDTYSRGLEGRRVVTQTEDNRDSVCGDTQKCARETPAGRRREEESPGRSGSRGVHSGRKILQKRHTTKQTGKRRVSKGGKKPIVGTPPRDISRLLFIFIEPNYSAGLKTGPSFFSSLPKVRRNLGKSAWTDLENAERGE

SEQ ID NO: 961702 - protein, 247 aa, Homo sapiens
PGWGPARGGCLSHPRTHAAQGPVASVRVFEPKKTATALCGRTCKRGNVVFSHSGFERAAPVEIDLTRRTSYRYTACCGPSFCFLSDKRAIVLGVNTSPVSPLIKRGGWAHVCAPRYFVLNSAQVSISLTNTPCGVRLYFSPRETSFVGDMKGFLTKKGKDLQKENLPYISQVYCSTGRTPCACGISCGPFQFRFAGGLHKVFCESGRCVVPRLLLFTQENSLIPGLSAHSGDLKNLPVGFIYPPLFG

SEQ ID NO: 961703 - protein, 136 aa, Homo sapiens
MASYDEQPCDTLPLRTLNEQTTHITELLFYPGRSVDPGAVLNATAAGCTDNNTQHPGDSSLKDRMMTDFTTLHGAWPRSCCLKQHNLAVSATDPCNPTQPNRHQLLHPSKGPTHRTAFSTQRTHFLHNPQHIWMPH

SEQ ID NO: 961704 - protein, 126 aa, Homo sapiens
FFIILAGQRLFLNNKGKQNEHLSMLLQSMGAHPTVSGERNRGGGARKQGKDTYTGRGTAKHHHAASLREGQTHVDTRTRETTSTETATGRDVVKLGTRHSSSYVPTAALFCHEVPYGEGSHCSVFH

SEQ ID NO: 961705 - protein, 179 aa, Homo sapiens
MDAAWKPEASTSRMAPPAIRAPLDESCTQARHQSLSHQQRHPHLQLASSAACCPGMPGLMALDGNHMQLAWLWASACGAHNWVTAILAGFSERKEELSLRGLTSLSQVASGNPASTASSSLAFYEIKQFLECAQNQGDIKLCEGFTEAAEDSADLQTDWPNLKKFNLDDDGTISSHNVS

SEQ ID NO: 961706 - protein, 102 aa, Homo sapiens
MTRGPARVSPAYQTGLHLTFLLRVLGVENGLPISEDPDGPRKSEPGPGKQVACERYCVQDTIRRCCNIYNRHKLVPTLGEKTYYLCPSVVGYAGYKRKDRMS

SEQ ID NO: 961707 - protein, 125 aa, Homo sapiens
MVAGQGSGVPITWPYYTRALRPTDLEAHYMCRYVKRLAGRRLVYTYPTPRPSGLLSPSAHPRSVQCCEGGTIAQYFRNLCSDDTPIGAVGRRLRSWGVSKVLGAGHVTVAHPSLTRLYSHTSVRR

SEQ ID NO: 961708 - protein, 49 aa, Homo sapiens
GPRRRKGQGTCIPTLLQLQVKDTAQRKGQGTCTRTLLQLQVKGRRGREF

SEQ ID NO: 961709 - protein, 294 aa, Homo sapiens
KRTKPETTDSASVRAWVFNRTEAGGRRLRRSQCPCHLPCPALLARSALPAPRCTDLPACCLRVGLPLLAACCLPACLLLPAAACCCCCYLVLLRWLAELCVGCCAECAVPACPPCTPLSCLCRLLGPRLVAPALPRWPAVGRTCAPACHAPWRLCPGMPVASCACCSVCCARAWMCAMLLLLVRLNNPLRCWTSGAAAAIPTRAPSLPLQALVIGAICTCENAPGRRSNGASPEQVADTWLMTTQKECLVAEPRWTAPMNVLGGGVQCWPDAPQVGYDELPCSGAGPDSTAMAR

SEQ ID NO: 961710 - protein, 141 aa, Homo sapiens
ASTRTNRGNRLSQYVLQRGRTMETGLVNTCFNADDTVETGTVNTCFNEDETMETGVVNTCFNADEPWKQAWSIRASVRTNHGNRRVQYVLQCGRTMETGVVNTCFSADEPWKQARSSTQMNRGNRLSQYLLNADGRRGREF

SEQ ID NO: 961711 - protein, 111 aa, Homo sapiens
LRVWEMLARAARGTGAHFDEWALYWLLAALRAAPPLDCPEHTVVLFVPQHGGLSGGADWADSTGILEPGFEHPHPCCSHRIRILCRRLTDNMSYNAACSSRLVTLRKIVNY

SEQ ID NO: 961712 - protein, 82 aa, Homo sapiens
MMGDVAGSRTFSTVSPDTMSHAQCEPAFICEEYRVPVANLPILVFSGKCQTSSTVFGYKHNPHLWTSGPHTTLMESSTRPRI

SEQ ID NO: 961713 - protein, 225 aa, Homo sapiens
NFCVQSSQAELKEAVEEPSYKDVMENKKEEEEEEEATNTHPPDSLPSQKYQAHSAEGDSEGLSQGSGCDREKGLSCTARDGRQTQRRGRSERGRRRLRLERRLIPEEEGPTVAARTPTRALATRRSGTGESRSESSGCGLELGSLGLRRLRNPKGRENRSTSQQKRARRRRWQWIPQGPSSRGWEERRAGDRRRKRLSKELRGLQKLEQDGTSCQGLTAESGGGQ

SEQ ID NO: 961714 - protein, 116 aa, Homo sapiens
GGVHSSGVGILCGHREVKVEDYFVVKQGRVLGVDVTLRDCRYRLVGVNGPQAAADRREMVDCLTPLCATNRQLVIGGDFNIDLGIGGDSSAGAITGLMACHGLGRRGREFSSSRRP

SEQ ID NO: 961715 - protein, 188 aa, Homo sapiens
LYRSRYQPQQQTGSPERTAGQQRQPLAAPEQSGSGRKLLGSALYRGALCRSADVFLSAWEEEEEAEEEEEEEEEEEEEEEREREDVCKHQIGRNGASGQQTDTNDDTDTTRTKNDRSEDGRDDEEDGRERRTEVERETTRKKNQTKHKKTDKADTTKKHNKYEQKEMKSRDQQDNPDRYATQNNPNSN

SEQ ID NO: 961716 - protein, 244 aa, Homo sapiens
GGTGALRAGRGGGGGDGACLLPDGPGRAEPRGRCGDAWILPPPGRTALVPRGGCMSPMAMVPSAETWNLGATPIAAAACGEMGQGPRETRAGDGSTPKPESTQGQDHGHATRHHSVHTDIPAPTRGTRYEDNMDVNEEHKKSPHQNNARDAPARGSITQRNEPTGKRNAPQPSAPRYVSTHFTQSTIATPHSTSPSNTSLGQPYGMYTCEHPTGRKKTTHPNSSRPFPYQQLQPPMNPTRHKQH

SEQ ID NO: 961717 - protein, 103 aa, Homo sapiens
HSRVSSASVNWTLQPPVVSQETLEMFSDDIEKRKRSDQKKARGENAAESSRIEIAENKKQGQGYPEVHNSPSRNLQTISMPSYYYIPCIHHAFMTIDDPTRHT

SEQ ID NO: 961718 - protein, 81 aa, Homo sapiens
VIPNSNRNGIPNAYQTPKILGYIRTYAKGPNVVEPLRATTTHSTDAIKLFTKEPHKTRHIITITLYITDPDLRLITIALLL

SEQ ID NO: 961719 - protein, 115 aa, Homo sapiens
RAVRNRRGRSHLELEPGRAGALQPRGSASTLLAVQIRGAPAGDSPIQPCKKKVLLIGEETGLGKTRHVESENTSATLHLRRRHPRDLWWPPLVACETLSTVSHSIEETLDACNLV

SEQ ID NO: 961720 - protein, 168 aa, Homo sapiens
MHDDGSLNNFQEPGLKSWQVHPPAPGESTIQDTKGQTCPEQSDSSAWTCPEDTCPLPKAGVSSNGSKTERSSNVSQQDDLRCSCGTQHKIDKSHEFALDGGEDDNGLAGLACTSEPHDETRVAASYDLETDIHVANFQIWKAFSGLIQQKLSSGHRERAENPPQCGRH

SEQ ID NO: 961721 - protein, 107 aa, Homo sapiens
  misc_feature (33)..(33): Xaa can be any naturally occurring amino acid
MDEEMVLGLEVVAVDTITIATSESLIEQVAMMXALAISEGTVFAVRAGTSGIEQVTVTMVSLEDIEILEHAGELVIALPEGQLEVQMVIVQHEVCGVLAGQGQGRGL

SEQ ID NO: 961722 - protein, 119 aa, Homo sapiens
MPAKILTADNQTYMSCPGQNCLPSVQGLRSACDPMLQWLDEDGTTVLQDEQHLPPMPMKTLGYYETSRTKDTGRRTTAWADQMSKTQVTIMDNLKVKRCKLRSHQGPRKATNREERFPG

SEQ ID NO: 961723 - protein, 169 aa, Homo sapiens
MGSSRMMEPWRLTHDYHHCGTNQQHYDILWYTNPSRDLGPQFMAQTMILRTAHELWAMDLSSIILHDSFQSASRPPWCHAHIPRAYHASDQTSMQHELRDSVVSHGTVKSRNLQSWPHTTGKWTQRYSKGGQPMGTGCPEVHLPDGDKHAQYSSLGLMKARNTTKEPQE

SEQ ID NO: 961724 - protein, 74 aa, Homo sapiens
YDVIKATHATDDKDSYHPLSLIGHVDSGKSTTTGHLIYKCEWHSTNRTIEKFEKEAAEHGKGLLTRYAMGSWIN

SEQ ID NO: 961725 - protein, 146 aa, Homo sapiens
  misc_feature (27)..(27): Xaa can be any naturally occurring amino acid
ALPVTKKNDDITSLASTGERVQCMQVXPPLGLKKFETLSYFPPLTTEQLLAEVNYLLVKGWIPCLEFEVKDGFVYREHNKSPGYYDGRYWTMWKLPMFGCTDPAQVVNEVEEVKKAYPDAFVRIIGFDNKRQVQCISFIAYKPSGY

SEQ ID NO: 961726 - protein, 289 aa, Homo sapiens
  misc_feature (49)..(49): Xaa can be any naturally occurring amino acid
MFILSTATYAETVRWQDTMPRAVICRHWNPQIIDEVRTWHLPPDIIPPXSSIITGKEEMLPITMPEGTTPIGKEIIRPFVLRTEFASWHDQMHQDHSEDFIEFSTDLWMEGTGSGVHHPCSWNVSQIDYGKKYKTESSPIYHRHHQVFHSCRYETHTTSILTNHTNLEDTLISAFMVDNEAIYEHLSVRKLAYRDAQTTPNLNRLYYASIESSITWIPLNDMDGALNVGPEQTYQSKLSAIHTIHYPPGQFALSISVQKATKNSAEDKSTKVVEQPNKGIDSLETGGLT

SEQ ID NO: 961727 - protein, 113 aa, Homo sapiens
IYVVDNGQSVHFQTIFARCSNDTVGMTLKKLEYFHAGLGVVLGEDKKQHNNTYRDETVRLIAYYLGKRTKTSMDKLKDKETQTRSYLQRNMNAATDNPLHMAASNMLTIPITG

SEQ ID NO: 961728 - protein, 226 aa, Homo sapiens
MAPIKVGDAIPKTDVQVFDRGAREQGRTWQTSCSRAKKGDASLEIPGAFTPGMFQDTPCQGLLLAAEHESSEQDQREDPRDEMDLIMDDEVNALCDMAEMEDETPQGQRTATDSGILELNPNMEEHIGESDEPEDFITQIDYDWVSTLQGEIERSSGAFSQGGYHAWNIVQGPKMWKQDGTELHLAGTRTPDYYSNNLGPGTNIKFFNHTFSLTTVLRPGDEVGQF

SEQ ID NO: 961729 - protein, 277 aa, Homo sapiens
MVRKERIQGGREKMVKPQTEPGPRPIPEPMQESKAEGNNQAPGEEEEEEEEATNTHPHRPDLPSQKIPRPTEPRGTVMVCLSQGLVDREKGLRCRARGGSAKREEERGGGGGELKTAEEAVTRRKEGPTCEMLNQPPETLSIQGRSRQRREIGRRLMAVGMELGSTGGLRRLRDPRQGRENKGALPAERGGGQEMADGPQKGPFLPGAGNEAPEPGTLGEQEADSTQGNGRTDPNSWITEWTMMGPQEAACAEKRCKGRRDGGTTDEHKAYIGQSKA

SEQ ID NO: 961730 - protein, 273 aa, Homo sapiens
LRAIEKLLASVEERNGTSQGLAVGRRPPQECCSPELGRRLAELERRLDVSGRLSDSAEWAARHRAGRSQRGREATPPELHQIGPPACLAWRDQHSTPPWALREEQEESWPGAPEGELKPLACTADRGRLEQLKEELLANVSGEHREGRLDLLEEQVAGAMQSMQGSLSALGPLGSRNSSSQRDPQMPWSAEVLDSEGQLVGWWGSGLSHGAKQRGRPGKAHAAVAFPAGWWGRLQDPCGLPTLRRCESTLPDDLLAPVGHWGRDAWDRMGWRQ

SEQ ID NO: 961731 - protein, 282 aa, Homo sapiens
ASQLDCRSVDVATGWLGQGTGELHVEWHIWQVLRQDQHTGVFCHHEMMASPSEGSVWEAMAFASYYRSGQSCGKSLMLNRSGTQMVHCPPRHCIHIYQRTHAKHFGWNTYVDGRTRTWRHCDQVFWTETFSRMKHKPTAVVAKTFKGRGTHKYVRMQTSWTCKANAEQKEQMHIIKLIAETKYKTRQESGAQEPRIEDSPESQTIQRTVKGYPFSHLGFHRRLVHKNRILRNNMRSWIQGSAEIREHNRSRETDMVTRELYTMKYPEEYPAPTQGLGHNVTF

SEQ ID NO: 961732 - protein, 63 aa, Homo sapiens
MDREQRPGLYWRVTPSRLIPQTVRKRRRKGPQPSNHRGRPLYWVRDKNAKPNNWHPYVAAHPY

SEQ ID NO: 961733 - protein, 217 aa, Homo sapiens
LPRCFRIDRRALRQPTDTAARTDGLPADRTHSMTIEDVQISHPFYGKPRGSGHDSHMAALKNGTPLEKLDLGGHHRGELTKPDSGRDSSYHRSCIARLKSAPDLQIFLPSSWRRSREISIMVGVQGTQTVPPTDHCEVSWGWHSCLTSTDLITISSGYCSSPGYRSNGERSGSQMRATGQPPSTDGRDGQPFLTMVAYMRAPEDLYNGTGCRHAAHN

SEQ ID NO: 961734 - protein, 250 aa, Homo sapiens
EKKKRLGRGPGYSARVHAGINGLWLHNKLRATDELWAPTSIADPDYTDAVIDNIRLLTFHGPLVGSEAQVATRDAAPPATARMDEMKGALMEIIQLASLDSRPLGAHGRRHLEVLSGTQARFNLAAGEQQNPNVPGYFGRTLAAQQVGECASVCHAATGSARYLQQKTALTNPRRDTLTPPVKHFQLKRKPKSATHAGGDCCRSPQETDQQLKRSSRGDLPRQGPGDAAENGHHNPLKGIRRRRLTSPGA

SEQ ID NO: 961735 - protein, 108 aa, Homo sapiens
MGAFVLDRSGLDAHGRRLLPPAEGLTRGKGQADDAGLPWAPALSGLLLAKTYECAPGELVVPKGFWIESSADLSGDSELRDKAATAFSLTAVTTIPGSDTVWTTSIPD

SEQ ID NO: 961736 - protein, 106 aa, Homo sapiens
VCISVHEGWILHIIDYGLIELSPNSYLPADDVVSIIEEVEEKRKRKKNAPPEPVPHKMKEKEKKRKKKEKKAKTTEQKKRDSTDEKEKNLNKKDRRTAKQQNNITT

SEQ ID NO: 961737 - protein, 163 aa, Homo sapiens
MTRSRGVVQLKPELTIGLLDRATERPNNSSTLHITIILGLYCDPRYKPSAATSSLPFTIVQTALYGLQHSEVATGCTRNFTYISWLNFPHYPAVTRLNYYFTDPSNASTLRPKAPTEYCHFVHVDTTYDCMSPTMCGLKALTPPEYQNQRGAKHAKHRTHTKD

SEQ ID NO: 961738 - protein, 163 aa, Homo sapiens
MAPPLPPALLSDLWLWSPCPCLHTPSTPPSRPPHKGEERAVCSSMHISHHNARDGASRRMGSEKAPGAHQTESPAFQLPKACTQRRMPARHTRASEHAPVGHWRRLPHGTWEKPWPWTRCLRHRTQTSLRVLILPPHTPPLTDIKAKSTLASRSSHYSNTHIT

SEQ ID NO: 961739 - protein, 72 aa, Homo sapiens
GSEFLKRLGGFGGLFSEFRKAAQGTNKKKKDPWKSSAKKEQRPEVTQISRGPEAQKKKRWLQEAKFAGQTLK

SEQ ID NO: 961740 - protein, 219 aa, Homo sapiens
NPLFKRQAPRKVENQFLLNLPQERDVIYVLNVAKPLANSSNLTKHRRTHTGEKPYVCTKCGKAFSHSSNLTLHYRTHLAGPGPMTANVSKTLLAHARSAPFLNTHARNCTHASSAPLLSCTRLAGTRPFSRRRKRHALTPLTYRDPQLGEKPYSAVTNCWEELLSSRMRASAPTRDSTPERSHYNAAQELVATAFNHSSNFNKTPQNPHRGNKPYWLSL

SEQ ID NO: 961741 - protein, 223 aa, Homo sapiens
RPGLAVLGADERIFSTDAQLAHGEELRFGAIHVRCLLTPGHTAGHMSYFLMGGLIARTHPDPCSRADAAVRWPGLRLVPGRAAHQQMYQSLARDMGTADPRDRCTCGPRDTRISNLELCPESGAQCNDHVRAKHVTGLREEPVRKFTGKAVPADVLEALCKERATLEQAGEAAEAQRREDLTCADSEGLLKCRHHTTEPPKPHRLGTASSSWTRQLDHMRATL

SEQ ID NO: 961742 - protein, 74 aa, Homo sapiens
PLSDSRRCGCCKGSSLRHTAVAMVKLSKEAKQKLQQLFKGSQFAIRWGFTPFCCDYTWDLRGVQTSRKCLNQLF

SEQ ID NO: 961743 - protein, 120 aa, Homo sapiens
MHPKAPCLPRPRDLSKPPPPALPHFSIKIGQPIDRTSRSNHRTACSPRTVSTTREPQTRDHDPLNPAHDSKPLETSYRHNPDTEFITQCIPLHPFNLPFSNPHALHFCAFSNPNISDPTL

SEQ ID NO: 961744 - protein, 280 aa, Homo sapiens
LQECSSFGGNWKMNGRKHSLGELIGTLNAAEVPADTEVVCCSPYLPIIELRRRSEPLRSQAIACEAAAKILLLKCDYTGCLLHGGSIMSLRHASNASAGSPRGVRPRASLSSRTALFFIAGSLEVRHVFVARNMWVPMRPCARRDLETLTLHLTLRGDECLRLKTGNAWTITCMKGFVSYGAKTNGHRMTEREMDLVAYGSIAGPIAVLLCGQLVHGKTATAQQAQEVTEKLRVMAEVQRLCCWWLMSTVSFIGGSVNWGNLEELARQTDVGWFPVVGAT

SEQ ID NO: 961745 - protein, 238 aa, Homo sapiens
  misc_feature (232)..(232): Xaa can be any naturally occurring amino acid
AVTVFFDDDSRPLLNPWWGGAQSEMGRQWNVLKVCPVMSVGVSRLGEGRVEAFGHTAGAQFTRPRWRAAGPCAGTLPRLASHSRTLAPRPQGRSSTTSTQVQIDLGANLNFRRDGGNRARWRLLNSSQKKRKDRKASETKRQKDGKKKKGRWWERRSFPLEEPQLRGMMWWLVDQPIRRRGWPVKWIPRCGVGAAGAVSRWCPRCRADRSGSPSLTFKRQILTQVGVVVVGXSSHGSL

SEQ ID NO: 961746 - protein, 237 aa, Homo sapiens
MPSKGPLQSVQVFGRKKTATACDRTAIRGNGLIKVNGRPLGDDSSRARYSTICCERQFCFSARSDLLGVMTSVSVLKGGGPRGPYLCYPSVHLPKPWWTITRNSVDEASKKEINSTSSSSYDRTLVGSLTLVAASPKSLEALCARSSLPEILPISPSCTHNLTCHNKQSWRGIVTSFNLMRYQRGDAGIITWERRDDKRASRCPWVQGLPKPPVVSTWANRRATEVTGNTHALCSVN

SEQ ID NO: 961747 - protein, 129 aa, Homo sapiens
MSGLVCTSSPYFNVYAKSTEMAYYQLELIGITLWLDLYLELQCLEKTLIRGISIPMSKRTRVIRGMYCAMLMHMYMICPCKPYAHSILRNCPGAFNHAFIYQDTLNGMMKVAQFHEKCRYPVGHSEGTL

SEQ ID NO: 961748 - protein, 233 aa, Homo sapiens
MYYYSSLLQFTHLSYILVQDVVDRLDRLLPPDCIYIIRKRIKVSEGHTHRAYEEEDKLKWGAISCHARRSAPMRSVSLVSRVGLTFFLGSSLVYQRSVCDVSRIYKAQVVPLTLEVSREGKRKSQDTTTGKERTQAHEAYGNQAEKKRGRRNLTNTQRSSQTHGLHGLSPNKDWLFLMRCLPFSIVALECTRTQGQQQARCHRTPGHRRWTQEGLVIPPECEAQRIGRFIFTQ

SEQ ID NO: 961749 - protein, 116 aa, Homo sapiens
ERADRGGGTTLTPSSAAKHVAPYVRLHHPQGNKSEVAQKLKEVDDVLGGASCLGECGLYCKVCVPNANILLASFMQLQTRLCPMSLMTTFYKCCNAQVWTPTLAGIKGSMDGASLP

SEQ ID NO: 961750 - protein, 247 aa, Homo sapiens
RRPGTGYSGEYNRGGDEWSALQQELSCPWISVPIHGTHITCKRTWDPLHLLDSSVLTLHQIFAALSTGAGERLHLTDPCPCIMFVLVSCRNENCHVISSARRHSKLVPMVSGVMHPILLPESTTWDELTSGPWLGATVLGVATECHGHYHTSWTSSLTMYILTPNGHHTVADRPQSKFTVSKTLSVRRTVSKRYECANFGEQGITVGCWDLYRHDIDCQWIDITECEAKEIYILQVVINPNFEVAET

SEQ ID NO: 961751 - protein, 85 aa, Homo sapiens
DEDDDLDTKKQKTDEDDKHSKKGKVNTNKKKGRRDLFTLHFPSQNLNVVTFELKRPALPTVGSATQQNDTRISTTLTQTHENCAN

SEQ ID NO: 961752 - protein, 312 aa, Homo sapiens
FWCPGSPERRIAEGAPGAGLQRSASSSCAGKGPPSQCQRSLRLARIIPDPLPESAEIPLILILRSPSPPPWLGELPQPPSEDSRSTESSTPNPKRPHSLHGVPHADSRGPDRRSYQMPVLRIDVSSGIPEKRLAPVLMRQSTEVHHYGVVDVLTRTLNGWQNKACHRKGPRRQEKPSAEPVDPSPKGPCLSLGTGELCTCALHSMRLMARPTGTGPGPTGGQGATAGSERTWSGACREGERGRSRRDRYVRSPGTPAGRPIGARRAPVAAGTSSQTLAESESRARLRTRFDLGREHTGSEDRPNTCRDATGR

SEQ ID NO: 961753 - protein, 138 aa, Homo sapiens
MTPAQQIAKGLCGYIEVTETIYKRLLDYSLHKEEDRQPIDLAKAMSETFEHITQTWYTKGVKVGDGHSSMKLRNETICSRWYTFKNSVDVPGGTELDEGTRRHGYRNHQEEHLADFTWTTSYYWNRPIAVRTLVWDKM

SEQ ID NO: 961754 - protein, 150 aa, Homo sapiens
WLGGGKGRLQTGGLRYVAGGAVGAALEEGATLLEKKENVVGLEIGEAPKEPLLWEGRLAFHIVVVELWRLGLDRPVHFSLCCLSPVGVFFSLFSFSEEKGPRKGPLPGPRRLGLPHFGKAARKPGLLGKAGRVAFPPPLRFGPVGGPGVC

SEQ ID NO: 961755 - protein, 91 aa, Homo sapiens
MLIKAKSSNDTFPTAMHIAAAIEVHEVLLPGLQKLHDALDAKSKEFAQIITDWDVLILKGCCSTYSWAEFSGYVQQVKFAMTRIKAAMPKS

SEQ ID NO: 961756 - protein, 73 aa, Homo sapiens
VEPRAKGVLLETLCPPGRGALMRAPHSSETTLCKPRGPKGTSVLQRPSLHEMRKIHSHSTKGTSAATSMVGSL

SEQ ID NO: 961757 - protein, 67 aa, Homo sapiens
VWGCQLAIQIGGKPGNLRGHVTHGHGRLGKHRKHPGRPGKCVGGSCIHHRIQFRQITTQATLGKVVV

SEQ ID NO: 961758 - protein, 132 aa, Homo sapiens
MPARESTRYMVAALGWATAELIMSRCITPIGSEPGAYEFDWKYIQMSIDSNISLVHYIVASAQVWIDKHCYDLYHSFRQPVLLLMFLSVYQAFVMETFVHLCSLGTWPLYWPAQCNGAVASALAFFPCHASS

SEQ ID NO: 961759 - protein, 41 aa, Homo sapiens
MGHMPSDTVVTEIEVCTLLPNTDSVALSQSQQLCQGPSDQS

SEQ ID NO: 961760 - protein, 275 aa, Homo sapiens
QERGYMHAVSCLRNQLTCGDPMAGSGGAPVLRVGHDHGCHQPALTATRPSLDPGPYRVKFLLMDTRGLTQGLRPSGYRPAYTTPPREDPRIPSDTWPGTAKWTDDRHIPTILLLLWPASYSWPILAALYHALLQTCGGPEGGPGDRLTDRLLHGTSDYMTHPHPTQTRTDHTDRMGAAKTLEHDTPHHTGLRTHRHETIICTGARRKTDSNREDKQPWRISPKTEPTKGTAARDAATHGPTGHDARTKTETDKEQDNQQKHRHPKTARRQASTSN

SEQ ID NO: 961761 - protein, 183 aa, Homo sapiens
NISAKYQAGVNQAEAMAAGNCTRILNTGGPYKALIAAQYSEGSESACSPQHPTYHIENNTNADPVQFHPQNFLPGQVPAFEGDDGFCVFESNAIAYYVSNEELREKYSRGSKPSVVQWVSYADYRYSSPQPVPGCYPTLGIMHHNKQATENAKEEVEANSGAAGCYTMKTEDYNLGGRTSDIG

SEQ ID NO: 961762 - protein, 383 aa, Homo sapiens
MVILPDSVRNYMTKFLRRQVDAAEGLSEGGGPHGEEALDGGTIRCTGAGPVSTTTETVTPQTITCGTHHRDPPGEGHSEQDAQMDGLRRGDNSWRMVTDIEEHDHRSPGHCTGKDARRIRPKIGKKINLQSRYQTEIQHITGQQTGARDIIDNIHMETGTTIRQHEMRCNRQPGITRYPNKTNTVERIHRLQTETTELENDIRESLETNQEQIRNNLDIDNVSNGPDNTKGKTEGEHQNNKVANSPPGEGQASKGYKRQTGKKRKETQEQNNHRHPQISPITYYEIYADGSTTIKARATPHALELEDSNDGNIGGNNRRANTHGQNTHTIEQATHEHEAKERDQFPRRYYTTHIPEMKNHTIGRFTHTTIGGHNDDQRREPHI

SEQ ID NO: 961763 - protein, 77 aa, Homo sapiens
KRDGAACARDAKVLAKHKHKNGFQKSSVSSWLKDAEEMEMVIPVDVMRRAGIKVTVAGLGCEKTSVQVVACDVGHLS

SEQ ID NO: 961764 - protein, 490 aa, Homo sapiens
GRLAATANTYGTRSRVDTRSMGHPDPALPPSGGELLGLRGQRLHCQDAGVPRTTCPERSSSDTEEADGGLARTVCQQLHGMLSHHRRAHTPAGEPRAGTWSWMRRTRLTDGTENPHLDDSTVDGHMHGTLTLNDPDMNTYFDTDELCVDHTKQDMTRETGKHTVELHMNTQGHAPWTYRTGRPDRRCRPCGDGPVPGDRGIRAGPHGPHKGPTEDHRFKGRSPQGTGAESRIRTETGPSNKWIKGTVCGLTHACQQTRASWEDGKKFDSSWPVQEASLGRIPVEDQFLLRMGQPPERTGSKFPRSSFTRTAPLRGPESTWQLTRGSRMAIGNREHPDSYHLGTRYYNLNPSWNSFLLVANQDPYRLGSTPGPSQSTARNRQLRPRAYRTHLLQAAHGHQSSVRVPTQGKGTAGSGEEAQTPAELGRHREEDSTRGMKRTTERCTGTTNGKHNHNEKTGDDGTQGFTRRDVVQQGTDHTTGYQQQGRRGTP

SEQ ID NO: 961765 - protein, 134 aa, Homo sapiens
MTVGKSSKMLQHTDLPGLTVHPAGPDRTLPWTPFNGFDEQRTLNFDPLMTCDLTFRTDSQNHNDTYHKATARHRGHDDTRTILRDPWMTEVNERGDEHSWIHQRDPIRKGTTQLAKRLTWDNRPSEIRIFDVEA

SEQ ID NO: 961766 - protein, 131 aa, Homo sapiens
MGCGRGRQPAYESCWGRYVAGAARVKSGWVDPRSRSRWAPRAPPPGVAAAGLSKRRGPVGSYASQGERLRGSRGNTVRIHDYGRTGSFQEKVVEDEVADRARCGVLVNVAGKRGMRGRVGVGCCKGCCATM

SEQ ID NO: 961767 - protein, 214 aa, Homo sapiens
TNKHERVRKNEYGCVYFSYEAGGCPHTGWISRHDDSASCLVSSPSSSPSSLLFPDHLLLSRPCASFPLPICPPSLPIMPIINITPYTSHTQPKYTHHKPTTSQTTHTHPHTQKHNTDIHTLKKQKKQPEKKTTKHTTQILPDYIQLPIPPPPHAIPYKTNCKQTRPYTIHITSNTQTNMTNNHSRSQQTITYRSKTTDNNNNNHNKPSQHNAMK

SEQ ID NO: 961768 - protein, 289 aa, Homo sapiens
MKQCVSEHPDVPLLREPLRRTTLMQGASGPGSVTCGPTSTRAVSRQGLLQTFHLALSGSSDSMSVQPWRNILGPSDTVVFREKKPNVSVTGTAFQDAAPNSSTPPSCFTMEYVDVVLKSEIHDAMHAGLESTVLMITLWLYAPPAVHASGMALVILLSRTCSWLSMASSGSLWQEIPVVRNSTVLVSMTHEDQNACKRVKFELIVSEASYLRSLNIACGSFPTFNFAPGAHVSTRSTSGSSLGYRLCETVSAQVPFRNLGRGLCCTNIFSFRVCDVVLVRGPGFRGATA

SEQ ID NO: 961769 - protein, 32 aa, Homo sapiens
MRTTGFGSSGEPPTFNVALPKPLGGKTRNQER

SEQ ID NO: 961770 - protein, 179 aa, Homo sapiens
EQSLAQSHPSETSRTLGRGLSYRHWKELRHGRRCGKSHTPRELEDIERRPANGSGPTHTGIQRILIESSRQAQSRYRGSKRRHVSPIIVQLPERDPFRLGRHDISSDWRREHTRTLRKSYSAEQPSNYSRYVPRGSAPTGKTGGHRSPGKTLKRSTAQQTLPQEPAKETTSTKAHKGRT

SEQ ID NO: 961771 - protein, 107 aa, Homo sapiens
MCVVSSRAVGRPVCLTRRRGTEMFCDPPEVQSVERSVLPCARERTPPPWCLCVVPTHYVCDDTARVRAPQKCVARLPVSTSLSLTRGKTPAYIQTHQIVGVAISPMW

SEQ ID NO: 961772 - protein, 107 aa, Homo sapiens
MGTRARERKLVASTCSSFLHIYFPFFNLFLSLVHSLTHFSLALGLRSSLPWSGLSCPHQKATRKRPSLADAVPAFSLILLPIRAFIRHSFPFLALHLFFSKDIYSSY

SEQ ID NO: 961773 - protein, 195 aa, Homo sapiens
MPCVFAILGQRCTSDPEWRTWTAGRTPFNTPHLQLVHDGLGDLRQQTPQRTPRDQPRAHLASHGQNAAEEEYKYRRILAPDARYYSNIVDELLGSGSYYSFVVIDNNNIACGYPPWNLGRNSRYAKVRPPKTDTTGAIMYNSEYHRDCTTFEEDRALRSSRSGFSAYTGTESIRTFITSETYITNDNAAPHDKDI

SEQ ID NO: 961774 - protein, 229 aa, Homo sapiens
IPPAWFQVCAVRWVTASARWMSIPRELMLGGTNTQDACTTRCEDSHAGRTQSCMDRNARLTQRLVTSSDETYYALTWNPETDSTLPHTDVKSLATEYTLLQGRPHKMTDPGKTGRIKYDDYMNRADRQTDNEDNSHIRALQMEDIHGHKRENTTNDQTLAENNTGHEQADPEDPQKHQRRRYETPVDMTTHTHIVDVKQETTDPDTTHAHTTEHATRMHCPMGNPANEG

SEQ ID NO: 961775 - protein, 115 aa, Homo sapiens
MPRHTDQNVYIPGSNATHDHTQTWTSGDGKAHRQSGQWQQEEVGQEGEEVTWRPGQEPQGGPLPNQPSFSLPAPRTSEFQGLNPQEILGRGTKGQCIPHLGKPRQAKLPQVPENT

SEQ ID NO: 961776 - protein, 82 aa, Homo sapiens
RLVRAGVIGRGPILGEASGSKDQSASRDPVDWKRVRLHTGVADYRSQVIWASRHGHDPSVGSSGCGCWLQDTQGGERMGDKC

SEQ ID NO: 961777 - protein, 443 aa, Homo sapiens
LIAGTGSSLPYQGTRPKPDCHCPYLGPTAPQKAACCDSLGNIFAKPSQEPALAKNGALRIPALRWALDCRQRNRPPLPTTEPANLGRARLDQPTHSPYPSGASHAVRPGCAPYYTQPLHALLQDCCGTARALAPPKRHPHATLGTPPSLRTNQRNPSPANNPTAALHSLSCCAPAPGPHLKLRAHARARSHPLHGGPRGATRHALATSAPNTCPLPPRATLAPRKRPFPRRRNTCTPLALSTHYPPLHGHYPLLMSPHHNTPNKNTPRLANLPLVAHPYKTLVTPTNLARKLAAHWTPVGARRKLYRTADRQPPPQSPPWADRHPPAFCPPDTTFTPPTPPYTITRAHLPQQPHEAHPNTTPDMVRHIKTQSITTPTTRRRPPPKTHPHSRHFAPPTTPTRPPPTTHRHNPCRRAPPLALRPTPNHTSGHPHSPPPTPGTAPL

SEQ ID NO: 961778 - protein, 166 aa, Homo sapiens
SCMTKRKFTSTIVLLVDPEQDRKKSIEERHYAPTDLEADIEWVSRPVTRQGTRETVTEKLGSINQGLDRLRRVSHRGTDEHWSAEFEWSPRVIDHVRDLGASAGQNSTGTKGSLGGAFRGRELKIIVRSRESPRKCSYHVTEKAVVGELATRKKAERHAESRWATA

SEQ ID NO: 961779 - protein, 78 aa, Homo sapiens
GLPDHPGDDCASYLASTYTAYDQLKAFLLCVNPDSDSYAPMVAGALAAWAPRPVISPLELMRTNLELTILDPDRSPVQ

SEQ ID NO: 961780 - protein, 488 aa, Homo sapiens
TLVAGGCGDPAAAGYIALEWARAAQCSGVVGRMADAAKLSCPRLCVFPDLLRVPERCCHLRPGVSLTAQPNITLSSCTASFHKHLPHLAKTKIITQSITRRASQHASPANETHTKPYHSRYANEAITPAHQTKDDSQTPRQKFSPAATTPYSGSPTLIDRLHPPQATLPDATTPLFTRLRLPGGHAAHPSHSAYLRPRAAPHLLPPPEGKPCFDRPPLSPGGRFLHSPPIHSLATTPPRNPMPPAPPAPFLRTFLSHLRPLRTIPNLPHTVATTARALQPPSGKLSNPAANHLNCATNGLLHAALAIRVHRAAQPGEPTGPYPTLVSSRIWPTLTLVLHRRLSERHNVAPKTRIINVNGEPPIKLDSTQTATPNAVVLVETTSMCPSNTAEPTALKPPIICATVHGGHSARARRREHNPQNPRNKVRQPTQTPRVIQSKDAPSNRVGTYPDRQITPHYEKDSKQKTDNNAEKKTNTNTQQKKRHSEKN

SEQ ID NO: 961781 - protein, 69 aa, Homo sapiens
SRASGSMLEVTIIYQYFEIFVEEQSEVGSMEGPALTRDPSPGQVGGSCSRSASEGELSSWRVLLRHMDF

SEQ ID NO: 961782 - protein, 236 aa, Homo sapiens
LRWPAVACLVPFLLFRLCCSLWSSGASERQVLRRGGLLGADRGSRRIELRGFQGWQQLLLRCCAVQEGFRFQHNMNEYKRQLGTLRLANPGEQTAGACEPLTLANRPAKKQQGQQETDKKGREGGKQRARNDKERTDHTTTNGGERAANPKQRTTRTRQNKRSNGRRERGKARHKEREQINEQIQRTEKDDQTVVRKSTKQQQQARNTRPGRTKRERNTRKKGKGQKGTDNENTKR

SEQ ID NO: 961783 - protein, 113 aa, Homo sapiens
VEKRGKAEVGLGGVCEGEEEESGGDRESAMSGGVPVRGTVLPHVRWLFLEGKARGGLGCWLSMGSVVVVFGAVRWVAGGTARRALRVQGPGVVGGRRFARVVTARYWTTLGSV

SEQ ID NO: 961784 - protein, 116 aa, Homo sapiens
MICACASCDVHELCADVVVPWPALREELKKVATLPCPQNLPSPLQSCALFPAMTELCVCDVCSLCLPCPGLRGKMAVTWPEVQHQSDSCLLQTSQLSLECEPAVLTMYIARVYRDE

SEQ ID NO: 961785 - protein, 212 aa, Homo sapiens
GWRSQVSALETDGELRRKTRGGDLAAVEGSLEPPLWEGISSGSARASALVAEPQGCPSPQTPPSKADPYELYSLNSINPATLMAHRAPWLPLPHFAPADSVHCWHAATRVQHTTLQPYSPRSRLYTPQGRKGSAYTHAAPTPMATCVSLLHHTRTLRYEHHPSPFSWITLHKLTVSPVRAECPLPCWLPCPYCCRAVAGCRSAVGVGHSSCP

SEQ ID NO: 961786 - protein, 272 aa, Homo sapiens
MGNTNYIGEKDSGEKEVYQLVPKPPSRLYGVWPSLQSPGQEEARGHCAVVKQWAVVGRMCLGVRAECEGKFSVTRPGCLGPWAPCLGRGSGFLTGSRGPWVEICLHSRDPVLAHNVARGLVQQYSVPRLGGHNRSLLYVALSPYRLYNNTWAQQPGAVSMWISQLCGTRDISLCAWQHSGGSLCVHSNGAAVGVNPWGTHLLTGTVWISPRCVMRGPYVGVYLYTTLCCSPQSRRVAHNLLTFILPTWVVYHLRPMCPSAPVGHTTPNFTKP

SEQ ID NO: 961787 - protein, 137 aa, Homo sapiens
ALPPARIAGLVWTARLQAEGRSGGGWARVSPGIVPGGTVSARPTWAASEGVTVYKPSASHPSSLLIFSAASSIDPKAPSPESSTFDRRVGSYNVHDQTVGRRIVREMHVHAPFRHVCFLAIHASHVGTKPRETYLFA

SEQ ID NO: 961788 - protein, 149 aa, Homo sapiens
MSIDLKDRIPRTLELNLFKYVANNTNEEAGDGTTTATVAGTLYAKEGFEKISTRCYFQWKFRRGVMLAVDAVHCCSLKSSLKPVTTPEEMVTRLLTIVCHIRRTTEHSAMIISDVNEPSSDERVSSTVKDGHNLDDELEIIEGMKLIEA

SEQ ID NO: 961789 - protein, 183 aa, Homo sapiens
MVMVLLVIMPLSSCSSPLYRISISCRCHRIQNGAEAQKLVSSVSLISTEVAPESSFGTCQLQFVPLLHVHYPREGNDPISEWRALGILMLFSGLDETQLLTFSEDYGNSCLSDVLTDSYGAIKYSDFTSTKLVPEQMRNSVCLWLPSGYTILARGCYKSDLLGERQEPFIANMPYNRVCDLGS

SEQ ID NO: 961790 - protein, 109 aa, Homo sapiens
RYLNYLLTNKAYKLISSWTHPRCGHGGQGSWCAGLGHERPQKVTQPSYGPESFFSRSQVFTELVCPDHGSRTSAVISHPLLSSSCLCVLKNPRLVGSLVDTWRVDSRAL

SEQ ID NO: 961791 - protein, 122 aa, Homo sapiens
MADKQFSPLLPRYVEPETAVTGTESQRQEYIIQERMLELNRGKVIQGNTKSGEGGGEAASSGWVRLGIQEVTISPNIKGRGEYGVGARPYEGSVEVIIVHTQIDGGKTWEIVRNKRHKYKRD

SEQ ID NO: 961792 - protein, 241 aa, Homo sapiens
MRTRSKTLRRACKRSVQWVNCSRSASLSSAVSSLVQLAHVGMTSNLHAPCPRLRLPLCACCPAEPGVRTELHLTVPVQAALFISTPEARAGSERAGCGRVPLSSRGTGATGWIPGERGDERLEPWVWGARGTVGGVLGGRGDPCQSPGRREDGGGRGTWNPGDAETSAWFLTIRRSRLAPARSVGGELLLEVRGFAGISRLHSGGSGDERWWCLVGTEADLLTVTIPGSPPGAVLGVYPVE

SEQ ID NO: 961793 - protein, 203 aa, Homo sapiens
MQLSEPHGVSDANKLQEECADASEWFTLVNKKNALILECRTSCMLLMSVMQDYGAEVFDAAEPLSCRAMLAIEDWQKTSCSAAPESSSYWSELVSLGEPAADELVLGPGPQVAVIALEDVTSCLELLAGTVSADKLSRVVEPGGSAACLADGRGPGVPITSLRPGDTSSTPVAMLHAVRILCRPGGTNAAFFAMGPAGSLSPK

SEQ ID NO: 961794 - protein, 32 aa, Homo sapiens
  misc_feature (29)..(29): Xaa can be any naturally occurring amino acid
APAAAMPDMLGHRMCTREPPRPHAWCSPXPNL

SEQ ID NO: 961795 - protein, 122 aa, Homo sapiens
  misc_feature (111)..(111): Xaa can be any naturally occurring amino acid
  misc_feature (119)..(119): Xaa can be any naturally occurring amino acid
VPVFTEEFLDQDKAREAELGRVCGRVNGGLRGAERGTAEAHAERVSSAARAVWSRSWRWRSGGRVAAESKAASQCRMRPRAARPCTRISAYLAWPGCRGARGADKRRAACXGGSSHVGXPCR

SEQ ID NO: 961796 - protein, 110 aa, Homo sapiens
TARYEAGFALPLSHSVLSPLRRRVSSGRLCMWPEDIAALVIANGSGMCNAGFAADDAPRARVSFHRSWRPETTRASWWVCGQQGTSYVGRRGLQNQAGCVDPDPSNATST

SEQ ID NO: 961797 - protein, 218 aa, Homo sapiens
  misc_feature (79)..(79): Xaa can be any naturally occurring amino acid
  misc_feature (169)..(169): Xaa can be any naturally occurring amino acid
GPGNWFIKTQSKGQGKTIRIWYFWGGGGGDWEGVGLRVETAQKRKASFYPPLTSFSRGPTEGSKPTQLLFSAWCRVSQXAVVGGVVCAKGRCGCGAPPQRRERGSWETLEAVEELTEGLREHLESAFFSLRVHVGSRGHRTQPRAPTVVARGVWPWGFSRETRGRGVQXTQLYSGGVEREGLCRVGLSEKGGAGRGLPGAGGENVGERGTPGAQGGAG

SEQ ID NO: 961798 - protein, 286 aa, Homo sapiens
MQGPGFSCINYWAVVDNYKLESQISRTPRRAEVLERSFQEYKLKAKRDLGRARGAENRVEDTLDTTELAQTESSGQNVEQEVEHTKKKTLEEEAKTHEAQIQEIEAEALTGRGGAGGAAGGRRRRVKANHREGKADSEENERGELANEAETVLMQGKGDSEHKRKKVEAHAAGAARSSTTEGERDAHRAGRQGHQSCRWSWTHVTGGTTAQLRPAKSQPSSTKGLLPARESQLQDTQEAADREEKQEDAGHDEPSSAVEAKNTTKQREKESQHTSQRQERPPSTET

SEQ ID NO: 961799 - protein, 200 aa, Homo sapiens
  misc_feature (91)..(91): Xaa can be any naturally occurring amino acid
  misc_feature (99)..(99): Xaa can be any naturally occurring amino acid
MDAPAQLPSAVRAFLERVRSTDTVDIGLLCQATVQLRASILVRPGARGLASVELMLPEGAIDFAEPMATAHCGMGRIYINTPVHQCSCVPXVECIRSIXKTRFAVFRQCVTFVHTLTIVTVEPTGRHPDVAVMRTLSLSLDLGVGASQRMRENSLAVLRALQISGYLGERCPENSCYPSWNINGAGSCRSVFQGMFKATT

SEQ ID NO: 961800 - protein, 156 aa, Homo sapiens
MRLNQLLHPSPHDVDSAFSYVPALHYSQNSHARFCGLKPSACLSLVAGDQNMACHSENTPPPWPLRSLPPSRLRSSQQQLAGDEGRVLLDTCYVIKPGNTKEKVAFFVAHQCGGGSRAQLHEGQGALGSDSSKAKRRGAVLTHQGPPDPGPEGPFC

SEQ ID NO: 961801 - protein, 203 aa, Homo sapiens
MASPAIGQRPYPLLLDPEPPRYLQSLSGPELPAACPPDLVLAASVSLAPLSTAPGAALRVRSALEGFPGEPGAPAPGLPTRSARSGPGLQQKTSGGGLELPQPPQTMRSIYRSSRMDPRVHGRSDGRGALLRRSWCCRADLGMVGPVTDEQVLRARLHALHITCKIHPVTQNACRPDPVDMQSARKGIYPGTDPLQKDTSTVS

SEQ ID NO: 961802 - protein, 113 aa, Homo sapiens
MVGRLSPVFCRDKEAPIKEFLAHFGNRRTISSAPNKEELLHPRLLCAKCAPRFIIPGLLPRREEKAHFASIIGRAVKERVPFRAEFYRGVYPPGALGTAPKRGFTSTLAYKAG

SEQ ID NO: 961803 - protein, 266 aa, Homo sapiens
EQKWRGPVVTATDGHAQLASVLAATTITARTPSRPWSRDQAASWPAWRVYSGRDGWPEQADGCDVSSDALLPAAVHAVSCTSSTQTPCTLPSTPCPGAWVAPYDAGRRNADLQSPRALTSLCSALPRALLEAPCPQLAVGPCSLLPTCAALPRTPRSPSSHVIEDATESQALLEGDEDESRICRDVCWPPCLGVRFILRHRSTFQRRIVAPPVMREESLWLLDSLLPDRWSREPPAWNSTSPIQLELLDICCPAPGCGWDPVTDTC

SEQ ID NO: 961804 - protein, 171 aa, Homo sapiens
QTVLVELQEEAQEADACQEDAGTEGGQSLKAEPGVVFKGLMMELNLFGAGHQKIQEKAMNGGYGHLPPSIASITAKLCDVAQQRNCEDMIQMFQKLVPSMGGRKRERKAAVEEDTSLRKGEGPRQPDGDEEEEHSPSGSSEEMHARCSTSCRDDMICEDDCDSLTWEGDLT

SEQ ID NO: 961805 - protein, 203 aa, Homo sapiens
TCSASCGATKQEEEALLSEMDVTGQAFEDMQEQNRGGCVQQIAGNRMMPNFKLMSERIKANQIHKLLREEKDELGEHGPWPQVPGVMPMLLDCAERWRRRSEPCLGSPLGVVEKDADRCLQLKALVAQQSWNGCSKAAQLADGPEVCSCDARAMTRAAGRIQALPWQRAGLLVRKRASSLNEGSRRTSHGCGAGWKKQQEGGG

SEQ ID NO: 961806 - protein, 224 aa, Homo sapiens
MSRPGVTTISTQAQSGGWPQALSSHRYSACSRSGVVCRSQVLQLASLYIPFVPQVHHLPLRTRTGSSSTIATSLEEQHKHVPPELSQYLGVTIDLINSCTYRFDPNCSSRLQLMRTLLDRRRFRPPPAPRRLPARRDGGALRLRPDRVHSPLQFHRHCASPTEHSLRSASGASVTPHALPRPAPSHRRPCPIQPLPRLRGCPHLISRITATPSPRWRSLLSSQI

SEQ ID NO: 961807 - protein, 289 aa, Homo sapiens
RHEVETELATMGRGESPGLQEASWVKAEANMGFGATLAVGLTIFVLSVVTVSVICFTMSPAAAFTMTVPSDHARGCHHHHSPLTAVLHAPYPQASKVLPVQLPWTKLPGLPQPMPSQTSVCQRVSGATPMRVPSILTRPVPWVPGWSIQRELWTGSDAARASIPVRVHALSLATRLISMDAPQGGSLGIPWFSLDCLVGLVSVVCAMTWMFLVAGSPYASPLLLPVVLFMAWGVPLGPQCVLWCFPACILWVPSVSDMVGATSLPEMFWPRFCTRTGIWCSIRASKRGG

SEQ ID NO: 961808 - protein, 197 aa, Homo sapiens
MYERARSLQRDQEMARVYLTPIAASSFVSKCAMDAMRVLHDASFISSNDCEINAARIWCKLHQREHVKAVKREVAGKAHASYKFEFHVQGAPFEVRDSVVPPCWQSQASRGERPQCEPIGCSYYAQRWPNVLSPVQFAPWRCTPCPLAGLTHNPAGFDLSNYASEPPDDGRGHGIRAGLNSAFNLGAIEPAVRGPDV

SEQ ID NO: 961809 - protein, 103 aa, Homo sapiens
MLAAQSRRSVALACGPSTYHWMQKPFYSDERCATLDVAYAYGKLSLHQTQVSQGLATELSYTYMPRLTSGEVAHCASPSLIKWSAALVEALPERLTERRITCH

SEQ ID NO: 961810 - protein, 93 aa, Homo sapiens
VRPQLSHTILTEKNWFHYAARICDGVRKSSALAEYSRLLALRPGRGTCHAGDLPWVRSCLRVSTDVHSPAGVESRQLALMDEGSWLPVSQYDH

SEQ ID NO: 961811 - protein, 84 aa, Homo sapiens
MHKELKKESTTKRDSKRQYNKPQSATNTTTNIHTSSNRKTRGNNQRRQERNAQNNSDLTAEKQRTRQEDSHEKDDKQDRPNTTK

SEQ ID NO: 961812 - protein, 111 aa, Homo sapiens
MVACAYSPSCYRRLRHENRLKPKEVEVAFNLRSYHFISSLGDRARPLASKTQHHTNTPGETTPNRDGAPNNGDPSTAHGPTRLSDPSILTHQGTRRTPKERRQYRNPGNQP

SEQ ID NO: 961813 - protein, 265 aa, Homo sapiens
MVFLQSSAARGQHLGLPCCNGAGLQCAPLHFPAHSWGQSGAGRSARGLTWVLTQSHVRECGVALTQHRSSRNKDPGLLGKRSQPWALQQGPKAGFKKQTAEDTSSLRTAWFPRIAKHSQRAEREKQQEGLGVPTGRVDRGPVRRSPFPAFLLRNLQAGATRVSIAKDPGLEGKQILEAKFQGGPLNTGPHTGYRLTTKGVAPVPLGAFGWDPLCRFVAPDSLAKSPRVTSKHGGHDGSLDPGPNSHRPGTRPQRRSGRAVTSNLL

SEQ ID NO: 961814 - protein, 88 aa, Homo sapiens
NSVHGRGFNSIHYMVPRSYNFTPSRRRPLSVRADMGVQVETSPQETGAPYPKRGQTCVVHYTEMLEDSERNLDMPSQRQKQALFKLYS

SEQ ID NO: 961815 - protein, 119 aa, Homo sapiens
MWKRLELPRDLLNGFAQNADSNMDNKIQAEVASGRDVELFWNWRKGDSCFVLAKRLMAFCPCPRDLWNFELERDDLGYLVKEMSKQQSIQEVTWVTVYRDSVFKGKQTLRVQKICSLTM

SEQ ID NO: 961816 - protein, 228 aa, Homo sapiens
EDVEFGCHYIFIGSHFCDILLRLLAAWVPALLGDMVARAASLHSCAHPDHTKEADEAEYRDGPRRAWRKATDSLVNASRDLVTRVPTAQKVFSTAVIGTSPRHLTCKRHTSSSVHTNGPTEQRQVTLHITWPTSVDGKKAMAARRSTAERQAAAAACQLFTELGSAKVPRYMSCFDAAKYPSCCCIALASLPTAGGVGTQHDTYFLAAAESESIDQGDLGAYPLFGRT

SEQ ID NO: 961817 - protein, 115 aa, Homo sapiens
MVFFIFYRNGFCRQNTGVVKTTPKSQNGKGKDSYQHCRHGHTLNFGQAPPLRGHRDSITCGWHSTKEPLEKFDKGGCMKVEKGLLSRYAVGLANTTENLSVNGGYHHVISPLVEI

SEQ ID NO: 961818 - protein, 283 aa, Homo sapiens
QVQSDGRENASGMNAAMAAQVEPQVQFNTCIWLVMVVLGKTTFVRRHLTGEFEKTYVATLGCRGSSPSVPQQQEDLLMFTCMGHTTAIEKFGGAERWLIISNAQCAIIMYDVTSTRLRYKDLCLQLAYEIWYEVCDKPLPIDVDDGKQTWTNLRDRETVSGEKSSLIIPNRNKDGHITMRVAERTSYEPVGQRIGRYSKPRAFVGTPQAPVCSVLGSLCVDEVERCANSVVGRETAMTEDLGIADLGELPKVDATTIYRADPTRENEGSTPQYQRPGPFIGST

SEQ ID NO: 961819 - protein, 138 aa, Homo sapiens
MLHSSSSFNSFLGLVLRLTYCAWFDTYRNLCTMQAGSAATKSAPSIREVISDEHGIDPTGTYHGDSDLAARNAYNVVTTIEATGGKYVAPRRARRILGARHHRTTVRYGALRADLSGRTTIRISVRVGSWEQLGSKGH

SEQ ID NO: 961820 - protein, 293 aa, Homo sapiens
IKHKEKHRGVYYGRGEALRSGASGGRGDEELEQREGTMAAVGFEEFFSAARLRVGVAFPYLVATSWQSSARRRKWQYSVRWSRAGFKGSGRQKMKRKEAARGSAGGGPGGGIKSPAQVTRHIGIARLTEDDRRQGETKAESMNAGHPFRVTEAHTLEKGHAGRDPGGDSFMRRCWDILRENMNYHRGDHRHNVFKPNNVARRRISRRKTQGATGKLTHQNPPKGKTRRAADYEADTSQHRQQGRKQLVTSGPKEAANFHWTPPARNTQGQAPRTPPAAREANKMRARNKAERR

SEQ ID NO: 961821 - protein, 252 aa, Homo sapiens
ISIPGRRSLYYWPSSYNYNPDMYQLEGLNWLRFSWAQVDDTILADEMGLGKTIQTIVFLYSLYKEGHTKGPFLAEAPHLYLHSTELAHPPPPPPPPPPPPPPPPPPPPPPPPRSAPGTARSDAQATGYAPPAASVEADAPPRAPAAATPARADRAQGHQLGEPAPGPPSAQPHSQATHQPRRHPACATRRDARADTPCTPAPQHHRPTTHHPHHRPTRSTAHPRTTHPHTRHAPTAHAAPAAPPRHSTHSTT

SEQ ID NO: 961822 - protein, 69 aa, Homo sapiens
DPSSKLVLKSEQEQNREDSDLGRSLSQMQDAARAIGYWAFECLTVRDYNDMICVHSVCVAPKVEMAQKE

SEQ ID NO: 961823 - protein, 129 aa, Homo sapiens
FECEGRGFRLIITGRSSVQLNTLSPPNDLRPSHVITLPLHNAPHTRPTNQHTNHIPMMARCNTRKHIPRPPHTTCPKRPSIRDNPYYITSEVYYTFAGFILSLITNSSLAPYPHNKGGHMEPHKRASAR

SEQ ID NO: 961824 - protein, 108 aa, Homo sapiens
PPPQHQDYYDVPYRLLIQCRGLNLLVKVWSPRQNCLMERPCSTERIWYPAHLREPKEVHEGKAEAVSCWEAMQGASPSGLLRQVVEASLYPNEHCGNYREALIMETMS

SEQ ID NO: 961825 - protein, 163 aa, Homo sapiens
MFPGLGRGKTASRWLVPPRPRLPLRWLAPQMGCGLYPVGAVRTADGVENVRSAAGVCVVLCSIAPSVPGNKCLLKMYRKPTLLLYAICRRALLPGFGSSSGWLGNQEPTSHVLIPRSDCPRGQCAHSVSKRRGKFTPPKILSRLKGKPRVRFSGRLGKMWLNS

SEQ ID NO: 961826 - protein, 261 aa, Homo sapiens
MTGLDVFDSLVVFGSYAINLATAHSLGPRCVDELYTLTAKICSFTPEPSKTMSPLGGTNNFQTCCLKSCNTHHEGLQLHVLSQRDHEPTRRKKLRTHQNIRRDRLQMRHLKSCNTHQKVCSFTPEPARPRTHQKEETPNTSEHQKGQTPDAATLRAVTLTTRVCGFILEVSETKNPPIPDTFGDHEEDFRISPSGETNSRAVRPFPIAKQIEASSYRWSYKMEPQKKFNNNFYGGTWDQPTGLPGLKSPSEGPTGALFASE

SEQ ID NO: 961827 - protein, 88 aa, Homo sapiens
MVQRPPYVTPLYSFGWSLGSESAAAVLYGKHTEAPERQAHMWDRPRCHRGAPGAPGGPGMGTRVVTRKFRHSILGRSRLKGRAKTEPR

SEQ ID NO: 961828 - protein, 256 aa, Homo sapiens
GHEGCVSGDTSLCRYLVQLPLTAWLSCLRQLHRTQSAAPAGGAAAAAVNSSSSSSSSQAALQLAASSQQQQQQFQAQQSAIAAASSNAVVQHARSSSSSSSSSSSIYIKSCIIKISNWYSSSNSSLQTNRHSCSSNNSNSSQQTAAVSSSSRLMQAQPQFSRPPVQQPQPPASHCFMPQTAAADALTHSMRPAAVTNSPSQPPIAQNQSSQLPPQSADPAFGVTRRKSRWTCCSQHTEFVDSWWCQPSEPVTQQTQ

SEQ ID NO: 961829 - protein, 130 aa, Homo sapiens
MTGRGFDLGSYLVRSLLQLTMQHMLGSPIPVTGADKGLVSQHLGPGALRQAELEGPVESSSTTYVCTACPPAPSSSPALVIMVHRILSVEFLHPMDCSRHARTQTSTRLPPEMPQTRATPGQVGNGLIVD

SEQ ID NO: 961830 - protein, 124 aa, Homo sapiens
KKEIRPKSRVIGQAGRMYARSMPPAWQTFLKDHRIYYIQEAGPILEGCACTPERMDEAGYASTAPLRTSQTMAQCFFCFKELEGWEPDDDPIEEHKKHSSGCAFLSVKKQFAQNITLWCNYYAN

SEQ ID NO: 961831 - protein, 282 aa, Homo sapiens
MGYAVAVPACHMCCFVCLLCVCCCVCVLLLNVDLCCVCCVAGERMLLPGDLALDTGACCVCDPHLALLMCPADAASGCAATEVMPVCILLVPLSSGGALPRLPWAGREILVWAHLWGAGDPALGCISGVSVCAQLPWVTSWMALALASCLGSMWYPPVDCACSLLPPLPVALPCGAAWAKAVLEVQPWGFACVPPGPLADHWLTLLLCLPCGSGCDTPCERRFGSRLLSAYCACLLLACPLCSTLACSSSIVLILYYAFLMEVHRPQRWASSSCPRDLTKAL

SEQ ID NO: 961832 - protein, 217 aa, Homo sapiens
EEVGRRTRPFVARFGFDVVTCCGYLPQVNDWREDWCRVLCPAAHSAPDGHGVEGVWGQWRPSSLWSALQLKIPDLFRDLEIIPVAYVPGDLWGGNCSRGFLWAGDIMTPVFFLAVATLEYELAIAGMFGGFEAAPFTPPTTGKIPKDPGFEKRLQTVSDSLHYLNHLESFRIGVQRILPEHHEESGSVSGALLWKGGLRRFLHSPLLGKFLCLHMPD

SEQ ID NO: 961833 - protein, 111 aa, Homo sapiens
MLSSGTSRRGKGGYSTPGGPTPKVFSISSQGLLYEDNPSIEGAIYGTRPGQSSRERVENDREHLTGEGPGIGQNCGPTRDNLGVSRLSYVSSAKGRPLGPQRQESSFLVPS

SEQ ID NO: 961834 - protein, 260 aa, Homo sapiens
NCCSGGLEASDGGLDSAELAGWAGHGAPVRVVGAVKSLHALWLVSSRLNFWSTKHWGAYCGVARRFALVRAAMSALCVSKHSPRVCLCPERAYATAQWQSGLQQVPCPTMWILVCDNDVAVLTVAPWCYRVVDRHGWMMCAAGCAPAVSGCGTCADEAGGEGEERAEEEGSCMAGKLTLEDTTGVSNVQLPYDTTISEGRDKADAPEMIVLVALGWTGLSAYNFFGPLCLPDRAPSPVSGPVPVRRSLERGSRVRLYSWS

SEQ ID NO: 961835 - protein, 379 aa, Homo sapiens
MATICIRRYFGLISSQGLGFHSTIDGRWCHQFTQTSLRALGRPTTAAPRTGPRGSLPRTGPAPGPPLRRYALLSLLRPAYQYYGYGRYPDTHEDTEDTTTIYQKLKKQETKKEAQQKKRKTKTEKRNTRKEKNRHLQKTEDKKRAAHTQDKTQEDGSKITNRRERSEGYSQPRQQKCRERRDITGKDREEEQEPDTNNREDTSDKSPHTPRNKIKHKQRIKTATNAEEKRQGHAEGQPPPMRAMRGQRRTTTRRIETGQPRNNTEADEREERANKSTDENKEPRRERKGRDSRAADRTTDETVGADETKKRKERQKHKNSHHNTKKSSEDRGSNRTNNKTTRAGRGKKTDMEQTSGVQQESLPGPTQRENEASEQTRRI

SEQ ID NO: 961836 - protein, 187 aa, Homo sapiens
MLWWQQPQGSCESTKADGSAKKALTLFSKWEGSNPSPQTRPGLVCHPLMIEWGTRCNSWVANLQTDTGNHCGHPPGSENADVPSVISSTYRVVDAAIVETTCWIDQPKGRSGEMLSFVQQRGPAGSHFVSVLIKLRIHSGFNGAPGDFVVIPKPGKGGLLGRDRVRAASDFPWARAQHGRLALMAHC

SEQ ID NO: 961837 - protein, 190 aa, Homo sapiens
MLCLCLYVPVHRGKPKHDIPDTYEVERGLPAEADMSNNTMHQVSYNPTPRNSPPTSQLRTHRKLCHTGLEDKGPYEMAKPKTYEKKFCPYNPHKRIMRGKRRHRSAGGCYKQCLVTQHKKLNGDRILEQPQARDSIASSPVERGPRGPSTRLLHRPRQGKKNKISSKESTVDYTKTGNHSETSRKWGNTP

SEQ ID NO: 961838 - protein, 67 aa, Homo sapiens
VTVYSSRARFIVHLAVSYINTTGPHTSPTYDSGWPFEKVGYIAIGNRQQEKKNVGQVLLVPGPEKEN

SEQ ID NO: 961839 - protein, 241 aa, Homo sapiens
MLDYWSLVLQFNTRLFDRTAAGQPSAVENIDKNTADAITAEGFTDIDLDTLGRLYLERDTLGIREVAAVSIAVSPLVRGRVSAAAAAGDAREQAEGIQGKALGPTYTLTRYKTIEEYTASRYPHSTGIPRWTREVGTAYLPEHYTPYNPKPRVGVTYDRPRYLPSVGEGVQHQPLPAGGESLGLTAGPVTASGSQYNKRIFEVGFGLYGSIHGPTDSKVNIQIIHTDSNTVLGQNDPGYSC

SEQ ID NO: 961840 - protein, 207 aa, Homo sapiens
RGRIERARRRERMSLSDWHLAVKLASQPGHLLHQSILRSARDRTGSRYSLGGYSTFIFLKQVICWPQAPGGLVRRHLQSEYDSDLRVVGSKKMTETLDFVWPFNTGSTVHVLRNVLVLEDLKYMQIAEPCGITMCACSLYESSRVVAHLDSCSRQTSCLHGMAVFKMLQSTKESLDQIIVATPSALSRVTLSLLGFSSDKGPLLCLR

SEQ ID NO: 961841 - protein, 200 aa, Homo sapiens
MATWRDKVRGLKAGVLSQADYLNLVQSETLEDLKLASSRAQIIGNFLANEASPLTVVSHTIDRLKEKIGGGVPPHRGTIAYEPLRQLYLDLHYYNSYIDRQRRYLATYTGTLHQRSIARARAQDATHIGSFEQMEAVNIAQTPELELYNAILVDTPLCGFFPGLHIQRQDLDEMNIEIIRNTLYKAYLESSTSSAPTGRD

SEQ ID NO: 961842 - protein, 266 aa, Homo sapiens
RGLSGRYRRGTLCYCRARRSPALLRDATPCWSIVQPFVSWLLQSLCRVDWQVEPAVENWPACCVPPEPLVLSRPYFATWWCKCRVFDCSAMPVFAALDERHNWGHALTFYVSQSGLYPVGRQRIFAHLCQIALGKHSAGWQEALGAPYFFTFASASNPCERITTVTYEFTGRLSQKGSLRRDSLCERPWVDWLMRRTCYVLGEGLPPRVGGHGSRWSGCIPAVEQCEDELSACLVLRLVGPLTRTLALSDSPSHGSTLLGPGCGGA

SEQ ID NO: 961843 - protein, 218 aa, Homo sapiens
  misc_feature (78)..(78): Xaa can be any naturally occurring amino acid
MTFWHPDLHAIERLMTLGLRRGRDRLVVGDWRAPLHRGSDIRRYYRTMLESAGILRGPEPWGIVPTCVGTLPHVWSVXLVACSTSVALNAHLGGIAVCSFWEQPLPQAAVALWVIRIDFSKAQEESTGLLSVPPGSWSTSTVVLPVRAPGPHPLTPFSARTSALTFWVGGKAWSDDTSQLCPDQAARDVPSLEQYAEERWEVVLTSWWAPRGVSARLV

SEQ ID NO: 961844 - protein, 147 aa, Homo sapiens
RSTAARFIIIGRVIILTGPGPPSMVSSRTSQSSRGIEELLTDRNGGVSKVEDGRRAPKPVPTQPRPVSPQLTTNHRTTCIPPIFQSGKQKGVSQNLTGLVETSRGDIGQDVLLPSSLPAQATTITSTIEPRTYQSLGHPVVEELERR

SEQ ID NO: 961845 - protein, 257 aa, Homo sapiens
MSESKSGPEMLRYALHGRHGPTMVPYQQTPGQLTYGHSQEQVTVHCESCTDHDGTEQIMKSIHPRRDHRTRHHQPSTAMKGDGRIPSDRHTHHEVSRQSDHHNKAAYPHKMRQHQSPMKPDEAMKQAQSKPGKQPNQKNLKGEEQHESSEVGHTGTKGKATRDTIPMRAVESHRSSVSSPLLTREGEDRAIHNGVLQIRIRPHPVLIHNKDRPLSPEPEQKAQTIINVEDNTDHPYKKRTRQEKLRHRGRKPTRKWA

SEQ ID NO: 961846 - protein, 241 aa, Homo sapiens
PDAAHGWLILWKRGDKFRGVGEGMALFSQTGLPGTQELEMAVVGQPPVPPYRAFLRTPVDFESSGSSEPPAQEADFLAIQTAGGGVGRGPAGSQQLPPAMSEVASIRLPMRDWASRSLQRDSAPWKTVGNYVSPMDGKTQTLEAGLEVRGGGWAWGLDAWACLPGQGLRYLAHLCLVLVADGQGSCQLYLQLRIQRSPGDPGEEESIRAPLASRYTPQAIGGSGQGSCMQKTQEQGGYPSG

SEQ ID NO: 961847 - protein, 163 aa, Homo sapiens
MVLACSWVSDVAYAGLHELLAGLTDHSTACQLLFVPMQEGSVVLTDVARLSDSKKSGYTSARCFAQVHVHPLVPRSYVHPSSTSLAWHTSGRHVSLARATLAIEADVGHVEPIVCTCLMGPLLQLALRCQEVNLLASDLKEDGLASVFMLVDPDSLADPCVTP

SEQ ID NO: 961848 - protein, 205 aa, Homo sapiens
LRRAGLAAGFSDVEPSRDMAIYSGAGGSAPEMELAPEMGMRSEKYIQVGGSDCAFVHGRNYGLITSGSSFEEYGMMLHQRLRDVKNVRRCSRLYCMLLLIEEDEELPGRLNGHPTWTTWSPVSGLCMIRIVGRACATQRQRLITRVPYQALISAQANSDIHRVPDSFDCGCLHQRCSRRELSMGSPLHPYQGMCSRIPPKENCEG

SEQ ID NO: 961849 - protein, 284 aa, Homo sapiens
KGDIWIYPIIKDEWYYQIETSEIGNCEAKALIWTAESITQTIAIAGQWHHAAAPAPEGVLMRLVEAVARASLIPEFSDGILDWRPNWRCWNEYRKHLGILLSLNISIYLRRTQNSSQAHLRYHSILPHSFYTSDPLMERDRALHHSMNCNRIRGISPSTPCAGASAATRSMRRALYAHLRTRAQNHGWRTAAQPLCQKSQTARHCLDITGALPHTEDDEPSHMLSPISLSSETHTGIASHSAQKRKEANSIGLTTRAMQKEQDATDLSPKQPPTNTEIIPRTKT

SEQ ID NO: 961850 - protein, 125 aa, Homo sapiens
CGTARFERSQTCPPCFVAPILCVLLPSPTRECGDVWRLRRGDSRVCDADDELLLPACLPLTCCDVLPACHLVCHHDLEPALPSLMPWPILCPCSPDLYPFGTMLLEEGFGDLWTGIVTCGVIWRQ

SEQ ID NO: 961851 - protein, 200 aa, Homo sapiens
  misc_feature (67)..(67): Xaa can be any naturally occurring amino acid
LGARRSAVFCGVRPSGPRSPCRSFDIQSPSRIPVDVNPFQDPSVTQLTNAPAGSVWLELQQPFLRDXMQADILVPVIANIPGVLTASGFSSHQWNQSSRPPRPWCLQTQATACSVLDREETGSRNSCPYDWKRNGAGAAEAPAMHKLALLRQNQAGLPVCSSWCPCCRPCLLVKDFSTEIPGDYQRICKMLYYSVDVAFE

SEQ ID NO: 961852 - protein, 220 aa, Homo sapiens
MLWASPMSSKELQSVEQEVRWRMQDSSSTSTWPSWQSPVPPSHRSSTRQELLAESARHTWKGVVTEDLNDSHTLVDRHELKVGHLSESIVMRSACEDKWCLDVGWSTLVPFELREGAGVVLAALEPAAVPLLRAISYQPGAREALLSDEEMCSWTWTYAYGQTRAFTRAQVSQRLGSDLLSLMAQSDFWCGGPLCQSFAYSSGSTALFEAFDQHVLNERR

SEQ ID NO: 961853 - protein, 215 aa, Homo sapiens
QRRSELCSQDDRVARQQAPAGRTRPQTSSSLGSGAPMDVQDQMTFPCMDYIACEGEVCQVPALTVQGGYAAKCFRKAQCPIVGSASPNSMMMHGPVTSGKKLMTVRIVYRAFEIIHLLTGEEPSAGPGERHHLPVVPVEDLLRRIGRAGTVRRAGCGCVPPAAVCSLAIGSGVAQALVEVCLPGDFWTIAEVCLADELSRVLAMGSSYSYANLEE

SEQ ID NO: 961854 - protein, 160 aa, Homo sapiens
MVEELGYNQYESKTKEFLYVLVSQKSAESWKGVKRRCLENGNLQQKKIYLFCPIDLTDMVPMKRLPKLVLQEFGRIDILVNNGGMSQRSLCMDTSLDVYRKLIELNYLADGVLDQNVYLPHMIEEEARKDLLLRIAIVCIISVPLSIGYLCYKALSPGLS

SEQ ID NO: 961855 - protein, 233 aa, Homo sapiens
MEAAGATIPCSTTICCVAGYVRAAREVKEHERPEVFPGSARNPSRTSIHTGNKTSELGRKRKAEEDAVTASLSKTRVSDPYQHLGELGKRRNECMKPKTAKVHPKTSDLANYLKFLGVRALAIKDDRSIAKARDSRKLARLVNSMPQTCPLGKARWPKPSITGEGLPRYVQPEPSANLLRWSQETLQAGGPASRPYGAAAKPWDGVSGTRTDSYSEGHLRFSDEPDCRGTLSK

SEQ ID NO: 961856 - protein, 217 aa, Homo sapiens
  misc_feature (117)..(117): Xaa can be any naturally occurring amino acid
MAGVSILSPKSKGQGLISQAPFLAHLQPLNLRGPQAISSVPSAWGVSVGYTSCPPPRLGSANYFSTQLVLSVYVVFSPSHYEESLFSFSPGGAQVLQCAPFRGFTRLESLVGCSPRXEKGVPRGLLHLFVATRLSRSPRLSYKTSVSSPYFYLQLQRAPQGAVRVGHFHCAPRQPSSFQPPKDKKASGAPVGEFPRDQLPGERGESLALGGSTAPGG

SEQ ID NO: 961857 - protein, 79 aa, Homo sapiens
AVGRLALSEMLRVTHRSFASMRPVFQCYWLLHLTRAYAIRCNIFGAGCRCRLNAFIRLIDRLYDLMPVSSLTIGGRERR

SEQ ID NO: 961858 - protein, 83 aa, Homo sapiens
EDGTRPQRDDICRQSSAGGVLFSVSLHLYPEAHPLTDVPMLICYNFMDLVIHTLNSFYKRFVDDYHGKFGPSIIIEFSVSDFL

SEQ ID NO: 961859 - protein, 89 aa, Homo sapiens
MMFRQIGEGPFALALPSKNSPSVGTPTVGADRRKGLPGREDASVRNKRHQIQGPLKTNEDRVKRKVSTNRNSNRSIKEPRREENKPGRD

SEQ ID NO: 961860 - protein, 203 aa, Homo sapiens
LRQMATVGGRRHGRACRTPAALVIPGLTAMRAQRLSSCRVRVEVKRSGSRCRPLAPIRSVTLQRCSCSLGEGPARQTIYVLPPVDCLLSSFSSILQSLLRTLAPLLGFMAYRPTGFTADFVTLVFKRIPYPWNTGEGLFVGNFLLPFWAFSLGQAPLFPCILPYKPRVWGKTCFLSMTHCFPDSRGFPAILGFDPGFCVHLNG

SEQ ID NO: 961861 - protein, 100 aa, Homo sapiens
MTKMGLLTCTQLWVRQSLARQTRGNICGTPSPGSEKLQSSPSGDITALQGLEDAAIVEHLLDDQPKGERGQHVDACSAAWLRWPPFVSPSSSAAITPDSN

SEQ ID NO: 961862 - protein, 107 aa, Homo sapiens
MSCNITVNVCSFTPEAIETTNPLGGKNNSRHTALRTVTLTTKVCSFTPEPARPQSHQKEESPNTSEHQKEQTPDTLPLRTVTLTARVSGFILEVSETKNPPIPDAVG

SEQ ID NO: 961863 - protein, 287 aa, Homo sapiens
RALSSPTRQRSAIVTITPREEPLLPQPVPVTITATMSSEVETQLAARRPSAVSLLLEARRTTNALATTGSGARQLVDRAGFNIGVRLPGGSQGGSSQAEGFTGAGSKDWVPRCFAGAALLALHSVQGNLHHQGQTTGSVGTAESLAPINGRGILTPVAEVNLFGGWFATTGAYDPGGTGLDWASLGTRTTAAVAGGKAEICFRGLLAGYYPGFRGAAFKLVDGRTGRPFTTDRISTGSEGGPSSADINPRDTFSGHCCDVGAQRTGGSADLVPKAMPRYAAHRAGKG

SEQ ID NO: 961864 - protein, 251 aa, Homo sapiens
MPRWVARRKVAPRHAGAAGRLTLLLGAGLGAVVEGYACGVLGVTALGWRCGLACGLAARLLALLASSQPNLAPLVARGGTPCGRGVNLGRTDNGWFSPGGALGWQGFQVDAREKCSVKWLLSWLRNPLVANPRGARARYCGVTVASEVMRTPGSVFFTGGARAGGDTPGEAEMFTRTLSRGEGGTEPYRDCRTGGYPTLCVARHKNGARKNRGGGTCGITRRRGGRQPLVGRRPGTGQKPAIDVLKPTKKI

SEQ ID NO: 961865 - protein, 228 aa, Homo sapiens
GNSYSFFEKKTTKTPKRGVGAPARGKGAPPRVLSWSGGAVGVVWPARLCVASMGAAADAPAGNGPQSTPHSAVRAPCPCTEGGRQTHKVLLGGRHPAPAEEGNTWAKMVGTEDVVAPPQAPPQRKILVTGNIHSGPEGVPTQRQGQKKIAPESTTPKEETNGRNTPPGGVAKKVPRTQIPPCGATGTTTGGLLQRPTSGYSKMETPCCSDPEGSREESRGGEGENMAH

SEQ ID NO: 961866 - protein, 208 aa, Homo sapiens
MVLSGVTAFCCFFISLLLLPCKKCLSPPAMILRPPQPGGTISPIKPLLVPSLRSCLDQHAMKCGLISTSTSGALLANVYPSNVDSDVVELGCLNIIWRASVSKIGKCRKVWYLPRDCEWRDCDTACDMYNFVVRLTVVSDGDVDLVGPEYEVTLVCLRQETAGFHSWPRALWPLRLTALLSGLRGKSQGQLSGPGGDLSLGGRIRNPR

SEQ ID NO: 961867 - protein, 253 aa, Homo sapiens
MRLAVLYLVWALTECYWQSEHCNNQPLDYQEPQKPPLTGQPPQVRPTQSIVHPTSATHNPLSPPERMDRLSLVLSNKPIALPRSLVDASTCSTRHDPAIHLVYWNMPRFSRNKQQHCAPARVSSPSSAHPRYQLHPLRVLARSLQGDHWATTRVPMVPSPVSTSVPRFRFESCHYPGWRMRPGCTLCTESHKYATGPGKAVRGGHRQLGSLIPLWTASGFGFMAGLHRKLLPEPLGAGPRVFPGSRGFRAKVL

SEQ ID NO: 961868 - protein, 124 aa, Homo sapiens
MKDLFKKNYKPLLNEIKEDTNKWKNIPCSWIGRINIVKMAILPKVIYRFNAIPIKLPMTFFTELEKTTLKFIWNQKKSPHAKTILSKKNKAGGITLPDFKLYYKGYGNQKQHGDWYQTDILPID

SEQ ID NO: 961869 - protein, 80 aa, Homo sapiens
DTVTSPSLVKFMIEPTTSVGNKWSLDVRSPRRRRQVRYRTAYFREKASLKLYKTTPECHLSMLDSELIWAGGNDNWLGMI

SEQ ID NO: 961870 - protein, 196 aa, Homo sapiens
GLSPQPRSGWRTAVCTHCEGSHADAATWMAPVPLPRCPDRHAATSMRPMNAFMVWAKDERRKILLKAFPDMHNSSISKILGSRWKSIDQPGEACPTIDGTGGGLSRGADLEKYPELQVHSRGPKRSLRSWRGRCGLRVGESHGSLLMDPWVGMPVGATVIPPQAGQVQMSSSDVLSPRAAGYACGGATGVCTMSLG

SEQ ID NO: 961871 - protein, 180 aa, Homo sapiens
MSDAAVDTSSEITTKDLKEKKEVVEEAENGRDAPANGNANEENGEQEADNDGRPKNDGQNGGDGTRTDGTTRHGDGDGHEDWTMNDWRNAGVSYRGKRAAEDDEDDDVDTKKQKTDEDDYDSKKGKVKLKKKGGGTYSPSIPSQNLNVVTFEYKRPPANGGSATADDSASTPTNMELHGG

SEQ ID NO: 961872 - protein, 269 aa, Homo sapiens
RRCSGGAGGLVALGWGTAVGSAEVSAGGIRGPWVACVDVGRGRGRGSSRRQGRGIREWMPVNQCWAGFGPRTIEDQGPVERESNLFSHAQLRESRRSLIHFHGEPLYKGMRVSKDYRHVAEAHDPVPGQATPGSRHYVGYRGTNNVATVREQGVSKVAPKGRVGQTGTITVGANHSMEQKDPPNRSPLRKRPNCGGNQRSGKSTKTCHLCKGVAKGGLGHTYEHENAHNPLHPGRTGQLYSEPCADKKMANEAGKQQKGTKARGDATWE

SEQ ID NO: 961873 - protein, 219 aa, Homo sapiens
RGGPSTAHASIFSHHTSPDSAPAHHFRAPNTHNATSSSYYSVSAVPVMPRPPSGICGPACPRGSVIAPDAARSSDAPENQRGAHASLGPPIMAPRTARQDGANSQLCLLQLVARCRQLPDCKADHVHPARSPWQDEPTSKKTEDQRTASCTEEEFLRRNKGPGSIKVQVPNMQDKTEWTRNGQVLVFTLPVTDQGSVIKVQIHEAQAAEGKQKLQHEAL

SEQ ID NO: 961874 - protein, 76 aa, Homo sapiens
YFWGGGGGCGGQGKEGTRGPPSPPHPLYQFPPSPGSREKIVAGRGGAQVFAEPEGRRPALGPDPKSGLLGQLCQAH

SEQ ID NO: 961875 - protein, 41 aa, Homo sapiens
MSRVHVSGAALWKLLLLNFPPTWQKEAMLLARLGAAAQGLL

SEQ ID NO: 961876 - protein, 69 aa, Homo sapiens
  misc_feature (48)..(48): Xaa can be any naturally occurring amino acid
EVPGSDMPPWRRKRKRRKPKIHYLVRKKQLMRLRKQAEKNVEKKTSPXYTRIVLNDPPDSWFWAQLNHC

SEQ ID NO: 961877 - protein, 242 aa, Homo sapiens
EKNRIIIRRICMEDTQQAHEDGHESKQHAIILNHHTVPDSKADIHQTTLTRAMVSGHDSDLFNDSRPMMVHGGEHGMPYMPSHKKLDAMDNTDWHSLKRLHKEIRLKRNESKGEHVPEITRLPEEGSDLHTFQSCREGVLTGQTLAEGGGRPKTYRLGNPPDLELTPLRTLRWLSHHMAHLILILWGTRFSWTVTGGSARRHSDSCRLRWDCPESPSCPSLQTLSPKPEEYTGWCAEGALLW

SEQ ID NO: 961878 - protein, 104 aa, Homo sapiens
MTETEPSTVADGQATSMMIWTLTTQYIIHNYRHRRHPRTCYPYCSEERPPIVKRIGRQEIPAWTGPGGTGHVMPQSTEDIPDVPPMTLVGECDVGRTVSLTNTS

SEQ ID NO: 961879 - protein, 220 aa, Homo sapiens
GAAAASVEERADETNIMAWALTEKASSCVVTNRFDQLFDDESDPIQRCMKADREQEKRSRLVEAALGALRAKERRLMAADQTNIQQRTGKQHAQGVPERPQEPACPPALAVVDKKEETAAARGRLRKKESDELEEDLIKQTIRDEGKNTLIEDQKGDTSMKKIRKSHLKNRVKEANKTVRYRRLLTDLFKVDGGSWKRYEGAVDVEETEEMDKINEAKVI

SEQ ID NO: 961880 - protein, 84 aa, Homo sapiens
MVCSNWGKSLPCWDFEERFYKVLCSLVSRKWAEPKLWQDEALGTRPWVHFRRAASWLRAGEFKGVNFAHAFRGGEQRRGRRNPG

SEQ ID NO: 961881 - protein, 204 aa, Homo sapiens
GAAETRLQTPGGRRHTTALSSSLPRSAQPASFRGACSWQRLLCPTVTRSARRSAGSWHTGSAAWRTHRTERAHATRLARLPRAHRFGGARPSPRAGPPFSARHSPPLPCGCTHDRASSPPCPADRSPSNSPCCASRPSPHLPELPTTQCSPSPAHSPTRTPPPPPAPAPPLQHSTPALHNLPPYRCTPPSLTLNPLHPHQRSLH

SEQ ID NO: 961882 - protein, 228 aa, Homo sapiens
  misc_feature (119)..(119): Xaa can be any naturally occurring amino acid
TGRLTLQVPLVSRNVSACRRQCVLLHLPAHHRPPSLQRSLPCRPLEILHGYASPPVFPACAASNDAANVARRPVVGPQSARRTQQHANSSSSSNSSNSSSMQQQQQQHAVSMQFARPLXPSTAQTDPVLQPNPGYLTSVVVLLTLQAPVTHALRAPRFRIMPVPILLPMWIIDRESHRISQMLRGSFAAGRGRSSLLAAVVREFTRACYRGAGGCRVPYGPPVGGGGG

SEQ ID NO: 961883 - protein, 216 aa, Homo sapiens
  misc_feature (40)..(40): Xaa can be any naturally occurring amino acid
MQFPLWGLDRGAPIVSIVLLCFSFFFLDQCVRSSFSLVDXEWGRFLVRAVALCAGSPLSRRFAVRVLQRLVCVVCVVPLRRRFSVEMVTPIVGTYMRVSLMSSLCVHAELYSSMYGQCLYHVERHNRGVSLPPSVSFRGHTDMLRFIGSLISVYPLLLVVPTRTLLSWGRYSRQIGLRRSGGDISQVEVVSSGRKSLALPRVALGRPCVCCLFLVP

SEQ ID NO: 961884 - protein, 251 aa, Homo sapiens
PRVRLASAPDSSASRRPCPDAEAVRPRPRASLLRSPSALSPRPRCGLLLDSFGHRRACKHAALVERSEDSSSSVMTQRVSGNAPRTEVNSSPEESGEQVRIAQTKILPAPSPTQRIYQHAMVTTNIDSFPGASPVRLSTVFDTLKHAEPKGDTPRTTKIARRTVNAQTPPEFHNEPHLPSADNDTITFRILTQARNLHGNSRPNSNVTPLSPQFTPNLWVSNWATHHIGAYPVHTERINIAEGHQRERLHC

SEQ ID NO: 961885 - protein, 188 aa, Homo sapiens
CAMGHPSFVMSNSFTNQVGWLQIELCDPSMTKYPVGVQFPDPRKLCMSAVGVKPRPWASVNVKLTKLTGESKARDTVRLCPCDGTHSSRISYRILESQVCVSPIQACVSYDASAHIISSRKRLHWTSKRLLEYGYVVEIVRLIDIVMRGRESAVSILDLMLTARSILYPKCCDTRGNMRYPSCKHPCR

SEQ ID NO: 961886 - protein, 182 aa, Homo sapiens
VRTFLIPEAMTFEEAAALLVNYITAYMVLFDFGNHTAMATADHWYTWHAGGVGYGMPCSMCRYRWRNVTVFGTASASKHAGNMHRQHMWVHNHHPSALITHAHALTDDALRHRKQALSPINRAVAPYDQCDTNHGMRIKTTLTKEHNKHIRRNTQWDNKIRSTIMDTGPSRDMHGTHKNRKP

SEQ ID NO: 961887 - protein, 114 aa, Homo sapiens
MESQDTNGSLLRNGETVYHFRGVEFQKANSGVMLVTNNVYGSYWLNKNLGISETYKPRKEQTARWCLAVIPVLQRTLHLCSCIVLVNTCSDHQWVGYCVEFPAGLIDDGETPRS

SEQ ID NO: 961888 - protein, 147 aa, Homo sapiens
MMERNCRREKKVVIEQPQEMTKNFRFSLLEVRGKQYLWYLNEVNMFTNQGTVIHCDNPKVQAISGMRTLSPLQAMLRHSSCEKCYPVMLNQLGADSLTSYKGDCACELLHKKDLWDGKAPVATGEDDDDAVPDLVENFDEASKNEAN

SEQ ID NO: 961889 - protein, 240 aa, Homo sapiens
RDHVRVRDDWRCARSMHELAAKDIDGHMVNLDKYRGLRVHRHTTMDIPDEAKTEVNYTQLVDHEQPDTLRCGIADPGLPDVTSTGKQEPGSNEEDQRVSAAGSQRQQFDMFSKICSELGTDDPPDCGSRMKIPPKDKGILGNAIKWNFNQDYLIDKKRLDVVTDATRHHRRSHTGRIADRTHDTNIELGIQTGSEETPAQAATQAPKAHQADDQTRTHERDRQKEDRKGDNQENQEHPPG

SEQ ID NO: 961890 - protein, 285 aa, Homo sapiens
PCAPLRRASLPAPRLGSLRARPSRPQSSADRSSPAPAFLRLRLSLLPPPPAVRDIAVRMCLGSGTAAGESRDCALCHALSSPLVLRESARAPSSVAPPYSLPSHCRPSRRLIPSPPLLIPSALGVQTRNDPGRVDEYERSSNLDVDNLALTSASLQGAVITRIWCKDIGVVLHIPKGLTLVSRTYSLIGNPKVISTGGHTPTFAKFVLFLGCADNAQVAYSSVDAHSLTGGQTLPSFLRDTGMGSSDEEVPCKGLKSPLLVTSPVPPTGVARICVVRSRHELVDL

SEQ ID NO: 961891 - protein, 286 aa, Homo sapiens
LPGPFPYRVHPKAGHSENGVEEDTEGQNVGPQKCYPLEPIGDPSVPGPARTYQGSEANREPIGDLRVPRAVRDHAWGRSHYYEAQSYETHRCPTRLGTYKGYDPGLRIAIQVGPQESPSDPGGHTLQIVGPKADASRTTQVLETTNGTRQARGKSYLALGGAQHKCRTKPQWCLKHSYDAQAPRCYPLLTMVEWQVLYSWRTQQKVYRPRDPRLPYFQVVRWHLAPGFAAVRLVNWALVGFARSGMPSLGASSVDQHYFVLASWRSLRELLHRLSFTHAAFLIGGG

SEQ ID NO: 961892 - protein, 144 aa, Homo sapiens
RRDGCAARAPGPVQHLYSVGDGGTGKTTFVKRHLTGWTLRRSMYATLGVEAHSPSCSTPTAGPIKLQCYWDTAGQDEHFGWNCRALAYYTPSPSCCHSLTALIVTLEQLLTTNCAYTGTRRSGYELVLNTHPHLCSCWQPNVRS

SEQ ID NO: 961893 - protein, 116 aa, Homo sapiens
LLRLPEGQERIGEEAVKLLEETPQAERGRNVTFHAVVSRSRGGSSALMSKLWGLFKRGQASWRVTDVAEAGVPAGMLQPGAPCGPQELCGTLALDFTHTPQASTVTVLQELGSKGA

SEQ ID NO: 961894 - protein, 245 aa, Homo sapiens
RCQCSPAGGCLPVRLLRGQRSGVRDPLEEAVCPFSDLQLRAGRTTALFKAVRQGHFSLQRFLLSFCLSVPCPQRWSLQRQAGLLELWWAPPSSSFPAALFTKQAWAMAGAPPPASLPPCSLISDCCASNQRDSVGVGPSNPGAGYYLVVRRFLSPLEKRSIQVGVTLFSRCRLSPLSLTRKGNSLTPCASQVRAMPRLFGRARCAHPLTVPLSGLPREMTRSPMEWGIPVWAPRGGARGVLWHWP

SEQ ID NO: 961895 - protein, 175 aa, Homo sapiens
MRELPKGGNRSGEGTDTELCTKPANKLTGEVVAAEDNTACDTRDVRVCPVRAIREISSDLRRLNQILSIVKLTGVSFTAEEIRTLTCVFELYCSQDSRRNSVDCRMLLTWPFRLARSIKSIVWFQTWVQGLRLSCHSHRDPSERELKTQKSCLINIMRGAIKLADFGLARAFGVP

SEQ ID NO: 961896 - protein, 122 aa, Homo sapiens
RVHQPGTSSAVGPEALTAGGGQDAIRLGLGETTTTARNPGIEDSKPLVLRLLRRGKYSSRVLAAPPELALRDTVTATIGTWVTPTVGTHSLHRVGMLLTTREFHDPDRARLHSTEPRARPGL

SEQ ID NO: 961897 - protein, 194 aa, Homo sapiens
MGASHALRGASLHRVHHPPGDAMNAESRTSMVGATAVPPSRHARGLYPLNRLAVAIGPIRSDARSALEYYSCFLPTVSHLHVVAGRSELFPVAARCPRTKDAVLLDGPVALNAPEKLSEKELQHEACACSSVQRTASLDPSSMASRLSLVNALFTELVVDLQDTFVCAMKTLYLADAFATEALGTLQGHEADHD

SEQ ID NO: 961898 - protein, 239 aa, Homo sapiens
RRVQRGGPEALCGPVDVGTACGFRVRFRQWHSGPGGRGPWTGAGAEAAWARGSATADVIRSGLPVTKLGRFGKDMKIKSLEEIYLFSLPYSEESADHMISLLGEPLSGMRFLIRIMPSCRKQNPVAGQCTSVSTVICCYRWYYNGHDRVWVVKSLQGTCRPPPSRGASHPWPMLSIVPVAQRLLGAEQDPASPTLSLAIVTGLLCGSCACYASSLRPRVHWHLSPAPVPMKLLMMAGIR

SEQ ID NO: 961899 - protein, 209 aa, Homo sapiens
VVQELIVLPAVCSCRSVVAIPGPGMAALALTPARQRRRAAAALGPGLTISLGMCVQWCFSLHARTWLLPPCATGTRVRRPHLLLADVACNGLLCRHSNLGDAPSASITGCEETLAPVSYLLPSRFSEMLWRSLQHHAHCTPGDATLTPCGDLLARRFSCLLPTLLRHRRTHSGERPYVLRGLVASASDTRCRFRRHERQLHGACRSRGP

SEQ ID NO: 961900 - protein, 156 aa, Homo sapiens
TFFASVHGAPRQIGGPPLSSPHPVLPPPGVGLGGWMWTNWEPARVNASPAHPCRWDEVSDSHRGVGGDTAPALSPTPDAQPRRRKATGSKYTGNWAVAAPSPNHPKSRIHHNFKGDSTKIHDPTERVHMPCAPPAAIESRPNARADCRGTPPANAP

SEQ ID NO: 961901 - protein, 74 aa, Homo sapiens
YSRIPVGSSGEDAVESIVLTTQEPEETWYIISVEGDQGDGYETDFPLLVEGDMVMVRQFEKGRNQSSEKKVHSS

SEQ ID NO: 961902 - protein, 133 aa, Homo sapiens
RGSAVEGCYTWDAVRWWGLAAIMPWELTVELWIMLLQVCTENVEVSSEGFIDHPACLHHCPSWLAADLGWHECLGFTVLSQFLQWDICIASPSANKHEMAYLGRRKELHGGYSIARENVVDAWMSKHVQGQYR

SEQ ID NO: 961903 - protein, 177 aa, Homo sapiens
GLLPCEIYSIAYPIFSSHFFTSFALNLQEPMRDFGSDEATAPRTLRVQRRRIDSSGDGEHPVQGELNLSTHYDSAGICTEFLGGPVALGVVGPIVWAPCHSVSALSSWDAPYPLAYSTLGVSAESLVVWSSALVPAGLLINYKCGQQEGIPAIRAQGSEKYMGSLERAVLGILGDYH

SEQ ID NO: 961904 - protein, 122 aa, Homo sapiens
MCRSRPVPASAPVFKAFVAIWGLHSGLLSCRVVLMCSKRGGTRDYRCGGHYLWPKSLLSVPCAAECYVGEQRSASPTRVPCKGRHVPRAVLCAWVRLYPLHPRGHVGICLPAIVVAVRMRAL

SEQ ID NO: 961905 - protein, 204 aa, Homo sapiens
  misc_feature (63)..(63): Xaa can be any naturally occurring amino acid
QSLTGGPAAGAAGIGMPPRGPGQSLGGMGSLVCHGTATCHLSGQHAIHGILGEWAAHSHGVSXSSGNSSRPSLQLQEVALQTAGEKQQAVRSTQQQAGAYSKQRSRQEQQQQFQAQTECHAAGSPSSSAACSKRGSSRQQARQQSSILNWSWHSSKSDKEEYEAGKRTQQAGGGNSHKGAAPKQQKQQQQQEQQAAAAALEDPA

SEQ ID NO: 961906 - protein, 247 aa, Homo sapiens
GTRRCRYEEAGSMAALLLLPLLLLLPAAAAEATPLAAVALASWRTCAFAGAMLCAAKWALLMLCCPVPAGCLPDPGMVPEWVAACHCLGASLELAQHALPRHTFLIHWLAAALATHEAGARDVTGASTAPSYCALVLVTVDPDGGNSGQGEALEKCEAGSCQVAVDACWPEAARTFAGRGRCRQSVGWSRPAPLVTVDATVELILPCWPEFLVGLVRGWPMPAAHCLCAIGPGRCPFVHASAIGAQR

SEQ ID NO: 961907 - protein, 118 aa, Homo sapiens
MDDDICLRSSSTTGSVHVQWPCFAGRLMPPCGLSSPPSVGAPQCTMGVMCGALGQNVIPSGATMAQSNEMASSPMKYPIDALASVTEHGTDMDENLAPAPSTMSLLCGSLRSTPLLLT

SEQ ID NO: 961908 - protein, 260 aa, Homo sapiens
  misc_feature (218)..(218): Xaa can be any naturally occurring amino acid
NCARCADCGRGAPMALWLHACGCLVFFVVGWRVVCCAVQRRSSSVPLVAVVEYDRDLLGSCGRHSMKATYTSCLAGYYYLTIDPALGAGVPGMCCCSCSDKLSIEDFTGIMAVVFGNKQDSAFFYPRRMPWTLAPSYTGCFLAVDLVCSHAPLDHLYLQEKLRGQPLALWTLATLRELECSSASLPALVLIRLPYKATLMVLNGTQGKFLTMATNRVXGAVTLEQLKSEEFPETGGLQRGYALPVVRLNIPVVGEGYSTR

SEQ ID NO: 961909 - protein, 223 aa, Homo sapiens
MVDFFLGDNLYYMDSLLLIITRGWYGKCVYYAGEKVSRNSRRGETQGSCRSVPSSCVAGGIPRWALVAGEFLQCFVPRAPCVRITFLVVSGDIAIEHPCAKGESRSQINVGNTGVLPERIALRGVIRVTPLPRGHRRGAWRASRSGLTRRPPLWGAACQTSTQLAHRRGPSPRAYPPREARQSFWEKPQIFNSFSFAGCSQSVRHLSFKNNLGKNSPGPKAVE

SEQ ID NO: 961910 - protein, 56 aa, Homo sapiens
EEVSRCWRSFKAELNEFLSLVEAWTEDGYSDEFEVRVTSNQDSKSLSYAHQNTECS

SEQ ID NO: 961911 - protein, 32 aa, Homo sapiens
MGLVHRDLKGETLCLGRRCPYRVTGRARPPYG

SEQ ID NO: 961912 - protein, 122 aa, Homo sapiens
TTVCWRPAGGAVARRAVHRAALAFRLPQANVSAVGSWGRHGRRWKTERKTLLPWPSHLRESQAPVRGGRTEDVLPRGSGPRWASCCQSGTGVGAGYVAPICQGPGLMELPVILRIVPMRDRA

SEQ ID NO: 961913 - protein, 242 aa, Homo sapiens
VSGLQVPTLSPSLMMIATSIASVRSVDCCASEQKAVHQKWFAPLKKNFNIHGTNKHWLIRQCQDSDDYTSSHTSSIDDAYYGTNVWQTLLSVDDLVEKLVKRLEFLVELNNTYIFYTSDNGYHTGQFSLPIDKRQLYEFDIQSSTVGSRTWDQPNQTSKMLVANIDLGPTILAFLATTKLDTDCGMSLFALLRGGRTCLGIRVLGGGTPGKAGEVSCTSVAPVVGGSSVPQVCVGSYTPLPL

SEQ ID NO: 961914 - protein, 93 aa, Homo sapiens
  misc_feature (38)..(38): Xaa can be any naturally occurring amino acid
  misc_feature (60)..(60): Xaa can be any naturally occurring amino acid
  misc_feature (76)..(76): Xaa can be any naturally occurring amino acid
  misc_feature (78)..(78): Xaa can be any naturally occurring amino acid
  misc_feature (86)..(86): Xaa can be any naturally occurring amino acid
VEEDQTENPLILIDEVDKIGRGYQVDPSSALLELLDPXSRMPSFPCGPNLNLGPVPPLAXLFPQGACFTILATVRXTXSTCVPTPXSPPRKPP

SEQ ID NO: 961915 - protein, 94 aa, Homo sapiens
AEVPPPPWSATGNPPASAALAGVACVGPRAPEARLGRHRAAGHGVPVRAAPGGYADVAPEVGPGSVAVWVPCGKGGKPFSARIRSHNPVKEPRT

SEQ ID NO: 961916 - protein, 198 aa, Homo sapiens
MSGIVHLQAGQCGYQIGAEVWGGDQQMSTASDPTGDLPRWTSGPARLERINVYYNEATGGKYVPRRRARGSGARATDGLRALGALRADLPGRDNYRFSVRVSAGNYWAKGHYTEGAEGGGHRCQECCEKWRLMSCDVPCRGFQLTHIRWVGGLGLEMGYPPHQSRSGRSTPERIMNTFRVVPSPGVSDTGVEPYKASL

SEQ ID NO: 961917 - protein, 137 aa, Homo sapiens
SCALQLSVELRGARGTLARPGRREGARAAAWGAVRRGFGSPGTGPGLRAGEAPQVLCYCPPGAVGGVAAIWGPGQSPLIIEGAWRSGNGWQHLTRPTHVPWGGHGPPSAEPRGLRRASHLRSALRLLRPQEVRPPSG

SEQ ID NO: 961918 - protein, 193 aa, Homo sapiens
VVTALVFGANGGWLALCKTPELPTCRVLAVAGSREMVPRLLLRALAPWAPAVGPGEPPCQAPFMLPRSLWPRSDVPCMRKYRCPLDALAMDCLPQACSIPNFEDTHLGEYLMCTEALIFEVIGPGSGATTNQFPQTEFVHKTRDWEIHELALEQDLVCSWTTAGIRHYQGILFLENPWPMSMYLFCLGDSVGS

SEQ ID NO: 961919 - protein, 149 aa, Homo sapiens
KEESPEPCVLERRAEPMLRGSRSVVPPPPRASVVPGRWAGLASCGVLAPLVMCVRGARGVRPARGSGNPGEAEGGACSCVGPDRATDEADFPVRVFPPSLPSRPVCRPLFSFPFHLAFPGFLRARYAAIAFHKPAACLSLQGTFIGRVG

SEQ ID NO: 961920 - protein, 206 aa, Homo sapiens
AGSRSHRRQPVRPTARTRRRLPYPAAGQVRATVARTVYRCGYRAMATKNDKEASRAAYNLVRDDGSADILGSTIEHIARSTIVPGEQGAEYQHSYQQCTDRRTGCMPYRPLTPTGNAMSQGGSNVGPQYTCIRLKPVRRVCKRAKTGDGHKTPGDRQVVHELRIRQCVTQCIGTGAGQEDSSQSELNTAGGTPINDSSDRRNAQAP

SEQ ID NO: 961921 - protein, 224 aa, Homo sapiens
NHSSEFTVTRNYLDWLTSIPWGTVQQLRTLTCARAQAVLEEDHYGLEDVWKRILAVRLRVMPDSAAPPRATILCFYGPPGWVQTSIARSIARALEPRATFRFSVGGGMTDVAEYHRGLQADRTWAPCPGRSLQCLKKTKTENPLDPSSSEVVQDRPRLPGGPVRRRLLELLGPRAGMPTSWTCYLDVPRGTCPRCCSSARPTSGHHPRALRDRMAMINVSGVVA

SEQ ID NO: 961922 - protein, 220 aa, Homo sapiens
MLFPSVSVPLGPVCGTLWRPCGSSHGCGPRARLGGHPRCASLAPCAGALCLCARAELALLPRAQNPREKGFLLRGGDAIEVPPFVQQELLGKNTRQKRRNDNCSLLSRQQRPPEGGGGAQWGATRKKGRPEKPWRVYRDPTRNKHTARGKKTPATEKGQESKRPFFSTRGDKPHLLVGRQLSDHHATHQGGNTQHIRKKTTETYTSGASEHINKITSIIA

SEQ ID NO: 961923 - protein, 113 aa, Homo sapiens
MLPRLVLERLGSRDPLRAVELTGVTSPRLAYAFLLAVSSLQNSFFTVLLLFLFFFGLHNENEIVLKLSSSEWKFGICYSSLITQVNYYGSTLAGQFEIRRMIAQHLNRLEGSV

SEQ ID NO: 961924 - protein, 111 aa, Homo sapiens
MRYVASYLLVCPGGNFSFPQRQGLQEDSLDSVGSRGGRRPASTGLLSELNVEKPLKTLFRPGYGQALPVFPAVGGGLIPALSCLPQGFLKAPVLAWFSRPCACTQMEERKD

SEQ ID NO: 961925 - protein, 159 aa, Homo sapiens
RKYRLLPSDAPQVTLHRSSRRRPCLGQAIKRACRRRWCSGPPEKKLSREEQDHHDSYEPIRLGGISSTAGDGPGRYYSFHEQVNWLERLDNGSACEDELLRTNGEVGEAAVPLDDATLLIVNRYWAQLDDNLWNALSPTAMRCHGGCLSSAAMGHLVTQ

SEQ ID NO: 961926 - protein, 291 aa, Homo sapiens
MSLRPDSAPRVSTCRSPFLSGGQSEEEASINLNVAFNNVPPVEPLGPVPFVLRPDARVSRHVTLNAHESAGTAQGGTVYRCCRSEDVVVNLEGPWYREKVREWSSQWALVSGARDRFTFGGDKTLPFSTSHAASSPWRYRALERGPFGRSFNTEKVPPSGMAGSRRRGGALALSRMAGRSRNPFSGSYLDSQTGPFRFKGAVSRGCVAPPRRVLGPSAARCEASHGGAPWCADMRHTSFAINRRRPDSPVGGAFHRAMVRLSLRHRFSFSLCVPIGALSGVACSSVLVGVA

SEQ ID NO: 961927 - protein, 127 aa, Homo sapiens
VDQDSEFAEGSLAMRNCAAGMLETGSSKHEDGGLEIHRAWWCMKEEQSLEARLVRFWLQSCVAKSEFDSIQACENDQSRDHLRYYCACSWALQQKELLINGIPSLGWIISFIWNRIAISRSMKADAY

SEQ ID NO: 961928 - protein, 184 aa, Homo sapiens
  misc_feature (42)..(42): Xaa can be any naturally occurring amino acid
MTRGGSLGPPPLQGVYWATVRRGNPGWGGTECGRDSPAVRVXSLPSGGSCAGGGGLQWVYTPGDGHVGHGGPPPLCAVAKFVVIPGNELDKVGSVEGNGQPQRQRWEEGVVRCRSQEETTGGSGVAQDALEGALRAGFTTFWMSSYWAGFLKEVRSTIDTWACGDTGMARPGSSPVSSGMTLAH

SEQ ID NO: 961929 - protein, 146 aa, Homo sapiens
TLLGTTAGGWERVMERKAKLRSQKVEEGWLVPLDLTAELLQSRGLWPLPRGVTLSACWGVRGVAPPVEVTAWLWGPVRELVLLRAPLSEPAPWDQRVSTSRRSPMRWAGPGWSPPPSFQWVTVPLTSDGFVGHSLGTGALNFHNRQ

SEQ ID NO: 961930 - protein, 202 aa, Homo sapiens
MRSAQILASGPCRDACASTVDPSHRCALTEETNGVDECWPRCGVPDQFGVRVKANLRLASEALRPHREEVEQPPSDHLASMNYTEKFGAGTTRLECVLRSGLPAVWEQSATPLVFQDVCPMMDILAACDLSVSADIIGTLMPLAFHLRHARPFDWHLVGFWPTPISLGPGLGRDTILMPDEPWTSPGLTGWNNFSWWRADLA

SEQ ID NO: 961931 - protein, 254 aa, Homo sapiens
MSNVCVRCLPPRRVPKRPQHGHGQGLRERPPLRARGHGNMELFLPCPLTSAGAHVSPVHVLVVVLHCCCAPTLPSTAVRPPALSLPPVPGKFLAGRMLVACGPERICCGSGLRVAPCVRVLLVPAEGSWSFGERMPMARARRWRPLEWGPWTETLGAGSTGNRGARQAYNAPGDKSPDAAQESSRDAQGQNQVMVPVAPPKSTPGKDRAGMHTELRSEFTREPRLGGRVLTPKRGLVAHLKMQEQKKDWKRLPG

SEQ ID NO: 961932 - protein, 282 aa, Homo sapiens
IIDGPRAAQIFANTVDNARIVRRALDNARLAVLDDFRVKYETESGLAPVCVRIDYAMVLRKGQLMISRISHRTVRLDDQTILGLSRGSCSALNEVNLAKRKLTHVSYGPRLPARGVDRCEARCPQISGPRPRIHGKHPWPKYDAWLCSDMNQKELDLELLVSCRVEETHHQLVCHHGPAECCDAAEDALPLSELESVQSSSLRDQILDSDENDLEGQPWADSALRTVGVRVIAYMMGAWQPGPAEPESKVGRPREGAGGPRLGPQVGPGGAPPPGGGGLRAA

SEQ ID NO: 961933 - protein, 175 aa, Homo sapiens
QTAAPGPEEKARHPEGSLPKPLGTAEDWGDQQETPQAREELFGCLPCLTCPRQAGGPPAAFKWEAEEEAGGGWHHGPGRVPLHARGMTDTAAMDSPVPSLQPPKSGSPSSYQGLRFQEALWGRPLRPWPVATDGEWEEFTLPLFPLASPLPYTLVPSEVAKVKGPRPGAVGDPPE

SEQ ID NO: 961934 - protein, 215 aa, Homo sapiens
WLPGLKWKRFGGRGPDLGRGVRPQESLTGISGHTPDSFSGIRAFVNFTGGPIHGGPRNPMCGDRDLTDPSGVKFSRAEVVMCRQKNVCGISQSGASLVDYRFRGNTFFFRHYMWPMSHNTTGYQVVWGVPLRGGRIIARVNFFPRIIVKGQRFLSSAEKVGVNCGVKRRLLVGELCAPPSVCCLPKKALFHLPSEVLAPEGAPCYTRRGAPCGSY

SEQ ID NO: 961935 - protein, 240 aa, Homo sapiens
CEGRSGGAQMEGGRHWGHPRPPVQHHELSRTPGGEELWGPGGLQRLLSCFLGQDYWVGAGIPEKTSWGSLNSNPHSHPPAGAWLPTRQEPGALEVVHPLDGGSFPQPLGPWRAWWENRAWLVGPTNRPKTRETLHSPHGTVLILALPWPFVRDLAWVTREATRWLGRPGRSFLPLLEGPGCHFGVAPVVCRCACNQRLGTRALFDVLYSLCEASLCVVQPFVLPGGAIAVDHLHSPSSYQ

SEQ ID NO: 961936 - protein, 167 aa, Homo sapiens
MSKNLESLYFSNNKLESLPVAVFSLQKLRCLDVSYNNISMIPIEIGLLQNLQHLRITGNKVDIAAKTSCLNAIKLRTLNLGQKLHHLTPRDTVGQLSQLTQLELRGERALEAGCQLQLGQVSGVRHCNKRALSWNDHHYSIPLPSSNVKSRHVNQDINIPFCKWDLN

SEQ ID NO: 961937 - protein, 154 aa, Homo sapiens
MLVNWMSVHPYDRRQPELYVKCREMLRSGEVETGFFCGCDDLVQSSVLEGELRRPQREITDRKLASQASRVGSNSYTFACVPGGRWLAVTISRGKFPSVARFCSVPEAPTEHAGWRGLYETTPLMNPWRAPAGFFNKWSSIGDPFRELALHTTL

SEQ ID NO: 961938 - protein, 122 aa, Homo sapiens
  misc_feature (24)..(24): Xaa can be any naturally occurring amino acid
  misc_feature (97)..(97): Xaa can be any naturally occurring amino acid
MERIMNSPRHFGTTPPVGYVSGRXRCDLVDQTLTDPICGDCVRQNELRSDENDEGMLRTVVVLLFETALLSSGFSLEDPQIHSKAVIYRMIKRGLGXDEDASGSRGTQVLQFLYEIPASRGR

SEQ ID NO: 961939 - protein, 230 aa, Homo sapiens
GAGAAPRRHPSICLPAGWPRWSLARFLRRPSPPLPATRSAHRRPSAELRASQPSTLPPCSLVEGTMSESSSMSSQPLASKLGQGTALSNAWAGGMAWASEPPKEPSEVPTSYYTSGPTKGEATNIGCCQYPENHHNSRKETQRVQYPKKLGRKEAKRRASRRSPSEEEPVTLVVPICSLTWREQPSILGTEDSFSSGPKRPQDPECKSQQSTFRINANTHEMAGFNVKTR

SEQ ID NO: 961940 - protein, 48 aa, Homo sapiens
  misc_feature (28)..(28): Xaa can be any naturally occurring amino acid
MGKVKVGVNGFGRIGRLVTRAAFNLLVXKWIIVGPPNPPLENPPFFQI

SEQ ID NO: 961941 - protein, 92 aa, Homo sapiens
FSAACNPRGCFLGKVVSPAELSPVPPTRAVPCARGSSRCRLDLLVSRSARPFSLDELASFLFSAYGILLRAFSPSVSQRNPKDNEIAPIRRR

SEQ ID NO: 961942 - protein, 72 aa, Homo sapiens
GCVHLCGKCVAAVFAGAWSLHGFQCCRYGMPGPLARVRSRVEGVTRHCHVFIALWHYLALVLRPSGLHVRNT

SEQ ID NO: 961943 - protein, 241 aa, Homo sapiens
RLRGTSAIAPHSMAVVSTATPQTQLQLQQVALQQQQQQQQFQQQQQAALQQQQQQQQQQQFQAQQSAMQQQFQAVVQQQQQLQQQQQQQQHLIKLHHQNQQQIMQQQTAAAANSTAAAPTTATAAAAAAAAAASEALQAQPPIQQPPDAAATASGPPRFCPKASCSMMHHTTAPPAATTAPAASSLLRTNHTQLPPQSQTQPLVSRGASLLDNCCIHEHIVFCRPLWWSSPPLSPGSQQKR

SEQ ID NO: 961944 - protein, 162 aa, Homo sapiens
MAGPCPKTFILRMAVPHGKRTMEELDLRDIDDDVPSSALSCTRHTLIHAGEVFHMRTRPGRRCDCSLDAPMAKHVVVLLMFHCVGSHGLLSVTHRRVLETMLERDPKTMPLHHMMTMAHRPLDLSTVAPCTTESPLAEGGDDEDDTSMCLRVLGSRRDMKNH

SEQ ID NO: 961945 - protein, 54 aa, Homo sapiens
MPQELSRLTDPNYLCLLDCPFQTGQYDESHVITALRGEEEKVVHISSPGVCGPG

SEQ ID NO: 961946 - protein, 277 aa, Homo sapiens
ETLKPPKNCFIIQVSLESRVGYIGRIPGSERGHQGLQTFEVTRGDEGGHVYQRGPWSYWDRGIVYEISFWERLIHIFLGNEATQGLGEDRDWTGYELNFLGAHGDHRPFIHEDHGFVLPRSKFALLCRKNAKICASKHAFDPWYAVRRASINSSYGGPDRVVHLLWMAEPMVTGRFVRVVAPTSVVAAVSHLRRREEDLCQDVQLAPLWTRAVWSRSLVGTEDDLNAREEFISLGTPESRNLVGALHPSGLFYSPLRGQGPPGKHLLTPWGCHLFEQ

SEQ ID NO: 961947 - protein, 59 aa, Homo sapiens
MREKEEQRGLRKYNYSLAFAGGFAPLPDGCLLQGTFYARERLGAVYGFVREGPCRSGLG

SEQ ID NO: 961948 - protein, 290 aa, Homo sapiens
GTRPPPPGERHVCGPSPPFPSLHSHPPAPGDPRTPNPDGRNGLPVLTDFVCLPRPPPLCAAAPGRPVPRATRPTVGPQPHDPGIMHRTTRIKITELNPHLMCALLARGTSSRPPLSCSAALPSAKPALVRLPVRSNKYCPCVTCRSIKPGLQLEQSGLTKHVQDIVYKIVPELLTDSDETVEGLPMQTYPTERRFPKGFNWSAPEGRFMRASRKGALSDECRLLSHLPFEIPTKVSRNRDNYEAAPVSTCDLRTQGQHGGTDLSRSHNRVSALTLPDSPEVFSHIKVVRD

SEQ ID NO: 961949 - protein, 282 aa, Homo sapiens
RRKLRLGTRLGFKFGRAGCCGPPRDPDPAPCPAPASPDGATAGSDAGLCGCSWLCAPCSVAWKVLAGAPPSDPVAAQMCWLNNERGLPWNVGSIHALPSSAVRVLPPPVPLAVHASVCVHPSDGYDGRSTSLDREATPILIYAPWKGDATVPLERQLCVGAEMLSLNLRRARIPSPKLPPAWARSCPMAKVHASPIDRPNFRLPPRRRAGLKKLPVCRKHQGAQSQFASHQGLRGLVNPCLPPVWRALPPCGSEGMPVPRDFVRAECARFVGTCTSLEGVVP

SEQ ID NO: 961950 - protein, 161 aa, Homo sapiens
ELSNRCETGFYFRHGPWVWLSKASGAVILKLTKGKFPFHFVGVVACAGGCLNGRGKPRLQTDMRIRPCLRKMEGIYADIPCAASGVQLHTCSELYQEWLEGINSPKAREVLHTTYQSQELWHTTAWTSSGEVRARAFQLALGGHEPNEPLSRGRGLPELEY

SEQ ID NO: 961951 - protein, 133 aa, Homo sapiens
MHDQLVWLARGRVVFAVLVFCIMPIHRNTNVPAPPCRRVLSELTQQLRRHRQPPQYIACRVPDQLMAFGGSSELRAPEPADRKIGGAQNRSYSKLLCVPAWPERLRISPDSVYHQTIRHEARPIVGWKNSTFG

SEQ ID NO: 961952 - protein, 72 aa, Homo sapiens
YRRSRTQPSERRCPSPLASAPGRSNSLRRETQDQALQQQADEAEDRAQGFSEELNGSASGARNAEGDVSALY

SEQ ID NO: 961953 - protein, 196 aa, Homo sapiens
  misc_feature (41)..(41): Xaa can be any naturally occurring amino acid
MSVGSCSTDRETGCVSIHSVHSNVIIRRLLDDKASVRSVSXNDAWMTWPAVPVGLSLAWARGLSTDFESRGRILACGALAHWLIGQRSSRSPSINGGGSELSYNSISLRDGNGGRPTRAPFVSHLRVPVMFSLGFGGHGLSVLSWARRGMELAWSGVLPEVQPTLAELEVLEKCRVPLRHGRTFGPSYQRCRLEEN

SEQ ID NO: 961954 - protein, 83 aa, Homo sapiens
RTEPDVNQDEAFPPPRLRSTATMAYEWACSACGSIGLCMRRAASTRLCMWNPQRLKPWLLLTGIQQQRCCNLTNDTFELSTFL

SEQ ID NO: 961955 - protein, 227 aa, Homo sapiens
MRRVPVFISGTGLEDERLSYCGRGRTTTPRGYPCTRAIRPGAPDESMRGRARGVVFPRTPGGLPRPVLCTSSPTKGETEAPRGVGRAGWTSGPAAGAVVRPLCRGGPLGLRVVLGTRDWRCDAAPLRPFAGLSRTSMQTVKPPKGRHSLSAGRLSAPLERNGLGNGCARGLCNSGLKGGKETSQSYYFPRPRSPTPDFGNAPKLLIREPYKVSVIVPRSWNRGLIFS

SEQ ID NO: 961956 - protein, 208 aa, Homo sapiens
MARYEAGLRKSGLRLRTQRNPFPASTGQCQRPGPFTGSSVPTLHRFFLSPGVGWADQGGGRATVRHIPLSLRPRVGRPKPVTDAAVACSPTLSAVCQTTSSSICEARERTGRSFCRIIALAPVRCFTRPCVGPQPARVVRSVRRTLGGQSTEPGGASGPRGDPFGQTPSGHPLPVRGKLVGEGAGQSSEVTARTIPPRRVLTRAQKNH

SEQ ID NO: 961957 - protein, 102 aa, Homo sapiens
NSAAGGPSMIIEGRWRTSYEEIGLEGGHRWLISITAHFFHLVEPEQCTDMSTLKVHYPRENAGTQQRSDREHQKWGRRRRGSLSETGFALGIRSEFPIIGKR

SEQ ID NO: 961958 - protein, 214 aa, Homo sapiens
MCLGAWLGVESAEGSLVLLWRGHRISFTMASSPAPASREAPDSSSPPALAESSRRTDALTSYALAVTFPPFDDESEGLLGTAGAPGGRSRYGEVARLAAWHGERDYRAIPELDALMMARGTGSGLHEDVRVSVMASSEGRLARRWVHCRVSVTREAAPGPLGLQCCPCDSVILTTRLHARTEGSAPDPAIRLSRCCRACRRDWRGAGPIESESE

SEQ ID NO: 961959 - protein, 217 aa, Homo sapiens
MPGPVPRWPRGECTALLLPCRRPWERSWCCLLLVPRLARCTDLMTCHWAGPLACWGPLSDAGWHLRVWLLGPGPRRLDAQCPVKRLRTLAALCLPAMVMSHGHLHCSSRASPCFWLIWGLIVLLLLASCSFLAAACLKRRQEERLREHNLARPRTWSPSNSRGSLGREPPRALTAAEHQHTVTRLEGRLMRTRNQPDHSLLTAAKTLVARPETGQGS

SEQ ID NO: 961960 - protein, 118 aa, Homo sapiens
MARSRLVVNRPRLAAMKQRRVPTSSRAAAPGLPDRAASWPAAPPAPPGLIRARLRTSGSEAHTQATTAPGTRTGQAHRHKKETCRAVQVEQGYPEHSYHIDDTQEHSRRQCTHTSKSK

SEQ ID NO: 961961 - protein, 62 aa, Homo sapiens
MLMMNLESTAVIFEDVGRPCWHSLQKACGRAVDAHTRREAEEDVKRVASKMVRGKPGVGGLG

SEQ ID NO: 961962 - protein, 137 aa, Homo sapiens
VYPLIIDSPPDPRLRSAVTHFGVTAWGLPDPPDHASVTIPSHALLSQKRLKPALFNEVRADESPLTNCKHLSGVPSSCYLHANGASIVLYLPLRYTLGRGLYSSESVLLYSRKPETVGLILRAYRLSQAAFIGYVLP

SEQ ID NO: 961963 - protein, 116 aa, Homo sapiens
FFFPGVQNVKARTWGALVVQNPGFPVGLPVGAVINGADNTGPKNRVYHSSVEGDLKGRLEQTSPACVVWVTVVSGHSSKKATPEPQKKGTLQQVAHLDNERVSSPLEKEVACVSPL

SEQ ID NO: 961964 - protein, 112 aa, Homo sapiens
MSPVFHLPQAPLCGDFAQDVRGWPPSERRPAKFSRRHPRLWPVHPLRENISHLPPDLLTQVSPTTRHSTAWRPGVWAPVLLCLPPPEFTSGEGPWGPVKATPLCTPQWGAAG

SEQ ID NO: 961965 - protein, 283 aa, Homo sapiens
CKRKDGRDTLPHFMPAFCPSSSRTSAPALGPKGSFASHTPIPGTQIWGLNSSCPMISGGPSFSFGRVPGVPSHAHFQSGSRYVMVEYETLGGLAQRGCQTCTVLRGLPRGLGAVQYSSFPSGPVSSGTGSFSAKCRLRPRFEKPPFVTSMRGELQRISFMSFPSVLPERDDQPPGGGREKRLAPVPFLLSRPFVLPMSPLVAFQGHRLLPRTVHGACGGLNLSSGRSASIAVGTLVLLREGLREAVLVLSCPSSSLSDRGVINVGIFGSVCGPTDWSNALCAV

SEQ ID NO: 961966 - protein, 163 aa, Homo sapiens
MPVPRGSRCSRVQVIGRNEDSDSCGALLNRGKWSHQGGTGGPVVDEEPRSATRYKPVWKPDSAFVGKERFARCRTIRVRCKGWLGHVLSRIYAIRRVRSSIEPWWHYYQKYVDEASKKEIKDILITDDRTRLELTLVGCESNRVVEALVPALANREILPISPS

SEQ ID NO: 961967 - protein, 120 aa, Homo sapiens
CFTSAWTEPGARFPIPGQAVPYATPSCSSLFTATLGILSPMAPAAVPAPRMHTKKRCTARLSLGSAATDRRLRSTVSRVAPITLLILGPHESLLINPAKDTTLGSLLPASLRYKPCSHAL

SEQ ID NO: 961968 - protein, 117 aa, Homo sapiens
MACPLDQAIGLLVAIFHKYSRQCRVTKHTLSNDRHLKELIRCKELTDCGVWKSCRDELEDIANGLDGMTLGPGTTDQEVNFPGGMSPSLRGLASLIYEFDSPSNGARIAKILRESIV

SEQ ID NO: 961969 - protein, 65 aa, Homo sapiens
MTMRVVALVVHKALVFLDPLVIPLTLPKCVNETRARNTTLNTVSAKIIFRVHTKRNPVLIDYLIR

SEQ ID NO: 961970 - protein, 48 aa, Homo sapiens
FPDVDWSSLSQSPAPCSTSGPGSGGRRGLREEEHAVGDLALIPDVGFD

SEQ ID NO: 961971 - protein, 250 aa, Homo sapiens
  misc_feature (165)..(165): Xaa can be any naturally occurring amino acid
PWFWPTVAGLDTSCILVWLKEPGYDVIAYLAHHWPEGRLRGTRPGKQGTVSLWAPTTGVHSEVMSMQWGSLCRPVHVHYSVAGPTHRVHSSHLVTEGFRLALLLWANPYVRVPLRAPWATPVTLRHIDMVVHILPLRAERRCGRPKFTVVPHAAGHEAEVGELPXSMCVPLVYGRASKPIVVIVPTLVPPSRPRNQDGYEIGRPPSAEWAFCALHSVLSENPGISRGVPLLEWNPCNGDVTDENGQNQLG

SEQ ID NO: 961972 - protein, 192 aa, Homo sapiens
YSIALSLDPNDQKSLEGMHEDGEGGESHGVPLRRRMWTDYWNGSGEEGDLCRGSAQLRLARRWWLTSEASCVSRMRRVCGWRGSSYGLPVACPALSYFRGLTGNRRSLLSSKGRSDSSMVDMLGKGSSAPPCSIHKFLQLGRVLYLVTHDEPLTEPSYVSYPITSRCVRARVGLRECPEYPRIMSGRIWANE

SEQ ID NO: 961973 - protein, 90 aa, Homo sapiens
MEHRRSGSVGYPCTVLEYKREAMLTPPVHPRSSCRHDDSSRQERQWCKGEGLDEELVKTHAGLDARTSLTLGIYMQMKLGQAPMPGTHSG

SEQ ID NO: 961974 - protein, 186 aa, Homo sapiens
KPYRLGRAGVIGEVTRRCALYLVIGCLAREGSRSQSENLPVVRIQLLYRALDSGEQAGTSEAVLVDRTCWFGAAAELTSRRASTVPLGARAVASQGWKSRRARRDHFSIERAQQEAPAVRKLSSKGSFAELGLEPRVAARNYRRLRLKSFRPTTVQSSTIPSLLRRPPCRLAAAENGQWQDSQLPP

SEQ ID NO: 961975 - protein, 195 aa, Homo sapiens
HQLLLGRSPGCYFVTGLGVFDSRFRGASFVPIHTAAYAPGPWPLSGMACGATLKRPMEFEAALLQPLAPLKRLALRPFCPGPTPGPSGPQDAEHAAAVFRTPDHHLQKSSSEPSPCPVRRVGAFRNSESRIFQEHKTRNIGRISRGWRHFRKWYLTQSEALCFRKVKPHSFSNFTGTIATPGFPHWIDRSDRAHN

SEQ ID NO: 961976 - protein, 84 aa, Homo sapiens
METSNAKQEHHPPDTTRQRITEHRIPRNDNTGTGKNRTSQDKTEQTKRTGDHVATPEKKTADQQQIQTEKKPKAERKENKNQTK

SEQ ID NO: 961977 - protein, 170 aa, Homo sapiens
  misc_feature (70)..(70): Xaa can be any naturally occurring amino acid
MRYYSRPWFISLPLLALRCTEVCRRFHFPAVTLLAAAASLRPPTPRAAETSAPAPVAAAPPSAAAPLGYXQRAACRYLGWTGTIESGISPIFLFGLCDACLPSAPTSIHLSLEELGSNTGIQVFNHDCEGRGLMTTFVISPHGNCVGPGDASAGGGLCRTKKQLRPLVMR

SEQ ID NO: 961978 - protein, 37 aa, Homo sapiens
MTNRLLQRKQMVIDVLHPGKATVPKTEIRRKNLAPNM

SEQ ID NO: 961979 - protein, 161 aa, Homo sapiens
TLKEVYRSKMDGEATRPPSPDRRALPSSSGLLLLLPAQVVPGGSPPQRGLSPRSGTGSFSGRTEAHAGHRDKRQLALQQKGHQVMKSSGGDWRELKQKAAAEAQCQWDAHFTGQHPSQLGPSGFPPLMHPIYPRTTCLRGRERGVEGEHAYDTLSLESSDH

SEQ ID NO: 961980 - protein, 249 aa, Homo sapiens
VLTKHLAGCRAGRLPPPAPRRSLRCTPRPEQRGHRAARSQLRSDAASARRGFVARTRRELGPGRCVRPRPRLLAPTSLNNDHRQPRWEDNGQKMPGHPETLSAFCPGHRLLHSLLPDDVLWEAPILSPAAVGGEFVALSILVAHMMVGGGRPELAASVLRKMSDLLELMVKRMDALARLENSSELHRAGGDLHFPADRMPPVGRPHGADPGYFAQNVSDIAVKVDQILRHSLLLHSKVSKAGGTRVRPQ

SEQ ID NO: 961981 - protein, 76 aa, Homo sapiens
LMYEDGPGVYFITGWGVAILCLVVPQIPGLKQSSCLSLEPPCLAPEGTVLKISKKRGAVAHTCNSSTLGGRAGQIT

SEQ ID NO: 961982 - protein, 71 aa, Homo sapiens
VVRITAVDISVITVDELIGFTESCVMYVFDRPGRVTEHVGQLSTLPREVMVCEWCGRKLVNCVVGPVIVVA

SEQ ID NO: 961983 - protein, 164 aa, Homo sapiens
  misc_feature (161)..(161): Xaa can be any naturally occurring amino acid
GEIKFGRSGWCDFGTEGESRSEPCRQGPLQSVQVFGRRRQRQLWRTERGMVSEVTAALEILSRARYQYKLLSQFCFSAKSELLCNIRVRVRVVVTCQIMYRQSISKALWPITRNMWIGFQEGDQRHLIQYDRTLLVADPRRCESKKLEAWCPRSLPEILPXSPS

SEQ ID NO: 961984 - protein, 128 aa, Homo sapiens
QYASFNAVFVNCASVRSQESCVESVCLSAVVGCCTCVARKPGRSTLTCQHKCWKVTQPHMEWRCEDLLPPRCGRPCAYPFPWGNLKYNAYIHLCGVIWLGVVCQERDHVRLRQAGCRGHRTPLWMHIG

SEQ ID NO: 961985 - protein, 101 aa, Homo sapiens
WKGSLTLSPRRECSSAISATLQPPPPEVQAIPPCLGPPQVSVGFTGILCHHVPGQILWVFLDRDRVLASVGARRGSSNLRELLRVITPAFSLLQEVAWELI

SEQ ID NO: 961986 - protein, 126 aa, Homo sapiens
APAALARWASPETPGSRPASGNPSCLPGLFARALRPSRPLPVSPGPSPAASLQSFLLSPEPERPSETLAFPRPLSRRQRGAKDEVIRKRLLIDGDGAGDDRRINLLVKQFHSNVCNVLGPSATQGI

SEQ ID NO: 961987 - protein, 141 aa, Homo sapiens
  misc_feature (7)..(7): Xaa can be any naturally occurring amino acid
MYSRPGXYFVTGLVMYLVTQGPGPFNFPAKASAYMQNVYRYLWNAEKGATFLSDAEIIQLVNCYSISQPTSWKRLMDNSVSVVYRIRRQLLSKKLTEPSSLQVPSLTGIIITSLRACAQLVVQQCYWILCPSLLEWQDPFA

SEQ ID NO: 961988 - protein, 226 aa, Homo sapiens
WDPRLFKTLRDPGGGPPLSTFFPPQFVTSEMAQSVSLFLGGPPEAIGRAVRPVNAPGKAHRLAAHWPEHLEGRQTPPPGAPSAGELTWRIFTLLTASLKQTLWTVHNHYHFDSTHVDATPFQRSELNTFSCAPTSAELCVLNQRQVRPSLTLTDPHNPEQTKCVTPSSLSYTITLFAAPQCVHRVKKLAIEGTMHLNTPGQASYALQCRERIAGAQKGHPLASPVH

SEQ ID NO: 961989 - protein, 103 aa, Homo sapiens
MVRYSLDPENPTNTHANHRGSTLFVFTLKNTRETAQAIKGMHYTKRATKLSARVCHSYTKHVCTIPTVTMVELAVCAQAKQWGWTPGRWPKNDVLKLYCWHMS

SEQ ID NO: 961990 - protein, 215 aa, Homo sapiens
DWLLHIRGLCNTFSSDALKVTCLITRLTGTRPVRWVIPYIKKVEPPPLTDYRRLSGLTMNAEFLDGAGRDEDFQARAMTLGPGAARSLMREGSACVTRPPSLASPSLAPVHIPVPSSSPALTPACIIPLRSLFPSRVGACLCSQELALHGSLLPPLGLTLERAAALSFQPASPSHVHLDAVLRSSCKLGSCYTLDRPPTAAAAKPSPPHQTARRL

SEQ ID NO: 961991 - protein, 233 aa, Homo sapiens
LAAPPACRRPSYHHTPGWMPACCRSLAPVTITATIACEAETQHAARLPLPGCPALSAAEHQSPGTYVAAGRLGKRVAPVLGLHNSVRLPFPGGGNKERVHRQRKGVQGRNKVEDLPSNLLAGTRRICVFNSTASEFDHPSVKRVVFWIPPQGLCAYTPAAYYSHAGNDYPFPRVGLVTANCARRGNFGGGRDFGNGYVHSGTTGQADTERDLTLSEDAEREKKSGLTRTGFAV

SEQ ID NO: 961992 - protein, 300 aa, Homo sapiens
SRQLQRTLAEEQHKNQLLQEELEALQLQLRALEQETRDWGVHVEYVVTGRVLLHLSLTCGPSAGGGLAAAREELEALEGGQKGLPGEGRRVLLLQQRLLACPGFETRNEPGLQCTQGHRSNTRLVETCRIDPQSVRQEVPSQACKAGTTQRQDQAQGRRPRAGAADALSLSLPVDHKASPEGACRQRTPGPIGPVGVAGFHPVGGRVASPGLRVQGILWARPAGSGEVLQAEFFAPARDIALTDALAQGSAAEAQHGQQRTAAWSRGRYLRLWTRRTTRPTVCGSRGPAVREHRSGRPPG

SEQ ID NO: 961993 - protein, 196 aa, Homo sapiens
QNQLIPPDGEFELMRYRTTKDIILPFRGDYPRELLRNVETHRNLVGQRWSSNVQQYYNPYTGMGSRKDSQSARDRPIAPPETANRRWVDHGSTPCHSRRAGHGAKLPNVASPETVANPVLRNESKAAMVSASVNATLGRTPGAQRANLSRSMPRYPNRTRGTGTHSSGGRKPLPQFSSRSENRFSHCVRRHSPDRL

SEQ ID NO: 961994 - protein, 70 aa, Homo sapiens
IISDITDAGSCQPLASPGGSIDESPHGRQGHTDTVGPASHPTPDTTITPREKCLSSSLPGQFGSANPTDV

SEQ ID NO: 961995 - protein, 234 aa, Homo sapiens
GFWLALRGPGASLEVFGTATAPALYLRQRLAGAPAPKAYVLGSPALAAGAGVPVGCRHALGGWGPEANCEGGGLPGELVLHRLPVGNPERCAAGWMVGLLTPGNFQAENLKGFTSGPLAAYLLQASAPGLPFASGGATQPFGPPGAYPPLDEAWPCFHPAGDNPGDVTDSREALVVKLGRPKVSGARHSFGEAPAGIQFIEVGCPQGNYRVIHPRKTHPSLGGENPSLDNRTSS

SEQ ID NO: 961996 - protein, 103 aa, Homo sapiens
MDPAPGAGAVPVSEWTPIHDPSSSAGWEPPGHLTLQMPAPGSDPVEKHATCTDAGGLPGKAKAAPQVSACQLCHLDDFVMPMRSWSLRLGVRRTCQEQLGSLV

SEQ ID NO: 961997 - protein, 274 aa, Homo sapiens
GQVSAECAEYTLLCRRHQSPTPRQPALSPASRRESVSAWPGLAVGFCCNTPLASPFPAHAVLPLPVAPALDLPWSPRASVCPSVFGPLSLPVALNNAPMFTARISSFRYGFWTICPNARWENRWAEKCVRRLEMGRRIAWYCPACPEPPLPGAPFVSGRIDVPWGAPPGLCRALGISAAFPEHLWGQPVIRARLRPRKSVLHPPAEEIIGNSLATDARYEKIGPFPHPTPKKRLTSRVARELQNHAWTTFSPVKPRTFGKRHNKAKSPAAGERY

SEQ ID NO: 961998 - protein, 223 aa, Homo sapiens
MNAEELYNYMVPRLNYLQTALEAEAKQMICRRRREPEPPPGARGGAQVQRVLHGQQAGGLLLRSVHEEFLKRPAAAPLPHPPLHHLVAASLGDSWAPVAVPGPHLFPAARHRPTDRGLPQLMSVRVPICSSAPRAGHEACDSGRGDGDWAVAPAAPDLPNLVPSKSVASHLPENGNLAFSHSAEGRMTGIRRETYGTGTTKAVVRGEKTLSISLKLTLITIDN

SEQ ID NO: 961999 - protein, 319 aa, Homo sapiens
ASAQKQPAGKVQIVSKKSELQPYSVQDVVPRTILSMSLEVVMFRLRTKNSGHSHKVSSNVCAIYELTTQRHKPGWTDDVKIRKRSEDMNLHRTNETHGHNRMRRLHIEHKNDARSHHINNDKRTDDKKEQNHEETTETRKHSREHTPEATQEHTQTMNTGTKRKDTETQIINRAKRQNQRKDKRQTKTRQTKETKTGDTVKNETQRRSKHKEKKNRNRKKNKKGKTKHKAQKGGRETRETNEKTTKGKNRAKEQKQKTRDTEEEKQEKNRQRKITKTKKRHSKRRSKTSNTKKKKRDSRQQEQHTRKKNESKTKYKKPH

SEQ ID NO: 962000 - protein, 38 aa, Homo sapiens
QSRVDGSGGGVLARARACGVLSEWLAADGGVGSFPNAR

SEQ ID NO: 962001 - protein, 75 aa, Homo sapiens
FTRTNTGSMVVTQPGEEPSVGLDVSPKHVLSERSVLQCGLTVARMTWKFLHENEYVHGNVTAENILSGSRGTEYR

SEQ ID NO: 962002 - protein, 135 aa, Homo sapiens
RGRAPHSPRANPALRYLPTTLHIPFFSQSHPADIEGGRCKYTNNTLSGVSVKDNAVILELSDGVVAMLAASMTLPGLEGLLEGPCLHVAIEGPGPATGGQGSSSPFPGLGWLELPATAAIPLPESRGTGCGGSRL

SEQ ID NO: 962003 - protein, 205 aa, Homo sapiens
  misc_feature (199)..(199): Xaa can be any naturally occurring amino acid
SLENPLSPFSSDINNMPLEELSNALMVGWALQWSTGYTALLHVYLSGAWHAQRLANSPSPLAVASNNQDSGLLVHRERWAQSCGRSVPLCLVGMPRSGLGWTVRSASALGHSDECRYVIALPGQGRSIIVIPVPGRNESSRPTAGCEAWFGHGRISRIRKRRSSSLRQGWPGPVVWHPRPLQAHRSALELTFPDVLSTXLSELVQ

SEQ ID NO: 962004 - protein, 257 aa, Homo sapiens
CWALELLEQCCRGALPRTRCSVSAAAWRSSELLCCAAVECELMLPPQGAALLVATCDVMLLLLHACMLNGVSLDLTCVDATPCAHNLLTLLAAAVPVRPECVCSEHAEQLPSCLGERLELLCTMLGVHMQDHMLQRLPHGPATREAARQALAEGLQNSAWLRELSCWGQCLGCARSTEHRTVSPEWADSLAAVRPQGTLKDPAEAAQTARGAPREAGQCRFSRGGVLARSFRTRNELKAKVFLLKEKLGYFQRELSQ

SEQ ID NO: 962005 - protein, 232 aa, Homo sapiens
AARPPMSVSVAHSGALASAVSVSFRQSPCCPLSRMAGMDGRAVFWCGGQGCGPSGSWRGARYRGVQWLTTGQPCVLTRNRRVYGLGRTPSSCCTGSAPSSWGMCGRPGTRRFGGPRPSERCMARGLSSEEGPRTTERDQLGGRLTPVGALEQEKKRLDEAIQGSLSRDRVPCPGPHVGKACQQMKSRPGYVTQVTVLRPRGHVILCLVLLPFLVLGTVEPSGRWVCGGVGGG

SEQ ID NO: 962006 - protein, 98 aa, Homo sapiens
MHCVELAVHRLKGMGEGAWGTQSLIIRIAIAIAFRAKILSSTHYATFNGEKSCEHTNGGKKELLSALRKALGGWLGTSGSMVGSDEDGRGPGVWADHV

SEQ ID NO: 962007 - protein, 203 aa, Homo sapiens
MAPPRIGTHNGTFHCDEGLACAVLRLLPEYRGCRGLCGPGIPRIDSLPVNIVVGRGRGGATYASAGRPDDDSIIAEVISQSTMSSLVPCGSRGSTKLDAVRDSSSLYIAGHKTAWAQIAGAQMKQDSHGWAPLYDKMYENFGDGGGMLLDYDGISQWQRGSLDMHWSNMLSARVARSYSYLEPARAKTVRPGFKLCNGSLVQE

SEQ ID NO: 962008 - protein, 230 aa, Homo sapiens
SSYRSAIDYSDSAMLQSRHGSCSCGLGSFLEDARAYTEGAAGLRLRSGKDAVGEALHAPRRAVKGGLGKYDFVHHARDGWMLIHGALANTNGEWTSVNGRRREGNAVKGLMKSVACVGVPSQIIVYVWELGCCVKRGMVITSWPNLTSWAKLSCVTKRTEMTSESPRPITKCPTQRLLATSVLSFQDDLSSICASKSQCHIRFRETGSRGRTLHGGGADELVRYRARKGS

SEQ ID NO: 962009 - protein, 239 aa, Homo sapiens
RISTERTVTKRLSLPADILAVPEGYLEKLTLNSPIFDEAPQPPSSARVRPIWMIGFVEQLEHLTFIAGHNTGAEALPMPPVYKSARTLQLTDNLVALMEHPTGDIVHEGAPVHSPVPGARCPCSRDLHITPTFVNATLTYLSITGRKSLTLALLTYLARGPEAVPWMTVGTSSTCTNVKLFPVPAASGGLRLLPPAGKAATPMYPQAPRICSIQAQGQSSKLADFGLSRVTYPTGTCSM

SEQ ID NO: 962010 - protein, 106 aa, Homo sapiens
MGKVKVGVNGLWYVLERLVTRDCIYNYWYRWILVAINRPLTLTINIQWIYTCTTYRFHTIGKLPVDTRTRAAERGSIDTYNEANTTYTYLTRAARIPYHKYKLAAD

SEQ ID NO: 962011 - protein, 273 aa, Homo sapiens
PGQLERKVLLEKKVPKGLQEEMEFNGPVGLPVDQLVLPAPLGECRAGPTWVRIGRAWVRKKALRRCDYREQNGPPGPPRSFRGPVGCPCELLEVMVIPRSYGGHAGVCEGIEKVMRVPVGFPGPPWSNRSSGSARPYLVNKGDHWGCWSHGATMVLQAQRGPRGPPVELMAPHGTPRSVAFSCGGVGRIWVNLAEAVKPRVLLGGTRRVGGDPEEPMRERTGEARSALVRVDLRCAEGHPCDGGLGFPVRGASWRTWAPGGLARGKCVGDQGR

SEQ ID NO: 962012 - protein, 85 aa, Homo sapiens
GNFKTPQKLFIIQVSLESRWAYTEGFLVASAGPRPPNFWDSQRRGSATSRSGHTWMRMSWISFWEASSTYSWVIGHQGLGDGLDG

SEQ ID NO: 962013 - protein, 118 aa, Homo sapiens
MSTSLCPQFPPALSPLLALLTRVERVLSKGRQCSRSSEGRFLSSWRTPLLPGRRAQHPFFIQTLSWAQALCCAPLRERDSPSEGTSRGCCVAAWDLGVGLCMGGRWGWDQVSLVPPPV

SEQ ID NO: 962014 - protein, 110 aa, Homo sapiens
MTGEKPRTRRAPVAGPWGSWRNSSYRTQGQSHSKAQAQPGSLSGLPCLLSSPLWLPESSSVQSESCKRVAAVAQAAVQGLGMDIRGSVEPPWSPASPPRLQGGPGGPEPN

SEQ ID NO: 962015 - protein, 133 aa, Homo sapiens
MTHSKFRAVRADCREFDRGRGPCGPSCPFSDGKLPHCQGPARGRLIVGPDDGLQVTRLRRASAGAVVALQGTAGTTLNWPPSPRAPSGPRLADRAAIPQHLTRNQGTRCGTHSIVRRPLDRGPGQSQQFLYTG

SEQ ID NO: 962016 - protein, 297 aa, Homo sapiens
  misc_feature (95)..(95): Xaa can be any naturally occurring amino acid
RSDTMGKVNGREVHGFGRIGRLDHQGCFESLVKWILLPSMTPSLYLNDTGSYMFPSYEYPDLNVQIPMGDAVITAGERVTAESFNGIDPITHLSXSMPMDPTNISKLACASCVGSIEGTRSSCDVQRSAVVSPTRVGNDMLLRASDFAIVEGACPEGVARFVLRPRLGVDSPRLFQIDRCVETDCQKVIERYESLAYGIRCYANLSLPWATYLEIVAYKDSPRGPEGCSPMTRALGIREKSDLNVDQQVLIAQSTSATANGMNLFAWLAPPPREDSLGVDRPARAFALEEISLRLAS

SEQ ID NO: 962017 - protein, 95 aa, Homo sapiens
MHPTSLCPRYWGRQVAGNPTGHMSRTAQGVSSMYEPLCSTQEAKTGPDGRRGDTINTQVSGPSEHGWRVPAHIVGTEGQHPSSGVGPPVEGLVVS

SEQ ID NO: 962018 - protein, 101 aa, Homo sapiens
TERCGAACDAASASFPERLAACGAEAAVYRQVRAVPPRPRVAALSNGLSVRVGSSEALSELLRLRAATVRRLEWMAVLRDLLEAFSEPCLAANVLHEAHSP

SEQ ID NO: 962019 - protein, 276 aa, Homo sapiens
VQRGGRGPWWPWDGEPAVASAEVFGSGILGPGSRELMDGGRGPEAAEARREATAEDNGVDSTVTKLGAQLGQRHMNASSHHRRHILSVLPPLALHLQGSSARAPLTPSLSMRARLVLPGPAPAHRARALLPQVCPLHAPVPRLALLPLSSLSPGGRTVVSAPRPRPSPPRARSSPTLVAAPPSRLRCPAALLRASRPSLVPSFSGPSLRPPSFAARPVPLLTRPSTRGPAPPALPPALPPAHPPSRVSVCAARTVRAFVLVAFVVLTASSAPSLGC

SEQ ID NO: 962020 - protein, 105 aa, Homo sapiens
PAPPAPALPPALRTAAALRVYAPDPPPADPCCCSAASSQSAHLARDVSAEQAADRRTYVKINASKIPGQTIHTNRTIKGPILYRTLKPREMQTQGQNTEKTNKRK

SEQ ID NO: 962021 - protein, 151 aa, Homo sapiens
SAETKRRRVSNPPTGRSPTEEDPPGPSPDRQARVDAGSVACGVTVYCQPGSWADRTVPRRVHVPRKMAPRPLELGSGPRRCQPAIGLTEEAPHALGARRSVFSARVCEPTMLWVAMHVPRSCCTQNAGRCMSQLPLWPFQPPFMSSYFKLH

SEQ ID NO: 962022 - protein, 259 aa, Homo sapiens
LPAHSMMLHQLAPTFSTNYRSLGSVQSAQLRRPAGQPRAGQPLYVKSCWGVSAFPGISAARRSTELTEDGDVGPGAPLAHPEISPRVLWPCASGTRIQNLQKGEHNSTHALEKRPRPWALLIPRDHACDVTSQEDQRHRVGLGETTHSGKHLAQEWDPRSETGRHYFKIIRGTLRASKSSANTGGTMPASFCGLDNCPSCMLITKTSEYDNRSCACPRSCARTESMGLPKRALWLPHYSTDCSFGQRSGPQGERALKGP

SEQ ID NO: 962023 - protein, 77 aa, Homo sapiens
MQVLSPLAPYRNLLPHSRKYPFQHEKWTIHHVGPLARSELQDESKDSAVEGFPSFSPSALVCLSGRHEHYPIRLTCS

SEQ ID NO: 962024 - protein, 78 aa, Homo sapiens
IQEPKTLPVAQCASPHYRKPLSTSPKAVANIADPCALSQMGAGPQALGDTAWGRVGVGFLPVSALTVQMTGQKQLSLQ

SEQ ID NO: 962025 - protein, 173 aa, Homo sapiens
MWCSRTSDGPGFVLALRVPSLGDGEAPFGGPLGECVLARRVDPISIVRSEFSCGRLLQGDRCWTLVCPCSSFCSRSGQDVSSGICVASNSRCIADGYLPLVCVAKLTSSGMLSHFDESGVFVVAHSSPRACVLSPIIVSLLAGTIAGQGFGTWLAAAADLSFMGPAGYLEPGA

SEQ ID NO: 962026 - protein, 201 aa, Homo sapiens
MYVAIQAVLSLYAFWTHNLASCMDIWSMVSTHYCPSSYEGYAVPQCQSLRSGSGMVRRISLDYLMKILTETWHISILSYCLSVRIVRDIREKLCNVLLDFDSEMASCRILILPLRRVTELPDGLVIAMEGERFRCPEYPASRQSFIGDGVCWRSSETTYNSIMKCDIDLRKDLYANNVLSGGTLMYPGIADECEEITGLHQ

SEQ ID NO: 962027 - protein, 176 aa, Homo sapiens
ALQSNHFELMPAALSATQGLVLCEWQWPLERADYVALAIVDGHLQLSYNLVLPARGACVPPVPVNTNLLVAWSVAHMWMHDGKVPCRWAMMCPCDLAPPRWAATQSGHCWSPVAWGACLELALWAQHLANGLRHRAFVGCLRGRGGWGGHPLHLLEDAVSKPRACGPAQPHELGNQ

SEQ ID NO: 962028 - protein, 113 aa, Homo sapiens
NDPLLPNYLNGFECFVCDYELARLDAEKAHAASPGDSPVFEPHIAQPSHMDCPVPTPGLAMWKRFLRMTEKNKREDRPSGWVQWLMPVIPALWEAKVGGSLEPRDSRPAWVTW

SEQ ID NO: 962029 - protein, 268 aa, Homo sapiens
VHVPGAGEPGNDAESRVRIHGVSQLRRRRGFWPTRRDWRAAARVSSDGCASCERCSARSLGPVSSVPFSAPHGCTRKTVLAGGFRDGYTVPSGGLRGPGHSWNIGDFPRFRVVTRKPKERKAAKELRLHSLLEAMCGGKTHTMHQVIMDLALDGAYATFIVPITGDELLSCDPDCPVVAAASLICVLRLGLQYVGLTARLREPLPHSVTAAGRLVRAALLTRRRGGCGLLPGPLRSPTRSGAPPFEPSSLFSRAARRTFVSPGPPCKS

SEQ ID NO: 962030 - protein, 170 aa, Homo sapiens
WTSRLSVKWTNQQDMGGAREENKSRLPDNAVATRSGPLPHCGNFVLSLFAINLATAHSLGPHCLYEFVTLTAKVCSFTPEAIETTNPLGGTNNSRGSALRAVTLTAKACSFTPDPGDHKPTEKEETPNTSEHQKEQTPDTPPLRTITLTSRVRGFILAVSETKNPPIPDT

SEQ ID NO: 962031 - protein, 104 aa, Homo sapiens
MGGMGGIGATTSMNWHQLGLRRHRRTSKQILLTNRKWHERILQAPPRDDGELWRELRSTLFQNAHYSSRWRLVCVPPFFGELESRLEGGDAGLCGGGGLPAGGP

SEQ ID NO: 962032 - protein, 235 aa, Homo sapiens
RCSGFPSIDLEGNCHKCPEPLNVLQMKERVMSLSSLSVRNPTLGVACKYCRRSQSGDKYYLVRHGNSDRAILLVHRSRQGVSRGRTRSAWQLVQLLALKTLLTRSSVISSRQVRAPVRRVMLEGLLLPRGSHLQIVCARFTPGTFIVTMIHGTPSGEPRSWLWLAGPPSGLTSTVLSLEASLMFTYLPLRCVTQIAPLRYVDLAIPCTTGELTQWVYMWVDAGLREVLRPAVGPF

SEQ ID NO: 962033 - protein, 150 aa, Homo sapiens
MFTSPMPLELGAELENPGVLMGGCYTPARHAPPAQTVAVSSSPFRHRGTRTCGYWLHISTPPSYEAGKTGCSYRRHYVINASMVRTPFNAVAKSMLTVWASIGGSVKERCQPTDMHSSYSEMWPWIPSGMTADSIARVRRDTERRTAFCT

SEQ ID NO: 962034 - protein, 74 aa, Homo sapiens
LRLRGAGVGWAAALETGGCRGDRSGPSLLRSPAPGLPHRDAPGTWGELQPVTRREGGAAPKMSQTAMSETYDYG

SEQ ID NO: 962035 - protein, 244 aa, Homo sapiens
SCDCLQGFQLTQLTVAGAHGSGMWHSPYQHSIREEYPVVGTHAIPSGGGAFIPTEVVLAHRWVRVPDYECPSALFRCPSRLGEQTYCNGGPVTLAICTKRSAPSYRYFMALRRYVMQSLTHDPSAYRGMLETQPFVLQGQPSRSWLSTNRLPSPCFPLCPSVHTALEPSRRELLGEYETDWVPPVSPRLGCSQAISIYKCPVGRFVSPLCSTQGAPGESAHASLFAGPRVTRCPGETSLPGTGA

SEQ ID NO: 962036 - protein, 67 aa, Homo sapiens
SKSKGHYEVTGSDDETGKLQESGVYLALRSPRHDLLVLSNDSGNKVGITATRGGDDQLTTKKEEQDI

SEQ ID NO: 962037 - protein, 190 aa, Homo sapiens
MAAFYDSAVQDALSSSVASMLRMYCLEQVSADIVTVGRFLMSLVNHSYLTNSSLMSFATYAQQLRHSYDPFDGDPYLAKTSHTVTRLALDMIEHLETPVEWSPNAVHLAGLGINPQDSEVKAKWVYAGGLLESLLTHQSVRVVTATLNRSLPCGKLNHETEIQKRECSKVTRNGQQADSLLGSLRLGVSG

SEQ ID NO: 962038 - protein, 173 aa, Homo sapiens
  misc_feature (42)..(42): Xaa can be any naturally occurring amino acid
MSSDALCWYQNKADVAMKPRASFILFLSKPFSHTFQKHGCPXVSEMCMTLSGQMYVHSDLYVQAYYSGMPSSKRALSRGSIESRGVSSQLLFSSDCTRRAVSVVFRGGLSLPSSWELIAGRVYNLSQSFRGVRCGIPMKRLFLQELGPCSLQHGGYGPGHPFRGPSWSPVGPL

SEQ ID NO: 962039 - protein, 63 aa, Homo sapiens
MAGVKDHVAVRALGWASSLRYRGTPSLRSELEALLAGGCPFLCNLGFGAFNFSLQIGGPACFR

SEQ ID NO: 962040 - protein, 255 aa, Homo sapiens
  misc_feature (90)..(90): Xaa can be any naturally occurring amino acid
  misc_feature (143)..(143): Xaa can be any naturally occurring amino acid
  misc_feature (159)..(159): Xaa can be any naturally occurring amino acid
  misc_feature (226)..(226): Xaa can be any naturally occurring amino acid
PSTSEATITMRMRKGNYLDDIMKLLEQSELAANKRGLERGTVCQMERVESRPSRHAAYGRSVLDVVHGREPGRLDEAPGWGVLGAGARTXVLITQESLERETVEIGHSLALAHMAFALHRSPCFARCRSPFTTSQGPECSRCXVERCLGDAVAPCVALXAYHFAHLYARIRQVDRLVAESQLVGWASKYGLVDGWIGRGELSWVGHRAFDSQPLEGVLEPPQTVRXDEVWGALAGGRSSFTLGGLQLGHFFPGGA

SEQ ID NO: 962041 - protein, 89 aa, Homo sapiens
QKKNLRVSGTKAGVCEIQSHGGDDDDDDDDDDDDDDDDDDDDDDDDDDDDDDDDHWGSRRTHSLSSTILLLINSPPYYFLSFLPYLPTT

SEQ ID NO: 962042 - protein, 188 aa, Homo sapiens
RWRRKALHRPFGRSLVPLPQPRRRRPRGAAPRRWSCWSTAAVCRERLLTLRGSPACCPVLHSACSACLGPAAPRRANSSGDGVGGGATAPVFGLVPLFNANSASPKTIGGEITFMLLIVGSKAATEAQDCEPVAALSLLRIIAPSHQAYCVGSAREALLCENLVLEAANSGVKLHQGTITVALYVGPC

SEQ ID NO: 962043 - protein, 228 aa, Homo sapiens
IPPSSCQKGTDGDIVAQRAFQCLKQDCCYDYRENPISSVEREEGSETFHLTTGADGVYPGFQPSSCNPIMRPSKEVLIGVNFRVGPRVLLVALQSLCRFQCSLVVRGQFLQCSMAVSLVLILWDSSAHTHLVYLCGDHPLRDPGSSCEEFLMVGATPMPFIPRSCFILGLNAAVFKTSRVLSLNAAAVWIFQVPSRCGTGWVWGSLAFQTVTVSISSEKTGRLCVAGS

SEQ ID NO: 962044 - protein, 258 aa, Homo sapiens
DWSRSRLVGIGRGLGPPARAHTNGPVADQGGAAHPPWARPYPRRSAACSPGRGHPTVRASPRGPPRAAAIAPPCPRLYAGRFGTRPPSPPFPFPVPPQNQSRWRQSDPCSALNLLCPAAPQESAVTALLRAAPLGSGDALAQVAFSSPLWRPGGSRFQQGPVGRFYPCHKASYKVPKQTGSKKHSSETLRRARATKAGGSQVKPLAKHTPGVFRTGAPPLGEGSFLGEKLSLRNQGLEELKQAAELAGQRALERTRTL

SEQ ID NO: 962045 - protein, 239 aa, Homo sapiens
MLLPLLLLLPHCCWAVEGQGGPGGVSLTTSSSSSDESNAFHRCLERSRAYHSALVSPGHTSAPSCALRQGSALDCSQCDRSCRGPHIGRASYCYLTTLALTKPPVYPPPNPGPNCIGRPVTSLAMRTKQRKIFSTQTAPVHFIGADKTTHCQNKQNKKRARQAAQTTSKIPHLDAMPSMRTRERIPPQAQKTGGTSPTSPVTAQRNNTSDFEGDPGQQKSQTNAEHKPHHNTTTPATKH

SEQ ID NO: 962046 - protein, 212 aa, Homo sapiens
MILAQWKRLCFLTELHVNGRTQLLESASRLSQTAKKRRSYRFRSAEQRTKERNRRRSACRKHGWSNRADPTVATGPVGCAARSSTVWRLPPGIKSSKKISDNYAAGIVCNAGLPSLHKRASWLQATAKNVITRVIGEQQISELGMHSYLAVGHGSQKRIADVGDRRTKANASRRCTAQIAAGALKRSPSTPANLDPASTTLRLNDADMSRRP

SEQ ID NO: 962047 - protein, 232 aa, Homo sapiens
  misc_feature (149)..(149): Xaa can be any naturally occurring amino acid
RLKEFLQQCDREDLVELALPQLAQVVTVYEFLLMKLEKDHLAKPFFPSYYITEFEELHNNGLRTHAANDYLTSSGSRVPTETLDNNTTDNGCLSSLYANSHELSYATRNAQYSPRHTLAPKHPQPEHTGMGTQTRTGSYAAEQEGNAEXCRTDGTWPPAAHRPQQENGPVPTIPTALSWLPNSRRPGAEAPAPCLAFCGRWVQLAVFTDEAPLLPVTDCPAACPARWAPLNG

SEQ ID NO: 962048 - protein, 254 aa, Homo sapiens
MMPVWGVVQLGDTVSCFGALGVSTPVITQFVEAIICQPRFCVDRNCAREVLRYRRAHRSTAWRSFCQPVVCTLSGNLRITIRAGGVVDRNRFVFFVLRLCFASRQISVGLSWISRIGYAHAGVCATEYKCVMSVGEEAVSFQGVDEHVGPGRVFAAGPFVADIAHSNKVKDVACQTTDEARDDRRRGDAIARLSLVPSQVYSLIRFRGSRINGLSQFRTPKELAPKGALMLMTRKGQTKQKLTGGKPGKYFRKG

SEQ ID NO: 962049 - protein, 35 aa, Homo sapiens
  misc_feature (6)..(6): Xaa can be any naturally occurring amino acid
  misc_feature (10)..(11): Xaa can be any naturally occurring amino acid
YGLKRXKWPXXALGGEKIHSMVKETKNQDWSQAIL

SEQ ID NO: 962050 - protein, 211 aa, Homo sapiens
  misc_feature (187)..(187): Xaa can be any naturally occurring amino acid
KLGPRCEAGGAGPESPEHATAARLVTITPREEPQLPAAGPSHHHLQTMSMRGRDPAAAAPRARSRAADTKPWTHKGAAEQRMLVGPALTIKSQYVLTCHFCVYKQRSLNNRKVYGKHVNIDYKVKRTDNNESPNTTRNMHTPKGNDQIVRKHHRTRPKKQNTTIHNPAQDHHYHTVQIAHNWKKHEXRQDREDVRDREKRSIKKRVEDEEQ

SEQ ID NO: 962051 - protein, 176 aa, Homo sapiens
MEDVLKCLAVGTHLWWTTKSLSVATMGTSSQYYYNTCNNDDAQSSITTDLKRTWEKLLLAASCRLLPLKTLADVRCYSPPGDTGQRAVLKFAAATGATPYCWPLSRPWNSSANQHPRQPSAEPRRSLLRSLSPRADHQPLIGGLLLLSLRYHVRCVTRDSPLRYVDVAIPCNNPGA

SEQ ID NO: 962052 - protein, 230 aa, Homo sapiens
LRLPGRAWGLWEVARPGPAAGRRRRRSERPAAAGSGVDWERAPVSLTLSLSLMPDACCLELVLCECAWRCADAATIVRLFWESLFWGLGRGCIVPGIGAVPLDPAMVRCHSILVLRDTVKEDCLDARNQEFPCEKKIRVRSLDVPAKKSRLPKNRARRALPGTEALRKRFDECSLAAYSSGHFYQATRVFPAGRPLGDLPITNTEGAQGTWAYSRPRAIKGGPLPTFDLR

SEQ ID NO: 962053 - protein, 92 aa, Homo sapiens
SKKTIKGPEGLAEGALGLGEISGHRGGSGGNISRIREPSRGRWGAACTITGSRSHRPGQYSSLLGARFGGYHWQMQQYGAEASGNSPPTEAS

SEQ ID NO: 962054 - protein, 85 aa, Homo sapiens
VVLVSTNASTRCPSYDRCSDSTLLGGVMTEQIDPSVGILDGATNWPRGNARSAYVRACRDSPGTIKSVIAALLLDDNKDPFIHCA

SEQ ID NO: 962055 - protein, 203 aa, Homo sapiens
MNTFKRRALYPKVSETRVVIALQRHRCPSTRLVENTDETYCIDNECCSTYNLRSAIPQAGHASTLRGPRSHLVSADHELESPGSLRFPGQLNADLRKLAVNMVPFPCLHFFMPGFAPLTVPGQPAVIGGLSVPELTQQMFDAKIMYGRLLIRATDCYLTVAAVFRGRMSINDEVDRQMLGIQEAEQSYFVEWDPPKVKVALFN

SEQ ID NO: 962056 - protein, 325 aa, Homo sapiens
DYNMTPDRHLELPGFDKCRPNLLITESTYATTIRDSKRCREIEYFLMEGPRDLWIVVRTVLIPVFALGRAQELCILHGDLLGAHCILKVPILLSPRGLTDEGQSTIYNAVRSLWNHTQEGIPRRSISGAAGTVVVSFNAPSNGLRTGAFCKTTSSDLHEFVFCQRLEKCSLRCGMSPARSSWHYGARETETSIHWSSLPRPDCGARATVWPRSIRLAVCKLACIGRCDGGGMAAAKVMTAGGVRVIHAHIADCHRASMQLSGPGRSRDSVLLVHWRGPRRLAYLEQKDEPEVRVNGYLPGHGDDGDAGPSPHPRRLSWAVNGMRQ

SEQ ID NO: 962057 - protein, 173 aa, Homo sapiens
NANAHLTSETGSAPQTSHSKLDGQAGPEESSSQASSLVLVPKGRDNVQVFLGLSLGQGVLAWTEERGREAAVSLDDHSAELEPTWFLTGQTQALRTDVNSWKADSEVSAVWCTPPQHIRVPGVPSATIGSCNDFPRRHAPVEACGLTLYNRQTITEPRPVLVRRTCVDQDLVA

SEQ ID NO: 962058 - protein, 128 aa, Homo sapiens
MPRMRLLALVAPIGAICAVAAIGYIGAAGILLEARSATPRDSVDPVNMLPPLLALSFPSCWTKYTAAFAPRKPDPPVVPCPLVAITKHAKTRVVGPQPMLVRGDPNGYSREIPSAWPPVPLDVVWIRP

SEQ ID NO: 962059 - protein, 320 aa, Homo sapiens
RGSASVSLFLIFPPFPLSYILYFLILFSPSPPYKISPYGRRLSRGTGAEAGLTQRRKIKREQRKTRREKEKKQKRKREEEKREEKEEKKNQKTHTKQSNTRENKEKRTQKRKTERNKKEKQRSKKNTSKTKKTDHEKTNKTKPQHDNKTETEREKKRQHRKRTTDKTRKQKKEKTKKETNKEKHTAREKQSRKTTKRKKEKRKKTQAKKKRKNYDRKHTKKQKTQKQEGQEQQKKQKEKRRQKANKRTKNSRETPNKKRQETKKKESKKKNDKEKRGKKKRKKQKEREKKQKQNNTHQRRTKTARQNKAENKQRQSNKQE

SEQ ID NO: 962060 - protein, 118 aa, Homo sapiens
QRQHAQVVLVGELCWFRYSAPDASTWVCPIAWASMHHNETGHCRNAKEEVRVGIRGVCWMLYVDRTRTFLVGRTSDIRLTIERLSAPCGGVYKRGFQSASFRQDLSRNTANRWFLSCC

SEQ ID NO: 962061 - protein, 273 aa, Homo sapiens
  misc_feature (212)..(212): Xaa can be any naturally occurring amino acid
  misc_feature (238)..(238): Xaa can be any naturally occurring amino acid
RETLVEDALTSRVESKDSGVPCAYVGRLIGEVISLNGMKEERDQAAVCRLRQRLTRRASLKFTKDGKLAAKLGFDGVQESEEEAQKAQKHFSKSFIDTSRITVEFCKSFGDPAKPEPGANVPRNQARPKQAPKDSTTPEIRKDENEEKGGRSTGEAEGGYRVPGVVCQFIRGGRQASHLGEVMAVDAEPSKGKSKPGSDYLKFDSRYWAESXEEGAGGGLEEEASLEASSVKRGGDMXTETTGRRRPPGKRRETAGKAGPKRPTLENGGTSAE

SEQ ID NO: 962062 - protein, 135 aa, Homo sapiens
MDKSYYSIACVNGTVVCTRMLVGTRITLVLIKSHDCRRIGHSRVGEIDTQGLAGRGPGGPRIGKAAKGLIKMGMNEHEVCNLPSNYNSGILEESPFAETKPNTSGRQGGIAEWGLPMSPEAATGNGQIGVNLHSD

SEQ ID NO: 962063 - protein, 81 aa, Homo sapiens
HISSPRCPEREDDWQMRMDVESHRLRRSGYADVHMPVKPVRCKAAVWLDKVRTRVAVTRSESKWRTRWGPGWNVVLSQMEP

SEQ ID NO: 962064 - protein, 107 aa, Homo sapiens
GGRLARTPVEMRPSPGDGRAMGGLGHPVGMCLCIWSPCRHPGSFPTCVLLLRPLVKSTATSLSFLATCRASLASEDNATDLCNTNYFNLQQSTMLLMWCRSRPDAFR

SEQ ID NO: 962065 - protein, 102 aa, Homo sapiens
PSHAATRRLLSGCVKLFIDNRSPGGYRARMIRSLFEHAHGKVLECDITYIYYGFCAHIHDKTAAVRMPLRNRVTTYKLHGVQQSTWKPARIRAKLQPSYTLG

SEQ ID NO: 962066 - protein, 136 aa, Homo sapiens
ASETRSRRRMTEQMTLRGSPQGPQRLGNPDRYYPSSARTVILSASRDRDPSSMLVKTDHGYRCTQLIVNSTACSAGVTPNFVSDVVIFHQMAQCALSGSWDGTLRPLGLSQTVAATARAMYVGHTQGCAEMWPYSL

SEQ ID NO: 962067 - protein, 262 aa, Homo sapiens
HQVVSSALQQRHPHPPPLTLGLACPQRPLSSSSLSWYDNVIGLQRDLGVVDLSGATSGLRQEVTTPWTTRPPRGEEAAKRRKEKRPITLLGESAVRHSSPHTTLEVSRSLQVADVRPPLNRGDGVAREACTLVNVAIQLEGTLVLLTKIHEKKIGSMASGVGSRGVGRRSSSLALDGHVTWSLPYARVFRRSTRGVRLCAGVSPLMSEACHHVLGVSRLLPRGIVARGKLWPWGPVEGFEPAGFLLTQVLGTLNSLRYRGDK

SEQ ID NO: 962068 - protein, 284 aa, Homo sapiens
MSIAARAPSPSNPSDVPHVAANSDAGVCEALAPSPGGPAAGEVWAHPPSLLVNYELVMETGLPTPFQPTEDSRAAVCLLGPQVSALNVREMVCVDPPLTGRVDSSPGAPTRRWPTGGYATRADETRNSFGLHFFASNVALMRTIPCVYNPVQIVLISRYVCRGKSWCYSPVNVALGFFGVPYRWVHALNLPDPALPTPRIRTGAGWFRDVYTAAGNPAGENDLHGLDDRVCVAMNDDPGQPAHQNNPAESPRQTARPRPNCKENPSKGDTRTTTQTHTGTRLLQ

SEQ ID NO: 962069 - protein, 170 aa, Homo sapiens
MLSSCDPSDKVPRHICEYSTPTIDGRGKIALPSLPVKGVGRSILRRWWVVGGKGESEWDLTRRAGELTEDEVERVITYYAVIHVQYQMIPGLVAGRDEKDVKDGRYSQVLANWSGANKLRERPGATDRRFGPMRGLRHFWGLTCPRPSYDQVPLAAVAAAVGVSMNEVGL

SEQ ID NO: 962070 - protein, 229 aa, Homo sapiens
RPSPVRQRISYVHGPNARGWCWLTLCEVVWSPTGEEWRAAAAAVCAATRMGAWCMPDADAWPLLVQEMGWMAACLRPEVLPWYAPLAAPGDHVGQLRLPSGAGDGCRLRMWWPPDGPCRSQGAWRWELPAGRGGAGRPWAGCPRVTSETVTCCLFSERDAAGCAPGRQRPPGRGGPGAGGRAEAESRSALACAAAGAGTQTVTYSLLKLVKERSLDTLLEAVSPRRRAG

SEQ ID NO: 962071 - protein, 215 aa, Homo sapiens
MVSVPSPARSCALAWSRRPQPWQLPAWPRRGLPAPCASAAPREPGALPDCGHRFCRACVVRFWAEEDGPFPVPLQCCLTDCWQRAVLSPAGPLLSRAFWRSRRRPVAARALTARPAMACCCSCVCLRRRLARVCAACRMAAGPRCRPMWEPALEDGAGGNGEQGVLCEIIENRTWMTPGTCMARAESAAAVCKGHDDGHVGKKALTGLQGSCGPS

SEQ ID NO: 962072 - protein, 251 aa, Homo sapiens
PTGEAPQRPPLPPVTADYQYGRNNQSSADHFQYSRQSYPNSYSLNRYDVESSKGHGPDCFGDILPRSPHQQVSETSDNHVNVATQLGVTVHKLSIMISPWGSWFPREPPEDALPAVHDGRELWAIPKQMTSCLIALSFLDVCRSEWPCSLRRSWPRCTFPCANLFPMPCVSQSTCVCIPDNIQDLCEKLGSLCAVDHELSSGGVHRRLLENVRLAESNALAQIAEDHRVTSQRKPEIFNSPHNDPSGTPSP

SEQ ID NO: 962073 - protein, 220 aa, Homo sapiens
CYRDYKWKRFGGRGPNSGRGVPAPGQFYRFPSTPDLLHGSGVLALLQRLQFTRTQNPSGDRDLSPRRLSFEGGVVIAADLLGSYGLLGSFPQHLSHLCEFNNEYQCVGLPLGDYADFSSIFEASFSAKVVIVMRSFVGNGHSYSPKAIQFMADQGHVQPALEDEPFVDTPWSSEDYADGESFLGYVDMLGVPMKPFRGHWLWAYLVHLCAKIWKSAVLAD

SEQ ID NO: 962074 - protein, 56 aa, Homo sapiens
ISCAHWHGRETFYVSEMKETEWNGGAVEGIAPVVARADHWCPQFVLGLPGRNSARS

SEQ ID NO: 962075 - protein, 246 aa, Homo sapiens
MWPAWSQHDENTQMYTHMHVDTSDGHSTTKCATKEWTEHMQMPQHCKGPIYRGKKERDTAWPDHGKEWRFQPSFPTLDMTPRPFHWNNHQTKSDKSDHTDQSPNRTIQRTLEDKAQTPRGKRQIPTRQKRNITHRTQMHSHTTEKREKQASVKSMLDGDLQSQSDQNKVMNEAKEPYNHINPYYGQRYQTNTRGTAHLKTHHEEMMEHRKNITPKQDPQIIRNPKTFKGDPTDLHRKNKENSHKEI

SEQ ID NO: 962076 - protein, 38 aa, Homo sapiens
NYGLRYRGLGCRAWAWFGSSGSQEEEEEPGLVEGDPGD

SEQ ID NO: 962077 - protein, 114 aa, Homo sapiens
FPDPRVEAWSKGEDLKKYFRRRMKEEVAERVEPTPVETSPTWTLAPRLQSAIHHPSSYLGAQARRTKVTGTWADGRTGQWEKRSCRKSARGFVSVQGTKSSTITAHQILGVTGR

SEQ ID NO: 962078 - protein, 224 aa, Homo sapiens
DNGPAQMVTVVPSLLHQDLAALGNSDAPVTGMVSASELAVREQERIPSLQAIAAQVGWLFTNSFLQTGICWILLSASASVRCPSEIMVSQKECPQGIATRLLSPLQVGPGSAGPFGLLPHLQQKYSSGLKVFVPLESVMPSSPAASHCCMTGMDSEFCSTSPRREPLGHPGGTGAALDHDEQRLPSTVWDIMFQVAVPNVNESEAAAEIQLLLPVIQSFDGSSV

SEQ ID NO: 962079 - protein, 181 aa, Homo sapiens
MIKLSERYTNHAEEGRRRAVFRKRASRPPLPTYSAVPCYFCSCALLPVDLTEQQRTLTESIGARKGGSELGVDQCALRDALGDDLLEHDKRSTIPGVRRDNWSLRSSRDAGRPPVAGVPPCLARTVSFTPDQASRLSRGLCRVPDLDRNYLSGLAAVQTEFMLTDDLLTRFFSDACSTCGE

SEQ ID NO: 962080 - protein, 280 aa, Homo sapiens
SLLCASHPRGSRSFSRLRPRQRGRTAEAGHGLSCVWEPDLSKDRCELQNVIILDDPTKLAKVEENDRPLTSSNRAAITITLLSFTIDSASMYFAFDLGYVLCSRKTTSGEASSLLFCFVSYRSSVLAFPIWSVQLDRHPVLHGESRFWTHVCSSFLFLVFLLFLNFEQVKSLYCIVLDPTSSYATREADVMEYAVNCHVITWGEDYPATFDILAFGHSWGWGHEGFGESEVKGSAGANQDYLGTARALFWVSSHFAASRGHKHLGTVCKRAGDSGRTPRQ

SEQ ID NO: 962081 - protein, 195 aa, Homo sapiens
PPPPPPPTIASIEASLNSLTETLPGNLAVRLSTQSDCLIFNATSPSGSNDCSYCETEFSHTCGASSSRCTCWRHVTCIPAFLSSAHPRALQPARPVAVCLACARVVHMPGCHSAWPDLQCPLPLPCHSAGVQLSCLSMPHSGMQHDLTDTAGTYCLVASVLGVLASTLSTVQTPCVPGAWCVGVGHQPGFLTLVK

SEQ ID NO: 962082 - protein, 225 aa, Homo sapiens
MCGKSGGGRGRRPCGQGHEDALLLGTRPGPQGPPVIAGWLQVLGGHAIGPGGDATVLLGVGGPSDLSSWGVCGSSLLAVAPVSCPSRPEYGKAFLWVFGTPLSNQGSLSLDLLGQARDIVYTLQLSRELISRSILPVLGILLFRAVVKARELLQDPLLKVEGASQKLLAGNTVRETFPLGPHGASLSARPGPSLGPGGYNVQLVLAHIAARGRAESRPSVFFVSE

SEQ ID NO: 962083 - protein, 138 aa, Homo sapiens
MLTPCSDSDLSADLDPSVAHTWHMVGEDAESALFTCSRTMSAENMELRWVSSSLRQVVNVYADGKEVKTGRVHRHRGRTSILRDGITAGKAALRIHNVTASDSGKYLCHFQSMVTIYEKALVELNRCRIAVLDLSHPM

SEQ ID NO: 962084 - protein, 98 aa, Homo sapiens
VFQSQRQATRRTFIQKYHTPPWSRAQRDRKATHRWMRQRDVPGVYHRRKADHSVDQTRHSECQHKREIGAQLGYRDSNGRSYIQSLHVIRAIIQKYFE

SEQ ID NO: 962085 - protein, 209 aa, Homo sapiens
MRDSEVGSGTVEVGSGERGPADGDMRGGERLARSGERSALCSCRRTLNHGRPRPRVDDRRARARKAAAQRWKTMITHAGIRDQVRSVDVSPTFDTMGLREDLHAGASMLYELLNEPFAIPSKVAINVRVINRGDDCHSATDRQIRAHGNNRATLQISSSPSKMFWIIQGFVDILQGLDLELPSRELGWCRFQKGLISSSSDYRELFRCQ

SEQ ID NO: 962086 - protein, 246 aa, Homo sapiens
MAARSMPGSRHRTATQTPPEDHPDEEMGFTYRHTRVTYKPGEKTYTTEAADYYQLGNLPTDITEGGTYKRALYRHRLWRAPAARLSSNTGHAAHNRHTSSIGQSRTTDWNSEKAEASDAHHSSQKSRNLLPGYSTIRLTHRNAALEHVQATLNYQDSSTQQKPDQQPTQFNLNHRDTQDATNQPARYRSGKSTTSEHNAYTGNNAAATTTPPHTATPCHHTHGLRKHNTAQNGRTMTLDYTNAHNR

SEQ ID NO: 962087 - protein, 124 aa, Homo sapiens
SAPSFKCCLCSENTLIYKYPILNPLQIVVHKGRLYTSCRSTIGLLLCTPDSFTVAFIQVVIDYLPIKSIGWSVAGSCNLQHYWRSHRWAGSLEDQEFETSTGQHDETPSLLKIQKLAGCGGSLL

SEQ ID NO: 962088 - protein, 139 aa, Homo sapiens
  misc_feature (66)..(66): Xaa can be any naturally occurring amino acid
  misc_feature (90)..(90): Xaa can be any naturally occurring amino acid
MGLLLQLRRVGRRGEPPGSIKGVGVLHATSMNVKQRVRAGVRNCMRYSARAEMSWCSDSSSTCAIXRDSVRKKLRPHPDANGCVQLVVEXLICMRRRLAFPTAGEVVPECRQCSCMRARARMCRMGSEVLSWLGSRFSR

SEQ ID NO: 962089 - protein, 163 aa, Homo sapiens
MANGFGLSVLYFLFLVFLLFLNFEQVKSLMYWEIQIFDTPKGKADVMEYAVNWHVITWGKDYAATLIFLRLDISGAGAMEALSESEYRSLLAISITWELTEPFFIGFSPQFASAWGHPVLLASCVPCGAVGGWRCRLDQGSLGGHDFSPGRQNFRPCPRFCCP

SEQ ID NO: 962090 - protein, 173 aa, Homo sapiens
MALARCRGSLAHARAPRARPGGTTRTREMGFTSRTVGGVCSRRARTGRTAQRLPPLRGDVCPRDVAEGDFLRLFERYGEPSECLHQTGTVAFGFIRLDIQNLAEIAKAELDGTILKSRPLRIRFATHGAALTVKNLSPVVSNELLEQAFSQLVPVEKSCVVWMIAVELRETGL

SEQ ID NO: 962091 - protein, 186 aa, Homo sapiens
MLAPGDPNIGSKNLGPNECSLCHLEARTLMHLVETPPNRWTIEHGASTTTHSAGSDGERVGRATTPAPAHAASTRRSHSITGSPLRRACSTRSHGHVASLRSFVTAFVPADDGRRTSGPLPRTCSLGSQTSTPPAGGETGRGEETRGKGAAPWHPIGSKPLFLHAVDIGGLPKGERKNKTGMGVGE

SEQ ID NO: 962092 - protein, 94 aa, Homo sapiens
EKFGLGRRLGVDLSVTLTVSERWSLVTALPPFALGSAMPIYQVKSPITGAARLSVCMLPTLHVPGSPTCTRRNYAPRRRALAYCAGMSLILSLQ

SEQ ID NO: 962093 - protein, 115 aa, Homo sapiens
CCFSCYITWALADHYTRSARRRARHMRRWIDTRFEARRELCWLTASQCHQPAENKTFRFVGTHSQRQIKEVITFREKNQRQQVCLITCQLSATVSRPWARVGYRLPSLALYVNRQ

SEQ ID NO: 962094 - protein, 121 aa, Homo sapiens
MPSMTPFIDLNIHGLYMIPISFHTMDKFTWHQYKAENEELDHQMEIHITSHIQEQRLPSKNQDGSRMHGRLTIRSMRRSNMDVINTPNERTAWRDINIDTEERQTKKKSIQIESYMTHTIQ

SEQ ID NO: 962095 - protein, 72 aa, Homo sapiens
WTCRDESVAQRNAYDMSMLSSETSRLCHKVTYTDRSGAESGLRLDDLFVTGRYVRYVPLSQNDVKHHASSAL

SEQ ID NO: 962096 - protein, 146 aa, Homo sapiens
SRGPCMEAGTEMGVVRDQDLSSLSLLSDIVFKPCVAIPDAPPLMPRIDRSILRSSNYFLKIINYWMIIRNVSLWEQTNVGSKLDAKHIRMFLFDGKAVVLMGKEHHECAKAIRGHLENITQLWEQTVCLIIRGVMSGFVFTKDGPH

SEQ ID NO: 962097 - protein, 194 aa, Homo sapiens
ARYEAWVLTLCPCCDDPDRPSAVPATVCCCCWTSPRRRCRRPLCKRSRLLWAHGPPVIATRQAIYTCGGPLRSPMHRLVYVDPLTMKHCAVARRILPDPGSSSLTWLLVYGVSSYCLRWLPIRIHAAWNNTVSDGQSACMLQRLPSSVECSECKFNKVEACVLDELDMELAFLTIVCLDSSFERHGEQVCQYAC

SEQ ID NO: 962098 - protein, 311 aa, Homo sapiens
KKNNGRSRPGWYRERTRQRLCIAFSYFSPLSPFFFNYFFSFLPCTKKSSKGHGRGKGKKEQHPEQRTTKRNKEKKRSKTNRQHETDSRKQTKHKTSKQETQKTKENKNKKEQRKNNKTKTKEKRAEEQESNRGRTKDHTHEKKKHKTSKQKDKHNETNKRDTRQSQETDHQRKKRPQQNEDKKKIHREIQKKGQKEDKELRRNRERKGKKKEKNRIVNITILLGETKTRNHRTMKKHNNSGKREQKKRRKNREQSNTGKTATTGRKKRENSDKERRKKRNKNKRKEKTTDNQRQTTTRKKKEPKGHNKKQK

SEQ ID NO: 962099 - protein, 128 aa, Homo sapiens
YRLLPRYQTEGSQKLSYHCKNVIATASDYDMPEQSPISDLPSDCVTGWWPASSGPLCCAGAVLSVTALCSGSLLTPSKRTRRSTENPPYKFIHMLKGISIYPETLSNQEENHHSAEKTKMVLGGEGET

SEQ ID NO: 962100 - protein, 218 aa, Homo sapiens
GSCTWYVLCGGDNLSKDPNGPIPFLDSVREGRLELHVFYVLASPAKRRLSTLILHGGAPMCRVQEPGAVLLAQPGEALAEASGDFISTAVHPGLAWSATSRLELGRAYRALGPRRSSGWTTGIRKQSPGALGRGAPRKPGSRHRATAGAEIRLLPREFAATRTVKAEFFDGYGLQGDTLPRLLTPGFRCPTRVTPAFGVDKGEWDRPDSFAFSGQATP

SEQ ID NO: 962101 - protein, 84 aa, Homo sapiens
ARGSCRNRLVMKGGKKKQASSEVHSLYCTHPVEDGIMDAAYFEQFLQERIKVNGKAGNLGGGVGDHRIGASSKITVHIPRCLSP

SEQ ID NO: 962102 - protein, 130 aa, Homo sapiens
MARVVYNLQGSRGASALPGAGDERVAYPLASVSYMYVVGWSMARTGPPRPPRATSPTAWGPQSTGNGTKELGDFSLSPGPGCVTDPPVPRAPSVRPGCSSQVEMVDTVRIPPLGSFESEKLNELHYAEAA

SEQ ID NO: 962103 - protein, 167 aa, Homo sapiens
MSALPHHCPTPEPGWPPACIKLEAERGTRREGGTNGPRAVPFHARGMKTLLPWTDPCQPQPLSQALPQLPGSIVQSPWKPEPWPGRMGVESYPALSPCIPYYHLSRSAYEGLGRELRPPEPQPLYHCQHSSGRFTAARMTDELRPMRVKALSDVTKGATMPARRTAE

SEQ ID NO: 962104 - protein, 217 aa, Homo sapiens
GKFLWRSGPESAMSHGPMQPGAAAAPCGRQGSGSRHGGFVVTVKQERGEGPRAVREGVPRWRSRLKKLAAGPRGQSSGRTILPKWARRHRSRCYCALPERIGAELDPHCAYPDLPFPEITKMLGAEWSKLLANGKSSRYLDEAEDAEKQAATSEGAAGVPGSLKPIRCARRRSRRRRSRTEDSMLWAHEHSPEWTQGGDCDGFPTSMSIFTEEFWTT

SEQ ID NO: 962105 - protein, 120 aa, Homo sapiens
  misc_feature (72)..(72): Xaa can be any naturally occurring amino acid
SEQRAGWIAERRVREPSRPPPQPCPSRFEDERGSARRPTDRGRDQRRERSGQAGRSGTATRGRPERVDGSSXEPKPAVARGGGTEPVCGLPRAVLAVEGGSRLWPLSYVGRTKRTKESKV

SEQ ID NO: 962106 - protein, 123 aa, Homo sapiens
NGVVVQGPTPHGISLIASTAVLKSNLQGGTKVWGRGARHLPRLCFRLNKAAGKLERGVEPTTAQGGRAVPLVGLHLRGGRAQTNKKTSSITLCVRTLSVSPVFVTAFVKKKRGGSPPRGSASV

SEQ ID NO: 962107 - protein, 119 aa, Homo sapiens
CNRKPTACSILQSEQFSYSLTLDRGFSVAKIQNKSDKIKADFHIGRRRVNSPTGKLGPCGSMPFLLVVWGQCRWTCVGCEPRASNLATLATCKAILAILDLQWLAPEPLLFPPIFPTWV

SEQ ID NO: 962108 - protein, 267 aa, Homo sapiens
DHSPLARNSEERLQQGLQAPRRSHPPVAPLAYPQNHLAGHESTDKRTDARTRKNRQDEKKREKAHYTPHRQAKHKKANKRTAHPHPRPHERNTRREDSASDPPAQRRDEREDRAGQGTTHRRQNGGTRRAQRQKAEAASTTNRARALPTHERDREETAPPATRRERPATDPPPRPPGGETAQSDNKRARTGRDATTETQHTTTQQEQTRREEEDGHHPRRESADTRGGTEHPRPTTQTQNEKANAREAEQTRNMRTTPPRSDEQKDT

SEQ ID NO: 962109 - protein, 79 aa, Homo sapiens
  misc_feature (1)..(1): Xaa can be any naturally occurring amino acid
XKLRYSYLKYGGSDRNRTSDTRCFKPLLYLLSYRAIMAVQTGIEPAIFSVTGRRINHFTTEPYWLLETGFEPMTDKASR

SEQ ID NO: 962110 - protein, 315 aa, Homo sapiens
SFELMRSNADLFQLGSRPRGCCWIVCTTSEACRWRRGRTRSPHCLTRTGHVPADIHHDRPVIPACGCTAMQGAAHDATLKASIVTRRRGPCGTARRSGAFTREGSRKVLREASKGRSGAIPVHRYPMRNCEHNHITEPVNKKVSKNVPRHNILFPIRHIRGISKADYTPHGPMNFYQPHMRMKTERGVRTRMRYQSVPWQPTALRETVWSGTPLARKCPGHFTLAKVRNKRTFRGEEATPATPRNPPKETGGRTLTIPFFGDTSGITLERHGTTGHTGASLEKRPKLSDGALSGELFLPGSDSTSTGSLALGTCC

SEQ ID NO: 962111 - protein, 43 aa, Homo sapiens
GQDTKGTSYNEKPGPGQDLILCKTCFFLFGEVTRDPKVVITAP

SEQ ID NO: 962112 - protein, 95 aa, Homo sapiens
KRLLVSGGRLRAPPRLSVAVAALKFICLRHSGRFWFPYNLVRRYLGVSLQHVADIVTTKNSLLNFDSRIVDCIVEKVKKRGTRWLKKQNLKARSA

SEQ ID NO: 962113 - protein, 68 aa, Homo sapiens
  misc_feature (40)..(40): Xaa can be any naturally occurring amino acid
  misc_feature (57)..(57): Xaa can be any naturally occurring amino acid
MTSPSPASVATQPGEVGQGGHRIFCDKGSTAIRTSLKETXWSSSEGNVTEKKLGELXRDGGKNTTRVQ

SEQ ID NO: 962114 - protein, 193 aa, Homo sapiens
GCNSVYWIMSPGFLVEALVGEGHRAKGGVKGMFEGCSVMSVGASKLGEGRVEASGTQPDAQSPGPKWRAAGPVRRHLPRVAHTHAHSHRELQRPLFHNLHPGANVTLGANLNSQKGRGKQSSVNNRTVHSFLFKSGCLSFQQNCHIKGLAIVITPVGNIFCKFPLTHSAFGITSGVMRGGFRRPVISTGKSHT

SEQ ID NO: 962115 - protein, 229 aa, Homo sapiens
SSGVTEAFYLEHKTTGDLPGGHPGNNTRLTGSLNTGGKGEGEEKQWTGANYTTGKARAGQRGPGELGLLVGSPKGSGTELQGGGALTAGPPASVVGSGGLELPELDTEGEGCLVYAKGDQRGLAWPTGLTGARGVPECSWPANLALRAEVQAPGCYEGIEAISVGRLGGHSWLNGSRRGRKVGARYAVEGITISGNFYRNTLKYRAYLRKGMNTTLPRPYHFRAPSRFR

SEQ ID NO: 962116 - protein, 178 aa, Homo sapiens
QDRHRPGLPCSAARCWSSRCTWGPSSRAKMRLRKKAVANPEDALRHGGPQYCRSDPDVERCLRAHRNDMERHLHPSFSWASSTPFWVLTLLSPWMHFHGSSSMRPMMAHTVAYTGEAERHPVRLRGTTTMDPASPCAIHGSADPLGSGTPPDDQTADASLDTRPWDKEPTRAYTLGDL

SEQ ID NO: 962117 - protein, 228 aa, Homo sapiens
TGGGLVHRAAGAVHSGCVEPGGVDGVDPGWSRSPADVWVLECGVVPVRVPAMNDLSGDGPGWRWRAWPLGVSASSAGRAAGCCWAVTDHHEKPLLMEKLCLNKNISCRSCDRNRSPCGKIIIISELREEVSFTQVHLHEEAAASGAKCVLTHSPTWIIDPIDGTCNFVHRFPTVAVSIGFAVDKSLNSGGDLPLAQKERLYTGPGGVRGAFCKWTAAPGLRGAQISQR

SEQ ID NO: 962118 - protein, 231 aa, Homo sapiens
VPPESPGVGVEPQGENPGDICGRRPCRLPRLAVGGGCCLRPTPNPNTCERAQQPLLSKQQREITQRSRSPVVEPRGTSPLNALQSTSSPRTTAQGVLLMLQTHIIGPKMCSNSDLFSFRRHKTKENLSISTKNVRYYSHIFVVSTQNILENNLQPPRPKKKIISKTSVPKNPRVCETLWNSTLELCVRTERRQLCFVTPEVCVWTQTLFEDFSRRNSEDTTCATTPCSYPW

SEQ ID NO: 962119 - protein, 261 aa, Homo sapiens
METRRTGLSHPLKPRAPCAPGHLARVFHGHRGPTLITNIDDSHSALLFRTVKKELSQHQRYTRHAHWNWSRRNCSHTYHQEENKTTLHDSDMRVGRDSVKPTEGGFQKMSRSHLGLPESQNKTEQRQETQDMKTERTYEPANTNELGQERRNHQTKRAHNRQRSTKTTHATHRKRVMRQRWRNIEGSSQEETVRAIKEETIENRRPKGRTGETQETEGNDHDQGKFDDVHAIRYIQDNMTPEKEKDKRHRRKKKRKQREKE

SEQ ID NO: 962120 - protein, 210 aa, Homo sapiens
GGGPPPQKGVFLKKKLYKGAVLLLFLLLSFSSGEEREKNRVYRETTFYIKKKLFFSLTNILLIRKEGVVVPRGTRAGLYYCVCRHPTALGPLSARVCVSSLSCLWEGFSLSLSLSLSLSLSLSLARAGCGVPPGAPGGGGRWLYIVGGRRKNRLSLRRKNNTKKRERGEKTTRRQASPPARGGDSSLSPKPGGGATKPPGGGRVDYPERN

SEQ ID NO: 962121 - protein, 191 aa, Homo sapiens
MSSRQSGGVRLQKGMLLVSVLLRAEEEVGVHLSHYPKTAGNSEFLGKTPGTTLRNWIPARRTRRDDKLRSKQLRTTKQNDMMHSSGKYEAVLNKLTPEKFDQLLPCAPPCGCRVINLHPLPGSYCLIVDKDPRRSHSIAHCLLSYVCDWQKDCKLTRLSGPTARGVNTDQQATQHIQKPPYFQIRDAFDTT

SEQ ID NO: 962122 - protein, 259 aa, Homo sapiens
MRQDLAEAQARPSLTRSSLMARPRPTVRGIPSCWCPATPYSDEWFCMQGYAQSQRGVGDAVRAEQASDDPGSYTQTRGPGLQPPRDPTRREWRQQRPPWTGARTRGPILVGHRRAPGARERAHAMRGRLAGEGDGPGKDVTLQWMGDPQEHIGSQSGKHMRACPPGAGILAWYSHRHSAIPGRPDTLHPTGMGAGASPLRPGPRGSKAVRPTPGPRRDQAPTSAWGWRDGSGHRGGAGEVDDTRRQIAPHAETAPDARN

SEQ ID NO: 962123 - protein, 106 aa, Homo sapiens
MATLKEKLIVTSSGKIEATVPNNKITVVGVGQGGMAVCYQHSGTKSLADELALVDDCWKISLKGDNDGICSMGSVIIFEHHLNIVAVVIRYICCDRRRFYRSVVVN

SEQ ID NO: 962124 - protein, 243 aa, Homo sapiens
MKEHGDVPPTMLDGTLNNGAGGISNDEACGGDVECMAQSPRLLKDTWDSDKDDNYSIKNSLDTLYQAQEIVKPPSFNSCDHSIQDTPHAEPPSPPCKGLFSHFTKHDRPGVVTTPPYKRTAMLTGSSALTGSSRPQDKNYGPLPERSHVEVAGAAIHSDLKQDMTRSMRAEDTNITTERGTTRAGTNIQLVGDKHPSTRATRDRWDPQSQESAKQNTILDARRRPKNPGPTPNTVHHGTAPRA

SEQ ID NO: 962125 - protein, 475 aa, Homo sapiens
SAHKDGYIGSKEQHAGKIKNPNIKSVECGVERLKTVRPAVDFGFDLVKGCGEGRISHRKSACSPAPNHHPCGQGFSPLSQGGHGAQCLPQGGLRQEALCVSSPCARIFSPVYVHAFCGNLRRGEGSLSRCESVTTCGGSSPVREHPFCVAAVRPTPSVAPIACGCGVCQPVSVSETQRAPSLSLSLCRVRTHLCDHECVRRVSLCARTCRPGARGRRHTRVASPGGDRPTRGVSTHKHKAGPVVGEHESVWRAPHILQTPSSEGKHLVALISLSRREGRPLCGCYHPLYQQRDTFHHPLSVDPCCATRAQKMRRGLSPPVVARLIRKHHILLDKKVVRPQGGTTKTAGLSRGGNVGAVSSGIPPSLSVVSLLLAPTPRVPYYLVCNPYYVEGPSSGRAATYFMPKRPTLSTFLVVNHTLVGDRPPKSGLSVSRTTLFPTTDLPYTSPFEGASLRARGVALFNPPLWWVFCGGGSP

SEQ ID NO: 962126 - protein, 317 aa, Homo sapiens
MYMPADGVCIICVCEKLCISRVCVCMCSTNTHTHAHLISARWRARAGSVFYPRCVSVRSMCARARVCPRVGSTTRVVALYMCISPESRLSHSPGSRESVGHFVLWLFRERPRAQILSHTQSRASPPHFLLSGVFPPEGSLPSQSAPHKREEGGRPCCVPPVRIKGRRQRIASCGLRGPIVESATQTRAPPEREIFPEEIYKAPPRGRPPGAILCLYSRGRGPPPCRREIPKEGQAPGRVSPPQKQQTNPEAAGGGSTKEERPDNPLLHHRKWGSRSIEHSDEKVDIPWVLFFDTPRIRGPRVFSQPQKTVLKKRGGP

SEQ ID NO: 962127 - protein, 439 aa, Homo sapiens
MSPRRKRESLYTRGSTPAQTTHILDTETHVCSRDTWERLLHTVCADTHCATRQRDRGAVSTTAYSADRCDTHVVASLREYHPPLLRPHMMRSRHPPHHLPTHLCPHDETYCAVYITAEQRPDILLSPMIISSAGTLGTAQSSRLDATRFPPPLPLVRHPARHPPRALSSHHPAGAPAATHNPPTLRAPTHHPSGRALAPLPPRRPFFLPPFLLIFLLATPASSSWGRHPLLVAPLLISSPPPLLQTHVGVGRPSFSHRCAQRAAHNSIRKPHTPAGAAAHPPLLRAGRPPARAPISRWPHQHTAPPCTTHLLLIPHPPLATNARPTPPADQQTAVPLPPPNQQGPHPPRRPPLTQTTSLVTPTNSSIYPPSLPTTTSTTHRHLLPPLLHAPPSNSTRQLSSHAPARTTSSRPTHATTPLHDRSSPTRAADTTPPTIRHD

SEQ ID NO: 962128 - protein, 142 aa, Homo sapiens
PEVIPAPDVTHLLPMMSTDEETEAWRGERDPFRDPTVADWSSEELCPLQQGSFRCTGGTWKLRSMLVPTPMASVLLRGCRLMDFTQWRSWEQLDLAQRTLYLRGEPWRPGSIIVSLAGAIKRDLLQGIAGGPPETGSYLEGD

SEQ ID NO: 962129 - protein, 30 aa, Homo sapiens
MAERYRISQYTGTESHEQATDTTERPQQIA

SEQ ID NO: 962130 - protein, 179 aa, Homo sapiens
  misc_feature (38)..(38): Xaa can be any naturally occurring amino acid
MREIVHYSMAGSRCGTSMDRAVQASWRRGWIDACMNLXNLTPTRDSHIHKCAHTPDTVELGTDILLVLSTRLRASMMDKIVFHRDSFLLVWILENHGNAHGASCFCLIVHICALRNSFRHPRIKLLVFSWFQFWWAKCNYNVGPKSDLSYLAKRGTGLQAWLALLVLVDAVYGHTDGKT

SEQ ID NO: 962131 - protein, 146 aa, Homo sapiens
MPSHSASCALGPCWTLGDPVVSSHGLGPRARLGVPPCASSAPCAGALCLCEGGAAFLLSTDPESICQGGRLSFLLLCTDFRKLQRSGAVFPPSAQTRAGGPGAPRGRTCVSAQHTPGRHRKGKSSLLSTDLVGTASLGDYSEPHQW

SEQ ID NO: 962132 - protein, 76 aa, Homo sapiens
GLTTSRNCGPRESAIKTRWQAGSYKVHLAQSYRRTVVEHKVESSAGVYHEAHGRMLILNSQSSIVTQSLVQVFFHH

SEQ ID NO: 962133 - protein, 81 aa, Homo sapiens
YHGHALFKRTLVLMSLPRRPGVPGAGTAAVGLLLASCRLALAMDWPPGERAEAVEPTAPVPTPTPTPHYPLLLLDVYPPIV

SEQ ID NO: 962134 - protein, 246 aa, Homo sapiens
  misc_feature (167)..(167): Xaa can be any naturally occurring amino acid
SEGKIKYDAMLDKDSQEDKVIYSKYTDLVPQEVMNADDPELQRADEEAIKEITRKDKSQTLEKYCITEGRRSHSQFEQLTNRVLRHNIPIHTILSKEWRMSTLGAETREGISASVRNSTKDPIGASQQCQRFNKKIPQGEAPYSIPAPVNAYYLKPEQKDTVNRETXNEDGRRITLPRYIYTWQKMQKGDYKSTSDNTSGVLMERRTTHRTHQHEEYLHKGRSLYIADRKIAKLRKACPVREKGPQ

SEQ ID NO: 962135 - protein, 233 aa, Homo sapiens
CWGDSHEYRLCQLPDCPPGLCPSETYSVPCAMAALCLGTQKTYQWCALSMGRPTYVRSFNVPGLRGIAFLSTSVRTAVPWTGYRLSAPWCPGGSAWLAAALAPCCDGVVRALGCPRRYRLWSVCRRLLNDSCLFVRRVFRDAGAFAGYWKLTLIPEGARHIRVERQEPQSTWALMGGDGRYVSSSGHWVVSPPGPTRSAARMWSTPETQGPGDVASSRATPMTCSYRSPAEPT

SEQ ID NO: 962136 - protein, 223 aa, Homo sapiens
MGFYSSKNKGRGFSYSFHSFLYFFTKGIQIPNWVETETSSYMIQLGINSTHKLQQLIWQQETGRVQVWPQRTPNVHARGRIKEEEPPKQPGEQRQSGVKWGQGVRQESTTRQKTWPLAIKLGGQRENKALSFIRNKPLRHRVRHIQSLVLNEYGVGQMRVPQRLSSGYRELNKADTRGDGQGRIIRGEEAQFVDLCLGNRKESDLLRASAGGDIKPRIPRGAL

SEQ ID NO: 962137 - protein, 33 aa, Homo sapiens
DTTLMNIRTKYGLSKEENPYARFDNTKALHTSV

SEQ ID NO: 962138 - protein, 60 aa, Homo sapiens
QPSSRVCALISGLCCNGAWVGFRPDSVDPFRFSISGHGWAPAALMSRASGRAYRQSAARD

SEQ ID NO: 962139 - protein, 195 aa, Homo sapiens
FSSVVTQDGELVLGAPGGYYFFRSPGPGSSCGYFLELPPRHPFVARVLPEPLHLTPATQKYFDGYWGYSDGRGAKFRRGIFNNKRRNSVVVCPTLGAGPWERWKFWIPTTRGCIGCAESRWRRILGIQWLSLTSTGMGGMICWWALHCIWRAGQTENWPKWGVCICSCRREAPALGAPSLLLTGTQLYGRFGSAI

SEQ ID NO: 962140 - protein, 206 aa, Homo sapiens
MGPPHHHPGHRMPHPGINEHPPWAGPQHPDFGTSHPSGFTGQTPHMRRQGPPTHTKHDDPRLVPKCALRSISLTGHEWTHPIVKLEDHEIQRPLDHIKTSALPHPHDRPAERLTGLQDGGHPNTNAPIHTDQAPGKQLNGMRDTSRGHHSEGFHIQKTQHMTGPREGSEQGQSTHAGHRQDPSEAHRNTDPNRNQGAVIPTTAELK

SEQ ID NO: 962141 - protein, 102 aa, Homo sapiens
VASPRCRVPVRACARLGCPARRGEGPGRSVCMETGVFGWAPSPRESFNGVEIPAGCVSAQIVSTQRKCCSSAARILLDGVLSLPRCGNSLPHSAYEFVLTVP

SEQ ID NO: 962142 - protein, 88 aa, Homo sapiens
MPGPQRPSKALGCQALRERKWSKLTWTRKNQGGHDPELHVRDGTPLQFMMGIRSLVKKVSGTPGKGDALGRGHLGQELALPCEKWGFN

SEQ ID NO: 962143 - protein, 201 aa, Homo sapiens
AAPPSRFSVGARLEEEIAALVIDNGSGMCKAGFAWGLSAPRSRVSFHRRGAPDIRASCWRHVAKQDSYCGRSSAQSKRGTSDPECTPLTHGIVTKLGLTLDDSIWSPLTLLATSLRVAPEEHPVLLTEDPSLNRQGPNREKMTQIMFETFNTPALYVAIQAVLSLYALGRIIGLVYGLCSSGVTHTECPSSRATHLSPGPS

SEQ ID NO: 962144 - protein, 143 aa, Homo sapiens
PSGSCTRAAGGATCQSHALCPHSSALGWLMGLGAVEQGAALGEAQAAQEPTEFGEAQAWRAAGPEPCPVGRQLRPCEKLSTAAAGPGAKSPSLLRRWGQLAAPSAGSAEPTPTRNSHWPASTVRSPGSRPCLSLHTSPHLPAS

SEQ ID NO: 962145 - protein, 32 aa, Homo sapiens
KERGLFRGIEDNPMVVPLCNRSKDVVEPLLRP

SEQ ID NO: 962146 - protein, 127 aa, Homo sapiens
MVLHPGSLLPSLVLQTCLRLGMPSSIPRQQCEGAGTKMSSWPGVEWPRPLSPVMTTFWCSGSAWKRQSLERKRWWTDQGGLQAGPVRVGPRTQAHHSQGPFRSFNSEIYHYVICVNNELGNKRDLKQ

SEQ ID NO: 962147 - protein, 90 aa, Homo sapiens
PRSPPVLGRPPRSPRDGEGRHARPLYGEGRHARPLMGKAATLAPCRGKAATLAPCTGKAATLAPRWGRPPRSPPVWGRPPRSPPDGEGRH

SEQ ID NO: 962148 - protein, 202 aa, Homo sapiens
CWFLPSGSCHHELQVELTCQSHALCPHSSALGWLMGLGAVEQGAALGEAQAAQEPTEFGEAQAWRAAGPEPCPVGRQLRPCEKLSTAAAGPGAKSPSLLRRWGQLAAPSAGSAEPTPTRNSHWPASTVRSPGSRPCLSLHTSPHLPASSGSRLRLGQPRKGLPQCSGGLKGSSSAAKVEAQAEEVLRVSEGCEGCQCAVTSH

SEQ ID NO: 962149 - protein, 122 aa, Homo sapiens
MRGETEWAVPPHTGNLNGRPPGGPPLSRPRLTFSSPGGHLEDQLYHAAQRQAGCPRRSAPRPIWCPVHPKTTAREPDEHGGERAVQFLPVRGGTVPYLEGVGFRVPVCSSPRVALQYEMHSP

SEQ ID NO: 962150 - protein, 132 aa, Homo sapiens
MWVHHCRRMHSAIEDKQEENYKKINREITLIRKKLNKAPSLFGPANPDDIHPRRSMENSKKSLTTLLAKTNLASQTHLYCRKRHVGHSSDMSNTFLDRGTPILNLFREPTKEQRTTDRILMYAVSSSWHRCE

SEQ ID NO: 962151 - protein, 256 aa, Homo sapiens
TDEDAQPDVMLLSLSPDRMSFTTRSTFSTNYRSLELCPGAQHNETTRTVSDSAASVHMQALGAHGSRISDDPDSTRLSGAAWGPGAWPRDSRGIWQRMGGIQNEKETMQRLNDRLDHLYPGQERGALETENRRLGEQNPGSTGGARRDPRSEHWRHNFKIIEDLRAQLYRINTVANARIVLPAVTNARLLLMTYSVQSLQTELAMRQSVENDIHGAPDRSLLTTQYHTHCSWETEIDALQGRTCSSEHEPQRTYTP

SEQ ID NO: 962152 - protein, 124 aa, Homo sapiens
  misc_feature (73)..(73): Xaa can be any naturally occurring amino acid
AAAYYYKIRGRVDLVSTLETILQGYTNKNSMALVTWHIDKNRHTDQWNRRESPEIKPHIYSHLIFDKVDKNKXWRKDSLFNKWCWNNWLAIHRRLKLDPFVVPKSTHDRLKTYMRNLKLCRRGR

SEQ ID NO: 962153 - protein, 268 aa, Homo sapiens
DGQFDVAEQRTPEEHMKEKICPDGISIAQLLPTLPPVALTRVIMPLETEEISTASLTEGLEARGEALGLVECAELHATERAGGMTSVLFITLVEDHPGGGDLHARVTQILPSRSIREPSSLPTTMNYHSLAANSYEDSRQPRRGGATAPSLTWRSEFHSSTQEDGGHVGSFICSSKYRSRGARITQGRNDGECHRKLPKSFFPCEYFNHKISDSLCNCTKTKELTGSGPPTANLYTLRHLLQLSTLAAGDHPIMPLRLLNILAYRIST

SEQ ID NO: 962154 - protein, 218 aa, Homo sapiens
QAGVLASPLGGTLDGVYPTLMEPVIAAQGGPPGARPERTRADTGHAFLAKPPDPLRDWSPPPPPARSSEPRSPELPSMISGTRHHLSSNTLQKEPSHHHHASPDPAGSTPEPRAYETRTGNKTQSKPFSIQELELRSLGYHGKQLHAPNGVGARQTCELTQSGPTTRGIPKHLEELDQSQLEGELRPKQPGPVKAWRGGQHTSTQHAGASLRASPRPH

SEQ ID NO: 962155 - protein, 74 aa, Homo sapiens
MTIQIGEASYGVNNNHSLRIRGDPKGLGGRWVRILGTQKDKRKKGEHDPAEAKGREASQRGPGRITHQTTTRDR

SEQ ID NO: 962156 - protein, 387 aa, Homo sapiens
MSFTTRSTLLHQLPVPVAAVQAPSYGARPFSQRRPASMQCARGLWFPGISVSRSTSFRGGLGSGGLATGNSRWSGRNGRHPERARRPCKVLNDPAWPSYLGQSEEPGVTENRSAVRRTNPVEHLEKKGPQVRTHVGAYYFNIIDGPVGSDLRPILWIGCPRSFLRALTMPVLLLMHFESQYDDCFWLMRPMSVADRLSTGLRWALCCTPDITLTAAVRPEIEAHQRNELIVSLMEETTEVVKLKGPTKPENCQLLRLTVEEMPPNLRYSPMLLGRTVRAQYYLGWLGENSSRRYPKCVSRQHWGGKPPKCAFATTVLTRGLQHGLYQKAPERSVTSVRSIPVKDYARATFERQTLIGDAGGQSFVIEIQTKSQPREEHYESSAKRRR

SEQ ID NO: 962157 - protein, 127 aa, Homo sapiens
MQVISSDKMPSEATIASSSRLTLYRLTTVGNTPLIFNPPHRATIKRLNPLYIMTFSYLKIAISRYDDSFLPDLPNTMNAAEITDKLGLHSLRIQNTGRHSGYLCHYWTVESYTKACHWLANQFQNQN

SEQ ID NO: 962158 - protein, 397 aa, Homo sapiens
MTPPRALLVCGCWVAVNPRGVEAMVTCGCACTGWLPPEPGPSWRLFYSRPRGALCVRTCGHAELSASVGLPGRLALRRTPAQASGQERAFVARDLGLHQCSVRSSSPSGSVGDASGRHMWPDHANSRWGHGRRYAGEAWQRNVDADGWIVGVRQIDDHGASHSSWDLFQGGLSGGPVGRDFLGPARPGLASLSRHAVTCAWGRHGTPRGLLLATLVSPCTWQSLEARGPVAGSGACSGPHAVWLLVVVAPWSGDPSYSVVTTSPNGVDIKLLNYSAAASQSWHMPNGPGHSTTIGQAFTDGSLHQDPGPEARAPVRPCARDKRTPGSETTADTTGAGNMGEDKEDRPGSTDSNEQTPTTEGHQDHNDKLTMRKEPTRGSERKENDGRNEQTKREKHK

SEQ ID NO: 962159 - protein, 71 aa, Homo sapiens
MSGPWRKQEDGEELHWRWPWNRDYRAIPELDAYEAEGLAPDDAGRKAVDDTRHGSQKNNHSAFDRKGTKTC

SEQ ID NO: 962160 - protein, 395 aa, Homo sapiens
KPLFWVCDRCERLRRQQTTSRGAVVLAQTFRCSNGNVPLKSQQCNGKDDCVGLWSDEASCPNGELSVTCTKHTYRCLNGLCLSNGATLSVTGECEDCSDGSDEKDCDCGLLCHSQRQCSCCMGGTVMRIEELSGPVQVSLHALVPWATSAVLPSSLPTWLVSACTLDTSMTEDSVYSDPTQWTDFLGLARPETSAAPLGMQELQQLKRINTPNPFFNDFTFDYDIEHAGAEKNRQEYSSMVRPNLTWRNAYTMTFPMQARPSGITRCGDTTTELKGLKSMIMQKVRTRDIKPEHMKNISPRRNNRPENRVAPQRRNHAGNTGDPPRKQRGEHTAQKRREQAHPEQSEKAHRTTTTGRSHTSRNRNKNTTYNTIDTTTRREHAAQKKQPHKPTTPP

SEQ ID NO: 962161 - protein, 81 aa, Homo sapiens
TSRLYFCAGGLPAVMKRRPGYLQHRQRLRGPGSPLMWHRLEELYTKKLWHQLRLTGCYEYVSAGSSSIFARKDDGSSFKAL

SEQ ID NO: 962162 - protein, 116 aa, Homo sapiens
RSLCACSPSASRGAASRPLPEAHTGHVAADHLPGRRGLGGQGCRLQSTLQPAVCCAANGRLVSLACHWCTRACLPGAAGIHIFLTCIPTMHSSIPAQAARIQTGIGDQALRKQFQV

SEQ ID NO: 962163 - protein, 209 aa, Homo sapiens
CGCPTQNISAWAYPYAYPPMPAMDATPLAFDGHGSHESAYHMSHRKRESVRREADEHDQDLRHSNQYTPSNKPIESHHTAPRRAETAESRTSARKAAGEQRTTEPERKPRTRGRAPRQHPGDTTPTAPATHADARATSDTVHTPTVQIRCASETSSQCTAEHHTINDDPALLDTPALSSQCQCALALGPTLQRPPPTMIVVIVSAPTPA

SEQ ID NO: 962164 - protein, 315 aa, Homo sapiens
LHNQSVFLPFLSEPTTSHDPPQALNPFMDRSPTAWGRKRRRGRQKWRQQQPQQPKRGQRKTKKPRRRGLAKPGLSRKSCVPVFTARSPWSELSQAIAPALKAQGAEVWWGTSRTRALPPPKLLHRLQTSHTTSGVSGTRTGGATTKRTTINQPKITHAIRCADQNPDSASSNHLYQESPPKRRTPLWTHNPPRNWAQPAPTHSTHRERAMRATRHPAYDRPTPHPYPTNDKYMKLICSVPHTRPHTNFHYTLSTTSALPLSTTRLTVTRDGLAASHTPTTQVEPIPPTNPSDGTPDKTGPPPQLQVRTPFRQRQP

SEQ ID NO: 962165 - protein, 69 aa, Homo sapiens
YNGTYRPEDVKRRAMADPEVQQIMSERRLRLILEQMQKDPQALSEHLKNPVIAQKIQKLMDVGSDCTFG

SEQ ID NO: 962166 - protein, 201 aa, Homo sapiens
MREEPLDTDYGVTQRRAEALVPLIGHAPRTSRLWAAPYTLSAQATPVGEHSVHTSTERKALGPTVIPRIGRGALTFPLGLPAGPVGHFRDTGGIPFNPIHQSHDWIRDKPIPPSSIFGGLGPPYSFPTTATSGSPPGNHSRNTTTDTQPTAAAPHNMRGVATPDHKTATEPAHTQLTPTIYQADNTRAPMGELQNGTTPQR

SEQ ID NO: 962167 - protein, 429 aa, Homo sapiens
MTADALMPGVNDGGWLCSIQSWCPDFSVGIVRILVTLRPKRCPGPFACALPVHTHSRVACAEPGTLLTQAEPASMIDQPKGTDERPREVRTRAQEGNSRPTHASEPTTRPSETRPQHSKRKSKQKRSRDNTEPNNGRESRTRRAEDTQDEKREKKKEDRPQNERRGQQEPHTTADPEKRRRRRGSTPAAPNPEGGTQKQDRHETRGRTRSTGAPNSLPRQETHQTANEMTNRGDEKAHTPDRETPARASHRRKPPKEQGRAQRHTRGHTKPTRPHAANHTQPHTHTPPTREPDQHATTQPTHRPRATRRARHRTGRGGRAPHPQAREARDSRSGPHHEPQNRQDQRRAETEGKPEDTTADSQQTHTTHRKSRAAAAPARPHQSERHTGVTPSKTTEARHTSDTARGPHAEQTHREAPTQTAARHRAAAQ

SEQ ID NO: 962168 - protein, 202 aa, Homo sapiens
MANLPPKRPRKLLPSLKTKKPRELVLVIGTGISASSTKPQVPALKSWKGLISGLTWMLPLILILIEDEESKKFQKCLHEDKNLVHVAHDTYPETLLLVPVMFDPHSQGLLYEVYDDLESHDGRFWKTANIRSVLPPDGKMEPYVIKYKFCYVSWELYAADQGKQLESLELTDENQVSMAQNSVSGRVDIQEINSYGKLKRRQ

SEQ ID NO: 962169 - protein, 121 aa, Homo sapiens
RLRVFLSLMATGWYDNLTPGQDKADAIVKMLDAAVIQMDGGHWRMIFAILEQAEEAEQAENAGEPARKQKDGLEQARDGDASNDHPYHNTQRPPNATATHPTPGPPTAAHTGRPRERPQRP

SEQ ID NO: 962170 - protein, 274 aa, Homo sapiens
KKEKKKKQKKTTHLASVRCWWLLISICDCTNCTGKSYWDTSPGVTQDRICNGDVQRDSGTGARSSQPMNGHVLDGYKDHYQDPVPGITPSSSSRTRTPCHLSIANTSTTSTLQIYTGCRMPLPQNMTSQMFSAIAAVQANGQNPNATPDPVGLQTSTAMADRWRRQTVLTNVFHNASPDSQWPHHIMTPYDIIPTRPKAKPITTPIRNTKLQASTNPQSARPSPSHLPAPGTAQQQSPQTCARWDKGERVRKERRGKTGETGTSQKSPAGQTKE

SEQ ID NO: 962171 - protein, 263 aa, Homo sapiens
MTCDVAVTKLMCHVVTYYQHVIAWAWEMDLTCSTLLDYTCVLDGFSTVHLWRLHRTPNVAPAPCLPLLIALSPYSEGFTMQENAKANMPMECRRSPQLERIPNPMVKVLDLKLGRPWKSVEPHGIMTIPLCKRQLERLESKDNTPLGTRVGPPPRLASKHDWRRHLANGKTQPSGTGIPRLPDGFHDPTNGWKEETPMNSDFGLGIGPTPPMDQRGICAAEMIKDAQQDIVVSSRQRRKRCRSVPAKCTSPQRHKLRKHAFGP

SEQ ID NO: 962172 - protein, 115 aa, Homo sapiens
MTHDTAHDLCPSTGTSIIVQMIDHGDLKQNMQTTEQYKREQWRQLANTTIENTGKNENNTRPTTQYNTEIINDNTNYTMTHNTCHRQEPRHNINTQQPQHNNDKTNESQNLKEPK

SEQ ID NO: 962173 - protein, 173 aa, Homo sapiens
MTTRSAPPSPPTPTQHRGPDRDALADDEQLTSDPTRPEPGRRPRPGGTRPQPRAPAHHSYPRPATPPPPPEVPPDQTRQPGAPPPAPSQSPAGYPPATPHHRHPPPPPGATQASHQPAGTGPPRPAKGATPRARHTPAPAHQPHHRHRERRTRQSTPQEANTQTPRAPQPIPP

SEQ ID NO: 962174 - protein, 122 aa, Homo sapiens
MAYNLRAIRVYMGDSDSLHRAPYRCGTWRIGGPASEAGLRQQVTFITHVQWRNLVHCLAHTEVVATDPDERTKGATYTNSLGNTSLTEATRSDLQADARDERTRSIANHRTLSKSQIFTPLF

SEQ ID NO: 962175 - protein, 113 aa, Homo sapiens
MGDDPPTTPTLLSSPHRTNKPDLTPPPRHLRRHPLAPTEHSTGRQNTTVSARLCSTHAKPGPGATTYLRHSPQHPTVTLHHVIDAPPPKPTAYINATNAPLSSCQCHGTIPPT

SEQ ID NO: 962176 - protein, 139 aa, Homo sapiens
GLWSNARLSTSEPTIRDRSMWLDILLIYQMLGLLPYYWFISRDKEETLPLDRWVVGGHGTRSAARKDDSIRPIQGGNVRRVRYHDLHQRIDKLPYITPPLGGQLLPLWLTTTNYLKKVHTPTGGMNSDWKKQVGDIYNR

SEQ ID NO: 962177 - protein, 84 aa, Homo sapiens
QSTLRMRQLTDFSTRLDESTQDHEPLVWSLRPKCQTQWLEPYNATLSSTSSYKTQTDLTALITKLYYDICFRTLKLTTPTYKST

SEQ ID NO: 962178 - protein, 244 aa, Homo sapiens
GQGCWCVRDQWPARALWAYLQTTVLIQCTSDLLASQDLLWVMALLLPWGDNLSSMATWDDLWRITDASMLHGILTVINALNSLVKVILDKYYFLCWCMPLQLHPEEGSCVTGGAVHCPLGGAGRRSTVVKSFPEGPAVAVRLSKDRSTLQSAGLGHRELDSLPVVDKLHRSSRLRQACRQTGLQLRNPLSAACGALVPMTRICDEVEITDKQPGASHAELKLGPDSQAPWYTLNFYACGKSLND

SEQ ID NO: 962179 - protein, 80 aa, Homo sapiens
HTHHPTTAPAIGYVHGGVNTDEEHICRRYINRSIVGTSIPRIYTFQMMMANFIHVLLYVTHKGEIRGASTPFQYSSFFSS

SEQ ID NO: 962180 - protein, 431 aa, Homo sapiens
DPESRRTAGSRVDGFTMTLDGRQYNPVKAAAECCYATSCYSVLVLRLASGAAILRLWDRRSARGAPVMSPYPPGSGPRFPRGPWYSKCMTECVSILAVALSGRTPYETCAASNSAHEGLLCLQLSADAFHVSPWMQGFGELADVSTDKCILLERRKCLTPSARPASQTLYSRKPVDCENNLDGETIPWGRSNSNGPSHWTFLLTWFKFAAQLAWNPTLVGGPRPWAILEAPHYALLTVLPWGGLRSRTGRNPYLRLGWCEFVCPFQNSRTFQLGPFASQSVNTFRDRGKPLVAFYGKATEKFPQGPSAFDTKWEPLPRTNYPGGRDNLPSANGNQRTLPRRFTITNDFSPAHAGKISTGRRKPMAFPVRVPTYCKVRPEVTPRDQGPVVVVTFGGLEPVEIQEWHRGLQETHTIRHYNAPVNVHPEGDPIG

SEQ ID NO: 962181 - protein, 172 aa, Homo sapiens
FICKHESSVTMYQALWGPERRARAPWCSSPEAVAFRASSDLLGLEVKYGGPWMLLHGAHPPLTALVPILCADAGQELTMKAQLPDQKALSLVSCFSGEASYLATCLLDLLNYYLDCHEMRPMADLARDAPDTHMQEFILAMGFFLDPGMMEQITLAYKEQTGPYNSWRKQGL

SEQ ID NO: 962182 - protein, 349 aa, Homo sapiens
AKATIEVIQQYSRDRLIYTGSTASNMPSSSKTKPVLQLSKSATEYIGVVRPHTTYSSKLDPPTVQGHVLKAAGEEYGEGSAPGYPLTRKERDRQKQKSMSLLSQQPFYIAGATMSERAGYNNARDSLPPSTARCNQIVNNWRDDQYLDDSKPKQHMHEALKLRLNLGEGACKTRSRRSTQQTTESETNAPSWEIIKQKAHVDNADPANELISNKVIGTCEETEPIQKETIEPADHDQDTTQREAMEGTQAGHNIDPMSKEEAEEDEGRRQPDETGHGQKDTAKHEDTNDPTTKNPKDAHHRGVNPHREIPEERKPKGTHKKERTQKNKPENKGGTTGTPQNKKNAPRDH

SEQ ID NO: 962183 - protein, 214 aa, Homo sapiens
RPGSVTLCNCLYPSSSSSTTRHCGLDCSRMVLRYLVQLDDSEFRERPCRKLHADQEDIWTIDLAYLMHHYWREAPHSVPRPWVSHKGYKNQSFYRTHYVTQQETRVNQSVCTSKGLAQVAEVGSKCTVSVKDIQAHLAQGHVAIVLVNYGGAALVTCAPAHVKYCCYTTQMATTCFCRTPDYQGHFIVLRGYKRATGCIFYNNPAYADPGNVPA

SEQ ID NO: 962184 - protein, 169 aa, Homo sapiens
SLLRTPGGLALVLACPRPRRVHALPEVPVPALLSCWPWLPSGCACGCACLLQSACTAYTCLAACRILLSALLILCHLLCLPIFSIGLECCLLGGVLGSPKAGRMPAGAFRCACQPISRSVPLTSWVGCVVVAPKQRKEPWEGHLGVLHKAIRINAQTCGISMRFPNPLY

SEQ ID NO: 962185 - protein, 36 aa, Homo sapiens
  misc_feature (13)..(13): Xaa can be any naturally occurring amino acid
  misc_feature (17)..(17): Xaa can be any naturally occurring amino acid
HLHTPQQGEVPPXWVEXSLPLGIESDSQTEFPLLPD

SEQ ID NO: 962186 - protein, 343 aa, Homo sapiens
MVMTPAFQAPSGLLMVDCGLTWWSWEVPAGPQGRPGYLHVFLTGLPWGEMVELGPMLAWSGPKWRCLGMSEGGGLVPQNVHPMGSPTGSHAGVQGVGPLVPRRVLLVPCMWLSLGVRWQIDGERLGCSGGTECQLMHARSGGACVGGMISRTKFGTVSLLHLMEAFGTLGPLVRAGPAVPPWGPPGPPGSNRSPWSSRDPPDTAVPRGSWETRARGNQGDRGDEGAAGAGEEGPDGDQGPKDPTACREHKDRHDGVRETVPSGNLDPEPWGPGDSRGKRQKRHAAKEPVRKGRGDTRPRAVNTTEDEVTRHPKRGEDTEEVSQERQTGNMHTDEGSGVREPEV

SEQ ID NO: 962187 - protein, 125 aa, Homo sapiens
MQGLRFDWLFAGALLAVRYYQLQLHCIMPHVNTEITEQLKGADKVAELVHILKHRDRAKGLVPQELSGVTVIASSTENWAEIKYWMTTKSNTLRLQGQKPALNEGRNLPDPSRRAHETYFSDTEQ

SEQ ID NO: 962188 - protein, 322 aa, Homo sapiens
MAGVRVVVEFQRAQSLLRHLTWEASIDILHSICECCDIHVKTMKMACAMSNDADASWNLGSLLCKCLDNAAELGGLLKYVLTLLEFHQQMAKAARLVRSLLDLFLDMEAATCGSECRAVFRCASECGQVREKNFLTPSFGGKTGVLCTFDTKRYQEAFAYGFSAAAGVEQDGRQSSFGGSTALRKQKIPCPEQAAESPSCITSARTTANAIYWPPKLQATLEHAVGYNPCSRREGLEKRRYSYFIMRPFDGYDSSEKTTKVPHIICRTMWQCKISAKTPERMTKALVNCDSFGTTVNAVGEKIERIYNRPGPRDKRASSLAS

SEQ ID NO: 962189 - protein, 275 aa, Homo sapiens
EEAAALPPTHTQRDPRYASSPGASAAATADRPGPSPPSAAMYHQVRLVLVLLPQDEFQAARDHRETGRDSSRSYVTTYHPHTTDHRAAALTPQTPAAASTSLRTPGGSSMPRAPLPCACGDRRARGADTCRTRMDFSLADSQSTTEIQETTRHQQRRWRLQELNDRFDQLHRQGALYPRQQAAHKYTCMGTTTTKQTTRAQGQKIAAMGGPSSRRSEDAGASPGQVAPVNQPRKPASRVERDNHGRRTIMAPRENARPSILRHQQRNPEAKTDVP

SEQ ID NO: 962190 - protein, 225 aa, Homo sapiens
WSRPSPVCLSWLAIVAKHVYCWAGIVVVCTAVNVHQHFLCNYLHETMLNVPWLSSCKLDEHQPFPEAPTTSWAPSLHLLGCDLCDGIACPTKPMLMCHVPLCDLSQCVFGLALPPAPTDQVKTADWLCSMPALNGSVLLLKRYNAKLCLFLVCCLCLTCRLGCARYQCMLTSHDPWAAPHMTDTHDDTGHEQSTYRDTNDHQAINDAASGTPRARAQDTMDERQF

SEQ ID NO: 962191 - protein, 246 aa, Homo sapiens
GIGLLPARQHGASTGTYGAHAHDSSHKMSALTELLPAATLRPSPILLTIFTDRGSDPANDRRPEHKTDVRPKPDGLHSHDTGPSEYSVKPFSFFSDSNLLTKQIGRLDQAGARRQGRHGSMQLRRGTVATHLGRQHPLAPQQNSHRRTANGEHNEARDKPYQAQPGPGLTAAPPTGARHERQHTITTDPDGLPTPKRTTHTQPTREHTTSERPGRLHPARHTTQSHSATHGAIKPEHSRSTAYDDP

SEQ ID NO: 962192 - protein, 34 aa, Homo sapiens
YRNYYRTTEPEKTVLTESKGLNSKLGTQKPRSTP

SEQ ID NO: 962193 - protein, 99 aa, Homo sapiens
MDLQRHPVWQENHPWLRNEAPCLLSMYPMKTKNLQEVISRADCGQKASYMRSLSIAGIISNFSTFLRPTFHQGTMVFLFQGFEVGQSFHLGDLGLSRVW

SEQ ID NO: 962194 - protein, 256 aa, Homo sapiens
  misc_feature (11)..(11): Xaa can be any naturally occurring amino acid
MYTKLVLDLKXVAHEPLALVPWTRCRRLQFPQECDLLLVVPKLTFPPCLLERTVRRGPNWLGCEGPLTTSTEVGWLFPQFVDQHTTPFFQLTFYPNVQIPYAYPLVPKRCHTDKEEHKHSCARHTQRSCRIINHRGGKKTRSEFENKETTAPPKEVTRDPPMAQNTPPTRNTQDAQDHDRNNMAQDTHQRAAPRGHNDAPSLQRNRPTKGNGCVKDERTDSVEIDPTCEIVSQRGRTPTRDDPQHARKASAQRGTT

SEQ ID NO: 962195 - protein, 458 aa, Homo sapiens
MSTASTPRGTYHVGTADLQLEAAVNVYYNECHRLAMYCAPAACALWILDALCTSVTPVAALCGPFWCMIIPVPVIILLLFVSMMVVLLVCNQSLCATMCVRHNNNVYVLPVHALCCETSVVGIGDLFCLHDNIAHVAQRRKAISLRTIARIATMMAFATPNDFCHYTDIHTISCGLGEGGVRTLKRAGYPFMVSRKFAGELNHHRIPPFPIASRVVHDKSKASTDRTAAHSGRHICFTATPAHKSGKPPNLVEKISTHLLAQVTAPTKRVTTLAHATTEQIWVTLVHGHLGAHTTDEDTHGHRQLDHKHTLRRSTVVILPLKRGAKTHNMLHEIGDSSVIGKHQWCSLQQTGTPTPDRRIITRRSDEQQRRWVDVATERQARHTYYPNDSPSKARSTYHRRKRQPPPRTTVERHDLSPRRRRDKNAGRQTRTNVTATNATHKAAVHARSTTPRCAKNV

SEQ ID NO: 962196 - protein, 33 aa, Homo sapiens
MGVDGSLKKRALQGQVEASGPNPGPLKGGVQQG

SEQ ID NO: 962197 - protein, 74 aa, Homo sapiens
AWTEPCARTPPRPDDHSQPSVHLLSPAPSVTSPNGPTAAQIQTACCSRPVLHCLTALPTIKYCLHMTDLLYTLC

SEQ ID NO: 962198 - protein, 407 aa, Homo sapiens
LAGLIHAHGQAARPLCLGTEVGAVGQLQDDPPGTLLTNNGGPGNWPPPDGIGFAIARRLAQDRAHVVVSSRKQQNVDQAVATLQGEGLSVTGTVCHVGQGGRTGSGWWPLAVKLHGRYRYPSLQCCCQPLLWKPNGCHRGGVGQDSGPPLAAGPSPDDPRPGARPWPHAGRRLTLVTRCLPQQPSVHLLASVLTMSVTQPCLRLNNTLDIELAPRNIRVNCLHLDLSDQLPPDAPAFASAQLDTLQATLRISRLRRPRGLSLPSRPSCARRSRFLSARTRWPAWLRNPEPAHKTAHTTHKHQQIGPQPQRTPPALTAVSLPDHLNNHEAYPHTRHAHEKDPPLATRAPHANTETPPIRPPTKYAVHTASTTHSGPDDERTTNRTTTESSPISQPEPTHATPHNHHHP

SEQ ID NO: 962199 - protein, 171 aa, Homo sapiens
KAPLRMGNEAPLTGSSPAGRHAAVTLMEPCGLGACRSCPWVPCHCPTAYGYRLCGLLAGCGGGPATRLHLAGGRLSPMPESAAPAPPHELAPRVPAPAVIIFYFLFNLLLFDMIFLPECWPDGTAGPGLPSVLGSRAADRPSAEGWTGEVASVEGSAWMAASGHTPLLSRC

SEQ ID NO: 962200 - protein, 85 aa, Homo sapiens
MQLQRTHRDAQHNNTDAHPLTAHEHDTTETTSFGRHEHAPHWRLKNPKATLRTLTSTYLGKQADNPHVTLYQARIPEHELTFDPQ

SEQ ID NO: 962201 - protein, 409 aa, Homo sapiens
MTSHSIETSENCSCDHMRTERYKATPGLYHRMTGPRPQWQGTFTEELYIKEKGFFRSPTTGPMAAVQLDPELAKRLFLGEGATVGTYLEHGPRRSRVMGYRLINYLGAYGSQDAGSVKHDTLPEQYHCPSDYRLLLDDRLDTCQEVRPISHRVNYRFSLAPSGRAGQWLQAREAPLQGKEVRPCTPRHPRVLEGRRATRGHKRYQRRWTELPRQHDNRNIAHALDTEGGICNIQPKLPVNGKGQTGQGAKAKKDPTYIGQESWERIETGVCLPWGQTAHGQGNSHENRRRACTQSNPPEEGQQEGEQALTQAGDMGPGVTNRKDAQETRTRNYQTKQKDRHSEIRSPKGRAQPGQRTTSTTGGARDKPWKTVSTRKKPQTPQESTSTQRTRRPKRKRGKRRKDKTDTDT

SEQ ID NO: 962202 - protein, 282 aa, Homo sapiens
RHEELLVSSCRSVNLSPLTHSGGFIINGLPYGTFPRNRAKGGRPEGSRTLQLLPLGQKGGCLGSSRAAVGQAEAPSNMAQGQAAAGGARRGRAPVSSSEAARHHIEAVENRALHARAWTLAEPKHELQEHLVEWRDHRRYKLLGRSPLNDAMMLRPPWEPNVAQTAALKHAFSNAAQQSPGPLWLEKPLTPHEERVPGQGSFQGGPLEKSRRGLTPNSASVAKGCRYILLEGPRRGTRAPVGRQVMGNSEPGACPSEVEGPADEIASTILDLGKRALYEWKT

SEQ ID NO: 962203 - protein, 260 aa, Homo sapiens
  misc_feature (233)..(233): Xaa can be any naturally occurring amino acid
MESDCGRGAQRDNEEYSHLMTPGPNGASFLGSIANTLDCFIIGNSNTLKPEDEALIDVGKIQSSSRGRSPKMPDVTDSRAPRDIGAPLSIAVFQPVRSYVDAGGRDLAIHDCGFALGTSALCDQPLLFSPALTGTRKRTMESTANGLSTPVPYLGTHVTSPRCETILVPIKGGFPPTRRRDTPRGYKAHARVVACRHYGALTTLSIRCHTPHNLRSLRIQCLPKSHYDTSTTXSRIIVTKQTSGSLAIATRCTVRVSCRP

SEQ ID NO: 962204 - protein, 168 aa, Homo sapiens
MSSRMGAVCVTVGAFRPGPSETGVSVVLFEPADQPAFPGMDSCGPLGLQRVGKIHCRTLRRRPLSSHSALGHTARRCILRAVITLLRYARSSICLPTEPPRMRSRCELPRAPSLRVGFVVRHGGSSRRASWDAIDGPSLIAGLRGSAFFASTWGCPCVSAVFSPCILG

SEQ ID NO: 962205 - protein, 92 aa, Homo sapiens
MCSMILYHAHEGVTNTFAHLYSSFALLAIDIREDTPFTVNGEPLTPPALACSELDKYHSNVLTTICKCGLAQPDPNLRRHHTCKTGINWAHW

SEQ ID NO: 962206 - protein, 356 aa, Homo sapiens
RYRPQPKSREILCCNKDMSESGAHSHIRGTGGWTDALEPRAGFSKAWWVSWRHWQGVLAVVLEMILGMWKIAWSWQSLFAGQPGHWWNDCAICHVLHVMQCPWALTTANSHAICLEVKSSPWMMSNDLRLLTAGLPVLVHQAVLHQGGDSEIIECVEDGGDPGFDLTMPTVDGSKVGKRDPSRPQRWRPIYDLGTKMIESLTQGRRDVITIEQRETGQDLQRWSRSLHTDARELRAMGLTKNKSDARCQMGKPKKSKEVGHTVIPATRIDGQSNIIEPRGIRAPHQVTQGRQVKVRNRQRQVTEEHERRETTGRSTEAIAKYESNVTSRANVDGLQDSAHKRTDECRKSLRTKQDK

SEQ ID NO: 962207 - protein, 270 aa, Homo sapiens
MMHGPSRRDVSHDGRIVDRWQTIVIDRLAYMATGTGTVLALGRPDPLYRVEIRSVNNLTDKSSPFSDLELWTSGVLTTPCEVYRAKSARNTPFHGEPYTTKQSPPEGHRELTINPSSMQKSIEKQYQPTNKDGPQGRSHRHCRDTTWSTLPASIQLDQSNTFPRGPRRRQRGRNTAQHHPKPNLPGTLTTHGSTATPSLDQSKRRNPKREDHTPSGEQQQGAKPEHHARNEHDTTQIPHSQTTTTQHATNSIKRQEETTQAPTTTEHMST

SEQ ID NO: 962208 - protein, 529 aa, Homo sapiens
MRKRRKKRRRRNEEPQQRGQGREVSHALTEDFWTRNTWESQLSRCMVLPRRILQTVVQAFLVLSHLPGVSCLSLQGPGDSDVCIDSSHDDKMLEHREEKRCAATERFTERGRSILRDCRGTNSPRLVKRDWQGLHGSGEVRKLQHGKCDETALISKTSRQLTIRDFIESNTFRVYTKGVASRWHSTEGGFMSFHRTVDTRSKGFRKGATRWDARIALVSWGARSVTWRRGLEKLRINVVVCATSKWDPSICIPLEKGPCIAQHPRVDCWLRGMVNRVGTAIMARRNHVGLTWVNCPGLPPIRDRGCNDDSLPGQATGEDEPNVVAFTETSKKAPFIPSHFSTFGAPMGNPHCWKALWGARVGPSGGLENSFEGGGTRHVTARFLPFGGHSVEPSSGGPNKGAEARRGSFHWVGFPPAWTRSPPGSQEGHTANGGETTSRLDREDKQGTAALFAKRAHRMDHTHGDQGESTRGAETNTVDKPRTRSPRRSPGQPGVSREEERIGGPPRRSETNGGTLKHEDQTTVYTSTT

SEQ ID NO: 962209 - protein, 202 aa, Homo sapiens
MRAAGVALGHLLAAAGCRSCPAGPCAALPWLLPSQLAGLPQREPPCQHCAPACRPACDAREQIARRWALPALPVGQPWLCCGCCCWGFYAWPVCLGPVWCAFAGIPRCCVRDCGCAVPCLGGPLKRDRCPWVCAELGLSASGRAAPQARRMLATVCHGPQKTFLLRPKEPISPPYDQVQYSGKPSQTPGVLVTFVMVFKEPS

SEQ ID NO: 962210 - protein, 236 aa, Homo sapiens
MNSRGDFYDLYGGEKFATLTELVEYYTQQQLVSCMTADWNHHATYKYPLNCSDPTSERWYHGHMSGGQAETLLPANGEPWTFLVRESLRAACITSVLTECSLTKPMLAQCYPDQGQPDQGHVEGGRYTVGGMDNVGQPSRTIDEAIPENRCIAVVLRRHWTTVNKRTNATGLTCRVTFEDPAYVGTVYHKRVRSRELRHCLCTASGSEIFSTAGVTALALRRGAGLLNRRYPTEPP

SEQ ID NO: 962211 - protein, 98 aa, Homo sapiens
CDLSLETLAPLACGRDWRHGNLTAPSLPSKANSTHAHVRSSERGVSSSMARVSACVWCGPLSESWVFRPEMGLIPPGGVGWTLETLIVMWPACPKALY

SEQ ID NO: 962212 - protein, 125 aa, Homo sapiens
MADRRAHGEYYDGVRYGRRGSSRGARPSREGGHRSAGQQTQDSSDYYQPSERQKAGITMEPCDQSESPKIKWWIGYEGRMTACEQYCPIRVLEPRERISGEACIMPISHQDLREQGDPRIGTQDA

SEQ ID NO: 962213 - protein, 368 aa, Homo sapiens
MLERPCYRTRAPTELTESVGGDHAACAGHSSLCLPLPAHTWIGCVLMHPNLTKGFGSDMAPRTSSHFWTLPICRTDSLTPSLQEQLCQLYPRLKMLAFGAKPDSTSAYLTSLLAFQSHALAVPHEMKKELLSKTAECLTVDPLSASCRGGQLYPKHLSQSSLLLEQIAQLLGGRLPETVRGLCRRPFTSLKLTNHGAAAEGLRSTQDVVPVTWPASACRSRCRVLGCLDAAPPVLLLFAVASCAWSRSTARSSPAYCPIASISGFSPASNKRVASYLKLESHAGGGTRRPKNQQITAAPTYRLGPKPEYIGQGLTQVGTTHTHKQTHPRITQQSTDQGADSPATKNGPTSPLLSASLSVPPHTTTTTT

SEQ ID NO: 962214 - protein, 88 aa, Homo sapiens
MAPITTRTPWANRSQGYEDFYAGPNMQQCTSIMVTSPDERYSIALKPKTRTTPLQNIPRITAVIEGQSCEITARGADLNSLVRVQVAH

SEQ ID NO: 962215 - protein, 367 aa, Homo sapiens
MSVSLVADENPFSPVWTCQSEDCFILDHGKDGKIFMSRKGKHGKHVRRGMAAFKTASDFITKMDYPKQTQVSVLPECAGETPHVSSSSSRTVLCDPDQTDGLGLYLPFQPYRQRGAGALRRRHPAHLHMPWPPSTAWMTMAQARNRYWRIEGTNKVPVDPATYGTVLWRRQLHHTVTTNRHGGRQVQIIYNWQGAQVYPGMRSLHLTILTAQLDEELVEVPPVPRDQSEAKAREPRTNYMKPDRVGQHMNHSTKDGTHPTRAGTRKTQSTHHGLNTKDKRPTRAETNPGNRHGHGLKGEVHWTHKRTSRGAVKSPVKQHNRCEGHQTHTKSTKHGGTGEDTGCNAAHPLCVEKAEHTNQWEHRKKNA

SEQ ID NO: 962216 - protein, 245 aa, Homo sapiens
  misc_feature (62)..(62): Xaa can be any naturally occurring amino acid
  misc_feature (132)..(132): Xaa can be any naturally occurring amino acid
  misc_feature (233)..(233): Xaa can be any naturally occurring amino acid
MVEKTSYTRCPCPMPNFHSHFICVIIKYSTFQKKKKKTRNYFSLSLGAAPIELLLQAFRKRXRLLSVSPSGLLARKKVSGLDPQCEAQVKFANVPTSRSADLRKLHSKIGLDSSPQRLVTGSILPGLSIRRXKHLWARRKGQGTLGIRYRGRVQPIARIAREGSHVDEEKGGFGARSAQKEYRESLRRFDRHMCFHSLYLRVTGELCSKTRRILMEPLPQAEEADKARKKLLXDQAEARRSKPKE

SEQ ID NO: 962217 - protein, 151 aa, Homo sapiens
MAETGASIKQGVTLPITVLQPEGPLAVLRDLSPADLIVPSIPSVPMLGGPRGQGGPALTLGLAGGSNQRVQTPQGPSRWTTGWLDAGGPAMVLGSQGIRQEDLRQHDQETMYSQNQMAAGLEHEKSGETLMKRRPHDLSLKRTRRSSSRPD

SEQ ID NO: 962218 - protein, 151 aa, Homo sapiens
LARGPAVSVEGPRRSPAARAPSARPLVDAVACEAPTPAGRWQAVPGGPGANGTRRVGSGSAGGWRGGMACDRGDGDEAFARGTCVRGGGSSSSDRPCAGREAEPGERRCALPRPPLWPRQTPSRCQTRPRAQHPRDLRQDYSTYSIRESRE

SEQ ID NO: 962219 - protein, 135 aa, Homo sapiens
MGCPESIGFQYSYVGMKRTRGAPFYNTPSVARVVPSTGACGRARIGTTTWPRPAELGLAPRHLINSGARCRASNTHQYYSGVPRQLSHDKPTEQPRSAPPLLLRDKQQTAPLHSIPSKRGRATGNTREIPPQQLF

SEQ ID NO: 962220 - protein, 329 aa, Homo sapiens
RGAYKDSTSLLSTAGLRYSVLSEPTHFHLGQTNRTPEFLRQISCLARSQHLRVMMDSVMFESNAIAYYVSNEELRGSTPEASAQVVQWVSFADSDIVPHSQYLGDIPTYGHHDTTTNRPHENAKEDVRRILGAAGLHYYEDEDLIWMGERDDIGLTSQYSLEPCEDGLYKQVTRDLYLIPTRPYIHTTTQHGVRYHQHDNENKSTKYPGGMVSGGKVKNMAHEKRLATREGIASTQGSGQKNPNPYKTRQQTTGHEYDKGGFNRETKHGNDQTKAPPQVAYERPQTRRQGTDQPKRLGTLAPPWQYPMRTQDRGKTNVAMATEWSTTQR

SEQ ID NO: 962221 - protein, 180 aa, Homo sapiens
  misc_feature (71)..(71): Xaa can be any naturally occurring amino acid
MPCFCLNTALCLFKIQIPNPSHAHKAFLLTAFFFPLPVPFTPPHFSFLPGGLQLPLVGLSLLLVAESSKKXQPTPSRPVGNLRVSFPPDISFPQYYSGWVSLLSSSLRGLLSPDVVTRMDNLLPETVYLALTLILLRQLFILPATLPDAFYMYLSSVPPIECKSPDGRGLILAHCRIPFV
